United States Patent Application Publication US 2007/0067865 A1 - sequence listing, part 7

SEQ ID NO: 26555 - DNA, 1143 bp, Glycine max
gctaagagaatagcttctggaaattttggcagctgccctatctttctattcttttctgttaatgcaagtcgtcaattttgcggggatgcagatatgattggacctgttgccttcaataaggacatggacttttggcagcaagataaatggagtgggagcttccctgtaaagtggcacatcataaaagatgtgccaaatgcaaattttaggcacattatactagagaacaatgagaacaaacctgtcactaatagcagagacacacaagagataatgtatagtaaaggtttggaaatgcttaaaatattcaaaaaccatcatttgaagacatctttgcttgatgactttatatattatgaaaatcgtcagaagatcatgctggaagaaaagaccaagttgctaatcagaagttttgaaaatccattaatgttacccacattagaaccacctcggaagttgaattttgtcgttgacatccctccagtcagtgttgagaagaaggcaaagatggatgatgagtttgatagcctaaaacagacttcaagtgctggacatattgttagtagttctgagatcaccagcaccgcatctgtggatgaaaaggctgagaaaggttcagttgagaaagaagatattgcttctgtccttaagattggttcagttactattaccccaaaacaggtggagactaaaccatctggcattagtgttgctaataaggaaccgcttgatgttatcacagtaggctcaatgcaagtcaaagttaatggatttgccgagtcttcgggtcttttgaagattgggagtatcccacttgatccaagaacactacagctggacggaggtactcgtgttaaaaatggatcttaaagttttcttataaatgtcgaggcacgttttggatctttatgaaaagatggatcaatgcatgcctgattgtgccactgttgggaagttgggtttctattcaatcttttttttttactgcttttttgtttgctactgattgatataaagggtcatactgatgtcatggatctttcgagcggtgttgattcaaaatgcttttaatgaaagtgtaacctctctagtgtgaatagcattttcaggaatagtatttttagaaatataatttaattcgtg

SEQ ID NO: 26556 - DNA, 344 bp, Glycine max
cctcgagccgattcggctcgagcaaagatggctgctgctacagctactgcttcttcaatctcagcgtggttcactcctcacgctttcgctcgtcgcaaaacccggaaccctaaaattcagaaaccagtcctcccagtccccggcggcggcgaagcaccacctacactcgcctcccgctcaagcacgactattccgctccctcccctctctcctctcccgaaatcaagctctccgaaacagccccaccgatcacccgcctcctccgtaatcgtaaaccacaaaatataacacaagacgacgtcgtgttcgaatattccgattccgaacctgaaagcgacggcgag

SEQ ID NO: 26557 - DNA, 303 bp, Glycine max
gtgttttcgagccgcgactatgtttctgtctctgagactgaactgaataacattaacacagcgatgtcgttgaaaacattagcaacctctcctctttcggggatcactcttttggtccttctcatcgctctccttctcagattttacatcaaattcgaaactgctgagagattgttcagtgctgaagagctatcattgttcaatggaactgatgaagggttgccaatccttctaggaattcttggatccgtgtttgatgtaaccaagggaaaatctcattatggttctagagggggatacaat

SEQ ID NO: 26558 - DNA, 251 bp, Glycine max
actcaatgaagcaaagtctggtgttcccttgaatgtcccagggaattgctctcgtcctagtgcttcaagtaattctttgccttcaatgtttcccgctggcactgctcctcctctttcaccaagaagtacatctggttcccctcgcattgtgaaacagagagttggcccttctaatttgggttctcccttgaaagtcgttagcgagccagttaaagaagtgatacctcagttctactttcaacatggacgtc

SEQ ID NO: 26559 - DNA, 409 bp, Glycine max
gaacacgatcttttcttacaccccctcaactacactacaatccacacttatagtcatgactcccccaccttcaccactctttataactcctctctccctcacattctcaccaccaccactatccccatctactactccttccccttattgacgacaccacattcatttaccatatccaacatggccgaggaagctccaaaccagacaaccacaccaccacctcctcaagagtcagtggtgcaagtggaggaagtggtagtaaccgatgttccacagccaccaggaccctcaacaaccactgttccagttgaaagtgattcacaacctgaacccgaggagcccgtgaagaagcccgttgaagaaaccgtcactctcgcgactcacctctacaaacccaataatgctggac

SEQ ID NO: 26560 - DNA, 312 bp, Glycine max
gagctattcaaattcaaacttttctttgctccgtcaccgtgtcctcccattactgcttcaagatctgtctttcgccaaccaaatcaaatgggaagccaatggacaaaagtgaagctcgctattgggatcaacatgtgcgttcaagtccctaaaaccgtcgaacattcctctccctctatcagctccgccacccccttctccgaccgcctttcgccgtccggcgatgcctccggccactgctccgtctcttcgataacctcctccgcctccgggctccgcctctccagatccaaatccaactgctccaagggg

SEQ ID NO: 26561 - DNA, 330 bp, Glycine max
ctataagagaaacaagacaagcacaacaagcattctgaaattctcttatttgttagtatcaggactagtaacaattaaccttgaaaataaagcttcatctagttttatcttccataggtagaaaagtgatcaagagaatacacaagtcaccaggtgggaatgtaccatcatcaccaacaccaaggaaaaaacattcattcttcttccagaatgccaatcccctctgagaggcacatgttccttcaaacaggaaatggatctggtgattctggacttgtgctttcaactgatgctaagcctagattaaaatggacaccagatcttcatgcc

SEQ ID NO: 26562 - DNA, 289 bp, Glycine max
acacaacgtaccaaaggaggttgaggagtggtcgcagttgcatagcagagcctcagaattgtgctctttgcttacccttcttttacttcctctcttctcttcactctgtacagagacagacactgcacacatttatggccagcgtcggtgatagaaaggaatcagaatggatggataggataatctcagaaggagccatcccacttcttgaaccagataattgttcaaatggttgggctacccctcctggtgatgcattcatggttagagggcctgagtattttacaac

SEQ ID NO: 26563 - DNA, 296 bp, Glycine max
agttgaagaagcctgaacgttatgtaaaaaaagaagaaaagaaaggtgtggttgagggagtgaggaaatggtgcacagcgcgtacgattgtctggaactggtgcgcgagtgcccagccaagatcgaatccatcgaatcctacggttcgaagcttctcgtgggctgctccgatggatcgctccgaatattcgccccggaaacggaatcttcctccgccaacggctccaagtcctacgccttggagaagaacctcgccgggttcgcgaagaagcccgtgctctcaatgacggtggtgg

SEQ ID NO: 26564 - DNA, 405 bp, Glycine max
gtgagatttaagatgaagagcctgatgcaatggttgaagaacctcattctggtgatgaagctacaaacagtaatgattcagactggagcatggattgctctgcaggtgcagttgttagagttaaaacactgcatatcagttctcctatcctggctgctaagagtcctttcttctataagcttttctcaaatgggatgaaggagtctgagcaaagacatgtcaccctcagaattaatgcctctgaagaggttgctctcatggagctactgaattttatgtacagtaataccttgaccactactacggcacctgcattgctggatgtgttgatggctgctgataaatttgaagctgcttcatgcatgagatattgtagccgattattgcggaatatgcctatgacac

SEQ ID NO: 26565 - DNA, 336 bp, Glycine max
caggcttcacctatcactgttggtgagcgacaagctgttgttgaggaaaagagaactactacacgagtcagcggtagtgggagagggaggtactcaggaagaggtggtttccgaagcgacagtctcagagcgcgtgggaaatttggcagtggacgtggttatagcagaaatgaattcagaaaccaaggagaattctcagggcaacctaggagttctcaacggccaaatcaaaatggaggtgggcgtggtggtggacgtcaaggtgtggggaaccgtaattctacaccatcagcttcagcagcatgatcatattggctaatttaaataagaaaaaga

SEQ ID NO: 26566 - DNA, 324 bp, Glycine max
ttcggctcgatgcgaccaggaaaccgatctcgttcgcctgaagaactacctaatttatttacactcccgccgacaccggcaccggcaccggcaccggcaccaaattcatttaggcccgtgcttggtttgacctacatgatcgccgaatcagttgtcttgagattgcgggattgatttgtgtggttgcagtgatggaactcttgtttggtaccggaagaaaagaaggacaactttgatcatagagagaataaaagcatgggattaggtgtgattaagaaagtagcggtaatgatactactgataatgtttctcagctaccctgta

SEQ ID NO: 26567 - DNA, 771 bp, Glycine max
aatctgctaagaaggaattcgagtctccccaaattttctccgcccgcgttaaagcgacaacacatgtttctctcattcggtgctcaattctccttcgtcttctgcactgcaatttgcagccactaacagtttaacaatcattctcaaaccccctcacaggtatgccttcattgaatgttttgcttttgggtagttgaaaggtaaccaggtgctgctttattcttgactgctcgagaaggtttctcaggagttcatcttcaatattctccagtttactttaccaaatccagggaatgctgaaagatgtggttgaaagtaaagagttccctctctcaggttaatgaggttgtagctccatctgaggtagccttattaatccttgatgagattggatgtttagatcactgccaacatcaattatatgctcatttgcctgaggtggctggaaatcttagcaattgtttgatttcaaaacgggatgtttgtgaagatggatgagctttgagcatctttggaatagtttactgctttctggtcacataagcacctgtatttagtgtatacttagtatattatcctattggtagtagcattggttgtatgctaaaggagtagttacagtaaatggagcagaagggaagtgtgcttatgcaaagatatgaacttgggagattattaggccaaggaacctttgctaaggtctaccatgctaggaaccttataactggcatgatgtggccattaaagtagttgataaagaatgatgatcag

SEQ ID NO: 26568 - DNA, 373 bp, Glycine max
aatgaaatgaaaaaaggtcgttggagtctactcctgatcccattagaataaaaaggtgttggaatagagggaagaacgtggaaagtggttgacgaagaagacgaagaagaagaatggagaagtcagggaagagagtgttgcttacctccaacggcgacgacatttctcaaggcattgccttccatttggtgaagcaagggtgcaggttggttttgctgggagatcagaattccctgcggagcatcgcgaacaaaatcatggattccctctccctcgcagacagaggcaccgtgcaggtcgttggattggacatggaggatcaaagcgaatcgactttccatcattccgtggataaagcgtgccagattttggg

SEQ ID NO: 26569 - DNA, 236 bp, Glycine max
cgaaaaagaggacctgcagagtgatggggattgcggcggctgttggagtgttgtcaccgtttccgttctattactgcctctggatttggccacagtcgtgggtggacttgtgtggcagagcccgagacccatctaagggtttatcagctacttggtgaggctggcacatactacggtgtacgctttggaaaaactattccctgggtaactgaattcccttttggtgtcatcaaaga

SEQ ID NO: 26570 - DNA, 380 bp, Glycine max
ctctcgtttccgcggacgcgtgggcgttgccgcgtgtatcgtactcgtcgcattttccgtgtctcatcaaaccctggttatgatcggtcaaacgcaaagtttgttcttatttcgccgatcgaacctcgatctggttcttagggatgattttcgttggaggtttcggcggcaccggtgattatcgtacgtgatctttctgcggtggatgttgatggtctcgtgtcgaaagactcgaatcagagtaattaacgccagattcgctgtgtaatttagaatttattggtaaaataatcctttaggagtttatattttatatggttaataaacgcgaggaaactgcaatgcgactcgcaaccgatacttaaaaccttggttgaagt

SEQ ID NO: 26571 - DNA, 448 bp, Glycine max
tttgttggcgcgtgtatcgtactcgtcgcattttccgtgtctcatcaaaccctggttatgatcggtcaaacgcaaagtttgttcttatttcgccgatcgaacctagatctggttcttagggatgattttcgatggaggtttcggcggcaccggtgattatcgtacgtgatctttctgcggtggatgttgatggcctcgtgtcgagagactcgaatcagaggaattaacgtcagattcgctgagtaatttagaatttattgggaaaataatcctttaggagtttatattttatatggatattcgatattcgatctgattggttgaactcaaggttttaaataacgggttgcaattgcgaccgcataggtggcatgtggcatttgtctgcgatttgccgcgatatcaataaacgcgaggaaactgcaatgcgactcgcaaccgatactta

SEQ ID NO: 26572 - DNA, 307 bp, Glycine max
ggagatttgagagttagggtttagggtcatttgagtttgagttggtgatggtggtggtggaggaagagtgagggtggttttcttgtgatggtgtattggggtgtgaggttttgtttggatccgaggttattggctacatagggtgatggagagaaagttcatggccttaggtttcatttggtgggtggtggtggttcatccactatgcctgatttcagctaacatggaaggagatgctttgcatagtctgaggacaaacttacaggatcccaacaatgttttgcaaagttgggatcctacacttgtc

SEQ ID NO: 26573 - DNA, 318 bp, Glycine max
cacacatatatacaagcttctactactactactactactactcttctccctcaaagcttaattaaacttgaacaaacagatctatctaagagcctgtacctgtgaacaggtcacttctccactatctctctctctcactcactcactttttccactttgatgtttttgttaggttgttccatgattctctcaccccaccattttttagcgtgccacaaatctctcggcttcagatttagatgccaagtaagacaagtgtttagggtaaatattaaaggcctgattttgcatttttatccactgatgcaggcaagtcag

SEQ ID NO: 26574 - DNA, 437 bp, Glycine max
gtccatcagaccaggacgtaggtgagacactgagctcacttaattttgcaactagagtgaggggtgttgagttaggtcctgttaagaagcaaattgatacaagtgaagttcaaaagatgaaagcaatgcttgaaaaagcacggagtgagtgcagaattaaagatgaatctatgcgaaaacttgaagaaaatttgcaaagcttggagagtaaggccaaaggcaaggatcaaatttacaaaaatctacaagaaaagattcaagaacttgagggacagattgagttgaaaagagccatgcaaaatgactcagagaaaaaaatctctcaattatctgccaaattgagagggaaagaagaaacctgcggtactcttcacaaaaggtgaaagagctagagaaaaagatgaaagaacaactgcagtcagagtcagcaagttttc

SEQ ID NO: 26575 - DNA, 534 bp, Glycine max
cgactgcggctatgtgattacaagaatgctgcacctcatgtagacaatctggatgctgccatgaagattgatatgcagcaaacacaacgtatacaagagctagtgaaggagctcaatactttagaccaaagtctctcccgatctgaccttcactacagggataggacagcattatctaaaaagcaaactatgattcaggagcaactgcaaaacatgactggattgagttcaattgggcaggaatcactgcaaccagtatattttgggaatgtcagaaggataataggagataagcttcagttagcacctcctcctattgatggcgaatggcttcctaaaagtgctgtctatgcattagttgatctaatagtagttgtgtttgggcgcccaaaaggactttttaaggagtgtgcaaaacgcatacagtctgggatgaatataatccaagatgagttagtgaagcttggaattactgatggtgttagagaagtggatttacaacactcttctatttggatggctggtgtgtactta

SEQ ID NO: 26576 - DNA, 1237 bp, Glycine max
atgttcactgtgcttgaggatataattaggaggagtgattcaatgacgaacatagggaatgctgttctctatcagtgcatatgctgtgtggcttctatatatcccaatcctaagttgttagaggctgctgcggatgtaattgcgaaatttttgaagagtgacagtcataatctgaagtacatgggcattgatgcccttggtcggttgataaagttaagtccacatattgcagaacaacaccaactggccgtcattgactgcttggaggacccagatgatagtctgaaacgaaaaactttcgaactgttatacaaaatgaccaagtcctccaatgccgaagtgattgttgacagaatgattgattacatgattagcataagtgatgatcattataaaacatatatagcatctcgatgtgtcgaacttgcagagcaactcgctcctagtgatcattggtttatacagaccatgaatacagtctttgagcatgctggagatcttgtgaatattcaggtggcccataatttaatgcgattgctcggtgaacgacttggagaggatgatgatgctgcatatagtcagttgagatcatctgctgttgagtcatatttgcaaattattggggagccaaagcttccgtcagcatttcttcaagtaatctgctgggttctgggggaatatggcactgctgatggaaagtattctgcttcctatatcactgggaagctatgtgatgttgcagaggcatattcaaatgatgaaactgttaaggcatatgccggtttcagcattaacaaaaatttatgcatttgaaatagcagctgggaggaaagtagatttgctatctgagtgtctatcttttattgaagaactattagcatcccactccactgatttgcagcaacgtgcatatgaattgcaagctcttattggtttggatgcccaagctgttgaaacaataatgccccaagatgcaagtggtgaagatattgaggttgataagaatcttgctttcctcaatcaatatgttcagcagtctctggaaaggggtgctctaccctacattccagaggatgagcgcaatggaacagtgaatgtgagcaacttcagaagccaggatcaacatgaatctgcacaacatggtctgagatttgaggcatatgaagttccaaagcctccaatgccgtcaaaagttgctccagtttcactttcatcctcaacagaccttgttccagta

SEQ ID NO: 26577 - DNA, 269 bp, Glycine max
gtaatgattgctttttgattcctgttgaatttggtgactcctttgctacaaaaagtgaaaaccaacatagatataaggtgggggatgatgggtttagtggggatgaagatgttgttttggattttgatataaattctggtgcagagtctgcacctgttattgagaattggcacacttccggggatactgtgtcactgttttcggatccagggtgtacaaaggtgttcaaggccaatggatttgagttaagaagtgaacatttggagcaa

SEQ ID NO: 26578 - DNA, 320 bp, Glycine max
aaagcttgctttagtaggaaatcgatcgtaaatatgaatcgtggttaagtattttttttaagttgaatttactttgttggatcttcattagacttaatcgaagagaattcagatctggcttagtgttgttccacacagtgttttgacccttctctttaatggcgtggaggctcactcagacagcacctttcgaagccgaaaacgcgttggaagcgtcgctgagggtagccttcgagtctctgcaaccatccctgagaccccctttctcactatccattcccacccccgaccaatacgccctcctcaacggcgcaattctt

SEQ ID NO: 26579 - DNA, 435 bp, Glycine max
cctcaacacaacacactcactcttctctgcttctggttcgttttctgtaaactcacctctctcttcctcttcatttccttactttttaacacaacgtcgattcgttcgattcttatcattttttgtgcaaatagattcaccgaacgttgctatttaagaaccacaatccgtttccatttccatttccatggcgtatgttgaagtagattgtccagctagtgttaagaagcagttggcgaaggagtttgaggagtctctccggataaccgtgcctgatgaacccgatgttgcgccttctattgatccttgcgctgccaacaaagctggtattaaattcgctgattatcaatgtaataatgcaatgggtctatttgctaagatgaaagggaagcagacaggattcaggggtccacaggcagttggacaggccatact

SEQ ID NO: 26580 - DNA, 272 bp, Glycine max
ctttttcttctccctcaacacaacgcgctcacccttctctgcttccgatccaccgaaccttgcgatttaagaaccacaatccgtttccagttccatttccatggcgtatgttgaagtagattgtccggctagtgttaagaagcagttggcgaaggtgtttgaggagtctctccggacaaccgtgcctgatgaacccggtgttgtgccttctattgatccttgcgctgccaacaaagctggtgtaaaatttgctgattatcaatgtaataatg

SEQ ID NO: 26581 - DNA, 494 bp, Glycine max
tacaaaaactgaaccaattgtttgttttacggcaaggcaatctcaatcaaacatttccttttctggtgttaccaaagatagtgctggtgactatcaagactgtggtgcttcttcaatgcttctcatgggagaacctccctggtgtcctccttgccctgagagttctctgcattctgctaaccgaagcaatgctgtcatgcgctacaaggaaaaaaagaagacccggaagttcgagaagaaagtaagatatgcctctcgcaaggctagggctgatgtcagaaagcgtgtgaagggccgatttgtcaaagctggtgatgtctatgactatgaccctttgaaccaaaccagaagctactgagtgtacaacttttaaccatgttctgtaaaaaggaaagaatcactctatagttgcaaaagaaaagtaactcttacctgaaaaaatggatgaaatttgatgcattctttctccatgcaatgacaagctgtctgatttt

SEQ ID NO: 26582 - DNA, 502 bp, Glycine max
ttttgattatgaatctctgaagaaactaatgtaatggcctccttcagggacctcacaaggctcttcaatggcttttccctaatcgccaaccaattcgcgaaccttctttacctaactccacaacctcagatttccaaaccctaattaagagagctctcgtctccgccaccgacctctccggcatcaccaaaggaaaggttcgccacttccccgatactcctccctcctctaccgccacacgacgccacgacgctgctgcgtctagttccgttgtttttttctccgacgacattccttcttctcaatcccattctacaccgacaacaacctctacagtaacaaatattgacgatgttgccaagtcttcttccgacgcaaatcacgatccaaaggaggagaaaagtgaggttgtgacctctgctgaaacggttaatcaagttgaaagtgaggaagtggcaccggcactggcaccttctccgcccccgttgaggaaacgaagacc

SEQ ID NO: 26583 - DNA, 369 bp, Glycine max
cttttaatgccttttcgtacaccataaccttctctcatccaaaacttccaatctctctctctctctctttctctaatatctttcacaacttgccgcacactcctcgcccgccgcggcgatggccgactatttctccggctccgtcgaattcggactcaacctctcgaagcgagtatactacggcaaaggatcggctccgtcgccggcgccggcgatgtcgcggtccctgtcgaagtcgccggagggatacctcccgacggcgccgatgtgctacgccgtgatatcggatccggagaaggtggagaatccggacattcggagctaccagccgtatgtgctcggtcagtgcgagcctccggcgctgatacc

SEQ ID NO: 26584 - DNA, 442 bp, Glycine max
ggcttcccccccccctgtccgaggcttttagtgctcagctccatttcttctttcccatcttttcttgtttttaaaaccaacgaatctgactcaccaatattccaacacgctcgctcattccacattgcataatggccaaggaaccttctctatgcctcttgttcctctcttttctcattttctgctcttcagggacttctgtatcttcttcttcatcgtccggtggtacaacattcttccaaaaaagcaagatctccaaatctgagattcgattttctgtatcagattgcaagattttgagcactctgaccaacaccaacctgtcagttgatttcttcttaaacgaaagcctggttgaaaattttgtttcttcaaaacaaaatcatctctagtttcatggctagaaactcatctcatgaacattattccccaagttgacatc

SEQ ID NO: 26585 - DNA, 439 bp, Glycine max
ctcgagccgcttcactttattttttttccaattcccttcactcctaaacttttttttaggagggaagggaggggcaatggagatgcacacacaacctcataagaaactccaccattttggtgtacaacattgttgtcttattagcctcttcatcttcaccttcttcactactacaaccacccaagcttttgattatgctgatgccctttcaaagagtcttctctactttgaagcacaacgctctgggaggataccttacaatcagcgtgtcacttggcgtgaccattctggcctcactgatggcctagaagaaggggtggacttggtgggaggatactatgatgcaggggatcatgtgaaatttggtttaccaatggcattcaccatcacaatgctctcatggagtgccatagagtataggcaacaaattgaagatgca

SEQ ID NO: 26586 - DNA, 329 bp, Glycine max
gtgagacttcacttattcttttttcttccaatttcccttcactcctaaaaacttttttaggagggaatgggggcaatggaaccacataagaaacaccattttggaacctccaacgtccccatgctagtacaacattgttgtcttattagcatcttcatcttcaccctcttcactgccaccaccacccaagcttttgattatgctgatgccctttcaaagagtcttctctactttgaagcacaacgctctgggaggataccctataatcagcgtgtcacttggcgtgaccattctggcctcactgatggcctagaagaaggggtggactt

SEQ ID NO: 26587 - DNA, 1007 bp, Glycine max
cgcgctgagaaactccttcctcagcccccaggaggcaacattcgggacaatttcttcaattaatgggattgatcttcaaactcttgcactcgccggccagctcccagcacaaagtctagccacacttcaagcagcaggacttggtaggccgactgcaaaagctggtgtacctatgcctctcatggatcaaagaaaccttttcagttttgaaaacccaaggttaagatttggagaaggccagccgcaacatttaagcactagtaaaccaatgaacttgttgcatggaatccctaccaacatggaaccaaagcagcttgccaatttgcaccagtctacccaatccattggcggcttgaatatgcgagtcaatgcttctgctacacaaggcagccccttattgatgcagatggcacaatcccaacctagaggtcagatgcttagtgaaaatactggtcctcgtgttccaagacttccatcatctttggggcagcctactgtatcaaatggaatttctaatggtcttctgggcagaaatgggattgcgggtaataacagaggacctgcatataatcctgttccaccgagctcttcattgttgagttttcctatgaatcaaacctctgaaatgtctgtcaacaatagtttcccaattggaaccaccccaggtatatcaagtatcacaacaaaaggctcttttcaagaagaagttacatcaggaattaaaggatccagtgggtttccaagttatgatatttttaatgaactgcaccatcagaagccccatgatttggagataacaaacccaggcttgacatacaatgcctcccatcatgtaaaccctttacaaggtaacattgatgttgcaccatcagttttagtgcatcaagggttttcttctacacaacagaccggccaaagcagagatggcgctttgattggaaaagctatgttctccatgggagaaggcttggaacaaaataacctccaaaatgctaacttcaatccac

SEQ ID NO: 26588 - DNA, 433 bp, Glycine max
gtgttagtgaggaactgttctgttccgaagtgattcattccactgctatgaagtttcttcaatctctcattgctcaatcccgttatgcagcgcgtgccgggccactgaatcgggtctcggggctccgattcttctccgtttccacggaagagtattccaagagaaactatgcaaacaacgttgctgagtacaacactgttttgggttctctcactgcacaaagaaggaatttcttgctgagggatgtgtacgatgatatgatgcttgatggggtaaagcctacgcgtgacactttccattcccttgttgttggaaccatgaaaggagctagaatgcaagatgctttctacttcgtggaacacatgaaaatcatgggtttgcttcctgatgttactttatacaactttctaatttcgacttgtgggaaatgcaa

SEQ ID NO: 26589 - DNA, 336 bp, Glycine max
gagagcttcacttagggagggaggtaaaagtctcagtagcatttccactttcattcttagaaaagttgaatgcatcacatgacaacagtattcgtaggattctttcagttataaaggaaacgaaatcctttgtcatggtagaagactgcattggtggagaattcagcatcgggggtcactttgttcatgctatcatcaaacgagccactcttgctgcttccattcttccttgcaaggatgctcccattgttctgacaataaaaagcacagttatcctcccttcaatggaattagctcaattcagtgagaagatatccaaatatctagaatccgaaa

SEQ ID NO: 26590 - DNA, 481 bp, Glycine max
gaaactgtatgggctaccactctcaaccaaagaaacaaaccggatatcctctaattgaaggaagagaattagaggttgatgcctcaatgccagttgaaaagattaaatctgcttctaataagcgttacatagtggtgcgtaggaagctgaggcatggggaggtttaccagcttgcaccattcatgttgcaatctgatatgccttttaggacaactaacaacagaaagttgaagactaggagtgtgaagattgtggtgactgcagaagaattggaatcgctgtttagcggatcaaagaggttccaaatccgacgtagaattgcaggtgtcaggagaagttttgggttgaaagggtgccaaaaatggttaccttctttgcccactattcaagaggtgcataactattaaatggtgggaaggatgctatttaagcattcctatcatcagttgtgcaatgaattttatttgtagtttttgtggat

SEQ ID NO: 26591 - DNA, 369 bp, Glycine max
attggcaaaaacagtgagaaattttcttcttcttattttttaataataaaataatatgaaaaatgagagacattgttgttgtatccaaatccaaaaaaacctttttctgaatcagtcgtgaaccaaaagaggaagatggagctgtggaacagagcccgaagctttgcggaagaagcagcgaaacgatcccaggaactgtcgttgggagctagagctacccaattcaccaacatcatagcagaaaccaccaaagaaatcgcagcgcaagcttccaagcacttgccccgaccttatgccataaacgacgtcgatctccaccgttttggcatcaccgaagagttgagggactttgtcaaaggaatcaccatc

SEQ ID NO: 26592 - DNA, 465 bp, Glycine max
gtggcaaatatggtctctttaaggccatgctttcttttcattcttatctgcatcgcgataattaatcatgcacattccaacaatgatcggaagacttacattgtctatatgggtgatcatcctaagggcatggactccacttccataccttctcttcatacatccatggctcaaaaggttcttggcagcgacttccaacccgaagctgtacttcacagctacaaaaactttaatgcattcgtcatgaagttaacagaagaggaggcaaaaagaatggcagaaatggacaacgttatctctgttttcccaaacaagaagaatcgtcttcacacaacaaggtcgtgggacttcgtgggccttcctcagaatgtgaaaagagcaaccacagagagtgacataattgtgggagtattagacacgggagtttggccagagtctgagagcttcagtgacaaaggatttggt

SEQ ID NO: 26593 - DNA, 398 bp, Glycine max
tgacgacagaagggggactcttctacgtaccagtttgctgatggtgaagcatgacgcatgagatgcgatgagatcccctttttgatggttcacttcacacttctttgtatccagatccaacagttttctcccacattcagctttgacacttgtatctcattcatagatggagtcaccccacgcatccctcttcatcaaattcaagacaccaatctttttctgcttcttcctaagcactctttcagtctcagcttcttcaaaatcaacccatctattccccaaagaagctcttcccaacaagtatggttaccttccaatcagcaccacttccacttcttccattttctatgctttctatgaagcccagaattccactttacctctcctccagaccccat

SEQ ID NO: 26594 - DNA, 261 bp, Glycine max
gagggttgcatgaagggagagtttgattcctttgggacagagagtgagattaattaaaatattaggtagttaattaatttcattaaaaggaaaggtgaaggctcctgcgatggagcaagcagtgtcactgattggtgccctgaacctggttcctcgcaacctccctcttcccccagacctctttgacaccgtctcttctatctatcaccgatctaatcctctctcttccgacgccgatgcaccggaacaagatttgttggc

SEQ ID NO: 26595 - DNA, 398 bp, Glycine max
caaaaccacttcatcacacaaaaccctacccctaaccctaaccaagtccatctctacctcctcaacctccctcccgcttcctcttccaattccaaagcctatgcttactcatactcccccggcgattcttccgctgctgtgacgaaatgctccggcactttcttcacctcctcccaccgctacttctggatcgacctccgcgccggccccgtcgactacggccccgcgatctccggcgacggagtcatcccccgcggcgagttccaccctctcgccgcgctccacggccgtccgaagtccaacaaggccttcgccgccgacctcgcctccctcgtctggagcgcctaccacgtcttcctcgccccctccctccggatctccgtgcccttcgagaaatc

SEQ ID NO: 26596 - DNA, 296 bp, Glycine max
cacaacttcaaagggtaacctgagcctgaggagattccgtttgtgtgcaagtgcaatggacgcagcagcaacagtaggtagggtttccaatggcggcggcgtagttcgcttcccgttatctgcatcgagcgctttattcatgcagaaaggagacatcaccaaatggtccatcgatggttccaccgacgcaattgtaaatcctgctaacgagagaatgcttggtggtggtggtgctgatggagctatacatagagctgcaggcccacaacttgttgaagcatgccgcactgtacctg

SEQ ID NO: 26597 - DNA, 238 bp, Glycine max
aaaatttaaattcctaactggttaattaaccccaaaattataaaaaaaaagagggcaaaaaaaaaaaaaatgttacactgaggatgtatcaccaagaacgtcgtttaacacatcatcctcaccatttgccaaggtaaacagctctgcatccgttatcttggccactggtaaattcccttctctcaagattggaatgagctgcaataaatatcctcgagccgacatcggctcgtagatg

SEQ ID NO: 26598 - DNA, 340 bp, Glycine max
tccccttgtgcctgagcttggaagtgaagagccattgcttaatgatgagactgaggagcaactactgtgtcgcgtgccggtgtttgatgctgagctttgtagcatatacaatgaagtgagggacgaggttgtagctgctggtgaagaagccttggacttggaaaacttttcttccgagtttcttccttcagatacggaccttgctgagtttactgctgatgtgaaaagctttcttggaaacggggctgatgaggattcacctgatgatgatgagcacgtgaaagaatcagaactactgattcttgattgcaaagaagaagaaggagatgaggaaatggat

SEQ ID NO: 26599 - DNA, 279 bp, Glycine max
gacgtcgtttaagccgcaccggcgcgggaacagaaccaagacgcggaagcccaagtttgtcagcctgcggcttcagttatccgatcctaagaaaaagatgaaaacaacccagcccaagcccaagcccaagcccaagcccaagcctaaggcccaacaacaagaacagcagcagcaacagccgcagctgaatctcttccctctccatccggaccaccatgacatgcacgaggagcagaacgtggcgcttctctttagctccgatggtggggacacactcaa

SEQ ID NO: 26600 - DNA, 297 bp, Glycine max
caaaaccacaaaccaacgctggtaacaatggaagaagactcagggataagactcgtccacacgctgatgacctgtgcggattccgtgcaacgtggtgacctcgcattcgcgggctccctcatcgagaacatgcaggggctgttggctcacgtgaacaccaacatcggaatcggtaaagtcgctggatatttcatcgatgccttgcgccgtcgcatcttagggcaaggcgtgtttcaaacgttgtcgtcgtcctcgtatccgtacgaggacaacgtactctaccaccactactacgag

SEQ ID NO: 26601 - DNA, 508 bp, Glycine max
tcttatacttgagctttgtatcaatttaatatttcccctaatcaagtgttttgcgtttaacagccttttgttttagttttataataataattgatgatgatttgtgtcttatttcaagtctcttacacttacgtgatgataaattgacaaggtatcctgggggaaaaaagcactgctcattggagggaaaacagacccaggaagtgacagaatttcagtatgggcatttgatacagagacagagtgctggtcactcatggaggccaagggggacataccggttgctcgcagtggtcatagtgttgttagagcgagctctgttctaatattgtttggtggtgaggatgcaaaaaggaggaaattgaatgatctacatatgttcgatctcaagtccttaacatggcttccacttcactacacgggcacagcaccttctccaagattcaaccatgtagctgctctttatgatgataaaattctttatatatttggaggatcatcaaaatcc

SEQ ID NO: 26602 - DNA, 600 bp, Glycine max
caacaagggaaggcttgttttgagttgaaagctggttacatattatttaccatgaatagatacaaatagacattcacaacccagtaatcacactgcactctcaaatctcaatatcaagtctccaacccaaccaaactccattgctctcaccaaaccatgaaaaactcacaagagaagaaacatgtcgcagtgtttgttttcccctttggaagccaccctgttcccctcttaaaccttgtgctcaagctagttcatgccactcccaataacttgaaattctcattcctaggcactgaacactccaacaaacctcttctctcaaaaccccacatcccagacaccatcaagttctatagtataagcgatggagtcccagagggtcatgtcccaggtggccacccagttgagagagtaaacttttttcttgaggctggtcctgagaacttgcaaaagggtatagacatggcagtggcagagactaaagagagtgtcacttgcatcatcgctgatgcttttgtcacaccttctccttgtggctcaacacttgaacgttccatgcgttctagtttggcctcctttgtcatgttctctctctgcaca

SEQ ID NO: 26603 - DNA, 338 bp, Glycine max
gagttgcacatatccatgtatcatttatctgttgataggtgaaagaatcaactgcacattgctggtttattcttcatgtgattggacgtattgaatccaacatagtgattgttctttttgatcaattgacggaattgtaacttttttaatccatttactgtcttaccgctcttggcttctcttttccttctttttagactggaaataccttacgagaccttgtatgtgtatccgaaagctgtctacatatgcctcacttgtagtactgttagatctagttgcttgatgtaagaattcaaacatgaaaattttcataataaatatcctattatctcatc

SEQ ID NO: 26604 - DNA, 406 bp, Glycine max
  unsure (1)..(406): unsure at all n locations
aataaagctgtttcgttccacaggtgcccccattttccaatggcaccaaaaacacagagattagaattcaggcgagaaggggatcaaggcaaagaagaataatggaagtatcaaaatggcaagccaaaaatgtatggaaatggaaggagaaatcaagagcttaatgaaggtatggatttcaatcctagcctccctatgttactgttatttcatatcatcaagggtacccaaaggcttgttgaggtttttgaccctctccccagtgttgtacctattcaccatcctacctcttcaactcaccactgtcctcccaacaggtgtcactgccttcttcatcacttggctcaccaacttcaaactcctcctcttcactttntgattgggccctctcacaccaaactcaaac

SEQ ID NO: 26605 - DNA, 284 bp, Glycine max
gaagaaaccaaacaaaaacgaaacgaaacgaaacgaaacgaaacgaaaccactcactcgtgtgtgttggtgggtagtgtgcttgctactataccatggattcccattcccctgttctcacctcaacgacgtcgttgtcgtcaatgtcgaagcgtccgtgtccgtcccaaaaccctagagcggagaacctgggagaggtggagcgtcggcttgaggcgtttctctccctctcggacgtggcttctctctcccttgatctctccttcgagaggctcctccaatcgg

SEQ ID NO: 26606 - DNA, 259 bp, Glycine max
ttcttccatcatcattccaaaaccacagtacctcctctcaatttcaatgctcctcgcttgcattcctctcagaagaaatcaccgggaagtcccagcaatagtacgggatctattgatgcggaaatggggtcaatgagtttgaccggaggagaagttgaagagcagcattcttcttcacaaggccccacgcggaggaatcttggcagaaagcacaccacactagtagtaggaaacaccaagcaacaacaagtacctagaa

SEQ ID NO: 26607 - DNA, 332 bp, Glycine max
ctttgccattatctcttcccttgtccttcttcctactatactatattttctctctctaatcaatcatagttctgattttcatacacttaccctgagacctccattctcagatcaagcttgcaccaaaatacatacatagctatggacaataatactagtgcctgtgcctacccccaacttgagtcagaagaagcatcttcagagcacaaatcagaaactcaaacatcaaagaaaaggaaaatggttgagaaaacagttgtggcagtgagggtaggagagaaggttggcaagctaaagaatgaagggctaccctcagatttttggtcttggag

SEQ ID NO: 26608 - DNA, 266 bp, Glycine max
ctttgctattatctcttcccttgtccttcttcctactatactatgttttctctctctaatcaatcatagttctgatcttcatacacttaccccggaaacctccatttctcagatcaagcttgcacgaagacattaaaaaatagaaatacatacatagctatggacaataatacttgtgcctcctcccaacttgagtcagaagaagcatcttttgagcacaaatcagagactccaacatcaaagaaaaggaaaatggttgagaaaac

SEQ ID NO: 26609 - DNA, 573 bp, Glycine max
gtaggactctatgctttagtagcacaaatgagtttaacaattaatgccccgccggagggactcctcagcctcaagtgttccaaactaaccggtggtttggttcaaaatcttaaagaaagtgaatccggttgtttattctcaaatctagagtctgtcttggttttcatgaaattcaaatttccaagctacatgattccatgctgtgcattccattttgttcatttagtttttgccttgttggtgttgtatgttcattattttggagatgaattgataatttctctttatctgaacatctgattcttatgtgattgagacttgagactttgagagatccttgaagcttatctgccaataatgctcacttgaatgcgtgattaagcgtttaagcaaaataattgacatacggggttgtggggtgcaaaggtgcaattacacttcaatattcacatgatcgattttatggtacaaaggtgcttggtgaatgtcgtcaattctgttcacatttttattgggaaaaatgcagtactttttctcacttgtgttgattattacttgagatagatgtatgat

SEQ ID NO: 26610 - DNA, 357 bp, Glycine max
ctgttgccatcacataaaacagtttcggtagtttcggccttgatcgtaccctttgaacctcgctatggacagactaacatgctggtctacttgggaatctgttcattagttggctcacttacggttgtgagcatagaggccattggaattgcaatagagcttacacttgatggaataagtcaaatagcctatcctcagacttggcttgttcttaccgtggccacaatctgtgtcattacgcagttgaattaccttaatagggctctggatacattcaatgccacaattgtttctcctgaatattatgtaatgttcacaactcttactattattgccagtgcaataatggttaaggat

SEQ ID NO: 26611 - DNA, 398 bp, Glycine max
ctgcagccttagagccaaaagaaggtggtgcttatctggaactcctattcaaaatactattgatgatttgtatagctactttaggttcctaaagtatgatccttatgctgtatacaaatcattctacaatacaataaaagttccaatatccaaaagtactattcaaggttacaagaaacttcaagcagttttaagggccataatgctacgtcgtacaaaaggaactttgcttgatgggaagccaataatcaatttgcctcccaagacaattgagctaagtaaggtggatttttcgattgaggagcgagcattctacaccaaattggaatcagactcgcgtcttcaatttaaggcatatgctgctgctgggacagtgagccaaaactatgctaatattc

SEQ ID NO: 26612 - DNA, 315 bp, Glycine max
ctcactttcacatcatcccattattcctcttccttgtaagcacttcctagctcactatctatccttaattcttaatgatcttgtgcaatgcttttcatgacaaactgcaagtcgttgcagtggcaccttagtttgacaagatcacatatatatacactgcttgtggttcactgttgttatcacaatcaccagtgaatgggttctatcttctttgcacgtctgcatggattcatcagatcattggttgcagggcacaattcacgaggagtctgggatggattcttcttcttcaccctctgggcgatatgcttacat

SEQ ID NO: 26613 - DNA, 266 bp, Glycine max
gtgaggttaaaacaatgggtgtggagaagttgagcttattatcgacgacgaacctcgccgtgttagctcaagcgaacaacaaatgcagtagcaggaagcacgtgtgttggagatcatccacgacgccgtttcatctgcagcggaagccgatctcatggtctgtgttgtgcggtttcatgctatttgggttgggcctcatttctctcttgacgggccacatggtctctgatctcgaatggtactctcaccgtcgctctctctactct

SEQ ID NO: 26614 - DNA, 511 bp, Glycine max
cgctgagtatattctgaaacagtccatggagaaccctcaagaactcactctgttgtagattgattagtttatttattgcaaggctttgaaatacggtccgcaattgcatgtttcggccgcaatgttaatgtttttgaggtgtctgtgcctcattggtcacatttgtccgcaatttcttgcaatatcgagaaatgtgacgaaactgcaactgcgatttaaaaccttgatttattgacttggatatgattggtttgcattgagttgagggggtggtcggaaattaagggctttctcatcttctggtgagtacgatgtgaacttacctgtagaatcattcttagcatgtttttagagaagttgaattcgtttcttttcttgctagtgtagctctaatttgtgtatggattttttaacataaagctcttctgtccgcggctcattgtaatttagacacccaattcaattgaatcaatatactgaatttcctgtgctgtgatcttcattatgctgc

SEQ ID NO: 26615 - DNA, 289 bp, Glycine max
cgttgcaacaacaaacaccacactcacgcaaatggatccgctcaggggatccgaacccgaaaaccctaccgccacgtgtctctccatgctctccctccgccgcttctccgcgtgccgtgacttcgcccgtcgcctccctccctccgacttcgtcgcccgcgtcctcgccgtagccgacgtcctctccgcctccgacttctactccgtcctccagctccgcccttctgacggcggcaaccgcgacctcgcgcggcggcagtacgcaaaactcgcactcctcctcgaccca

SEQ ID NO: 26616 - DNA, 486 bp, Glycine max
tgtaagcgcttctaatgtccgcaccaccacctctctcccctcctcctcctcctcctccctccgcctccgacaaaaccgtcgagaaggcaaccgcggacgccgcgctggtcgaaaaatccgtcaacacgatccgcttcctcgccatcgacgccgtcgagaaggcgaattcgggtcacccggggctccccatgggatgcgctccgatgggtcacgtgctatatgatgaaaccatgaagtataaccctaagaaccctttctggttcaaccgcgatcgcttcgttctctctgctgggcacgggtgcatgcttcagtacgcgcttctgcacctcgctgggttcgatagcgtcaaggaagaggatttgagggaatttcgccaatgggggagcagaactccgggacaccctgagaattttgagactccgggaattgaagttacaacaggtcctcttggtcaggggattgccaatgctgttggtttggcccttg

SEQ ID NO: 26617 - DNA, 279 bp, Glycine max
cgaggagggtgtgaagaaagaggtgccccataagcaaagccatagtagcataatagcaatgcctcaagaacgacaatgcgcaattcaaagttgtgtgcagcgtctcttctcatagcacgtaccaagtccctccaacttcaccatcaccgccacgtgcgtcactgcttccccttcttcttcttaaaccgcaatcccactcttcaggtttcacccttggctctcttccttgtgcaacgcgaaatcactcatcaccacgcgcctcttctccagctactactc

SEQ ID NO: 26618 - DNA, 583 bp, Glycine max
cccactcgatcgcgcatttatgcatacaacatggatgctagaaatttcatctcccagatgatggaagttccaaataatgaagttacattagaaacctcacatgaagttcccattttggatacacgagacaatgctgaatcaaattctgaaaatgagttgctaactgttgataccaaagacctaggagatagcaataatagtgggttagaggatgtaaagggttcaacaaggcacactgctacatctgtaattgctggtaaaagatcttctactagttatcatgaagggaatggagaggctcatggaactgacatccttgaaggtggtaggagaaaaggaagcgcaaacaaaagaatgagaggctctgaaatctctgtcacaaaaacttgggaacatgttgatcatgtaataatgaacctacctgcatctgctgttcagtttctagatgcattcaggggattaatccagaagaaatattggaaaggatgtctaccatggattcactgctattgcttcattagggcaactgaaactcctgagactataatagctgtagcagaatctgctttagacgctcatatac

SEQ ID NO: 26619 - DNA, 465 bp, Glycine max
aatgggtacccccttcatctcagtttgatgaacttgatgattttgcaatgggcagaagtcgtggtaatgataatgagagtgcaaatggttttcttcctgatgaagaattagagatgaactctgctgctgcggctatgaaggaggcaatggatagagccgaagccaagttcaggcatgcaaaggaagttagggagagagagtattcaaaggctgctaggagcaaagaagctgtgcaaatggaaaaagatgagagaactgtgctagaggagcaagaaaaccaggaaaggtttgaccgagaacggcagcaaaaggagaaggaaggaaaggagcagaggagacttatgaaagaaagggaggagaaagaaagagaacaacagcgactagagagggaaagggcaagacaggctgtagaaagagctactagagaagcacgtgaaagagcagctgctgaagcacggcaaagag

SEQ ID NO: 26620 - DNA, 325 bp, Glycine max
ggtttttggttagttatcagcactggactttttaccccgtgatgtgtttcgctaggattaacttgtttgcacagtcttttttcttgttattgtctaagaggaaggtggagaacagatggagtgagcttttggggctgcttgcgttctgggtttggtaccctttgttggtttccttcttgcccaattggtgggagagggttttgtttgtttttgtgagcttttctgttacgggtattcagcatgtgcagttctgtttgaaccatttctcctcggaggtgtacctagggccaccgagcggcggcgattggttcgagaagcagaccaa

SEQ ID NO: 26621 - DNA, 345 bp, Glycine max
caactctcctcctttatgcgtttctctctctctctctctctcctctgctcgctgcttgctcgaagagctttggagggcaaagtttcaccatggatgcatctcggatcgacatctttgagatttaccgaagatactgtgacataaaatcaggacatgcatatattggtggggaagaagggtacaggcaagatagtgacattcagaaggctaaggtctcaagggaggcactcacacagctctccaaattggttgagtctcgtgttactacaggggtaacaatttttgatgaactttcaatgctcatgtcacggttgaatttgagggcggattttcagaattctcgag

SEQ ID NO: 26622 - DNA, 330 bp, Glycine max
gtgagaacaagacaatgactctgtctgctggggggggtctcattacttcctgggcggtttcaactgtaaatggtttggttgcttcagccagtcatgacaagttcctcaagctctggaagtgagtggggctcttccaaggtaccataaatataatggcaatacattaggtctttttgtcaatgttgttcacatgtttgtagtttatttccctttttttttgcttcttgatcgaatttgattttctacgtatctttagcttactaacctatgttatgtaatgtaacattgccttcctgctgtcacatcttccatttaaatatttacttggat

SEQ ID NO: 26623 - DNA, 677 bp, Glycine max
caaagatgatgatatcttatcctgcaaaggagagaatgtgtctagaacatctcgtagtgagaagattttccctagtggaagaaatgacggaggaaaatttggtcctgatcatcctggcaccatggacaacctggagcatgtggaatccagtttcaacattccaggtgtttcaattgccatgccccaatcttctgtggaccctgaatgtagtaaatcaatatgtaaaagtgatcctgctctgcctgctaaaacaaagaagctaagcatggatcgatcagactcaagaaaccggatgcttctgcagaagagacttttctttcactcacacagagtccagcctatggcactagaacaagtgttatcagaccgtgatagtgaagacgaagttgatgacgacattgcagatcttgaagatagaaggatgcttgacgattttgtggatgtttccaaagatgaaaaacagctcatgcatctctggaactcttttatgaggaagcaaagggtgctggctgatggtcatgttccgtgggcctgtgaggcattttccaagcttcatggaaaagagctgatctcatctccagctttattttggtgttggaggttattcatgatcaaactttggaatttcagtcttcttgatgcctgtacaatgaacaactgtagcatagtattagata

SEQ ID NO: 26624 - DNA, 256 bp, Glycine max
cacgaccacaacctccaaccgccgtcgaagcttggtcgtcctcccaccgccgtcgcacgagggagcaccccacgccactgtacgtcgtcgcgccaaccaccaggccgccgccgccttgatttttgcagtgattgttactgctgctgctgctgctgttgttgttatggcagtggtggagcaggaaaagcttcaggaagaatctgtaatccgccgcttctaccagattatgcttagttgggactactttgctctcctc

SEQ ID NO: 26625 - DNA, 340 bp, Glycine max
gcgccgttgccaagcgccttcccttccccggctccggcgatggccccgatggctactggaaccgcggcatctccgcgtgcgccgtctgcgctggcgccgcgccgatcttccggaacaagccactggcggtgatcggcggcggcgactcggcgatggaggaggccaccttcctcaccaagtacgggtccgaggttcccataattcaccgcagggatacattcagggcttccaagattatgcagagcaaggttatgggcaatagcatgattaaggtgatttggaactcggtggtggttgaggcttttgggggcggagataacaagagggtgcttgggggatt

SEQ ID NO: 26626 - DNA, 412 bp, Glycine max
gtgtacagttacggtattgttttacttgagttgctaactggaaggaaagctgttgacaatgaatccaacctccaccatctgattttgtccaaggcagcaaccaatgctgtgatggaaacagttgatcccgacattactgccacatgcaaggacctaggagctgtaaaacaggtttatcagcttgctctattatgcacaaagaggcagccagctgataggccaacaatgcacgaagtgacacgtgtactcggaagtctcgtgccatcaagcatcccaccaaagcaactagctgacctaccacctgcttcaaatccatctgccaaagtgccatgctacgggatgagtatgcaaacctcaaaaccccacacttagtaaactgcccctcaatgagcacttcagatgctcaactctt

SEQ ID NO: 26627 - DNA, 267 bp, Glycine max
cagtaagttagggtttaagaatttcatttttctgttcatctcttcactcacatagacagtgatttctcctcagtttcctttccctgattcgagaatccgacagcattatccgacacgtggcaatggcttacgtagatgatgatgcttcttctggctctggagatgatgtgaacttgttggatggacacaagcgtcaggctggcatgccatcgaattcttgcggtgtccgcaagagaggccggaaagctactggggctgctatagttg

SEQ ID NO: 26628 - DNA, 283 bp, Glycine max
ctcgagccggttctgtcttatccaaaatgttgccacttgtgtacatactcatagctcttcctgcagtagtgtcgctattgatcctcttcaaagccaacaaaaacaacccgccacgtccaccaggtccaagaggccttcccataatcggcaaccttcaccaactcgacgcttcgaagctcaatctccaactagggcagctctcaaagacctacggtccccttttctccctccgaatcggcttcaagccagccctcgtcgtttcctctccaaaactcgccaaaga

SEQ ID NO: 26629 - DNA, 266 bp, Glycine max
ctcttctcgtttctctctcctccctcgatgctcagctccagcttggcggagggtccatggtccactttctggatctcaccgtcaccgccacaccttcttctcaatgctcctccttcattctttctccttccccgtgactcacccgcgcgggaagatatcactccctccccaacccattcatttcgatctccattctccctgatactcctctctctctctctctctctctctctctctctgtgtccgagttctagggttttgcggat

SEQ ID NO: 26630 - DNA, 266 bp, Glycine max
attctaaggcatatttttctttttcactctcaaattaatgcacatgaacacctactctgaagccaccacatcacaaccaatgccacccaccatggatgaagatttggagaacaacacggaggattgcaacaatgcaatgactccgatggtgagaaagaagtcagaactagttgtggtcacaaataatgactctcgtttccaaatgcttagaaatttcatgaccaatttgcaagaggtcatcttcggtactaagcttgtggtgcttt

SEQ ID NO: 26631 - DNA, 298 bp, Glycine max
tcgttgaaagctaaggacttacctgcaaaggatgtcactggcagttgtgacccttatactgaagtcaagctggggaactacaaaggcaccactcggcacttcgacaagaagtctaatcccgaatggaaccaggtttttgctttctccaaagaccgcattcaggcctccatactggaggtcactgtgaaggacaaggatgtcgtgaaggatgacttcattggtcgtgtcttgtttgacctcaatgagatcccaaagcgtgttccaccagacagtcccttggcaccgcagtggtataggc

SEQ ID NO: 26632 - DNA, 572 bp, Glycine max
gcctattattgtttcatacaagaacaaaacccacgcactctcttcttcttttttaatctccctcttcactgctctcgctgcatgaaattccgtcctatattgttacacattcaacaaatgatgtgaatcccttcttgttgccgtagcctcacacactcacttcttccgttgtaactaactttacttttccttccaaacggcttctaacaaactctcgccgcgatgttggatctcaacctcaacgccgattctgcctccgacgcgcaaatggagagctccggcagcttcaattcctccgtcgtcaatgccgccgacaccgacgactcctgctcctacggcgacgccgtcgcctacaacttcgccatcctcaacaccaccaccaccgccacctccgacggacctcccctggccgccgccggagaatcctccgttcgcaccatccagctctttccggcggtcgaatcgggagcctcgccggcgtggctggatttttcgtcgaaggtggatcagaacggtgctccgcaggagcagaggatctctccccggcaaccgccggtgaagaagagccggag

SEQ ID NO: 26633 - DNA, 296 bp, Glycine max
aaagagagaagcaaagatgaccatctgtatgctgacaaagacaaatttattactgaagcatatagaaagaagcttgctgaacgagagagacaaatggagctagaacgactgcgtgaactccaagaggaaagagacgatgttaccaagaagaaggactttttgcttgatttttatgctaacctagataaaaatgttgcttatggcgcgaaagatgctgaagcaaggaaacgtgaaaatcaggctgagcatagagttccagagacccatgagggagtgagccttgcatcaaatgagca

SEQ ID NO: 26634 - DNA, 278 bp, Glycine max
ctcgagccgaatcggctcgagttctcttctcgcgtctcactctccaccgatacagtttcggactctctctctctccgattaccgcacaacaccgtatcgccgttcagggtttcttcgctcctctttggatcttcctcccttcgcgtcgttcgctttgattcgttaattttttttcttgcttctcctgtcttggctcgagatccgggccaagcacagaagaatccgattctgatttgcatttcgtactcactggtttggcttgtttttggctcttggtt

SEQ ID NO: 26635 - DNA, 273 bp, Glycine max
tggctcatcaatttgctcccttgcatgccttcctaaccccccttgctcctcttcttccaagctccacataaaacttctctctcgacttgacttgcctcaatattttgtttttgttcccacatatatcattttccgaaagcaatcttgtttcccacaaaattcaaaccttagtttgtaatgttaccaggaactagcttattctgttggactcaaatctagttgattacataaatcttaatctacaacattgtgagagactagcttattctgtct

SEQ ID NO: 26636 - DNA, 223 bp, Glycine max
acgagtccccgtaagtcaaccgatggacgcatcacagcacctcgtctaattgcggcaattcagaagaaagaaaaagaaaagagagagacagagacatttgcgccttctttcttgcaatcgcgtttgaataaaaccaaagaaattcctcttcttattctccctcgcgcgattcatttcattttctctttggaataacctgcagggttgcttccatttcaacatg

SEQ ID NO: 26637 - DNA, 503 bp, Glycine max
caacaaactgcattgcagcagcctactcaacttactcaactccaggatcagcaaagacagcttttagataaaacacataacttgtctagagcactaacacctggtcaagtactcgaaattcctcatattattcagaattcactgcccgaggctaattctatctcaaatcagatgacaaaggccaattgccagagcaatattcaattctctcagcagcccaagcttcagcagcagcaacaacctggcatggtttctgaaatgcctggccacatggcacttctccctactgctacaactaaccaactttctgctggtggcagtagtatagtgactggagcaggtggtgcagggcagtctgtaattacagatgatgttccatctcgctccacctcaccttctacaaataactgtaccaatgcacttccacaattgataaattcacgattcccgagaagcacaatggtaggggatgacatggcgcactctgctgccacaatcttgag

SEQ ID NO: 26638 - DNA, 385 bp, Glycine max
aaattactactcccatcaattgctgcacttcctttgttaatggcatatgctggacacacaactatagttataccaaagccacttgtcccacacattgggattgaggttttggatcttggatggatgtatcaactatatatggggctattggctgttttttgcacaaattccatcaatatacatgctggaataaatggccttgaagttgggcagactgtggttatcgcatcagctatcctgatacacaatattatgcaaatggagcatcaacagatcctgaatataagcaagcacatgcattttctatttacttagctcagcccttgctagctacctctttggctttactttcttacaactggtatccctcttcagtttttgttgg

SEQ ID NO: 26639 - DNA, 265 bp, Glycine max
gtctcaataataatcagatctgacctcattcatagaacacaaaccacattcgcccccaaaatcaaccaaccggatcggttacatgtttcgcgagcgcgtgccgttcctcctcgtgggcgtggccatcgccaccgtcttcttccagctcctcccatctccatccactgtggcggctcctcacgagtcgttccttgagaccgactcggctctgccgactcggcgggtgctgttggaagggtcgacggcgattcaggagaagacggga

SEQ ID NO: 26640 - DNA, 372 bp, Glycine max
tcgagcaaaagcattgtctctgataaatgagggcattgcacagaatacaaccggaaatgtctttgtacctaaggatggtggagaaacagaggtgtctggatctcctacagagaaggcaattcttaaatgggcagtaaagttgggtatggattttgatgttataagatcaaattcaacagttctccatgtcttccccttcaattctgagaaaaagagaggtggtgttgctttgaagctgggggtcatttgataaaaacatttactgatgcatcctttcatttagagcaatctgtgaactagtacgagacatgtattcatccttgtttcaattgataactttcacttgtgaactaagttaagttgtaatagtga

SEQ ID NO: 26641 - DNA, 1043 bp, Glycine max
cccgtgccgaccgttgccccgactccggatgtgtcaaaatctccagtgattccagcgccaagcgacccgggtcaacaaacacaaaaatctccagtgattccagcgccaataggcccgggtccaacaccaaataaagcagaactcttaattggacatgaagccaccattttgaagtctttaataatgttcacagttctcatcttaatgttgtaacaccaaataaagcagaactcttaattggacatgaagccaccattttgcagtctttaataatgttcacagttctcatcttaatgttgttctagctagtagtggtatttaatataatatcgttcttaatttcattgaagactactccggatgtgtcaaaatctccctctactccaaagccaacagtttcaagtccaaccaaaacaaataatagtgcaacatggtgtgtgccaaaaggaggagtggcagatgcacagttacaagcaaatttggattatgcttgtgggcaagggattgattgtaccgcaattcaacaaggaggggcttgttttgaacctaacactttggtaaaccatgctgcatatgccatgaatctattgtatcaaacagctggacggaatccattgacttgtgatttctcgcaaacagccatgttgtcaacgaataatccaagttacaagagttgtctttatgctggaggaaatgcctaacccagaaaacaagtagataaaggagggccctttttgttgttttaattattctctcttaattgctaagaaatgttctggttcttggagtgttcatgtatggaggaggatcttcttcctctatttgtagtctccccttttttagtctttatcagaagcaaattgatgctttgtttatgtgtgatctgtgaagcgtggtttaggtatgtgtgttgttcaatcatcgtttgaaatcttggggcccattatttaagtaatatatagagaaagaggtaggggcatatcacattataaagatccttttttttttagtgaaatgtgattagtcattctaatccgttatat

SEQ ID NO: 26642 - DNA, 486 bp, Glycine max
  unsure (1)..(486): unsure at all n locations
ccccgaaaaaaaccccgggagtacagtgacaatatatgggggccccccctttttttttttttttttttggttttttttgtgtcttttttttttcccgaacatttcttagcaattatgagagaataattaaaacaacaaaaagtgccctcctttatctacntgttttgaacctaacactttggtaaaccatgctgcatatgccatgaatctattgtatcaaacagctggacggaatccattgacttgtgatttctcgcaaacagccatgttgtcaacgaataatccaagtaagttcctatttgatctatgcatagtatgtgttcatatctcaaaccttttttattctctagtgtgaagcatagaaactgaataattatgagagagattatttaagttatgagtttaggactctcagcaccacgctatacatgcattgcatgaaactttgatgttgtacgtcattcttcaaaatatcatttgatcttg

SEQ ID NO: 26643 - DNA, 289 bp, Glycine max
cctggacctgcttctgtgtgagcctttggactctacaaccctgatcaatccatgatctatgatgctggcctctccaaacagcaagaaactagtagccccgtgccgacggttgccccgactactccggatgtgtcaaaatctccctctactccaaagccaacagtttcaagtccaaccaaaacaaataatagtgcaacatggtgtgtgccaaaaggaggagtggcagatgcacagttacaagcaaatttggattatgcttgtgggcaagggattgattgtaccgcaattc

SEQ ID NO: 26644 - DNA, 285 bp, Glycine max
gatttctatggacaaagtgattgagaatagcatagcagacttgaaacattatcattctaagtgtagggatgaaattatgaatttacttggtgatggagaatccagtattaaatccataatcaatgcaattgatgaaaaagtctggagttttgatctgagtactgtaccgaatttgacccctcaaagagatgcagaaccagaagagtctgaatgtgcagatttacatataagccctcaagctaaacctgtctcagagtccaagaggaatagtccgagtgcactgtc

SEQ ID NO: 26645 - DNA, 349 bp, Glycine max
ctcgagccgttccgagctaggtttctgctccgcaaaacaggagaatcaaatttctaagcggcaggaaattgaatggccaatgcttaaaccttgtttgtccaagcgtagatgagatgataataattttttccttttttggtgtattcaatgtcatctggatgagagttaaacatttttctttttttttttccttttagatcagcatggttagtaaatcatcaaagttattgtagtaattggtttctcggccccattattattctttgattttaagtgcgtatggggagtttgcttggtttacaaatttgctacgaccgtttattgaatatcagatagggtgccttccctt

SEQ ID NO: 26646 - DNA, 491 bp, Glycine max
gtaaaagccatcaacttggaaccccttgagcaggtcaacgtttcaaaccattcgaatggaagccttgaggttggcgtatctcctccttccctggtggttggtgttttcgacagcagaatcggcgtgcaaggagggctgtggagtggcactaggctcctactacttatggcggggctccaacctcacctacatctcctccatcatggcctccagccttctgacaactccggacgacatagtcaactacaacaaggacaccgtgcccagcaaggacatcatcatcgccgaccaaagggtcaacgtccccttcccctgcgactgcatcgacggccagtttcttggccacaccttccgctatgacgttcagtcacaggacacgtacgagactgtagccaggagctggtttgccaacctcaccgacgtggcctggctgaggaggttcaatacctatcctcccgacaacattcccgacacgggaacgctgaatgtta

SEQ ID NO: 26647 - DNA, 330 bp, Glycine max
atcttgtccctacaggcttaagcaagtctgataaaccaatgatgttcttcatcaccaaaccttgtcaatctgattctctatctgtgaaggaaaagttcatccatgcaaagtatgctgagaagctttttgttcccaagccaaaggacaatcaataccgtctcttggtagcacaacaattcggggcggctggtcatgctaacgataaaaaagctgtataccgttacattgttaattctgatgttgatgttaatgctgtttatgagccaacatgcagcagctccttaacccttgctaaagtaatgctattacaagagcaaactagccatgatc

SEQ ID NO: 26648 - DNA, 743 bp, Glycine max
tgatgatggttggaatggtggtggtgatgaggggtgtgattgtattgagaatgtgaatgtgaatgagagtgagagtgataaggtgggtggagatgttgagggagttaagggtgagaggagcagtggtagagctcaacaataccctttgaggccagaggctgaagactgtgcattttatctcaaaactgggacttgcaaatttggattcaattgcaaattcaatcatccgcttaggaggaaaaaccaggctaaaaaagagaatgcgggagaaagagaagagcaggaagaaagatcaggccagacggaatgcaagtattatttaaggtctggggggtgtaagttcggaaaggcttgcaagtttaatcacacaagaggaaagagttcatcagcatcctctactgcagagcttaacttccttggcctgcctattcgtgtgggagagaaagagtgccattattacatgcgtactggctcttgtaagtttggagcaaactgcaggtttaatcatcctgatcctacagctattggaggaggtgattctccttccggttatggtaatggaagttctatttcgttgcaaggtgtatcacaatcatctatatcctcatggtcttctactagaccattaaatgaaccctgctcttttgtgccggtgatactttcacataatccaggggtttctccccaaagttctgaatggaatggataccaggcaccagtctatctatctgagaggagtctgc

SEQ ID NO: 26649 - DNA, 271 bp, Glycine max
gctattcaacacaattgtagttttattttttccttctaagttaaattttttattgatcacaagcatgaaaatcgaggtattggagcttctgaaaaacaattatgcagcaagaaacattcccaaaggggtgttcctactaccattcacttttctggtggtggtgatactacttctgatcacaaacttaaacgaatcatattcttatctatatggaagcagcgtggaaagcacagaaaactttagctgcaacatattttcaggaaattgggtg

SEQ ID NO: 26650 - DNA, 470 bp, Glycine max
gacaataataaaatgttgggtttgtaaccaaacagagaatctctgaaatggtccaaatgaccacacaccacttctctatttgtccgccaccacttcctcgatcaccagtgccactcctcctcctctctgcgctcccaacgctgcaataacacgctcactctctttcttcattcttctcttccctttcgcgccaactctgatcggtgttccttccctccttctgcctcctcctcccgcctcagatgcagactctccctcccttctcttgcatcagaggctccccatggattttcctcccgccctcaatctccttaccgaattcggttgcggcttcgtccttctccgctccctcacccgcatcttcaatcttctaggcctctttctgatgctcacattctgcttcaaggttatgtgcttcggttggaactccaagaacgcccttcgcttcctctgcgactccggcggcgtcc

SEQ ID NO: 26651 - DNA, 366 bp, Glycine max
ataatttttgcaaatgaaatgaaggtaccacgacttaagtcactgactgcaaatttgcatcgcatgggtgtatctaacactgtagtgtgtaactatgatggaaaggagcttccaaaggttttaggtgtaaatgctgttgatagagtattattggatgccccttgcagtggaactggggttatttccaaagatgagtctgttaaaacctctaaaagtctggaagatatacagaaatgtgcgcatctacaaaaggagctcattcttgcagcaattgacatggtggatgctaattcaaaatctgggggatatattgtttattctacatgctcaattatggttgccgagaatgaagcagttattgactat

SEQ ID NO: 26652 - DNA, 440 bp, Glycine max
cccatttgaaaaaaattgcattgattcctattaaaacagccaatacaccactctcaccccctaactcaaaatgtccttcttttcctcctccaacctggccaccgccaagacggtgctctcggcggcggcctcggtggctgccaccgcaatggtggtccgctccgtggcgagcgacctcctcccgtcggagctccggtcctacatcaccaacggcatccacagcatgttctggcgcttctcctccgagataaccctggtcatcgacgagttcgacggcctcctcaacaaccaaatctacgaggccgccgaaacctacctcggcgccaaaatctctcccaacacacgcagacttaaagtcagcaagcccgagacagacacaaccttcgccctcacaatggagcgcaacgagtccttaaccgacgttttcagaagcatgaaat

SEQ ID NO: 26653 - DNA, 415 bp, Glycine max
atagtttaccgtgaaaggcagagcaattgggaggggaaagcgcattgaagcttagcttaagcttacggcgggtgaaataaaagaaaggaagcaaaaaagctaagcaaaaccaccgaaaagcaacatcgccacctatatgtcgctgtctcacaacaagtctaagtgtgtctctgagagagagagacatctttatcatcatttttaaacacaccaacaacacatgttgcaccaccaaccattctctttctctctctctctgtgttttcttgtttttattgtgtctctcaatgagagattgtaatggaaaaggatcatcaaagtctgtccaaggaacatagtgactcttcagtgtgttgttggcttataggagtagtacttattcatcatctaactccttgcaattgctctgtctcca

SEQ ID NO: 26654 - DNA, 354 bp, Glycine max
cttcagtggacagggagaggtatgaagtgaagaactcacatggtgactctaccactcaaaagatgaactcttattcacaaagtgatacggatgagaaagtgcaaaaggtgtctcccccgcgcagaaaaggctataaggatgaaaaatccgaaaggcctgctaactggatgaaaaaagatgccaacggttctgatctcttcactacaagctcaaagcagcagagcacagggaattatgggactgtgtctaaggatgaaaagtctgaaaggcctgcaaactggatgaaaagggatgccaatggttctgatcttgtcactacaagctccaagcagagcaccgggagttatagcactt

SEQ ID NO: 26655 - DNA, 312 bp, Glycine max
ctcgagccgtaaggatttcagttctgaggaagattcagctcttgttcgtacgatgcaagctgttgcggttcctgttcttggaaatgtctgtcacgtgtttatgaacggattaaaccagtgtgcaggtgtatggtttagaaaaactgcactccgcgttgctgcatagacctaagggcaaacctcttcttacggtcagcaatcatgttgcttccatggatgatcctcttgttattgcttcgctgcttcctccgagtgttcttttggacgctaggaatctcagatggacgctttgcgcaactgataggtgtttta

SEQ ID NO: 26656 - DNA, 373 bp, Glycine max
ggatgcataaaccacgatggatgaaaggtggtttttccactttataaataccctattcttcagccactttgcttttattttctgatatatctccttcctgttctgctaagtggcaaagaaagaaagaaagaaaatttcaagggctgaaacatctatctttaactgtattctccctttgtttcctcaccagttgattcaggttgcaaacatggcttttccagacccatccatgtcagtttctccacagaggaagatgggaagggggaagattgagatcaagaggattgagaacactaccaatcgccaagtcacattctgcaagcgcaggaacggcttgctcaagaaagcatatgaattatctgtgctttgtgat

SEQ ID NO: 26657 - DNA, 293 bp, Glycine max
ctcagcgatacaagtgcaagacagttctcaagcaacttcccacgatttgaatcccctaaccattttagttgaaggcaaaaaacagttgttaattgacaatgatgtctctgtgtcgcaagatatggttacggagggagatgagaaacatgaatcatccagtgacaatgcagtaagtaatcctctaccatcagaaggagaaaagcaagacacagaaacaggaaaggaaccaaccaagagactttctgcagctgcaccaccgtttgatccatccacaattccagtttttggctctg

SEQ ID NO: 26658 - DNA, 653 bp, Glycine max
cactctcacttatatttagcagctcccacgttgcgtactcagtccactcaattttagattgttaagtgtctggtcccttaacttgttcttcattgtgccctttctctgagattgcatataggtttttagtgctgaagcatcaaaatggggagatattcaataccctttatgggtgttctgctactgttctgtctggtttcatcttcagaggcagaatatttgaagtataaagaccctaaggcgccactgaatgtcagaatcagtgacttgttgaagcgaatgtctctcgaagaaaagataggccagatgacacagattgaaaggagtgttgctactcctgatgtgatgaacaagtacttcattgggagtgtgctcagtgggggaagggagtgttccggcaacaaaggcatctgctgcgacctggcagcaaatggtgaatcagatgcaaaaggcagcattgtctactcgccttgggattccaatgatttatgggatagatgcaggtcatggacacaacaatgtctacaatgctaccgtttttcctcacaatgttgggcttggagttaccagggatcctgtgctcataaagaagattggagaagcaactgcccttgaagttagagctactggaattccgtatgtctttgctccat

SEQ ID NO: 26659 - DNA, 273 bp, Glycine max
ggtattttatttgctttagacttgaggctgcaactggtgcttgctatggaattttagcaaagaataattctctgggctcgaagtatccatctgaagaaaacctcctacaatgcttgagatatttatacgactctttgcttcatcctcagatgatggtaaactatgaagcagggacaaggactcttgcaatgaactcagctcagaagctttttgactgcaagcagtttgtaaaagattataatcctgagatgtggccattgtcagattcgcaga

SEQ ID NO: 26660 - DNA, 412 bp, Glycine max
  unsure (1)..(412): unsure at all n locations
caaaaacaaaacctcaatctctctttcttcctttctctccctctcttcttcattcttaggagagaaaaacacaataaaactaaaccctctcttttcttaacgccgtaacgggcanttcccaaaggcaccgtcacaaaccctcacgtgcgagtcacgtgtttttgtgaattctctttgccatggctctggaccagctttcgaatcccaacgccgttgacggtgccggtaacggcgcgacgccgtgctccgctgtggacggcggcatcgaggacgggaggccggctgcgaggctgccgcggtggacgcggcaggagattctggtgctgattcagggaaagagcgatgcggagagccggttcagaccgggccgtggaagcggttcggcgtttggttcgagcgaaccgaaatgggc

SEQ ID NO: 26661 - DNA, 271 bp, Glycine max
ataaaaatggttatgccttgaaagagggaaaacagtggaaaaccattttaagaaattttgtgacggtaaatgatatccagaagctgacttttgcttcgaggtgcatattgaacaagtattcaattgatgagctgctaagtgagagtgacaggtcaacaatgctaagggttttgaattttcatcctcgtaaaagtgagaagtttggcattggaccacaggacattaaggttggatggcatccaaattacaaggatagccggtgcttccatat

SEQ ID NO: 26662 - DNA, 485 bp, Glycine max
  unsure (1)..(485): unsure at all n locations
cccacgtgntcgcccacgcgtccgaaaacacactgacgaagacagttccttctagaattgatagtatgcctctacacattgcaatgctcccgtggctcgcagtgggtcatgtgaacccttatttggagctgtcaaagattcttgctcaaaagggacactttgttacctttataagcactccaaaaaacattgatggcatgcccaaaatcccggaaaccttacagccatccatcaaattggtgaggctacccttgccacacacagatcatcatcatcatctcccagaagatgctgagagcacaatggacattccctcaaacaaaagctattacctcaagctggcttacgaggctctccaaggccctgtatcggagttgctcaaaacttcaaagcccgattgggtttttttacgatttcgcaaccgagtggttaccaccaatagccaagagcctcaacattccctgtgcacactacaacttaaccgc

SEQ ID NO: 26663 - DNA, 617 bp, Glycine max
acactcagctaacagaaactgaattaaaagaagctaatcacaaggttttggcattagaagtggaactggagaacaaaaatcaatattgtgaagaattagagaccagatgcgttgaacttcagctccagcttgaaagcatgacaaagaagtggtcggacaatgatgcttatcagagagatgagccactgcaaactgactgggagataacttctgcttcagaaaagttggcggagtgtcaagaaaccatccttaaccttgggaagcagttgaaggccttagctgcaccaaaggatgcctccctttttgacaatgccattgctgcccaatgtcatacagttacagacacaaatattgtccccctaaaagacacgaaagtgaaaaatcgatcttctctatttgatcagatgttggctgatgatgatactaaaggaaaggttagcaaagcaagtgaaagaggctccagtcccaccagcattcctggttttaagctgcccctggaaaagattttacttttgaatggacttaaaggccaggatgacagtgccagtgttaattctatggccattgtaccagccaagaaatccagtggtcggaatttttggagaaggctatttggg

SEQ ID NO: 26664 - DNA, 324 bp, Glycine max
ctagatttgaagtggttttcatcgctaccccagccctcggcaaccttgttccaattgtggaattcgcggatctcctaaccaaacacaaccctcaattatctgcaaccgttctcactgctcaccacgccgcaacgacccctcataagcacctacgtccaatcccgcgcctcctcagccactaatctcaaactcctccacctccctacagtggacccacccacacccgaccagtaccaatccttcatcgccttcgtctccctccacatccagaatcacaaacaccaggtcaagaacgggctcctcaacctcagaaaaaacgagtca

SEQ ID NO: 26665 - DNA, 512 bp, Glycine max
ctcgagccgtgctgatgcatctgaattaaggaagacggaagtcccttcctttctaaatggatcagctaacaacttgctccaatttccaaagctagacaaggaaagaatgaagaacagttaagctcagaatctggaaccatcacttgccttgattttgcaccaaaatatacccatgaaggtgcagttctctattgttgcacttgttctattaggctccacactgtgtctttctggcctaattgtagctgacttgaactctgaccaacaagctctcttggagtttgcttcaagtgtcccacatgccccaaggctcaactggaagaaagattctgcttcaatttgcacctcatgggttggtgtgacatgcaactcaaacggcacacgtgtcgttggccttcaccttccaggaatgggattaatcggtaccattccagagaacagcataggaaaactagatgctcttagggtcctgagtcttcattctaatggacttataggaagtcttccttcta

SEQ ID NO: 26666 - DNA, 303 bp, Glycine max
tgagagtttccgtagtctgtttcgatccatcattcaaaaattcatggaggtttatcaacctgaggcagttgttctacaatgtggagctgattcattgtctggggacaggttgggttgcttcaacttgtctgtgagaggtcatgcagattgccttcgttttcctagatcgttcaatgttcctttaatggtcttgggtgggggtggatatacatctcggaatgttgcccgttgttggtgttatgcgacagcagtggcagtaggagtggagcctgataataagttgccttataatgaatattatga

SEQ ID NO: 26667 - DNA, 837 bp, Glycine max
gttgaaggttaccaatcgatcaatgatatgttaatttctaaagccacgggtccatgggggaacagaattaccttcttgcatgttccaataccgaaattaaatgaaacaagaactacaaaccctcttgaatttatttgggacacacctttacatattcaagaggaagaaacaatctctaggagttgtactcaccgggacacttttgaagatagagggcaaattgaggggacaagaggcagtagctaaacgcattcgtggcacattgacaaaatcaagtgcagtgatttcaaacttggctggaccaatacaacaaatggctttagctaaccatcctgtgaaaggcttgtatttcacattggccggtggacctgaaagtctagtcatttcagttatgagctatatgggagtcctaagtgttaccctcaaaacggaaaaagacttcatagacgaacataaattgaagttgtgcatgcaaagtgcatttgagataattctccaagcagctatggaaattcctcaggaacccaaaccttagtatttggtttggatgattggaacagcttatttcgaaaattagagagagagagagatatggagaatttcccatattatttctccggatttatcaaccccttaagtaattgcttgtctatagaatatttgtcgtatgtttggaaagatcaatacacgaggccccccttattttggatctgtttaggcctattcttgtttggaagaatcttattgtctgatctcacttggtaatcatttcttgtttgtttcccaaactaaaaagtgtccaagagttgttatatttttaattatgtagtcttttgt

SEQ ID NO: 26668 - DNA, 438 bp, Glycine max
ggccttagtctccatatttcagagtaactgtttcccaccctttttattttcgtttgctttttcattactgattagtgatcagtgaagagctggacccatgaccctttccatgttttgagagttgttaatctgaactgaagatagagattgaggaaaaccagtagctagtggttgtgtgtcaagagtgatggatagctccgaaatcaagtcaccagcagaaggctcccaacaggggacaccaggaaattcactgcgtagaaagaagctagccatatacttcattgagtctgaggatagaaggatggcctttggtcgtgggtacacagcaggatctacaccagttgatatccatggcaaatccattgttgatctttcaaagactggtggttggattgctgccttctttatatttggaaatgaaatggcagaaagaatggc

SEQ ID NO: 26669 - DNA, 518 bp, Glycine max
cttccatcaagcctggaagattatgtccacagaattggtcgaactggtcgtgcaggggctaaagggaactgcatacaccttttttacacatgccaatgccaagtttgctagggatctgattaagattttacaagatgctggtcaggttgtgagtcctgctttgtctgcattggttcggtcggctggttctggtcaatttggatcagggggaagttttcgctcaagaggacgaggaggctatggaaatcgaggtttaacgtcaggttccaatgccattcctctaggttcgaagaggccctggcagtgtctgtagttttggtgctgctttgggcaaattcttagttttacaaatgttggggtgttgaattttgaacatgcatccatttgaccacaattacacttgaaacagcacattgttagattttaggacaaaaattgatcttacttcgtctgaagtccggaaagcatgtgttatgaatgattaacatacatttatcttattttttcatagacttggt

SEQ ID NO: 26670 - DNA, 492 bp, Glycine max
aattatacattggcatcatcactactcaccagcacttgtttcaatttccctctcgtgtctctgcacacttagccaccctcaccaccaccatgttttcctctagaggcaacatggctatggcttcaccctcctcaatcttctctgtttatgcttccatgacagcctccatcatgctcctgcgttcagtaaccaacgacctcattcctcaaccatttcgtggctacctcaccaacgccttccgctacttcttcaaggctcgctgcaaagtcctcaccctcaccattgaagagtactgcagcggcatagctcgcaaccatgtctatgacgctgcagaggtttacttgtctaccaaaatcacccctgaaaatgagagactcaacatcagcaagagtccaaaggagaaaaaactcaccattaggcttgaaaagggtgaagagctagttgattggtttaatgggattaagctcaattggaaactaatctgctcagagt

SEQ ID NO: 26671 - DNA, 359 bp, Glycine max
gctgaaaagaagagactagaagaaccagcttctgaaattggtctggaacctttatgtgctatgattaacaacaatttgcgctgctatgaccttgcaatggagctaagtaatagcaccatagaagcccttccacagaactacgctgacgaaagttaattttgaagatacctgtaagggatttcttgaggtagctaaggaagctgtgcatcaaactgtcagtgtgatatttgaagatcctggtgtccaggagttactggtgaagctatatcagatacaatggagtgatgggcaggttactgagtacttggttgcaacatttggtgactattttggtgatgtggaaatgtacattggagaac

SEQ ID NO: 26672 - DNA, 282 bp, Glycine max
acaaaagaaaaaagaactacgacaagacaaaaccccccattgaagggtgtgagaagctgagaccatggaaggatgaacacaattaaccaactcccagatgatgcaatccaacagatggaaacccttgcgtggaagcatgcctttactttgatgatgtgagtcctatgataaagcccttatatcaatttgagaattcatcatcaagagtggtaaattttgatcaaattaaatccacacaacaacatgcccatcgatatggtagatttgaataccaggtattac

SEQ ID NO: 26673 - DNA, 579 bp, Glycine max
accaatggactgtttgttggacagatgtagctgaccaacctgacgaaactgctctctgtagttactgtgaagagctatgtggtgggacgttcctcagcggatcccctatatggtcttgtttgtggtgccaacgtttagtacatgttgattgtcatagtacaatgtctaatgaaacaggtgatatttgcgatttgggccaatttagaagattgatactatcaccactgtacgtgaaggaattgaactggaacttgccaggtggatttttgagttcaattactcatggggcaaatgaaatagcatcatcagttcgggcaagtattaggaaccagagcaaaaagtacaaacatggaaatgaaccatctgttgaatctgggaacagtgagagcattggtgaagtgtccaccgaaagcactggtgattctcatcaaatacataatggtcatcatgaagtgggtgaaaaaagtagctcgaataaggaggttcgacatcaagatagtgaattagataataagttggatagaaaacccactcttagacgcaattcatcaatcaatcagaaagatgaatcccactcat

SEQ ID NO: 26674 - DNA, 524 bp, Glycine max
ctctctctgttcatatatatatcgcccattgtaattgtacatggaaggaggagtacctgacgccgatatctctgccctcagagaatgcctctccctctcatggaagaatccctatgtccttcgcctcgctttctcagctggaatcggtggccttctttttggctatgacaccggagtgatatctggagctcttttgtatataagggatgaattcccagctgtagataggaagacttggcttcaggaatctatagtgagtacagcaattgctggagcaataataggtgctgcagtgggtggatggatgaacgaccgatttggaagaagaaaatcaatccttgtagctgatgtcctctttatagttgggtcagcagtaatggctgcagcacctgtccctgctgttctcatcataggtcgagtttttgttggccttggtgttggaatggcttcaatggcatctcctctctacatttctgaggcttcccccaccaaagttcggggagcccttgtagctctcaacagtt

SEQ ID NO: 26675 - DNA, 297 bp, Glycine max
agatggcattggtcaaccgatctagctttctgggtttcagattgagttggaagccaactaattaatagtacctccaaaaaaaaaccatgtcccgtgactgtgattcccttcctgaaaacaccattgttgtggggtgtggggcggcgggtgtggatttcttagctaccgttgcaacttatcccaagccagatgacaaaatcagaagcacttccttcaagattcaaggaggtggcaatgcaggtaatgcgttaacctgcaccgcacgcttaggcctcaaaccaagaatcatctccaagg

SEQ ID NO: 26676 - DNA, 396 bp, Glycine max
tttgtctgatttagcaaagcatctagctacagctgtttcatagatttccagtatacacggtcgattgggtgaatatggtggcattcacgaattgctggaaaagtataatgttccatttgttggcacaggatcaaaggagtgctgccaagcatttgacaagcataaagcatcattggagctcaggaagcatggattcatgacagtacccagtttcttagttcaggggtatgaaacagacaaatcagaactatcagaatggtttgaaaagcaccagctggacccagacttagggaaagttgtggtaaaaccaacaagaggtgggtcaagcattggtgttggagttgcatatggtgtgaatgcttctcttgtaaaagccaatgacattatgtctgaggg

SEQ ID NO: 26677 - DNA, 489 bp, Glycine max
tctcgagccgattcggctcgagattggccagatttttttctaagaaacgaaaggcggtgacacttgtatgtggaagaaagtagcaccgtctcttctccactttagctaaactcccgaaacgcagctgcgccactcgtttctctggcctcgccgtgattgctaccactccgttcgcttcatccatgtgctgttgtatgggttgaacgaggaagataagaaattgcttcgggaatggagtgggacagcaattccgatctgagcggggacgaagaggaggaagggttcgtcttcaacgacgccgacgacgctggccctctcccgttccctttccccgtcgtcgaaaacctcctccaaacggcgccctgcggcttcgtcgtcaccgacgcgctcgatcctgaccaccctatcatttacgtcaacaccgtcttcgagattgtcaccggctactgcgccgaggacgtcctcggtcggaattgccgtttcttgcag

SEQ ID NO: 26678 - DNA, 273 bp, Glycine max
gtcggctgaggcagcgcttccttttgttggacttgcagtggccatgtttatgttttactctttagtccctgttctgcttaagatcaatggttctacaatgctaaatttgtctctgttgacctcagacatgtgggctgtcttaattcgtatttttgcgtaccatgagaaggttgattggatgtactttgtgtcatttggtgccgttaccattgggctcataatctattcaggaggggacagagatgatgatcaacaccctccaaacgctgctat

SEQ ID NO: 26679 - DNA, 332 bp, Glycine max
cattttagcaccacagaattgcccggtatctagatatgcatagataaagaggaattggatttcactggcgaacgttatgaatacttgcactattattatgaattccatgccagttccttctcctttgttgataaagtcctttaaaacatttccatcgttcaaatgctgcagcaagagctcagatgagaagggaagtgaagatgtgaaggacacattatctggggtggtggacgagcaagttgaagagttcttgagtagaaaagagaacaaggttttgctggatggcttagagaaggcgtcgcagagggttgagatggctaagagagaacttg

SEQ ID NO: 26680 - DNA, 307 bp, Glycine max
ataacatatatacacaactacataaagtcaaggcaaaccatatcatgaaaaaccaacttatgttcttatccatgttcctttcgtttctgattcttccaaccgctagccaaaaacatgcatgtggctctgccaagactagcaactttccattttgtgacacttcactatcttatgaggacagggcaaaggacttggtgtcacgcttaacacttcaagaaaagacacaacaactagtaaacccttctgcaggtatttcgcggcttggtgttcctgcttatgaatggtggtcagaggctcttcatggtgt

SEQ ID NO: 26681 - DNA, 446 bp, Glycine max
gaaatgttatctgtttctaacttaactacttgttcgagtttgatacatagtaatcataacaataatagcggttttatctcttctttgttttgctgtgtagtttcatttttcaaccattcttatattgatttttgtgttggaagcagctcgaattgtgagtgacggctgttttgattgttgattgctttgaatcactgagataacagggagtaggagtgcttgttcttgttgtattgtgtgtacaaaacctgaggttattctattcaagttgtctttggatgtcagtcatgtgcagcaagaaaatatagccaaaaaattcattggtgttggagattctgtagaatttgacaaaggtgtagcctgtccaaggttacctatttaattttgggttggaaatttgaagatacataaaaatgtcaatggctgctccaagttccctattgaag

SEQ ID NO: 26682 - DNA, 310 bp, Glycine max
attagcatggaattccgaacggacagatagttgtgtaagaaagagctcctgagccaataaaacaatctctctgtcttcccttgaagaaggagaaatggggggaaattaaaagggaaaaaggcatataaccggaaacaatcgcgtttcgaattcaaaatcactcgtttctcgcttctcctttcgttcgacgcatgaatgcaggggcttcaccgcttcagacttcagtagcagagtgacagaaattagaaactcaaaaaagtaggcgcaccgagtgagaaaccctggaacgtgaaaacgacaacagcgccaa

SEQ ID NO: 26683 - DNA, 383 bp, Glycine max
atttgttgttgtgaacaagcatcttcttcatgacttgactgaaatgggactgtggtctcctacattaaagaataagattatctatgaagatggctcagttcagaaaattccagaaatacctgctgacctgaagaatatatacaaaactgtttgggagattaaacaaaggacattggtagatatggctgctgatcgaggatgctacatagatcagagccaaagcttaaatattcacatggatcaacccaactttggaaaactgacttccttgcatttttatgcatggtccaaggtagcaacacagtacttatgcttgcctgtgaagtgagataaatttatgtaatatgtgcaaatatacagttgggttcaattgtttaatgtgg

SEQ ID NO: 26684 - DNA, 287 bp, Glycine max
cacacgacaaaataaaaataaaaactttcccactttgcttcttcgtcttcttcaacgacaaaataaagtggggtttcgccttcttctccaaaatatgaggaagaagctagatactcgtttccctgcggctaggattaagaaaattatgcaagctcgacgaggatgtagggaagattgcaatggctgtgcctcttctagtctctaaagcactagagctatttctgcaagatttgtgtgatcaaacatatgagataactttgaggacgggggcaaagactatgaatgct

SEQ ID NO: 26685 - DNA, 406 bp, Glycine max
ttttgtttaccatcttctcttcctcactccttttttcaaacctcgaaaccaaacaagggttttcttctctttccccccctcctgattctccattttccctctatttcacactccaattttctcctccttttcatattttttcgcttctctgattctcaccaaaaccattttttcgtcttctgtattcaagttccctggaattctcaattcgggggcgtgttcgtttctacacatgtttggatgaagagacgcaacaggaccctatgtgttgttgttctccggtaccgatgattgtttatggctgaaagttgctgacttggttactgggttttgctgacccaagtggtagaagaagggtagggggaggaatcggagtgattgttgaaaaagtggggtttagggtttt

SEQ ID NO: 26686 - DNA, 261 bp, Glycine max
  unsure (1)..(261): unsure at all n locations
ctggcctcttctacgttgcaagttgatcttgctgatttgtttttgacagtatcaggttacatttggaggcactcccaatgtacgtataaaagcaggccttacggttagaggtgatttaaggtttcacagaacagcagggtctaaatatggtcctagtgtggtagtgctcaaagttttttccaccgccaaaaggccaacacgcttgcgcttgataagaccttattgcagtttgaggtcacaananaaccaagggaaaggata

SEQ ID NO: 26687 - DNA, 639 bp, Glycine max
cccacgcgttcgcccacgcgtccggaaaacattaagaagtgaggtacgctaaaaagagtagggtttacagaaaggagatagcgttagtgaactgaagaaggtaacttaggagggaaacggaacgataaagtatttgattttgcacgcaaatgcgaatgggatggcacatgttcttctacgtcgccctcctctgcttcgtgtcatcatggcctctcgcttcatcacctcctcttcctttcacatgcgcctttcttcattcccttcctctactctctccaaaaccaggacgagttttcctctgagaaagtttttggctccctgttgttcggttccaaatgcggtcactccaagggcgtttatgtcttctatctcggccaccgaagcttttctcaatagtgaaagtcccacagcttatagttctgatcaaattcaggtgcttgaaggcttggaccctgtgaggaaaaggcccgggatgtatattggaagcaccggcccacgagggttgcaccatttggtgtatgaaattttggataatgctgctgatgaagctcaagctgggtttgcttgcaagattgatgtatgtttacttgcggatgattctgtgagcatcacagacaatggtcgcgggattcctactga

SEQ ID NO: 26688 - DNA, 540 bp, Glycine max
ctttgatggtcattgggtttagctagccgcgctggcacgcacgcacgcacacagttgttaccagccaccggctctgtgttctttcgttgccccgtctagcttcttcaacttcacccacacacccaagacgcaccgtgtcacagttccctcctgaatcgcatcttccccaacacccacaatcaaaccctaatttctcaaaatgtggtctgcaacatcctccccttccatcttcctcccccattcccttcttcgccccctccctcgccgtcccctctgcgcctccctctcttgggcctctcccgacccacccgacggtctcggcggctgggccctccccgacatcccggcccagcccaacaacaacaacaaagttgcagcgtttccttcttatgccattgtgggattcggcacttcgctcgcttttgttctcgccgtctttgctgcctcaaggaaaggttttatttttcgattcccgaggccgatgtggagcgctgtggagacccgacacgatcaaaacgacgctcgggagtttgacgtttc

SEQ ID NO: 26689 - DNA, 279 bp, Glycine max
aggaatataaaagcctaactgccatttacttgaaactactccatttgcttcttatagtgcttgtagagagggatagtgaaatgttgaagaatgttttctcattgtcatttctctactgttaataaaagttggcaagtgctaaattgctaaaaaggtgagacttttttagccaacaaatccttcacagtatttcatcgtttgctatcttcaagcatatcaaatgccaagatcaagggggtcagagttgcctcaaaggcagtctccacgaggtgcacatca

SEQ ID NO: 26690 - DNA, 258 bp, Glycine max
ttgctcttcatgtttctagtgtttctaaagtggacggggctcacctgttcatacagtttattcatttgaacttgcatttttgctagcaggtgagacttttttagccaacacatccttcacagtattccatcgtttgctatcttcaagcatatcagatgccaagatcaagcgggtctgagttgcctcaaaggcagtctccacgaggtccacatcatcatcggacatcaagttctgactctgatccattgcatcatcggc

SEQ ID NO: 26691 - DNA, 408 bp, Glycine max
gtttcaatgggaatgggaatgggcatggagtgtctgcagttgctcctgtgaatgaggaaaaggagggggaggagggaaatggggatgttaaggtcaatgtgtttccagaaggggaggaggttggtgatggagggtggcagggaccgttgggattgaagtgcgggctcaaagaaaatccggggattgtacctcttatctattatggcctgcagcactatctatcgttggctggttctcttgtattgattccattagtcatggtacctgtcatgggtggaacagataaggatactgctaccgtaatttctacaatactgtttctttctggcatcacaactatactgcactcctactttggtacgcgactgcctttagttcaagggagctcatttgtgtatttagcaccag

SEQ ID NO: 26692 - DNA, 467 bp, Glycine max
gaaaattccaatctcgatgcaacttggaacttgcagatctagataaggttgaagaggaagaggacattcttgcacttagaatgttgatacagcagcatcaacgtcacacaaatagtctgctagccaaagaagtgcttgatgattttgagaatcttcttcctaaatttatcaaggtgttccctagggagtataaacgtgttcttgcaagtatgaagtctgaggcaacctccaaagatgcattggtgcatgctgctaaagacgaccaagatgatgaagcacaagcagtggagaaggatgcttttgaagagcttaagacactggtgatggcatctttgaatgaggaaccgagtcaggctgaatcacccaagaggccaagtcgagtcactggtgccattaaacatagagggtttgtcgcttatgagcggatgggtgttcagtatacggatcctaatgttcgcatgactgat

SEQ ID NO: 26693 - DNA, 546 bp, Glycine max
agtgtttctcctttcatgcactttttgtcaagagagaaaaaaatatggggaaaacactttggttctttttggttttcacatgccttttgattcctctagcagttgcagattggaacatactgaagctgcagacacaagatggattgaagatcagcctgaagaactattgtgaaagctggaggatgaatgtggagctgcacaacattagggacttccaagttgtgcctgaagagtgcactgaatacattggaaaatatgttaagtccacacagtacaaagtagactcacagagggcatctgaagagtgcttggtttaccttagcaccagctgtaatttgaagaaagatggattggatgcttggatttttgacattgatgataccctgctttcaactgttccttcctacaagaataatctatatgggggaaagacactgaatgtgacatctctagaggaatggatgcgcaagggcaatgcacctgctcttgatcactcattgaacctatacaatgaacttaaatccaggggggtgcaaatcattttgg

SEQ ID NO: 26694 - DNA, 455 bp, Glycine max
cgacgctagtgatgaacccagttcttaaaattttgatacctcatccccaaaagctaaagctaattcatgggagggacaaaggtcgtcgcccctaattttgattatatcactaatcaatgtgtgctctccagcgcactctctcacaccaaagactgcttttttttctttttttttttagtttattgattattgatggccgataggtctaacaacaactctaagattaagataaactctagtagtagtatcttaaaatttagaattttgggcctaaataaaattcaaaaagaaagagttgtctttaagatatttagactaaataaggtggaatctccaacagcagtgatggatcaatctggggagtggtagcagtatgcagggggaacgaacaaagtaagaaagacaaatgacagagacgccaatttgggttatttttgaaacagaaagtattttta

SEQ ID NO: 26695 - DNA, 509 bp, Glycine max
caacaacagcaactcttcaaatctttgtcatcaccatgtagaataataataaggcgcaacaaggcaaaggtgcagcctcgtatctgaaactcttcagtgctcaactcgaccttctcaatctcttctctcatgctctagtttttggaattggtttactcattggtgtcacactcactttctttgtcaagaacttctccttaatcaactttccaatccaaaaattctccttctcatccaatagcctcatgatcaaaccaccaacttctttgtctccctctcatccaatcatctccaacatctcattattaacatcgaacaaccaaacaaaaaacgaatctcagtacttggaaggattagtggtatctgactctcggttaagacaccacgacaaaaccaaaccttcgtcttccgattcgtcgtcgatcaacagaaaaagggttatgaacttcaacagagtagggttgagggaattcttgaagccccccatggccatgcatgatatgagtgat

SEQ ID NO: 26696 - DNA, 451 bp, Glycine max
aacgctgatgagttttggatttgctgtgacatatgtgataggtggttccatggaaagtgtgttaagattacccctgcaaaggctgagagcataaagcaatataaatgtccatcatgcagcctgaggcggggcaggccttagactgaaagagccgatggaatgggtacatgtgaggtgagtgttgtttcatggctgacaagatactgtaattttgttacatcacttacagaagttaatgtaatgggcatagtatcgatgctcaagggcaaatttatcagggattaagtttgtttttccagatgaaccattggtgcatgccacagggtatagaatagaacatgacaaattttaattttatgattagtttatatttagtagaatatttgcttgaactttaaatattgtaatttttttatttttaacattgtttaagaaaacaaaccttttcaac

SEQ ID NO: 26697 - DNA, 549 bp, Glycine max
gtaacctcgaagcgcagtaacactagtaaccactgattcattgttgtgttgtgaaaattgaaaaagcttcattcataaaaaatggcttacaatttctgaaacaccccttaaccatctcacgaggtttgcagaacgagacaaccttaacttttctttctcggctacgaaatccgaagctcccattgtcggtgagatgcgaagacaatgttcagattccaacttctttccggagctatgctactgcaaaatcagaaaaggttttgcaagtgaagaagaaaaagcggctggatgaaatatgtgttgaaaaatatcagcaatatagtagatccatcatccagtcatggattttgcaaggaaaagtatatgtggatgggaaggtgataaataaagctggtacccctgtgcctggcaaagctgttgtggagataatagctgatgttcccaaatatgtatgtagagctggacataagttagacgctgccgttgaactgcttggtgttgatgttgctggtaaagtagctcttgattctgggctttcaactggaggat

SEQ ID NO: 26698 - DNA, 296 bp, Glycine max
tgggagttgtgagtctgatgagatttctgtggagcaaattgtgttggagctcaacaacagagtcattgatgggaagaacagcgaagtcacatttgatgactttccttattacttaagtgatagaatccgatttgtgttaacaagcactggatatgtttatttaaaacaagacttttccaagcacttgaggaaccttcgtccagcaagcagagctattttgctttctggacctgcagaaccttatcagcaaaatcttgcccgagctttagcacattacttcaaatcaaagttactgt

SEQ ID NO: 26699 - DNA, 335 bp, Glycine max
atttcttcccatcctttcttccttcaccactttgaacttgaacttagttgggggacttggctgagttagactgttatgtttaaattgtagtcatggtggtgtttttggctgtgaatttgctcatatgtgctaattatgtgttcttgtttgatgttactctacagaagttaaaatggcccaagaaactttcctattcacatctgaatcagtgaacgaggggcaccctgacaagctctgtgcaccagatctccgatgctgtgctcgatgcatgcttggagcaggaccctgacagcaaagttgcctgtgaaacctgcaccaagaccaacatggtgatg

SEQ ID NO: 26700 - DNA, 374 bp, Glycine max
gaagacattcccttttgttgtcactgaaggacctgatggatatccattaattcatgcacggtccttgggtgaagctagaacatttacacccacccaagtatttggactgatgttatcaaaccttaaagaaatagccgagaaaaatctgaatgctgccgttgttgattgctgcattggaattccactttattttactgaacttcagaggagggcggtcttggatgctgctactattgctggtttgcatccacttcgtctgtttcatgaaacaactgcaactgcattggcttatggaatttataagaccgatcttcctgaaaatgatcaactgaatgttgcctttgatgatgttggacatgctagcatgcaagtat

SEQ ID NO: 26701 - DNA, 690 bp, Glycine max
attgtcttgagctggaagcttcggtttctctctctctctctttctctttctcttagggttttcactttcaccaatttctccttctcttccgatctacgcccaaaggtatcacctcgcgtgcattcgttcctaatcctttcaaactctccgttctcccatctttaacttgtttaagctgctacgtttaattgaattcgccgtttccaaattgtcttttcatttctttcttttgttctgcaattagacattgctagggttctggagtactggattagctcattaaggattgagtactccatctatcttctgtcttcatggataaagacaaatctctaggtttgccacctccgtctggacgttattctggttactcgtccaccggaagtgttttcaacgtgaaatctgaaccgtccccgtcgtcgtcgaccacgttgtatccgccattggctccgggaaccaccagttccgagtctagccattttggacatggattgtccacggattctagtggttttagtcatgatattagcagaatgcctgataatcccccgagaaatagaggtcataggcgtgctcattcggagattctcactttaccggatgatattagcttcgacagtgaccttggtgttgttggaggtggtgatggtccttccttctccgatgatgccgaggaggacttgctggcca

SEQ ID NO: 26702 - DNA, 309 bp, Glycine max
cgcagacagacaaagtgagaagagtatggtctaatgtcttgagctggaagcttcggtttctctccattttctcttagggttttcactttcacccatttctcttctctttcgatctgcgcccaaagttagacattgctagggttttggagtagtggattagctcttttaggattaaggagtgtttctatcttcatggataaagacaaatctctaggtttgccacctccgtctggacgttattccggttactcgcccaccagaagtgttttcaatgtgaaatctgagccgtcgccgtcgtcatcgtcgacg

SEQ ID NO: 26703 - DNA, 367 bp, Glycine max
gccgcatcagagttgttttagctccacaaaagcataagcatactgccaatagaagcttccatgttaattctagcaacttgagtcactcatttcaaaggagtgaaagaactcagcctgtgaaagcttcagagatttcaggggactgggaacaagaaactgagtcaaaaataattgctaactgcaaagacctaagtgctacttcaaagacaatatatgcttcaaacttggcatacagtatggagaaggatgatatggagtttccttttcaaaaattgtggagacattgttgatatccgcctacatacagatcataacgggcggttcacaggccatggacatgttgagtttgcaaccacagaagctgcac

SEQ ID NO: 26704 - DNA, 333 bp, Glycine max
cttatttgacagatacagcagtcattagttcagttggtcaagataactttgcagcagaaacgagttcccatcgaattaatggaacaaatggctcaatttcaagattctattccacaaatctgaaattacttgatgcctttgatgatgagtatggggggagttgttggttcatccggataggttaccatccaacccatatacctttgcatctgtgttgcgtttgtctctttctcagtggaaaaagatgggaaagaagggaatttggcttaagtgcccttagaacaatctgatcttgttccaattgctgtgaaggaaggcttccaataccaccat

SEQ ID NO: 26705 - DNA, 235 bp, Glycine max
atcattagaaggtcatggacacgtcaaatcctgctgtatttgtaaatgctcagttgattcccaactttatagggaagaaagtaagagcagtggttcaggtgagccaatgtgatggtggggttgccacagcaaaatccactgatgactgtcaattaaccataaaagggttgccacaagtccctcttatgaattatattgaggtcattggcattgctgaaagtaacagttctattga

SEQ ID NO: 26706 - DNA, 697 bp, Glycine max
ctaataattcatggcacgaagaccagccagaaggctcttatagcaaagacatacttggttgatggaggaaattctcattccttgccgggttgggaaacagaattggaagaatatgtaggtcttgttgaagactttttcttgcttcctcaaattattgggaacttaatctggcatatcaattgcaaaccactcagaaaactatattttattggaatcactctggtcagacttcttcctcacatatatgactagcattcgagctccagtttcaaatccttacttttatgaggaatctgaatttgtcaatcctaatttggatttttactcaaaatttggggatattgccattcctgtgactgctatcgttcttgcaattgtggtctatattcaacaaaggtggggctatgagaagttgagtcagtttctgacatttgggcggtataagattcttccaactttcagataccaaaggttgtcttctagggctggtgaatctgaactagttcctggtatcaatggtgctgctgctgcaaaagagaatgagcaagttgatgtagaatgatgtacactttagaattactgacaacagcttttgtacacccataatatgaaaagtaggcaagagtttgggtggatgtactattatgtatgaggttgctcacatattcaataatcaagtgaattttgttgtggtttt

SEQ ID NO: 26707 - DNA, 870 bp, Glycine max
ttttccgctcacgcgtccgcgacagagtatttattaattaacagctcagacagaagaagattgccgagaaatggggtctgcagtattatcacaaacaataccagcagtcaaagtttcaaggctcttcatataccctatcaagtcatgccgtggaatttctgtttcctatgcccccctcactcctgctggacttcgatgggatcgagaatgggtggtggtgaattcccaagggagggcatgcactcaaagagttgatccaaagcttgctttggttgaggttgaattgccaaatgatgcacttgttgaagactttgaacctacaagcgattcttacatggtgttgaaagcacctgggatgaaacctctcaatatttgtttgagtaaacaacatgaagtaacagatgctgtcacagtctgggaatggactgggtctgcgtgggatgaagggagctgaagccatctcaagtggttctcagattttttaggaaaagcccctgtcaacttagtccgcttcaattcttgcttcaggaaggttagacaagttggatcctggattatgttcgaaggacaggcatccggaccctatttctctgacggttatccattcttacttttatctcaggaatcattggatgcactaaacgagcttctaaaggaacgcatacctattaatcgtttcagacccaatatccttgttgaaggttgtgatccatattctgaggacttgtggacagagatcaagataagcaggttttcatttcttggtgtcaaactgtgctcccgttgtaaggtacctacaatcaatcaagagactgggatagctggatctgagccaactgagactcttatgaaaactaggctggcaaagtc

SEQ ID NO: 26708 - DNA, 344 bp, Glycine max
tgagaaagcatagaaggagaacaaaggaagattctgttgctgttgccccttttcttcctttctcaattttcacattctattctattctgcactctgcactcactcactcactcagtcatgtttcaaccgcccactcccactggcatcaacaagcattctcttcatacaaatccactatccatccaaggagcttcttcagcactggtgccagtggatttgaatgaaggcactgttgatgcaaaggaaagtgtgcaaaatggagaaatgctacaagtgcaatccatcttccgtccctcccagaaactggaagatgatctacgtatgctagggacaaaaattaagca

SEQ ID NO: 26709 - DNA, 1359 bp, Glycine max
gaatgatcttaagagagtttctactgagaattggaagtcttctggaaagcctactggtggtttccacaaaaagaatatggttggaacactcatttacatggcacctgaaatattaagaaaagagttacatacagaaaagtcagatgtatacagttttgggatatcaatcaatgaactcctaactggtgttgtgccatacactgatcttcgtacagaagcgcaggctcacacagtgcttgagatgaactatactgagcagcaattaacagcagctgtcgtttctgatggattacggcctgtccttgctgccgaggacttgggtataccgtcaagattattatcaatgattaaaaaatgctgggatgcagatcctaataacagacctgcttttgatgacattgttgaggaacttgatttagttatggagcatggtaagttaaagaacgcagaagatattcatatcagaccttataacttgcatgttgttcaacctgcgggcaagactgatcactttaaggcttatcaagagagttttagctggttcactcgtggcgaacttttggccaggagtgcctctagtgcaaatgattctggtttgataactaggtgcgagtcttctgacaagccttcagcataccacccaacaatgtcttggggatcttatgctacctgtgggagaagggagactatggaggatacacatttcattcttccccatatttgtgatgaaaaggatgcctatgcttttggtatctttgatggccataggggtgcagcagctgctgccttttcttctagagctgtaccagcagttttgcagacttcagatttcatgggcagtcctgctaatgcactagcggaagcattcattaagacagatgctgccttcagaaaagagcttgattcctatcgcaaatccaacagatgtatccagaaggattggcatcctgggtgtacagcaattgctattcttatagtcagaaacaagctatttgttgctaacattggtgattgcagggtaatcttatgtcgtgctggtaatccaattgctctaagtaaggatcatgttgcaagctgtcttcaagagagagagcgtgttattcggcaggggggccaagtacattggcaagttgatacttggagggttggtcttcctgcacttcaggttactcgttctattggtgatgatgatttgaagcctgctgtaactgcagaacctgagataactgagagtaccttgtgcccagaggatgaatttctggtcatggctagcgatggcctgtgggatgccataagcagtatggaggtcataaatataataaaagatactgttaaagagcctggaatgtgctccaagag

SEQ ID NO: 26710 - DNA, 361 bp, Glycine max
gaagtgaaggcagaaggaagaaggtgagagagatccagaacgatcacgcccattggagtagcaaatcgcgtttcgattctcacgacggaagaaagcacggcgcagctcaaaaaaccaaatggaagcacaaagctctcagcatacacaagttattgagatcagtggtgattttcctgatggtggaaggaagatttgtggggaagcaccgtgtgggtttgcagatgctggatccatctctaaggattctgaagaaagatcaacttctatgcgaaagcttttcatggcagtggtcctttgagttattttcatgactgttgaagtggttggtggcatcaaagctcacagtcttgctgtattgact

SEQ ID NO: 26711 - DNA, 305 bp, Glycine max
gtcatgtcttttatggcgaacaaaagtgaggaaatactgaagaaatgtctcaaaaagacgaatactctcaacaagactctgaaacggagaagtcaccggaaaagcccaagtctcttgatcatacacctgtggctgagggaaacgacacccttgatactgataacacaatgcatatggaacctgaagataacacaacataagaagagaataaagtggttaaggaagaagatggtgagcatacagagtcagcggatggaacagttgcacagaacttggatcatggaaaggaagaaaaccatttactg

SEQ ID NO: 26712 - DNA, 591 bp, Glycine max
ccagctgagaacggcgtccaagtccgaagtgtattcccttattgtttctgtcgttgcatgtgtaatttcgatgcacatttgttttgttttcactcgtgaaacgatgctgaagcaaactttttattttcaattgttctacatcagtgtagtttgtactcttgaattataggtttcatatctcattcctatagtttggtttttttgtataccgataggagcaaaaggggttggatgtgatgattataaaataattcctcgttctgaatgctaatgccatggcatgacagacacgtttacacccatagaatatgagcactgcccccgtttgtttacataactggttttttttttatgttcttacggttttgcttggtttttccataattattctgatccctgtgtgggaattgaaaaatgcttggtttgcccatattttgacatgtctgctttgtgtttagctaactcctcatattgattgagtggtgtttaaatccctaaccttacatcatagtggtttgggttacgcacaccatcatatttcaattgtaacatttcggatttttttatgaagaattggatggtgttaagttt

SEQ ID NO: 26713 - DNA, 284 bp, Glycine max
cagtgggcaattttggcacactgttgttgctctccctttcttcgccaactcattcccattccttccttctcccaacaaaaacgagtttgttagattcatcactacaccttcacattgcaacctaaaaatctctcagtttaacggtttccgcttttgctacgtgtttcttttctgcgcgttccacctctctcagctagtgtccattgtagccacaacacaagctcttacagcggttttaagaaatatcagctaaggctttgctggacagcaacattgggctgaac

SEQ ID NO: 26714 - DNA, 559 bp, Glycine max
cccgacgcaggagacagcaagacagagcgaatcgcgtttacgcaaccccgggacgcgaggaacaccaacagcagcaacccgctactgctgcagtgtggtggcagttgccatgcttgcaagttagaaagaaagaaacagtgctcgctcgaatttcgagaacgaaagagaggaagaaaaaatgtacagcagtggtggcgctgaagccgaatcggaatctgaatctgagcgcaatagaatgggtgatgataaggaagaacagggctcctcgttcaagagctgggccaaacaaacggaggagagttatcagctgcagctcgctcttgctcttcgtctttcttctcattcagcttcttcttcggatcacccctcttcttcggcccagacgctcacgcaccggatttgggtagatggttgcttgcaatactctgataaaattatagatggattctacttaatccatgggatggatgtatatacatggactataagtactgatctgcagaatgttggtatgattccggcatttgaatcactgatgtcaattgaacctagcgatgac

SEQ ID NO: 26715 - DNA, 740 bp, Glycine max
aaagaccattgggaaagggaggcagcattggctggattggtaaatcgtttggatcgactttatccattagagggaaatggagatgtacagtcacggaattggcataatgatggcaagctagcagtgtcaaccagtgcagaagacaaccttgagactaaaatggttgatttgaccagctatactgtggagttttctactagtattagcggctcgaaagatggatcaacaacatctgaatcaactgtctgcagtgtgtgcaaggaaggagactctaaaaatagacttacaagggacacagctgacagtgagatcacttcaaagagtacaatggattctgggcttgaagaacaaggacttgattgtcacaagtcatatgcaattgacataaatacggtgattaataaagttgaagatactttttccaatgaagatttcaatacagatgaagcacttagtgaaggtgtcaaacctgaggactccagtaaatcaataatgtccagtgaagacagcaacggtaatgataaagatgagttaattgatgagatcacatcaaagagtactctagattctgtgcatgaaaaacaaggatttacagctgaacattttcagaagtcagatgtgattgacacaagtgcagtgtctacaaagattgaagataattttttcagtgaagatagaacagaagcagagagggaaaatgccaaacctgaggactccagaaaatcaatagtgtcaagtga

SEQ ID NO: 26716 - DNA, 524 bp, Glycine max
caagaattgagcacacttgatgaagccaaactgaaggagaaaggaagagccttccatgatatgttcttgaccaagttgtcattgttgcttaaagggacagttgttgcacctcctgataagtttggtgaaacactgcaagacgaacgaattaatggaggtgcatttattggtgctgatggtgttcagttccctcacaagctaatacctaatgcagggatgcgtctttatggtggtgcacaatatcatcgggcaatggctgaatttcgttttttgggtggaggaatcaagtgtcccccaattactcgggaagaaattgtaaacgcatgtggagttgaagacattcatgatggaacaaactactctaggactgcttgtgtaattgctgttgcgaaggctcgtgacacatttgaaccttttcttcatcagttggggtccagactgttgtatatactcaagagattgcttccgatctctgtatttcttcttcagaaagatagtgaatatctaagtcgccatgaggtgtt

SEQ ID NO: 26717 - DNA, 440 bp, Glycine max
acaacacagtgatcgcgcacacactttcaaagagcttccaccttccactggcgtgctcatcaaaacgccaccgtattgctcacaagccaatgccttgctcttccctcacttccactggcgataacagcagcagcagcagcagcagcaacaagaagaaggatggttcttctctccgcgagttcaagctgaacgaatcaaccttcttagcttcgctcatgcctaagaaagagattggcgtcgatcgcttcttcgacgctcatcccgaatacgacggtcgcggcgctctcatcgctatcttcgattctggtgtagaccccgctgcggatggattacagattacctcagatgggaaaccaaaagttctcgatgtcattgattgcacagggagtggtgatattgatacctcaaaggtggtgaaggccgattctgatggtcgtatt

SEQ ID NO: 26718 - DNA, 438 bp, Glycine max
ccgaatcgaacaggagcaagcaaagtcaaagaaaaagagagaggagagagagaaacaacaatcatcatcggccagaagcgaacacgacagacacatctgagaaaccaaacctgatagagatgtcgagtggaggaaaccttagttgcgtgttggtagctgtggatggcagcgaggaaagcatgaacgcgctgcgttgggcactgaacaacctcaagctccgatcccctgcacccgattccaccgatgctccttccttcaccgtcttccacgtccaatccccgccctccatcgccactggcctcaatcccggtgccatccccttcggtggccccagtgatctcgaagttcctgctttcactgcagccattgaagcgcaccaaaagcgcatcaccaacgccgtactcgatcacgccctcggaatttgctccgaattcaacc

SEQ ID NO: 26719 - DNA, 309 bp, Glycine max
ggctcgagggtttggcagagaacagaaattgggaaattcctcaatcttttgaactcgtcaagtgcgtgcaacactgtacaataatcttcatcgtccttgaaattcccaatcccctgtagtggtagtaagttgctagcaatcgagaatgggagggcacggaggtctcaacattctcccccaaaagcgatggaacgtttacaatttcgacaacagagagaaggtccgtcgcgacgaagagcaagccgccagggaggagcagctcaagcgtgaagagacccggaagcgcgacgccgagctccgcctcgaccg

SEQ ID NO: 26720 - DNA, 338 bp, Glycine max
gagaattgattgaacgagtcgaggagtggaaaaagaatatgaatacgataacgacgacgacgatgacgatgagtgtattaaacatctatggctatggctatggctctggtgttgtagctgttgttgtgttccttatattattgctttggcagcgtcacagatttttcttcgcttcatctccgtcgtctccatccacttcattactgctcttcgattctatcaattcaaactcaaactccagaagcagaacctcaaattttgtgacagatgcagatttgaaatttttaatggagattttggatgagaagctcgacagtgataaatgggaggatgttcta

SEQ ID NO: 26721 - DNA, 266 bp, Glycine max
cctcgagccgattcggctcgaggaggagttgagtgaacgagtcgacgagtggacaaagaatatgaatacgacgatgatgagtgcattaaacatctatggctatgtcgttgcggctgttgttgtgttccttatattattgctttggcagcggaacagatttttcttcgcttcatctccgtcgtctccatccgcttccttactgctttccgattctatcaattcaaactcaagctccagatgcagaacctcaaattttgtgacagatg

SEQ ID NO: 26722 - DNA, 270 bp, Glycine max
gattttcttacttttttattgtcactttgactcatgaatgaattcctttatcctcttacatcacaactgaagtgagatatcaacattcaacaccccaaattctagttatagagaaagctaagttctttgatttgccttccacccccttaatttccgtaattgatcaattgggaaatttggtctttgggggattttgaggattagggttagtatttgcttgattgggaagtctttatgtaacctgagtggaatggttctgtgtctgcatgt

SEQ ID NO: 26723 - DNA, 147 bp, Glycine max
cagttcggatggaggcaaaactattcatccatagggatatagaaccatcgaacatcttgctcggggatgatatgcgggccatagtgtcagacttcggattggttcggcttgctccagaaggaaaggcctcatttgagactaggcttg

SEQ ID NO: 26724 - DNA, 273 bp, Glycine max
cctcgagcttaaacttttccctacaccaaaatcatctcttcactaatggaaggtggactaaagggaagctcattacaagatatgaagcttttgtttgttgaaatgggtgttggctatgaccttcatggtcaggacataacagctgccgcaatgagagcatgcagagatgcaatttctgccaattcaattccagctttccgtaaaggtagcatccctggtgttacatctgatcacatgaaattacatgtcaaactgggggtgcctatcctctgc

SEQ ID NO: 26725 - DNA, 534 bp, Glycine max
  unsure (1)..(534): unsure at all n locations
nnnnnnnnnnnnnnnnnnnnnnnnnntaggtttcaatctagaatagtgtttccccccggctgcaggtgcaaatatgcggggagggatganatggaatagggtatcgagtttgagagaagaaaaagagagaatcctgaagccatggaagaagatgacactgatgaggtccctgagataaagcctgcccactttgaggagtctatgaagtttgctcgccggagtgtcagcgacgcagacataaggaaataccaactctttgctcagaccttgcaacagtctcggggatttggatctgagtttcggtttccagatcaaaatgagaacactgcagcaggtgcctcagaccctttctcatctgttacagctgagggagatgatgatttgtacagttagtagccatgtgagttgagtaatgtggttgattttcactatttctgcaatgacttgtagcaaatatcatgatagttttggttttgctgagggtcaatgtttctgtttcatgttaaacgagcagtctatgatgttctttttggt

SEQ ID NO: 26726 - DNA, 529 bp, Glycine max
gtacctgaaagtgttgctgaaccagaggttacagctgatgcgactaatggagatgttactggggaacctcgagccccactaacatctgcccaaaaacttgcagcctccgcatctgcatctgctgaaactgctgctgatccttttgctcctgaagctaaattcttcaccgagattagagtattgaatcgagatgttcggattgtcctggaaggtgttgataagttcaacaatttgattgggtcagtgtattatcctgatggtgactcagcaaaagacctggcattggagcttgtggaaaatggttttgccaaatatgttgaatggagtgcaaatatgatggaagaagaggcaaaacggaagctgaagacttcagagcttcaggctaagaaaaacaggttaaagatttggacaaactatgtaccaccggcatcaaattcaaaggcaatacatgaccagaattttacaggaaaggtggctgaggttgttagtggagattgcatcattgttgctgatgatttgattccgtatg

SEQ ID NO: 26727 - DNA, 275 bp, Glycine max
attgcgtttgagagagaaggagaggctgtgacggtagcagtgccaccaccgtgacagtgcaactgtgcgcgaaggagcagggatatcggagatgagagtgtgagagacagagaagggagggagagaggaacgtaaccaacaaccactactcagaggctgaagtttcgacattgttgacttaaacaatggggtccaattcgttgaaggattatctgaaaaggtacgaaagtaacactgaagaagaaaagaagacaaataagaagaagaagcagaag

SEQ ID NO: 26728 - DNA, 306 bp, Glycine max
ggtttgcatggtgttggagtacttggacttcattctagcacaagggtacctcttgagactgattcaaatgtgtcttccactgtcacttgccactcatgtggagagcaattcaacaaatgggaagctgctgaagctcatcatctctccaagcatgctgttactgaacttgtggaaggtgattcatcaaggaaaatagtggagataatatgcaggaccagctggttgaagtctgagaaccaatgcggtagaattgagagagttttgaaagtgcataacatgcaaaagacactggctaggtttgaggag

SEQ ID NO: 26729 - DNA, 261 bp, Glycine max
cttgtttctcaacaaggagagattgccatcaggattgatgaaaacatggatgatacattggcaaatgtagagggggcgcaaggggctttgttgaagtatctgaacagcatatcttctaataggtggctgatgttcaagattcccttggtatgaatattttttcttatggtttccttatttttggtggcatagtcattctaatgacagagaattgataacgaggacacacatgacgcccttattgctggtgataagcgtttt

SEQ ID NO: 26730 - DNA, 581 bp, Glycine max
atcaaaacgaggcctgactgaacgttttgaattgtttgttaataagcatgaactttgcaatgcatatactgaattgaatgaccctgtagtacaacgacaaagatttgcagaacaactcaaggatcgacaatcaggtgatgatgaagcaatggccttcgatgaaacattttgtacggctctagagtatggtttgccacctactggtggttggggtttgggaattgatcgtttgaccatgttactgacagactcacagaatattaaggaggttcttctcttccctgccatgaaacctcaagactgagccttcagtcaaagctatgtttaaatctcagcagtaaaatcatacacttcaacaggtatgttcttcctcaaactgttatattccacatagcactaactaggttttggtatttctgtaagcttctcaaccacaatagtactgctatttgccgcaattgataaatgattattcagctctgtacatatttatttttaatttttaatgaaaatgactgtagaaaattgttattatttgattatccagagttcaggtgttaattcatatctacttgtataat

SEQ ID NO: 26731 - DNA, 587 bp, Glycine max
ctcaatatgagcaggatgctgattttgttcatataaagatgttgcgtaataatacctttgttactgtaacagattctaaaggaaatataaaactcagtggctctgccggtccattgaaagacctgaaatcagggcaaaagctttctaggtatgctgccgaggcaaccgcggaagttgttggccgaaaggctaggggcttgggattgaaatctgttgtcatgaaagtgaatggatttactcattttaggagaaaaaggaatgcaataatgagctggaaggagggctttactgctggttctcgaggggatagaaatccaattgtatacattgaagatactacaagaaaaccccataatggttgcagactcccaaagaaacgacgaatttaggtgtttgcaattgaggtggttgaagaaagcattatttaactgggatgaagacacaatttaggtgctgttttgggcacatgatgatatttttgtttagcacatttcattatgattctagttgttacttgtagactgcgttttctgcctcttgtttacagtttgtacaattttgaagattcaataaccagaattttctgt

SEQ ID NO: 26732 - DNA, 425 bp, Glycine max
cgagacccttgtacgtgcattcacttgacaaaatctccgagcttgttacttgaatatctggagctagcttctgggctttagatcctcttctttcttctttgcattagggttaaagatctattttttccatcattgtgaaagctatttgcttttgactagtagaagggtacctagctaaacccctgtttttacatcttcactagtttcatagtttaagaagttagtagcaccagtgaaagggtttgaagttgaggaggaaaaattatcacaattgacaaacctgttagtaaatgcatggatgggagagaaggcatggcatttcctggtggctctgctccatattacatgcagcatagaggaggaggggttggtgggtctgttccaggaaccgggacacagagtggagggtttcaaccaccctctgg

SEQ ID NO: 26733 - DNA, 349 bp, Glycine max
cattttaacaatatcttgagataagcaagccaaatctttagctcttctgaaccaactttcatataacaaccttgcagcagtcatttgattcaaaaggaatcataatggaagaggagcaaaaactggttaaagggaccacaaatttggagggaagtgaaagtgaggccaaacttgagctcacagtggatgaagtggtggaggagtatgtggggtccttagggttctctcagatggtgcatgtgttcttggtgtcattggcatggatatttgatgctcagagtactttggccacaatcttcagtgatgctcaaccacctgcttggaggtgcaaaactggttgtgtcatggt

SEQ ID NO: 26734 - DNA, 268 bp, Glycine max
cctcactagcttagtttctatatatgcgttatttgtctctgagtactttttctctcttgtgcattacctttgtggtcatggcagcctccgtggatcccctagtggttggtcgcgtgatcggcgatgtggtagacatgttcattccttcagtcaacatgtccgtttactttgggtcgaagcacgtcacaaatggctgtgacatcaagccatccattgccatcagccctcctaagctcaccctcaccggcaacatggataacctctacac

SEQ ID NO: 26735 - DNA, 256 bp, Glycine max
cagaaacgcacattcaaaacttccatattaacgcagcacgtggtctttttcttcttcatctatgcctaatgtaacccactacaaacatagttctgaaaccgaaaacttgaaatccatcatcaatccacagttagcaaccacgaaacctaatctctcccaatgaaacgctcccttcgccccctattcctactcctcctcatcatcatcctcttcgccgccatgctcacctccagcgacatcctgcgccatggcaccc

SEQ ID NO: 26736 - DNA, 379 bp, Glycine max
tctttttgaaacaaaaaatttggctcgaacagctctcggatttttcaaacccacccatcactttctctctctaacacctttttctctctctaaagagttgcaatatcggaggctttctttacgtgttgaagagttttcagagtcagctctgtgaagaagccttagaaggttggtttcaaacttcttaatattgcaagacacgatggtagcaaaaatccggcaaagtgctaccgagtctcctaatccaaaacccgaggttggagagattgacaccagccctccttttcagtctgttaaagatgcagtctctctatttggtgaaggtgctttctttggtgaaaaacctatctttaggaaggcaaaaccttattctgctgag

SEQ ID NO: 26737 - DNA, 283 bp, Glycine max
cggctcgggactttggaaaggcttattctccgctctcgtctgaaacctgaaaccctttgttcttcgtcggcggaagcatgtcatcgtcatcatcaagcaacgcctacgacgtgccatgggtagaaaagtaccgtcccagcaaggtcgccgacatcgtcggcaacgaggacgccgtctccaggctccaagtcatcgctcgcgacggcaacatgcccaatctcattttatccggtcctcccggaaccggcaaaaccactagcattctcgccctcgcgcacgagct

SEQ ID NO: 26738 - DNA, 217 bp, Glycine max
aagaaacacgaacggaacaacatggacgtggcggcgccgcgtgacgcaggacaaccaggcggttctgtcgagcaaagcccagcgcaactggtggcccgtgccatagcccccgtcacgacggatttcctccgtcctcctcccgttcgctcttcctctccagacgacggcgtttcgcttcccaatgataccaaccagacctctgttctcgccaaggaga

SEQ ID NO: 26739 - DNA, 239 bp, Glycine max
cacaatgctcccttaccatacccttgaaggagcacaagttgcactaggcagaggactaacccttgctgagacaatatggttcaaatactctgccaacaaacctgattttgttcttcattgccacaacactctattcttgtgcttattttactctatagctccaattcctttcgtattaatggagcttagtgggtatgagaagctaaacaaacacaaaattcagccctcggttaagagat

SEQ ID NO: 26740 - DNA, 336 bp, Glycine max
atcgcaccgaattcggctcgaggagagcatcgcgcagttcaagacgtgtgatagccacagaggatgggtcatatgcgcagttgcaagtttgtattcattctttcatctctatcatcaaattccttctcaaacgagctctttcatgtccaaagcacgaactgcgttccattccgcagccgcgaaagcgaagcactgttctcatggacttcaaaatcgatctagtttcttgatgaactgaagcatataaagtggagacctccacatataggaacaaagcagggttggcaagatagaacaaacaacatgcgaagagggagaaaggcagtcgaagtaata

SEQ ID NO: 26741 - DNA, 425 bp, Glycine max
aagattttggcactatcgacatacttgagcactcgcttgctaatggaacagaggtcagcaaaccattgtctgagacatctcggaaaggatatcttgctgccctgtctgcatcaagttactcttatatttctttactcagacactttcttccaatcatgaacccagatggatctgcaatttctcttacatacattgcttcagaaaggatcattcctggatatggtggtggtatgagttctgcaaaagctgctttagaaagtgatacaagagtgcttgcttttgaagctggtagaaagaaaagaatcagagtcaatactatatctgcaggtccattgggaagccgtgcagcaaaagcaattggcttcattgacatgatgattgactattcgtttaccaatgcaccactgacaaaagaactacatgct

SEQ ID NO: 26742 - DNA, 325 bp, Glycine max
atattgaagaagtttcttatttgttagcatttagcgtgtagcaacgagaaaggatttggtttaggggagaagaaagaaaagaaatggggaaaaggaagtgatttggtttggaaaatcaaatggaatcagctacgaatttgagggttagggatttcatagcaaaggaagttgctgattgggacgacgaattgattgcagttgctcgattcaaagccttttccggtcaaagatgcgattgggaacccaccttccgcttctggaaacacttcatcatcaaaatcgccacccattttggcctcctcctcattcgaccctcccaggtcaa

SEQ ID NO: 26743 - DNA, 255 bp, Glycine max
atcgggccaaatttccacataaattcgcatacacttcaaccatccaacaactaatttggtaaatattactacataacttaaatacccaacatggcatttccgtaaattatcaacaaaccaagggctaatcactagtcacaccctttacaaatatctccaacctctccacagttccactcaacctacaccacccaagtacaatagacacgtaatcaaaaccatgcagatacgaacctgccactccatcaccaccca

SEQ ID NO: 26744 - DNA, 837 bp, Glycine max
tggatgcagaagaaggcttgcacctgtcagaggctctgatcaagagagaaagaaaggagtcccatggactgaagaggaacacagacgttttctgatgggacttttgaagtatggtaaaggagattggagaaatatctctcgcaattttgtggtcacaaagactccaacccaagttgctagccatgcacaaaagtactacataaggcaaaaggtttctggaggcaaagataaaaggagacctagcatccatgatataaccactgttaatcttacagaaacttctgcatcagacaagaacaagcctcgcctgtgattgcaccacagcagaagctgaatagcatgtcaaaagtacagctggactggactagtagccactacaatgatggatcactcatggttttcaacccaaatagtgatgccttgtttgtgtcatcttcacctgatgtcacttctatggccctgaaaatgcaagggcaagatctctatgactgtgctttacatgaggcttatgccaaggtaaaagttccaggtttcagcatggctcctagagacttcaataatgaagctgtttttggtattcatgcactgtaatgccaaccctgatgatgttaaacaaagaaaattccacgtcatagatcattgttctgtaggattaatgtagatgaccataagctagctagctactttgttcatggttagtgaacaacctaaaagaaaactagaataatgtttcaatccttaaaaactgaatttggaatgaacttattttaaagttttcctctttatgtctatttctttggtgacccgatcagaataaatatggaaaaccattcaggc

SEQ ID NO: 26745 - DNA, 452 bp, Glycine max
cccatgcgtccgcgtccttctctgcggtgccactgcgacactcgctggccccaaaatgaccatcattaacatgaaccccccgcagagaactctctccggttcgtcacagagccctagatctccgtcttcgtcgtcgcaaccttttctctccgtctccgtcaccgatcccgttaagctcggcaatggcgtccaagcctatatctcctaccgcgtcatcaccaaaacaaattttcctgaataccaaggacctgagaagattgtcatccgacgttacagtgactttgtctggttacgtgatcgcctttttgagaagtacaaaggcattttcattccccctcttccagagaaaagtgctgtagagaaatttcgtttcagtgctgaatttattgaaatgaggcggcaagcattggatgtatttgtaaataggatagcatcacatcatgaactaaaac

SEQ ID NO: 26746 - DNA, 445 bp, Glycine max
atacaaaccacgttcttctctgcggtgccactgcgacactcgctggccccaaaatgaccatcattaacatgaaccccccggtaattacaattctgccctcactctaattcacaaatacctagcaccaccctcactccttttttttttcccttcttccgaaccttttgctttttcggggtttgcatgttgacggttacttggcggtattatgggacatcaataccagcagggaactctctccggttcgtcgcagagccctagatctccgtcttcgtcgtcgcaaccttttctctccgtctccgtcaccgatcccgttaagctcggcaatggcgtccaagcctatatctcctaccgcgtcatcaccaaaacaaattttcctgaataccaaggacctgagaagattgtcatccgacgttacagtgactttgtctggttacgtgatcgc

SEQ ID NO: 26747 - DNA, 701 bp, Glycine max
  unsure (1)..(701): unsure at all n locations
gcttcttcttggatgaaacaaaaggccacgatatagcttatgttcaatttccacacaacataaaaaattaagccaagaatgaccattatgcaaattcttatcttgtgagcaataagtttgagctagctggaatatgtggatatggagcagccttgttttgtggaactgggtgtttacatcgaagagaaagtctttcgggagcttacttgaaagattacaaagcaaaatgggacagcaagccaaaaagaaacgataatagaacaattgatgaattgaatgaagcatccaaggttcttgccacttgcacctatgaggagagcactcaatgggggaaagagaagggattagtatatggtattcccgtggaagacattgctactggccttgtaatctcatgcaggggttggaaatcgatttattacaaccctgaaaggaaggctctcgtgggcatagctccaacaaccttggatgtagcatgtcttcaacatatgaggtggtcagaaggcatgttccaagttttcttctccaggtattgccctttcattcatgggcatggcaagatacactatggtgtacaaatgggatattgcacttacctcttatgggctcccatgtctctgcctactctctgttatgtcattgcttctcctatctgcctacttcatggcattccgctgttcacacagntttcaagcatatgg

SEQ ID NO: 26748 - DNA, 643 bp, Glycine max
atttagggtattaactgatgatttgccactttgtgcctccgcttccgatgaaatgatcgagatagaaggcagagtgtcatctgtaaagacggcacttgttgcggtctcccaacggcttcaagattgtccctctgttaatagaataaagatgatgggaaacaaaccttatgggatagttcagtatgagactttagatgcacttcctcgtgagattttaactgcagctccacgtgggactttaactgtagtaccacatgagactgtagatcatcttttgcttaggagctctgcactttctactttatccagttcctctaacagctatgcctccagagttcattcactgccagcagtagttaatagagtctcatccttggaaccaaaagcacttcagcaggaagtctccttcagaatactttgttcaaatgatagagttggaggagttattggaaagggaggcaatattgttagagctcttcagagtgagccaggggcctcaatagtattggtcctttggtagctgagtgcgaggatcgattaattactattgctgcttcagagaatcctgagtcaagatattcaccagcacaaaaggctgctgtgcttgttttctccaggtccattgaggttggttttgagaagg

SEQ ID NO: 26749 - DNA, 261 bp, Glycine max
ttcttcttcttctcactcttcaccaatggccaaagagcgagcgaagaaactctacgtagccctactcggaaactacgccgccgaactcaaactcctcctcaccactctcctccgtcctctgtgccgtcgccactctcctccagttcctcccttcccgcttcaccatctccgcctccgacctccgcgtctgcatttcacgcgtcactcaaactacccaaactatccctaactcaactaatgcgacgtcaccaccagtaacag

SEQ ID NO: 26750 - DNA, 471 bp, Glycine max
taactgtacacatttttaagtttctaacagtcatttgtttcaggtactggatgagaatgcaaaggggaaactctctcaattttgcctaattccggcagaaaatattgttactctttatgatgttcccaacatctggcacattcctttgcttttaatatatcagaaggcacatgaagcaatgtttaaagtgctgaaccttcatggtgtaactaaagagcctaatttagaggaatggacttgcacagctgaatctagtgatttgctttatgaaccagttcgtatagcctcagaggggaaatatacgtgcctttcagattcctacctctccgttctaaaggccttactgcatgcttatgttgattgccaaaagaaacttggtgtggactggattccagcttgcaaccttgaaagtgcaactgcgaaagagaatcctgatgcttctaaggcagcatggaagttattaaagggtgc

SEQ ID NO: 26751 - DNA, 428 bp, Glycine max
tgacgacagaaggggtactaaaaaagttgagtgtgaggtgtgaagtgaattttaacagtgataattggtaaatggggacccaaactatggggactcatggtggtggtggagacagtaatgggaaacagtcaccactccagcctctggtgccgcgaaactcaatgtacagtctcacacttgatgaggttcagaatcaattgggcgatttggggaagccgctaactagtatgaacattgatgagcttctaaaaaatgtgtggaccgctgaggcaagtcagaccattggtatggacaatgagggcacagcacaagctagtcaagcttctctgcagcgtcaggctagtctgtcattaaccggtgcactaagcaagaagactgtagatgaggtttggagagatatccaacaaaacaaaatcgtaggggagaag

SEQ ID NO: 26752 - DNA, 396 bp, Glycine max
  unsure (1)..(396): unsure at all n locations
gaaccttcgagactaccgtgttgtagagctcatggctaaacccaacaccctctttctcccccaccacgctgacgctgattttctcctccttgtccttagcgggagagccttaattaacttggtgaaacccgacgacagagacccctactaccttgaccgtggttatgcacattgaatccctgcaggaaccactgtctatttggttaacccggacaagaagaaagatctcagagtgattaaactcgccatacccgttaacaaacctggcaattttgaggatttcttcctatctagcactcaagaccagcaattctacntgcaaggcttcagcgagaatattctggaggcttccttcaataccaaattcgaggagataaacagggttttgtttggtgg

SEQ ID NO: 26753 - DNA, 297 bp, Glycine max
caaaaacaaacctctcttctctttctctctctctctctctccgcaaattgctgaacctcttccgtcctcacttcaacgcagaagcgttcgtactttctagaacttggcgtcattcaggggaggaagtttggctacttactacgatattgatattcaacgccaatggttggattccagagtgaccataagcccgggaacaagtgcaatggtaattctaatagttttccggttccggatcgtcatgtacgacttatgagaggaagagagctaaaaaaaagcaccaaggcatctcctgat

SEQ ID NO: 26754 - DNA, 524 bp, Glycine max
actatgtttattgattttgggctggcgaaagacagggatggaggttgctatctgaggtatgatgatacaaatcctgaagcagaaaagaaagagtatattgatcacattgaagaaattgttcagtggatgggttggaaaccattcaagattacttacacaagtgattacttccaagaattgtacgaattagcagtggagctcataaaaaagggtcatgcttatgttgatcatcagacacctgatgagataaaggagcatagggagaagaaattgaacagtccttggagagacaggccaatttcagagtcattgaagctctttgaggatatgaaaaatggcagtatagaagaaggaaaagccacacttagaatgaagcaagacatgcagagtgataactacaatatgtatgaccttattgcatatagaattaagtttaccccacaccctcatgctggagacaaatggtgtatctatccaagttatgattatgcacattgcattgtggattctctagagaatatcac

SEQ ID NO: 26755 - DNA, 277 bp, Glycine max
atttgtgaatccataacgtcaggtccttgtcatgctattgacataacgagagaggctataagggagggggctgatgccgtcattgctgttggaggtgatggaactcttcatgaggttgttaatgggtttttctgggctggaaaacctgttgttagtcaagtgaaagagtctacgcattcaactgctcttggtctcatccccttgggaactggttctgattttgcaagaacatttgggtggttagtttttgtttgtatcttcattctccttgtgcatc

SEQ ID NO: 26756 - DNA, 456 bp, Glycine max
gctcacacacaatgcaagttcttcaggctccatcttcttctccatatttctctatccaaacctcaaaagcaccacaacgaacatggggtttgcttccttcttctgtgattgtaaactcttcacttttttccacccttcatttttctcttcactcccaaagggaccagcatttattgtggaccccccataaaagggtcactaccagagctgcttctgttgaagttggagattcttcagtatcaactggaacggctgaggatgatgtgttgaaagccttgtctcagatcattgatccagactttggaacagatattgatacatgtggatttgtgaaagatctgctgattgataaagctctaggagaagtgtcgcttcggctagagctcactacaccagcatgtgcaatcaaggacgtggtaaatgacacaaattgccattgtttgagctatatctgat

SEQ ID NO: 26757 - DNA, 274 bp, Glycine max
ccttcaacatccttgctgcttgctatagatcgcctcggggagaaagaaagattgcgccgcaaagtgatggtctttcacaagcttcctgatcatgaccttacgttggaagcagcatggcctcaattatttgttgaccacaaaggaaaatattgggatgtccctgagtctttatctgttgatttgtcatcccttgtgtccgaatctggattgcgataccactttgggatgcataaaaacggtggtaatccccaggcaatgaatgcaaccgatggta

SEQ ID NO: 26758 - DNA, 525 bp, Glycine max
tgttggtgctaggaaagatgaatttgatgctgaagttgagacccaggggaggatcaggcacaagaatattatgaggtggttgtggtgttgttgcaacagtgaggatcagaggctcttggtttatgaatatatgccaaatgggagtttggctgatttgttgaagggtaacaacaaaagtcttttggatttgcccactaggtataaaattgctgtggatgctgctgaggggctttcttatttgcatcatgattgtgtccctcccattgtccaggatgtgaaatccaacaacatattggttgatgcagagtttgtggcataaattgcagattttggagttgccaaaatggttactggagtcagccaaaggacatgatcaatgtctgtgattgcaggatcctatggctacattgcaccagaatacgcgtacactcagggtgaatgagaagtgtgacatatatagctttggcgtggtcctttggagttagtaactggaagacccccaattgatccagagtatggtgaaag

SEQ ID NO: 26759 - DNA, 244 bp, Glycine max
ctttgtcgcacccactacctattcactcgaaccctagcctcttcacttcctttgcaccttgaccaaccggactcgaaccctagcctaccctcctcacttcctttgcaccttgacacgcacgttgtgcttttaagcttgttttaatgggtcaatgttcccggccaacttgttttctacttctttcacgggtccaagttggcggcttgtccgcacaacaccactccactgccactgcttctccggt

SEQ ID NO: 26760 - DNA, 861 bp, Glycine max
ggtactgtaatcccatcactcaatgaaacttttgttgttgatcccactgtctcaccatatgagtcaaggatcatatttttctataaaacatgggatccttacggcgtgttgtcaaattactctcctcatcccattcaaatgcctgatgaaaatggtgattgtgtgacttggatgagtgttgagcattactaccaggctcacaagtgtattcgggtggatgatcctttggcacaagattgtgttgaaaggattaaatctgcaataagtccagaagaagctgcaagaataggaaggtcaatgcaaaagcagaaaccttatctgataaggtctgactgggacaacataaagatcgatgtcatgtacagggcactgaaatgcaagttctcaatctacccgcaattgaattctatgctgctctctactgctggttctgttctagttgaggcttcgccacatgatctgttttggggtggaggccgagacggtgaaggcttaaattatcttggtaggctgttgatgaaattgagatcagagtttcttggggagtcttcatcatcaagtgagacccctagtttaactgtatagtgtcttcaaagggaggagtaacaatattttgatgtagaactactaccaaaacggcttgttgtgcaacttgtcccgggcaaaaaaccatgtcaccgtcttgttagtttactgatcaagccttctgttttgcttaagagggactttcattcaagtcttcaaccatgttccaagtttcttttatgtggcgtttcccattttgattattaatacttaattgtactttaggtactcttactattgtcatttctcaattttttctcttcattctgttttcac

SEQ ID NO: 26761 - DNA, 473 bp, Glycine max
gtttcaggtactttgaccgtgatgttgaatgcatctttaagtttttcaggaaaaggttcaatctttcttttcaagaaagcatagatgataatgatgattctgatgaagggagagatgaagctggaaaaccctgtttttcttcaatagaaagaagtgctggttttctagatagggaacttgctgccagtggctttactagaaagaatgaagaagatattcaaaggttcattgaaggcggggcagaaagtgatacaaattcagatagtgaaggggttgacttagtggaagacctgaatgaagcagacactgtagatggtgattcttcacatttgtcagtggaagagctgaatgaagcagacactgtagatgatgattcttcacatttgttagaacagaatgagggatacaaatgtcaagggaaagaggagagttgtgaagcacgtgaaagcagtggatctgaaaggaagttgtaa

SEQ ID NO: 26762 - DNA, 414 bp, Glycine max
atttatggcctccatggaaataacagtagagcattcacacaccccttgaaaaccgtgtgttttcaatcaaagccaaggtcctcaccgatgagatgaggggttggaaccaatttgagaccatctacgaggaagaacaggagctttcttcaacctcctctccctttctttcaccatcttcctcctcttctcctcctcctcctccatcactccactccatagtcaatgcttggtctcttgactccgggtctgaaccagatgtcttgatatgtgttcaaggaacctcttttcgtctgcacaaggttcgtttgatatcacgaagttcatacctcaaacgacacctaacgggagtttctgacttaactctctccccgccggtaaacttaacggccaagactttcgccgcggtagccgaat

SEQ ID NO: 26763 - DNA, 273 bp, Glycine max
ctcacactcactcacttttgcaactcaaaagcttcatacccaaagcaaagtagtacttagcttatagccagtgaggaacactaactgcattatgtaaggattgcatttttgctcccacaaggacaacctcatttgtcaaatatggattacgaaaggatccaaaagcctcagggtggtgggggattttcaccgggaaaattgaggagcatgctactgggtgtggagaagaagaggaaagaagaggaagagcttgattctactttcaccacgaga

SEQ ID NO: 26764 - DNA, 370 bp, Glycine max
gagactgtgaaggaaagcaagcgagagtgatggaaggtgtgcttcaagggaaatattaatggcaaagtgtatggtggcagatacacattgaagaagtgcaataaaagggagattgtttcagttgggttttttgtgcaatcacaaacaacaccataaattaatctccaaatcgcatgtgtagtgcttcatcatcagctcataaatctaaagcaggcaatcatgatcttgatgctgaaggttgaaaagggtctgtgagctgcagcagcttaattgatctcaaccactcccttcctcaccattaatactctgaaatagagagagccttccttcgtttcttttttctcttaacaagtcgttttccacctttctt

SEQ ID NO: 26765 - DNA, 1081 bp, Glycine max
cattcacaggctcgacagcagttgggaagaaattgatggctggttcagctgaaacagttaaaaaagtatctcttgaactcggcggcaatgcaccttgcatagtttttgatgatgctgacctggatgttgcagtaaaaggaactcttgcagcaaagttccgtaacagtggacaaacatgtgtttgtgcaaatagaattattgtgcaagaaggtatatatgagaagtttgcaaatgctttacgtgatactgttcagaatatgaaagttggggatggtttcagtgaaggtgtggcacagggtcctctaatcaatgaagctgctgtcaaaaaggttgagtccttaattcatgatgctacatcaaagggggcaaaagtaattcttgggggtaaaagacatagccttggatttactttttatgaacccacggtcatcagtgatgtcaacagtgatatgcgcatatcaagagaggaagcatttggacctgttgcaccccttttgagattcaaaactgaagaggatgctatcagaattgctaacgacactaatgcaggtttgggttcatacatatttacaaacagtatccaacgatcatggcgtgttgctgaggctctagaatatggacttgtgggtgttaacgaaggagtaatttcaactgaggtggctccattcggtggttttaaacagtccggcctcggaagagaaggctccaaatatgggatggatgaatatttagagatcaagtatgtttgcttgggaaacatgcacaaagcttgaacaaaggtatacatgaggcagtggctagctagagggaaaagtacttaccttcagtgagtttgttgaagaatatgcatatagctgcacacgtgttgtatacaaataagggcaggcttgcaaaggacctcctcatttttctttgtttttctttttcttttcattttcattgctttctttttatggtcttttagaatattaaaaaaatgcactatagaaggtaccgcacgaggttaacaaaaactatgaaaatagcctttgacccttacaaaccatacaaaaaaataaagagcagacagccagacctacct

SEQ ID NO: 26766 - DNA, 442 bp, Glycine max
gggttcatatgtatttacaaacagtatccactgatcatggcgtgtttctaaggctcttgaatatggattagtgggtgttaataaaggagtaatttcaactgaggtggctccatttggtggttttaaacagtctggccttggaagagaaggctccaaatatgggatggatgaatctttagagatcaagtatgtgtgcttcggaaacatgaccaaagaatgaagcccgagccagtgccaagcaaaatagggaggagtcaccttgcgtttcttagttgaagaatatgcatatagctgctcccgtgttgtatacaaataagtgctggcttgcaaagggcctcctcatttttctgtttggttctttttgctttcctttttcattctctttatttttcccagatttttaccccattaaaaaatgcactgtgaaaggtacgaggttagt

SEQ ID NO: 26767 - DNA, 312 bp, Glycine max
agcgttccatgctcgccgagttgtcacccacccaagccgagacgctcctcggagccgccaccaagctgctcaacccggacgacatggttcacctcctcctcgaagccggcttgagaataatccccaatcccaataatgcccctgatcaagtacacgtggcagatacaaatacaaacataaatgagggagaagaaatatttgaggcttcgaggaacggacacgtggcggaagtggaatcgctgttacggagatgtggtgggagtgtgaagtaccgtgaccagtatggtctgacggcggttcacgcggcggctt

SEQ ID NO: 26768 - DNA, 809 bp, Glycine max
tggtggggctacaagtatggttttgtctctggtggatttcttggagcagaatcaaagaagaaaaagtccatgatttctggtaaggcagagaggactgcatttttcgaagaggatcaagaaaacctttataatctagtccaggagaaatccacaacggggaagcaaggactaggcatcaaggacagacccaagaaagtagctggctgctattttcagggtaaaaagaaatcctttgatgatagtgatgaagattctgctgataacgattccctggaacaagcagcaaatgatgacttaattaaagtagttaagattgttgaaggcaaagtgaagctgaaaaagttgtgcaaacagattttacaacaggtgcctggagaatcattgaaactgaaacagctcaaagttcttattgatgaacattcatcttcaattttgtctgatttttcttcaagaagagagtctgttgcttacttgaagcaaaagctgacaggtagtaggaagttttatatcgaagggaaaagagtgcgattggcatcaaagagaagctgaaattttgatacttctttttcttggcctcttctaattcattatattttaggagagaaagggggcagtttggaatttagtctaaggtaaatttgcattggttagctttatcaacgtatgttgtagtattaaatagcattttatgaaatttaataattttttcttttaagtttaaattttaaaagtgcatgtgtatcctggattgaatattgaaattacctggttcctcgtatagccaatactgaatgggactggacatgtcc

SEQ ID NO: 26769 - DNA, 309 bp, Glycine max
cattcctgcaatgagatgccaaatactgtgttggatattgaacgtacgatctttaaagatttgataactgaggttgtgagaggtgaagtagcaaaccattctggtagacattgcaggcaactggtgtcctacaattaggaattttggactaagctgccaaagcagtttgagggaagaaagtatatctagttctaggctttcatatttcacccttctactctagctgcacatgatatagtttgatgggtggtaataagctgtttaattggcaggttcacatgttttgtataaattattgcacatttatgc

SEQ ID NO: 26770 - DNA, 263 bp, Glycine max
gcggcgaacgggacatgagggcaccgcacatatttgaatttgcatattatcgagaaaggagctagtatgcatcgcttccatatcggggacaaattgtacaccagggtttttcatagggttctgagctccatctctcttcttacctttcactttttgactatttttccatgaaccctatggaaaacaacagcagcacaaatgccacatcaaaactaccccgcagagcaaaaagaaaaaagaagggtctgggagtaaatgttgct

SEQ ID NO: 26771 - DNA, 375 bp, Glycine max
ggcggctcgagctcgagcgctgttacatatatgtcacctgagaggcttcgaactgaaagctattctgatccagctgatatttggagccttggtcttgcactttttgagtgtgggacaggagaattcccgtatactgcaaatgaaggtcctgtcaatcttatgttgcagatcctaggatgatccatcaccatcaccattgagaaacaagttttcacctgaattctgctcttttgtggatgcttgcttacaaaaggatccagatactaggccaacagcagagcagctgctttcgcacccctttatcacaaagcatgatgatgccaaggttgatttggcaggatttgttcgatacgtttttgcacctacacaaagatt

SEQ ID NO: 26772 - DNA, 390 bp, Glycine max
ggttttgaatgcattttgatctatggcttcggaagtagccccatcttccggggatttgttgaaatgttgcaactgtggatgcggttgctccttggtagctcattcttcggggacatggatgcgatccgttaaacggaagcttgatgagttcaaaatggacggccaattacccattcctgcgtttgcgcggattgaagttgagaatgaatgtgtggccttacgcgagatggtcagcatgcagcagagaaccattcaggatttgaatgctgagttggacgaggagaggaattcttcgtccacagcggccaatgaggccatgtcgatgatattgaggctgcagagggagaaggcggaggttcaaatggaggcgcgccaattcaagcgttttgc

SEQ ID NO: 26773 - DNA, 410 bp, Glycine max
acaagtgagagtgtgagattctgttctgagtcatctttgtgttgtaatcgcgaaaccttttccgatgaaaattcagccaatcgactctcaggttctggccgaggggactcggcttgagctagccaagccggttgtgaagtcacgactgaagcggctcctcgagcgccaattctctggcgttctcagaaattcggcgccggaaaagattgccggaggcgatgaaccgcttaacggctccaatgatttcgagccgagctcggcgtgtttggcgaaaatggtgcagagtttcatcgaggagagtcacgagaagcactccgcttcacaccaccgcaactgatgtaactgcttcaacaggaactacgacgacagctcggacgaagactcgaactcgttcggcgactccaatttct

SEQ ID NO: 26774 - DNA, 264 bp, Glycine max
agacgaccctaaacatcatgattcgcagttcatttcttgttgttttgctaacctcccttttactccttctcctcatcccaagatcttactcttcggagatcaatgtaacacaaacctacacgagcccaaaatttgagtatgctcttctggaatttcctctaaatatacaatatttggtggctgaattctacttgattggtgctaagggttatggattagatgcttttgctccagggttagcccagggaggaccccctcccattg

SEQ ID NO: 26775 - DNA, 394 bp, Glycine max
cactattttcgcctttaggatccaaaccatgttggtgaaacaaacaaggacaatgggagtcgtcctatttcttccccagttccacagccacaaccacaacctttgcccaaagtgatgaagaatacaaatgatgatatacaaaaggacaatgattcagctcctccagtgagtatacctcctccaccgaaaaatgatgatggtggtgacaccggtatgcataaagggaaggacaaaactgagggcatgaagttttcacatcatagcaccactgagacttgtgacgggttcaagaagtgcaccgacgatgatgggggcatggttgcttgcatttcgaaaattggtcaacatcacacgaagtagcagtgaaagtacccaactgactttaaatgctgga

SEQ ID NO: 26776 - DNA, 1138 bp, Glycine max
acgagattacatactgattgctttctaactaattctcatggctctccatgcctctccaagcgtcaccagagtttaattactggtgtttttaatcattctattcagatcattatatctggaaattcagttcatacaaaagcaagtatggatgcaaatgataattctggtacaaattcacaaagacatcccttgcggccatatctggactacgttggatatctttaccaaagaatggatcctcttcctgagcaagaacgttttgagcttggttacagggattttttacagtcacccttgcaacctttgatggataatttagaggctcagacttacgagacttttgagagagatgcaatgaaatacattcagtaccaaagagcagttagtaaagcattgctggacagggttcctgatgaagaggcatctgttaaaaccattgtattgatggttgtgggggcagggcgtgggcctcttgtgcgggcttcattacaggctgctgaagaaactgggcggaagctcaaagtttatgctgttgaaaagaatccgaatgctgttgttaccctacatgcattagtcaagttagaaggatgggaggatactgtgaccatagtctcaagtgacatgcgtcattggagtgcccctgaaaaagctgacatattggttagtgaattgctaggttcttttggcgacaatgagctgtctcctgagtgccttgatggagcccagagatttctaaagcaagatggaatttcaataccatcttcgtacacaagtttcctccaaccagtgacagcttcaaagttatataatgatgttaaggcacataaagatcttgtacactttgaaactgcttatgttgtcaaaatgcacaatgtagccaaacttgcaccaacccaacctgtttttacatttactcatccaaagcactctgataaagaaatcaatcagcgctataaaaagttgaattttataatacctaatgacactgggtcagcaatggtacacggatttgctggttattttgatgcaactctttacaaggatgtgcatcttggaattgaaccttcaactgcaacaccaaacatgttcagttggtttgcaatatttttcccattaaggacacccatttgtgtggatc

SEQ ID NO: 26777 - DNA, 490 bp, Glycine max
gttgcacgcagaaaaattttctgggaaaatatcttggtatgggaaagggatcttttcaggactctgttaaagctctggaagctgacattcagtatgctaataccctggcattaggctatccaagggacaaagatggaggatgctttcagatgaggatatcatacagtccagcagcccctctttttctgtttcttgttcaatggaccgattaccgcctcgccggtgctctgggtttgctgagaattctaatttatgtgacttatggaaatgggaagaatactatgtcaatatatgaaaggaaagcaagcattagacaattttactcgattatatttcctgctctgttgcaacttgagaaaggcatcacagatttggaggaaaggaaacagaaagaagtatatgcccttagataccaaaggaaaagtgagttcaatgagagaagacaatctgaaattgacattgaaagagaagaggaatgtggagtgtgctt

SEQ ID NO: 26778 - DNA, 334 bp, Glycine max
ccctcgcctccctgcgccttcttagggtttgggttgctgcttgtgcttctgtcactcattctggagatggcttcttcggggccaaatggaactgacaacggggattcgttgcctcccccgcctcctgttgtcccatcagatgttgtacctgtcaaagctgagctggagaagaagaaggctttgcggcttccaatagccaggcgtggccttgcttcaaaagggacaaagctgcaacttctcaccaatcactacagggtgaacgttgcaaatactgacgggcatttttatcagtatagtgttgctcttttttatgatgatggacgacctgtggagg

SEQ ID NO: 26779 - DNA, 268 bp, Glycine max
ctctctggtactcagaagtttgagttgccaaaagaggatgttagcatagcagatgtattccaagctgttgatgctgccaagagaaacttcaccgtttctgcatggggcctagttgacaccacattggaagatgtcttcattaaggttgcgcgcgaggctcaggcatttgacaccttgtcataactgtcatacaaaataaactctgctcaaaaccaaatcagtatttagttaatacataaactctatgctacacggttagcatagagta

SEQ ID NO: 26780 - DNA, 305 bp, Glycine max
ctcgagccgcaagttttggattcgttcgacttcgactccaaaagacgaagacgacgtcgtcactctggtcaagtagtcactattcactctctattcggtcagaactcagaagcaatcctaattccttaatggagagttctgaagacgaaaatgatggagtctctggtaatcatgctactaaggaactgattcatttagcatctaatggggcaaaatttatagatgaagtactcaatggtcaaaatgaatgctgtctggagaattttcgcatggataaacacgtattctataagttatgtgatatc

SEQ ID NO: 26781 - DNA, 193 bp, Glycine max
ggagtctgacatgtgtgcgagtcaacgggcgagtaaacccgtaaggcgcaaggaagctgattggtgggatccccctgtgggttgcaccgccgaccgaccctgatcttctgtgaagggttcgagtgagagcatacctgtacggtgacccgaaaatgatcggtgaactactgcgctgagccgggggtcgaagcca

SEQ ID NO: 26782 - DNA, 436 bp, Glycine max
taggttctcgagatcttaattgagaaaatcaataccaaaattcaagtggggaaagatagatatcaatattttcgtattttgtcacaagtggcttatttagaagacatggtcaacaactgggcttattcattgctaagtctggagcaggattcccctgagcataaaacaaaggttataccagaaagtggtgggccattaaacagtcatctcacgcgggaaaatcaccaaactgaagatgaggactgtcatttagttgttcctgtggatggtaatgatttggagacattggagcgaagtcagaaggaaattcctgctgaaacaactggatgtcttgcctctgatgacaaaaatgataatgcagacatttttgattgtgatgatggaaatgctagttctgaaggacatctacagaaccattctttttcagataagaata

SEQ ID NO: 26783 - DNA, 538 bp, Glycine max
gtttgatttcggtataggaaaaagtgaagctagcaagaacgaaaggttttcggttttccaatggaaatgaagactgaggctcagatcacacaacaggctcagagaccaaaatatgattgccttctatttgatttagatgatactttgtatcctctcaattctggtcttgcaaatgcaattgacaaaaatattaaagactacatggtcgagacgcttggcccaggtctccttaaccttggcgaacttgcgaaccttctttgcagttactatggaactactatcgctggtctaagggctattggatatgacattgactatgaagaatattacagttttgttcatgggaaattaccttatgagaacttaaagccagacccagttctgaggaatctgctgctgagtctcccctatagaaagctgattttcacaaactcagacaaagtccatacgattaaggcacttgaaagacttgggttggaagactgctttgaaggaatgatatgctttgagacccttaatcctatccaaaagagcactg

SEQ ID NO: 26784 - DNA, 373 bp, Glycine max
actggatgtaaatttatttgtaaataggaatattagtttatgttatggtcttgctacaatgattttctaaatctctcacatcatgcttttcgtttcagacttcaatcatttcaccggattcaaccgctcgccatcacactgtctaggaaccgcaaccgcaatgcatttcagaattattttcttttttaatttttttttgtataagcatgttttttgatctgtttttctatgttagatttggaggagaagattggcggcgacattggcgatttttaagaagcgatgtttggcaatccgaagtttgcaacagattctgaaacctcgctctcactggaaactcgccaatttttaagttcacatgtgctcctcgctg

SEQ ID NO: 26785 - DNA, 314 bp, Glycine max
gtcatggtcacggactcatgattcaccatgaccataaccacattatatcctccacggcaccttcaaatggcatacctaccatgcagcaggaggaggatcatggacttggaagctacaagaaagtagttcggtacagagaatgcctgaagaaccatgcagcagccatgggagggaatgccactgatgggtgtggtgagttcatgccaagtggagaagaagggaccatagaggcactgaactgctctgcctgtcattgccacagaaacttccacagaaaggaagtggagggtgagccttcatgtgactaccaccac

SEQ ID NO: 26786 - DNA, 289 bp, Glycine max
gcgctgtgtccactgctctctctctcaatttcccttcactctcacgcgccgccgtggtttccgccggcggccactccctatccgccgcgcatccatcccgcttccctctcctcgcttttctctaaaaaaaattaaaaatttctctgaagaccgtgttatcattatcgttccctgagttaggttttctgttcttcctagggtgtttttattgtgtccaataacaagaggagggggaagagaaacaagcaataagaagaaaaaaaacaaggaaaaattagggatttttttt

SEQ ID NO: 26787 - DNA, 357 bp, Glycine max
tcctaactcactctagttgctttgtttgtcttcaatggaataagaacagcagaaagaaagaacacaactttggccagaagacttggtgggggcattttcttttcagccaagaagggattcggtgttgatgagcaatattgatctgttgctgcagtaggggaccgagtaagaatgccaaaccagctatggtttgcactgccaatgatttacaaggatggaaagatttcccaaagggacttagagttcttctgcttgaaggagatagtagttctgctgctgagataagagaacaacttgaggccatggactataaggtttccactttctacaaaacccagaagccttgtcagcactctc

SEQ ID NO: 26788 - DNA, 308 bp, Glycine max
catcgagcgaatcgcctcagcttcaatggaataagagcagaaagagaagaacacaactttgggcagagtagttggtggggcattttcttttcagccaaggtaatagctaggaaacaataaaaaaagaggcttggaaaagaaccactttccgtgtgcatgctgattctaccttgattcatgtgttcagttttggagacaaggcctccagtgttgatcagcagtattgatctgttacttaactaggggaccgagtaagaatgccaaaccagctatggtttgcactgccaatgatttacaagaatggaaag

SEQ ID NO: 26789 - DNA, 310 bp, Glycine max
gtaggaaagtctacacctgattgagaaattaccatatttgcaccaagtctgtgctcgcgagggctactcagacagtgttttggtgagtgatgaaccaatagaagacagacttggtggaaatatggtaatttctcaatcaagagtaggaaagtctacacctgaaaatattgtggatgatggtcaaccagagcatctaatggttgatggggagctgcagccttataaggagagaatcaattatgatgatgtcttgcttactgatcctgtaaatgataggacaacagccaaagaagattctggccctgcaaat

SEQ ID NO: 26790 - DNA, 627 bp, Glycine max
ctaatgttaataggttcctgtatataaagaacctatcttaactatcttgggtacacctgcaatagtacaacatgaagttttgaataataagagacatgtgctgaccaaggatacatctggttcagtgaagctgtggagattacgaaaggcgttgtgattgaagattacggaaaggttttatttgaggagaaaaaggaagagctatttgagatggttagcattcctgcatggttcacagtggataccaggcttggaagcttgtcagtccatttggacactccccaatgtttctctgcagagatgtatccagctgatcttaacattgtaggcaagcctgaagatgataaggttaatttggctcgagaaacccttaaagggctactggctcattggttgagaaaacgaaagcaaagaatgggatccccagctccagctaatggagaactattatctggaaaggagactgcttctagaagtagtacccattcaagaattgaggttgatggtagttctgagaatgatgctatggtttatcctccatttgaattctcagttacttcccctccttccattattactgagggcactcatggaggtccatggagaaaaaaaatcactgatttagat

SEQ ID NO: 26791 - DNA, 483 bp, Glycine max
cttcatgaacatattgtattgttggagaaaaatggaaaactggaaactcttgaagaacaaatgagaagattaggaagcgttctaagaatccaaagttctcagacagtaattgtgcaaaagttggcaagcatgcttctgttgcttggtgtcgatctcttgtatataatttggcacaaataactccattatcttgtgaattctcaaatgggattcaggtccttagtttgactgatggtgggatggataatagccagttgctctgtattgatttgcagccaaaagaattatggagtacagcttttgaagatccaactcatttagaaaagattgacacaacatggagcactattttatctaaagtagcaactattattatcaagaaagcttctgatgagaatttggaaactgcaaacactttgctcagagcttgctataatttttaccgggagagttcttctgtagtgcttacctctggactcaact

SEQ ID NO: 26792 - DNA, 240 bp, Glycine max
gctaaaggaagtgaagggaacataaatccagttcacgacaatgtgccagtgtaccaatgagaagcaacaccttagctgtttcagataatagaagatcgtcagtgtcttgggatcaagcagctggacgctttgtctcgtcctcatcaagaggtcccggaacagaattattgtacacgggccgttctatattttttggcagccccgttgtgaatgaacagccaagtacaggaacaagaagta

SEQ ID NO: 26793 - DNA, 652 bp, Glycine max
gattagagatgatggaactcccactgtgaagctctgtgattttgatagtgcagtgccactaagatcaactttacatgtgtgttgtattgctcatgcgggaacacctcctccctgtatatgtgttggaacacctcggtggatggctccagaggttatgcggactatgtataaaaaaaactcctatggattggaagctgacatttggtcgtttggatgcttgcttttggagatgctgactctgcaaattccatattctggactttcagattcacacttccttgatagtctgcagatgggtaaacgaccacaattgactgatgagctgagagtattgagttcaatgaatggacccacaatgattccatctggtgaagagctggaaaaatcagatgctggggtagacatgctgaaattccttgttgatttgtttcataagtgcgtggaagaaaatccaagcaaacgtcctacagctgaagaaatccataaaatggtgcttgcacacacagatcgcttacaaatctaagattttaggaagatttagttaggttattgggtcgcccggtcctactgtcctagcgaaatatattcattctttttcttcatgaagtgtgttagggctaatccaagaataattgttgtacttggccaagtc

SEQ ID NO: 26794 - DNA, 449 bp, Glycine max
gtggcgttttgacttgaaacagtcgctgctgcgtcttcttcttcttcatccgtggcgttagggttttggtcggagtagccgttccccatggacgccgaagctgaccctcctcaaaaccctatcacaagacacaaatgcttggcatgctataagcaatataagaagaaagagcatcttattgagcacatgaaaacttcgtatcattctgttcatcagccaagatgcggggtctgtcaaaagcactgcaaatcttttgagtctctgagggaacatcttactggtcctttgccaagaggaatttgttcaaagattttctctcaacagggctgtcaactttgtctggcactatttgatagtcccgggtctctcattggtcatagagaaacatgtcgcttatctgcccctacttgtccaggaacaagtgcattgccctatatagattcccagtt

SEQ ID NO: 26795 - DNA, 333 bp, Glycine max
cctcgagccgaatcggctcgagggcaaaattcgcaccctcggcgaactcaaacgctcctcccgcgatgatgattccgattccgatcccgatttcgaacccgacgagtactacaccggcggcgaaaagagtgggatgcttgttcgagatcctaccagaggaaacagcaacaacaacaacagtgtggatgatatctttgatcaagcgaggcaggttgctgttgatgcacctccggagaatcctcgaagctcgtcgaggtcgggaagttttagtggcacggcgaggttgctctctggagagagattgccatctgctgctgctgctgctcctgctcc

SEQ ID NO: 26796 - DNA, 707 bp, Glycine max
ctacaacctcagcaccgaggtgctctgcaccaagatctcgctctgcgacgccctcatcgtgcgcagcggcaccaaggtctcgcgcgaggtcttcgagtcctctgccggcaggttgaaggtcgtcggaagagcccgcgtcggactcgataatgttggatctggctgccgccaccgagcactggctgcttggtcgtcaatgcgcccaccgccaccaccgtcgccgccgctgagcacggaatcgcgctccttgcagccatggccaggaacgtcgctcaggccgatgcgtccgtcaaagccgggaaatggcagaggaataaatatgttggagtttccttggttgggaaaacacttgcggtgttgggatttgggaaggttggttctgaagttgctcgtcgtgccaagggacttggtatgaatgtcattgcgcatgacccgtatgctcctgcagaccgtgctagggccattggtgtggagcttgtgaactttgatgaggccattgccactgcggatttcatctctctacatatgcctcttacggctgctacatcaaagatactcaatgacgagacatttgccaagatgaagacaggagttcgcatagtcaatgttgctcgtggaggggtcattgatgaggatgcgcttgttagggcactggattctggaattgtagctcaggcggctcttgatgttttcactgaggagccacc

SEQ ID NO: 26797 - DNA, 418 bp, Glycine max
aaagccatcgccaccgcctgctccaccagcttatgctggtcaacctcccccaccaccgcctcctttcatcagcagcagtggcggatctggatcaaacaattcaggcggtgaatttcttcctcctccttctccaggaatttcattggggttctctaagagcacattcacgtatgaggagttggcacgcgcaactgatggcttctctgatgccaacctccttggacaaggaggatttggatatgtgcacagaggaattcttcccaacggcaaggaggtggcagtgaagcaattgaaggctggaagcgggcaaggggagcgtgaattccaagctgaagttgagatacttagccgtgtccatcacaagcatcttgtttctttggttggatactgcatcactgggtcccagaggctgcttgtt

SEQ ID NO: 26798 - DNA, 442 bp, Glycine max
ggcaattctgcaaaggtcttcagtgtactatcatggagtaggtattcaaaatcacccccatccaccaaagatggtgctgaattttctggtcgtagtgaaccatgcaagcctggagctcattgtgccacacttaaaaaattatatgcagcagagaagaaacttttcaaggcattaaaggaggagggaattgttgcattggagtttgacaggaagtccatgttattgcgtaaacaagaggatgagaaccttgacgtggtcaagattgacaaaactcgatcaagtgttgagaagttggagtccgatttaataagcctaaggcagtgcatcagtgacacaacttcatcaattttggaaatgatagatgaggagcttttgccccagctggttgcattaactgcggggttgacacaaatgtggaggacaatgcatgagtcccataaag

SEQ ID NO: 26799 - DNA, 286 bp, Glycine max
tcagcaacaagaatttggattgctcaaatggagaatgaaagctgacgtattactgctacatacgtcggtggcataacttttatgggaacctggccagcatatgtgcatccgagtctgatttcacccattttttttcttattgatttttttgtctttcttttcattggagttcgttcgtttgaaaggtaatgtcaacttggttttgcagcagcactggctgcgtttcaggaagcctgtattcaattttattccatgttaatacatattcttctcgataggattatac

SEQ ID NO: 26800 - DNA, 311 bp, Glycine max
cagatgttgacattgtacatctgcagaatccttttgatcatctataccgtgactcagacgtggagtccatgagtgacggtcatgataacatgacagcttatggctataatgatgtgtttgatgagcctacaatgggttgggctcgatatgctcatactatgaggatatgggtttacaactctggtttcttctatatcagaccaacaatcccttcaattgagcttttggatcgtgtggcaacacgactttcaaaggagcaagcatgggaccaggctgttttcaacgaggaactgttttacccctcacatcct

SEQ ID NO: 26801 - DNA, 406 bp, Glycine max
ccaatctcattacattttcaactatgattagctgtgcttccgtgtgttctttgccgcataaggctgtgaagtggtttgagatgatgccctctttcgggtgtgaaccggataacaatgtgtgctcgtctatgatatatgcttatacaagaactggcaatactgatatggctttgagactgtatgatcgtgcaaaagcagggaaatggcatgttgacacggcggtgttctcggggttgattaagatgcatgggatgtcagggactatgatggatgcttgaatgtttacaatgacttgaaggttcttggtgcaaagccgaacttggtaacgtataatgctctgttgtatgccatggggagagctaagagggccagggatgccaaggctatatatgaggagatgataaat

SEQ ID NO: 26802 - DNA, 268 bp, Glycine max
ctagaccgtaacaaacaagcagttgcgatcacccgcgccacaaccttgaacgcggtcgtttaaccttcgaatctgaaattgtttctccaacttcctccttccttaatcaacctctgttgcaatgtccatgtcgtgcaattctcttctccttcttttctcctccatattcctcacctatttcccaggattgattatatctgcggacgtgacgctgagctcgattgagatcttcacaacccacgagtttcttatagccactccaactgtc

SEQ ID NO: 26803 - DNA, 405 bp, Glycine max
gaaacgaatatcgatttcaattccgtcactcaactccgacaccaaaaaaccattccaacgaagaagagagttagttagttctgagtgagtggttcctctcaagaagcgtccagcgtagtaacgctgaggaccttcactctcaagttttcaaccgtttgttttctatataatatccctaaccgccgtggatgggacaatctgtttcctccgccgccgtcgcaagccgtcgtgagagggatccaggccacctctccgtcaacacctccaagaccagatccaccgccttgattacgccgatggccggttattcctccggcgccggcgaagacgaaagcgaaaaccgtcgtggcgaggccgttactgatgaaaccaccgactacatctgcgatctccctaacgagtgcc

SEQ ID NO: 26804 - DNA, 415 bp, Glycine max
ggaagctggagggaacaaaggtgtgtctgataaacagattcgtttgaagattttctcgccgaatgttctcgacattacgctcgtggatctccctggcatcaccaaggttcccgttggcgaccagccttcggatatcgaggctcgaatcagaaccatgatcatgtcttacatcaaaactccaacctgtgtcattctcgctgtgacgccggcgaattcggatttggcgaactcggatgctcttcagatggctggaattgccgatcctgatgggaacagaacgattggtgtcatcacgaagttggatatcatggatagaggcactgatgcgcggaatctgttgctaggaaaagttattcccctccgacttggttatgtcggtgttgtgaatcgtagtcaagaggatattctaatgaac

SEQ ID NO: 26805 - DNA, 380 bp, Glycine max
aaacactgaaacaagaaacagaaaacactctctttctctctctttctttagattatactactatcataagatcgttgttttacttagaatctgaactcaactcgccggagccaacacatctcgccggaatattcctccgggaaatggggtttctgaaaaactactgagaattaacaaaaaatgggcgacgaagaagtattcgccggagcttcgggtctccggcgagcggtggagctaatcttttccgtgctctcactctcgcactcgattcgcgtcttcgccggaaaatggcagctgattcgggccaagctggaggagcgccacggcggtctaatcgccgccgagaactgcgactccggcgacagccgtcgctgtcgagg

SEQ ID NO: 26806 - DNA, 505 bp, Glycine max
gcacagcgtcctctggagttcccgcttatccctctgtcaattgcggtttcatttcatgtttcggacccaaacagtaacacacttcacatttatgatttattcaacacagtcaacgaacccttcacaaaacgcatcatcaatcttgttttccaatttccttccgatctgtaaccgtctattgattggattatagcgtatcgtatgaactctagcttgctttcgccatggaaaatcaacagttagtggagacaaatggagcaggttttcaagctgttgagaatctgcgagtagatgatttggaacttgatcaggataaacaatcgaaggaggcaaaggctgagaaaattggtcacgaagacgataaattggatgatatatcagaccagataaatgacggggaagatgcaaggtctaatacaaaagatgagagtgggaatttgcaatctggaactcaaccagaaaacttagagaccaaatctgaaactgaagtcagtactgataagcg

SEQ ID NO: 26807 - DNA, 417 bp, Glycine max
ggaatgaactttatcatgatttacccagcaagcagctcaaggtcaaagctgctgacagaacggctgttgttacaacaaatgcagaaactgtggttgtgagccctccgggtctacaagaagccataaatgaagaaactgctaaggacccccaaggtcgatgctttgtgcgaccatctggcactgaagatgttgttcgtgtgtatgctgaggcatccacacaggaagcaggtgatacacttgccaactgtgtggctaagcttgtggatcaattcttagggttcaatagctcgtgacatcacaacagctcccccttccgtgtctttttaatttccatttgccattacaacagaatgtacttggctttgaaacttagctagccatcgtgattttccaataaattttctcctgcatttttct

SEQ ID NO: 26808 - DNA, 586 bp, Glycine max
  unsure (1)..(586): unsure at all n locations
acctccttatatgctcatgcaaacgaggcaaatgcattctggtctgtcttcattgcagctgctgtgatgggtcttgtaatgcttggtcaacgctggcagcaggaaagagctttacaacttaaatggcaaatcagtataaatgatgaggcgaggagcagggtgcttgctcccatatatcgactcaaagatgtgattgttggtggcaaccgtcgtggctccttgatcaggggaagctcctctggtgaaagttaagggaaaggtggctcagtgcgtatgggctcctatccttgtggtaaaagtgaagatgatgacgaaaaattgtatgtcagagagaggttgagaatgaaaagtgctacatttgtgaaatgcaggtttggtactaggattggttgacctttcccaattatgaatgccaatgttcaaacattttatgttgtggattttcttctttgtatcgattagcaatgtatagctcttgaagttattcaacatagtaagttatgtattatgattatgtgaaattgttggcagtttnnnnnnnnnnnnnnnnnnnnnnnnnnnnnnnnnnnnnnnnnnnnnnnnnnnn

SEQ ID NO: 26809 - DNA, 405 bp, Glycine max
cggaaattggttgaagggtatttgcttagagctgctcaaagaagtgacatatttgcccatattcttatctggcatttgcacgggtgagactgtacctgagacaggaaaagacccaaacagtgggaagaatggttcatttctagaactgctgccagcggtaaggcagcgtataattgatggttttaatccaaaggcacttgacatatttaaaagagagtttgatttctttgacaaagttacatccatctctggtgtactatttccactccctaaagaagaccgccgagctggtatccggagggagttggagaaaattgaaatggatggtgaggacctttatttaccgacagcttctaacaagcttgttaggggtattcgagtagatagtggtattcccttacaatc

SEQ ID NO: 26810 - DNA, 317 bp, Glycine max
gctaaaatctgagttagaaaaggcttcgcctgtattgggccgtagtgctacatacttgaaggaatcacgcatcaatgccttgccaaggtacttgactgttcagtttgtccgtttcttttggaagagggaatccaaccaaaaggctaagattttgcggaaagtagattatcccctggagttggatgtttatgatttttgttcagatgatcttcgtaaaaaattggatgctcctagacagatcctaagaactgaggaaggcaaaaagcttggtctgaaagtgaatgagaaaagctctgttcagaaggaaagtgatgtaa

SEQ ID NO: 26811 - DNA, 427 bp, Glycine max
atgttcttcccctcctcttccctccgatgaaccacggttcttcctgctctcagcaacaactcaaatacctttctccctcactcaattcctaaatcctaatccccccttttcaaatcaaatcccaattcccctcccaaaccccaaaaacattcacctcttcgtaaaaatcccacctttccttcgattttcccctacccacccaccctctcagtttttcacttcaagattcagatgcgctttctttccgctactcttcttttcttcgtgggttcctttcccctttatgaaatgcttaatcctacgcggccacgatttcttcaatagccttcaacgcgcaccgtctctgcgttgcccagaaaacctaggtgcttagggctcttcaaatccttcgtgggttttgctcaaaattcgaattttccgattcttt

SEQ ID NO: 26812 - DNA, 375 bp, Glycine max
tctcgagccgaatcggctcgagtaccgagaaggacgacagaaggacggttcccaaatcattacaatccctaccgtaaatcattagagcgaagaaattggcgtctgacattctccctcactctcttttcagttagggtttgcagaacggtggtgaggttgtggattcccatattttgaaggtaatttctcagaagcagaagaagtagttggcacttgatatggctcgaaggaagagtattgctagcagaaaattaactaagcgtcagatggtactggcagagaaagatcacaataaaggaaaagcttctaatagtcatccaatgaaacaacatactagacatctaggacagacgacttctgaaattccaccttgtg

SEQ ID NO: 26813 - DNA, 410 bp, Glycine max
  unsure (1)..(410): unsure at all n locations
tctcgagcgaattcggctcgagatttattaaagtaagagaacatctggcacttaattcgttcggagaagatgctctggatagatgacaagggcaggtggggtgtttaacgtgtatatttcatttcacggttgggtaaaggcagaatgaaagtgcaggcgaaaagggggaaaacaaattggctagtgctgtgcgtcacgtctaatatcttagtttgtctgatctaatctaaattttctcgcaaacagaagaaaagtcaagcgcggcacgaatcgcgatctttccttctttctttctttcgttccttcacaatcctacctctagncaagccgcagagtcaacttgtacaaatgcccaccgaatccattaaaactaaaaaatcttctaccacgaacacttgtcttcattcttc

SEQ ID NO: 26814 - DNA, 745 bp, Glycine max
gccaagttattgctcagtactaccaactaattcgactgggttatgagggatataaaatggtgttggaaaactgcaatgacaacatggcagtgcttaaggaaggactggagaaaacaggaaggtttgagattatatccaaagacattggtgttccattggtggccttcacattgaaggaccacacccacttcaatgaattccaaatctctgacatgctgaggcgctatggttggatagtgccagcatacacaatgcccccagatgcacaacatgtgacagtgcttcgtgttgtgattagggaggatttttctcgcacccctcgcggagcgtctagtgattgatgtcaccaaagttgtgcacgagctggatctccttcctgctagggtgatcagcaccaacaccataatggttacaggagaagcaggtgaagaaaatgacgaaaaagtgctgtttgccaagaagagtgaaatagaaacacaaagggaaatcactaaagcttggaagaagtttgtgatggacaggaagaagatgaatggtgtttgttagaaccttgtttttggatcattttttgagctacttatgcagaccagagaccagagcaattactattattattttaatataatatcgtgtggagagtaattcccttccccaataacatagcgtactttagatatgctgaaattgcaatgttgttggttgtatggaattgtgttggactgaaagttacttcatttctcaacgc

SEQ ID NO: 26815 - DNA, 260 bp, Glycine max
cgtcatcggcacaccaaaatatacttgacaattaactgaacggagaaactgtcgctctgcattttacttccattcttcctccgctagttaccagcaccggtcgccgaatccgaaaagtgacttcaatcctttccactaagggtgtgttttgacttcagagcaaacctaaagtggaaaaggggatttttattttttttttctttttcattttggccattcagttctctctggggacatttttgttctctctgcaactatgg

SEQ ID NO: 26816 - DNA, 252 bp, Glycine max
tgagattcaacgtccaaaagccagtatagtaccaaagaaaaaggaggtatatatcttggtctttaatttctgaaacaggcacacacattaggtcaaaactcaccgacccaattgaagacccattccaaaattttcatctttgagcccctccattcacaagaagctcaaaacctcagaagggtaggggtggagtgacacaacacaaacattaacgcagccataaaaacagagaatgagaaagaacaacgaggt

SEQ ID NO: 26817 - DNA, 332 bp, Glycine max
attaaatgcaaacattaagcaagagatgaatagggaatcagtagatatcttgcagagtgaaaccagaaatcccaagactgtttttggtccgattgaatctgaggattctatttcccacattcgtattgtcgctagagttgatgaaagttcagaaatttcacgtgccaaaggtgacatttctgaaactggtagttttgaaaatacagcactctgttcgcattgtggttgttgttatgaggtcactaatcaagctgagaagaatattgggctttgtccagaatgcaagatcacattattgagagttgtcatccctgagacaactttggcagtat

SEQ ID NO: 26818 - DNA, 377 bp, Glycine max
ctcacggtcacggacaagcgaagagtaaagaaagaagaaatgttggtgaggaagctgaaactgaaagcggttagtggggtccacttgagatggatgagcaccgtgatgtgtttcggagatggcagccagggtgccgttggatccccagtaggtgtgggactagacgcatacgaacccacacctgttaccgctcttccttccgacatcgttagcgtccacgccggacactaccattccctcgccctcacttcccacggccacctctgggcctggggcagaaacaacgaggcccaacttggccgcggcccatcctctagagaatcatggcatgagccagaaagagtgaagggattgttagagaatgtgaacgtgtgtgg

SEQ ID NO: 26819 - DNA, 253 bp, Glycine max
tgtatataacaagttttggacaacaaaaaaatctctctaagccaaaacagagcaaccagccttcacccacatcacatgctaagctaaggttatgctctttggaatgaagctgggcctgaacaagattctaaaatcagaaaacatcaccaaaatggacatggaattctcttcttctacttaaaattatataacttttcattggtttgaactttgaagctggcggtggtaacggaaaatggggttgcacgtggtg

SEQ ID NO: 26820 - DNA, 408 bp, Glycine max
cggatctgatctcatcggcctctctcttttctttaccactccctttctctcatttcttcaatttccacgttttaactctcacatcaaatgcttcaaaacaacttcgattactctcactctgtcacgacactcaacaaatatcattccaagtgaaagggcattcacacactgcactgcactgcacttcacttcacttgtcgcttaattcgtcaatgtcatttggcattcattaatggcagtcgagttctagaggcttctccactacgcagtttgatttcaagctcagagtaacgcgactcaatgccgctctgcttcctaagagtcccgtgctcgaattaggtcccagaaagcgtagaaagctttgtttcgacgctgaccgagttcgactcggtaatggcgcaatacgct

SEQ ID NO: 26821 - DNA, 577 bp, Glycine max
cagcattattccgttgtcttccttctccgttgctcactctctttctctctctctctctggaattctaacctagatcaaagataacggtgctgtgagaaaagcgtgagagagaaggagagagccaaaaattcacaaagcatccgaggaacacgtgaattccgacatgtaacggtcgaaagttgtaacccacgacgacgaatttggatctgtcgtttacaaccattgccgatctccgccttaaacgacgcttcactgaaaccaccagactcttcctcctcaccgttacaacttcacagcttctgtgtagtgttctacttttcccgttactgtcagaagaccgttgaacaacgaggttttgaagtggttttctttcttcagctgcctgatgaggaattgatttgttgatctccgaggttgttgttctaatttatcgagcatggataaggtttcatcagactgtccgtacccgggatgcttcttttgtgtcatgaaggaagggaatccaagcaagcgcagagcaagtgtactgaaattctttagagaacttccgtgtcaagatgatgatggtcaggttctc

SEQ ID NO: 26822 - DNA, 256 bp, Glycine max
gaaaaccacaactttgtcacactttgtgtctccaactccctatactttctcgcttcaccctccccggtaacgttttcgcttcagcccacaacgagccatgtgaagcacaagagtttttccagaacaccttctgtccccaattcccctcagacagcaacatcactccctccaacgccaacccctccgccgccaccaccgaccacttcctcgtagaagacttcttcgacttctccaacgacgacgacgccaccttcga

SEQ ID NO: 26823 - DNA, 308 bp, Glycine max
tggaaatttggctgatgacaccatcaatttcaatacaacttcgtactgaatctctccaaactgcaccagcttgtggggaaaagcctcaaaattgatggtgtcatcagccaaatttgaggcttttccccacaagctggtgcagtttggagagattcaggataaagttgtattgaaattttcacaagaggaatttcttacagcttggtcaacccaggtgcgtcctgcaacaactctgttggctgatgggtgtccatatttgtatgctatggtgcatgatagttcagtgtctacaataccaggtgattttg

SEQ ID NO: 26824 - DNA, 326 bp, Glycine max
ctcgagccgttttgacacagttcaaccctggtctttctgcctgtgcttctcccttcttctccttcgatctccgcactttcccaatagccacagcaacacactcagttactcaccagtcaccaccgacatcatgtccgattcgaaggtcgaaaccatcgccagattagcccaatggaaaatcgacaacttcggaccctgctccttcaagagatcagaccctttcaagctcggaatttggaactggttcatgtccatagagaggaacaggtacctctacatacacatctttccagagccttctcggctttctaaggaacagccacccg

SEQ ID NO: 26825 - DNA, 348 bp, Glycine max
ggctcaaggctggaaagcaaagtcaaaaactttggaagaagttctggaatcaacttctaaaatggaaccaaaacttattggctatgatgagactcccattgatgtaacagataccaataaacacatagtggttaatgctgacccgtacaacaactctaacccagaaattcgccctatgcaactgacagatgaaatatgctctccatgtgtgaaacctttcggccaacggcttcaatcttctgctaagggaaagcttagtcaaatatttgaaaatcgtgattgtggcagtgactcgtctgggacaggaacagcaagatcacgattgtatgaattatgtgctgcgtattg

SEQ ID NO: 26826 - DNA, 319 bp, Glycine max
gggatgtggaacttgggaaacttttatacagcttgaatggacacagagatcgtgtatattctgttgcattcagtcccaatggtgagtacatagccagtgggtctcctgacagatcgatgctcatatggtccttgaaggaaggcaagatcgttaaaacctacactggtgatggaggcatttttgacgtctgttggaataaggagggtgacaagatcgctgcctgttttgccaataatacagtttgtgttttggatttcagaatgtaacctgagaagcaccaagttattttgactatttaattgtttttccctccttactt

SEQ ID NO: 26827 - DNA, 848 bp, Glycine max
gcgtgggcaggttcccaagcaaaagagaataaactacatgtgtctcttggcctgtgtaccccatgcatgctacatccacgtgacctagacaagccatccctttctcatacaccagaggttggaagaaatcgtgtagcttctgttccttcggagatactctgccccgtcacttgtagtccatttccatctatggcaattcccttatgtacctgcaatgatggtccatgtccatcatttgaacccagagaagtagaaacacaggatggattacctcatcactctcaagcatcaacagtggatcaggataaaattgaagggccaagactagataaaacaacctgctctggcatgttttggggtagaagaagttgcagcagggagcaccaatgcaattcagaaataaatgcttgactcgcaccatgcttgtacgacacatacaagtgtcgtggatactgggtacactatagatcaacaggatcagtccacaattttcttattaaccagcctcaaatagtgaaactcgggatctctctagaagagaaaaaactgctctgcagatcctcttggctgctcaggttgtatggtaggtgatagacacaattctggcgtttcagcaacacaaccaccctctggatatgtcctttttctgatatttagggagcgtgtgtgaaattagtttcagtttcgtgagatttttattgtgatttattgtaattggatttcattttatccaggaaagtgtcttctttaaggggaaaagaatatcgtatgctttttataacatgtatgaagttaggagcatctgtatattatgcttgtcataaattttataggtttacaaagcacaa

SEQ ID NO: 26828 - DNA, 266 bp, Glycine max
tgatccccgttaagctctgttccaagcttacagacacctcatcctccactcatcctgactttgcaaaaccctcgggaaagagccagtttcacttgggaggccgcaagcaccgaacgtaaaaacgaagctctggtcactacgaagcgtgattagcatactcaatggccgattctggcttcactagtaacaggagggatgccattaagtcctcagttgggattgccgcggctagtaggagatgacagcatctagtcacagtggggcaa

SEQ ID NO: 26829 - DNA, 473 bp, Glycine max
tcccgaaaccctctgcttcttccgcgtcttcttcttctcttctcttttcgaagcttctcgaactccaccaatggccgaaaccatcgtgatccaaacggagcctccgaatccgccggatccttcttcgtccactactactaccgccgctcctcctttgctgtcgagaaaaatcgtgtttcttcctgtcaagaagcccttcaagggtttctccaaccatttccacgtcgaaaccctaaacccttcctcctcctccgaacctcgcccctccggttccgtcgctaagaaacacgacgcttccgaattctccgagtacggcttggatccggagttcagcttcggaattaccttccgcagaataggagctggattgcgaaatctaggaaacacttgttttctcaattcagtattgcagtggttgacgtatacagaacctctagctgcgtatctgcaaagtgggaagcataaaacttcat

SEQ ID NO: 26830 - DNA, 292 bp, Glycine max
agcaatgttcttctaaacctttctttctctagttagaaattaaggagaaacaattaactcaatggaaaaacaaatgtttccaacaaagtttcttctagttcttaccaccatatggtttgcactatccaattttgcctttaaagcttcagcagatgatgtcactcaaaccccaataacatgtctgaattgttccaaatgtgaatacccttgtcaacaacaaccctcacccccacttccttatgttgctccaccaccaccacaatcccctacaccttaggttactctatatatg

SEQ ID NO: 26831 - DNA, 414 bp, Glycine max
tgcttttgttcctctcatgtacatgtgcatctgcacatactattcatggttcaaaattggaatgttgatgttttactcactgacacccagacagactagctcagttaacttgcttatgatatgctcgatggttgctcgttatgctcctcctgtctcatacaactttctcaatctcattcgccttggcaagaataaaacaactatatttgaacagcgaatggggaacattgacaatgctgttcctttctttggggatgaatttaacaaaatctatccacttattatggttatatacaccattttagttgcaagcaacttctttgataaagtatttgattttctgggaagttggaagagatatattttcaaaactgaagctgaagatatggatggttttgatccatctggattaat

SEQ ID NO: 26832 - DNA, 249 bp, Glycine max
attcatttggaatcatattgttgagattgttgactgggagaccagcattgggaataacaaaggaagtgaaatatgcattagacactggaaagttgaaatccctattggatcctttggctggagactggccatttgtgcaggctgaacagttggctcgcttggctttgaggtgttgtgatatgaatagaaagagccgaccggatctgtattcagatgtctggaggatacttgatgcaatgagggtttctt

SEQ ID NO: 26833 - DNA, 197 bp, Glycine max
cagaaaccctcaccaatgactgcgtcactgcccgccgtaatgactgcgtcagtgcccgccgtggagccgtcaccggagcctccagcgtctgatctcgtgtttggcgacttctcctccaacttcaacgccttcctcatcccctccatggactcgctcttcaacaccactgacgagacaaacttcgcctccgatctcga

SEQ ID NO: 26834 - DNA, 523 bp, Glycine max
aaaaaatgcataaaacctccccctctaaaccctttgtacaatgtcatcatcattctgttgtgttgagcaccacttcattaactctttcttctcaccgttaagctccattactcatcccccatgatcccttcaggaataatgaagtatcccagaggaaagcttcctcttcccatcattgtcatcacaacatgtgttcttgtttttgtggctatcttgtatgtagagaggctcagtttcctctcttccaagtccattttcaagttcaaaccatgtcctagaaaaaccaccaaaccaaagactagtgacaaaaaaacagatgaggaggttgtggttgtgaatgcatcatcatggattgatgacaggtttgattttgaccctgaggagtgcaatgttgcaaatgggaaatgggtgtttaaccattcaataaagcctctctactcagacataagctgtccatacatagatagacaattttcttgtgtcaagaatgggaggaatgattctgactatcgccattgggagt

SEQ ID NO: 26835 - DNA, 611 bp, Glycine max
ttcctcgcgtccgggaaaggccaaagtagcattagcaatagcatgtttgttgctcccatttgagtttcaagtttgagcatttgcttttgtttttttcctagagcgcagttatggttcagcttcctccaaacgcgagccccctcaagtgactgctttataagccaacctctttcacaaacaaacatcacaatctctagagttctacacacaagcacgttctagagagagataggaaattattaaattaagcaaatgggtcgcaatagcatagacatggacagggagagattaacggctgagatggacttcaaggactcatcctccgccgtgatcagaatccggcgccggctgccggatttccttcagtcggtgaaactgaaatacgtgaagttgggattgggatacggttactcatactcatgcaaagcagccagcattgtgatgctagccatcaccctccctctcgtgttctctctaaccggtggtatcaagctctccaaactctgctcccacaaccaccagctcgacgccgagaccgtggcggcggcttcggcggcgctactctccctggccgccctgtaccggaggaagcggtccccggcggtgtacct

SEQ ID NO: 26836 - DNA, 251 bp, Glycine max
tgaacaaccgtaggccatatcatagtattaactttgttattgcacatgacggatttaccttgcgtgatcttgtttcatacaatttcaagcacaataaagccaatggggaaggtggaaaagacggaagcaatgataatttcagttggaattgtggtttcgaaggggaaactgatgatgctagtataagagctttgcgatcacggcaaatgaaaaacttccatttggcattaatgatatctcagggtacacca

SEQ ID NO: 26837 - DNA, 362 bp, Glycine max
agttgctggggaccctatacagctcccctcagatatattggattcttcaagtgggaggggaacaataatagatagtggtacaaccttggcttatcttccagtctcaatttatgaccagctattggagaagattttggctcagaggagtggaatgaaattatatcttgttgaggatcagtttacttgtttccattattctgatgaagaaagtgttgatgatttatttccaactgtaaagtttacctttgaggataagttgtcagagtaagcccctcctcaaaggtaaactttacagttgaggaggggcttactctgacaacttatcctcgcgattacctattcctgtttaaaaaggacatgtg

SEQ ID NO: 26838 - DNA, 438 bp, Glycine max
gccagacagaaccagaaaagcaatcattggaacaaaaggaagaagaggagaaacaagacacatctgcagttcctgaatcctcagaagaaagtggtgatgccatagaggtaaaaacaagagaactagaatttgaggcagaggtattgaaagagactaacaactctcaaacatgagaaagcagaacctgtggaagctaaagttgatgaaaaccagagtcaaacagagaaagcagagcccgtggccgtcaaagttgatgagaaccagagtgtaataaagaagacagagcttgtggctgctaaagttgatgaaaaccaaagtgaaccacaataacattgaggaagaagagcagtctaagacagttgatactgaaattgaagctgaaagtgaagagcatctagactatatagtggaggcttaccctgccaaagactcagtgat

SEQ ID NO: 26839 - DNA, 597 bp, Glycine max
  unsure (1)..(597): unsure at all n locations
ganaagtattagatgaatgagagacgagagatgggaaggagatgagtggggaaggaatcaaagtcatacacgcttccatcatcaccgtctcactcattctcctcaagatcttcttcatcctcagacttcgagttcaccatctcagtctcgccacgcaaatcctccacggctctgtgccccgctgatgagctcttctacaagggccagcttctgcctcttcacctctcccaacgcatctccatggtccgcactctcctcctctcctcctccagcacctcctccacctccaccaccgcacgtgactccaccggcagcagctcctccttcaccagcgacctcgccctcttccccgactgcgactcctctcgccccagctccgtaaccgatcaggacgacgacttcaaacgcctccacaaccccaacccttcttctcctccatctncaagcaggatcacgtcaagaaaaccctcaagtacttctccttctccagattctcctccgttttccgcaaggaaaacaccaccaccaaaacccgtgacctcgacaacgccgcctcttctaataacaactcctcggtcaagcgaatgagcgtcaccg

SEQ ID NO: 26840 - DNA, 295 bp, Glycine max
ctcacgcgtccgcccacgcgtacggccaaagccctctctctctctctctctctctgtctcctccatttctgtgcctcttctctggcgttacgaccctctctcctaaacggcgtaacggaaggagtcacgtgacgtgccgaagagaaaggaaaaggttgatggctttagagcaggaggtgggtcagaataggaacacaaacggcgtggtggatgctggagatgagggagggaaagcgcctagactgcctcggtggacaagacaagaaattctggttctgatacagggaaagagaga

SEQ ID NO: 26841 - DNA, 247 bp, Glycine max
agaactcatagagagacgactaagaatggttatattgtggtctgcgagtactagggatgattgatttcacgtgagagttctggcacaggttccgtgagtgcttcgagtgtggcgtagagtggtggagtttcgagactagccaaccactttaaccgctgtaagtgtctccgatttcatggatccccacctgagctcccatatagagctattagctagctcttacattctcatggttactgacattact

SEQ ID NO: 26842 - DNA, 313 bp, Glycine max
gtcaattgttttctttttctctctttcctgaattgttgcaagagagagcatgccgttgcatgagctgagccttggtatgagggcgttccaaccagggaacttcgtgtacgatgctgaggatattccatttgggacgctgtggtggttcttttatgctggaatctcttgtttgctcgttctatgcgctgggatcatgtctggtctcacccttggattaatgtctctgggtctcgttgatcttgagattctccaacagagtggctcctccactgagaagaaacaagctgctgctattttgccggttgtacagaaa

SEQ ID NO: 26843 - DNA, 482 bp, Glycine max
atgcatgaaggtggcggaagaggataattgttctccaattcaaagtgtggagaccaaggatgatcaagcattaatctgctcatcagaatgttgagggatgagtagtggtgtcaatgggtgactcaatgaggtgaaggtggaattggatgatagtcttaagcagtcaattgtaatgactaatgagtgatgatctatcttttgtatatatatatatatgtgtcttgtcatgttagtgctatatgagtactaaatgttgaaaacattccttgatgttgtctagaggtagacatgagttagggaataaaggttaagtatgtgcatggattgttaatcctgtcaatgttttcatgtatgaggactgtctcaatttgttctataatttcttattttacttgagctacatttaaatgtagagttggttgtagtttaagaaatgagtgtgtttctttgataacaccaaaatggtcataaattatttactc

SEQ ID NO: 26844 - DNA, 501 bp, Glycine max
aaaagatccaacatctgacatggctataatatctcgcaaaggatctactcttgttagagaaatccatgagaagcagagtatgaacaagtctcgccaacgcttttgggaacttgcaggctcaaaacttggggatatcttgggtgttgaaaaaacagcagagcagattgatgcagacactgccgaagtgggtgaagatggtgaaattgattttaaggaggaagctaagttttcacagcatatgaagaagggagaagccgtgagtgactttgctaagtcaaaaacccttgcagagcaaaggcaatatctgcctattttttcagtgagagaagagttattacaggtggttcgtgaaaatcaggtggtgggggtggtcggcagaaaccggttcaggaaagacaacacagttgacacagtatctgcatgaggatggctatactataggtggtatagtaggctgcacccaaccaaggcgtgtggcagctatgagtgttgccaagagag

SEQ ID NO: 26845 - DNA, 543 bp, Glycine max
tgggctagagaagtcttcagtgatgccaatatcatcactgaagagaaagtggatgaaatattgaagaagtttttgagagatttccaagaaggctcattagaaagtaatgggtgcgccaagacatctgggtgcctatattgtctctaaagctgctatgaatgcgtatactagaatccttgctaagaaatacccttcattctgcatcaatagtgtttgccctggttatgtcaagacagatataacttccaacactggcctcttaacagttgaagaaggtgcagctagtcctgtgaggctagcattgcttcccaatggtagtccatctggccttttctattaccggagtgatgtggcttccttttgattaggaatgcaatttcatggtttgagggcaacatgcattgcttttgcttctcaatttattaagcctatttcaagaacattatattatgttgcatttggatcacatcattatcatggtttcagtttctgattctgcacaatacaccatgtttattgagtatttttcaagcacattatatt

SEQ ID NO: 26846 - DNA, 959 bp, Glycine max
attagtaccacaatggctgataggcagtggaaatgacagtagggtggctggtataaacaaccaattcacatcatcgtcatactctgatcatattacttattctggtcgccaatggagttctagtagcaaaggtcctggccactcaaggtcatatagtagttctgagagaagctggcaggatacatattgggagaaagatattggcagtgatggcctgaactcagcatcacatgatattcctatgacagttagcaaggctatgatgatgcatcggtataatgttcctacaagcacatcttctattactcttggcacaatgggcctcagtatggctgagacattggctcagggtccacctcgctctcactcaccacaattatctgctagtactcaaaagcttgaagcgttggcccttaagcaatccaggttattaatccctgtgacaccatccacaccaagatccctggtttctagctcctcagagaaatcaaaggtcaagacagggcagcagcagtattccttctcccattcacgtcgacccaatcattctttacatggtgctcatccgaacttagatatacagaaaattagttctggtaattcccttagtgtcaatacttcccgagagtggaatggtgtctcttcagctgcaaaggacaacttaagtcccaatagtagagttgtgcttagtccagttggtgccactagatccacttctctatctgctccttctaggaacttaggtaacaattcaaccccttctgcatggataacattggagaagaggcctacttttcctatccagagcaggaatgatttcttcaagaatctttcaaggaagagttccttggaaaaaccttgctctgatgctttgtctattgacatgtcttgtgccttggagaaatctgaagccagcatgaggaatgtctctagttgtcccattctggagtctagagatg

SEQ ID NO: 26847 - DNA, 883 bp, Glycine max
ggaaggggcatctctattaattcacatcacactatttccaaaggaaaaatgtcagcagatttggagaggtcgacttctaggattcctcaacttgatggaccaattccatatgatgatgatgatgtgctctctactccaaatatatacaactatggagaagtgttcagtgaagactacaacatttctaatacaccagctcctcctgaagtaccagcaagcacccctgctctcttggttcagaatgaagtgggtaatgattttgatgatgatgatgatgatgaacctccattaaatgaagaggatgatgatgatttagatgacatggaacaaggagaggatcaaaatacacatcatcttgttttggcccagtttgataaggtgacacgtaccaagagcaggtggaaatgcacattaaaggatggcatcatgcacataaataataaggacattctcttcaataaggcgacaggagagtttgaattctgattttgttggggctggcgctttcgtgaaatatgattcggaggtgtcattgtgtgtttcatgatccctttctttgattataattattaagtgaaagattgatgaagataggaatatttttaccctttcgagactattgtgatgttggcctcttgtacatagagaatgagcaattttttgcctttaactgatggttagagactcgggcatttcctttaagcccaccatttgtcaagtatgtggtttctttagttctgtatacttgaacattttagtgaatttaagaatcccttgtatgataataatgatagataggcttgttaggcctcgcgtaactttttgacattaaaaaacaggatgatgtttttttttcttattaaattaaaagaaacagtttgat

SEQ ID NO: 26848 - DNA, 279 bp, Glycine max
gaaaaattttcagtgaagtatgttggagctgcagcaatgtattttgtgtctaagaaactgaagaaaaaatataacattactgatgaacgtgctgctctttatgaggcagcagaaacatgggtagatgctctggatggccgggagttccttggagggtctaagcctaacttagctgacctggctgtcttcggggttttaaagccgatccgctatttgaggtctggcaaggatatggtggagcatacacgtattggcgagtggtatgcaagaatggagagt

SEQ ID NO: 26849 - DNA, 244 bp, Glycine max
ccaaatgtgagtcacgcagctcttcactttgaagactgtagacggtggcgtttagggtttcggaagagcatgcaattgaacccaaatggcgacggctgaagatgctccagtgctccctgaggacctcatagtggaaattctgtcatggggtgaagtgaagaatctcatgcgattcaggtgcgtttccaagtcctggaattccctcatcttcaatcccacattcattaaattgcaccttcaaagg

SEQ ID NO: 26850 - DNA, 280 bp, Glycine max
aagctcaagaaggcgacgctcgaaagcgcggcgaggcggctagggggaggaaaagaagccatgaagcagttgctgaagctgattcttgagtgggttcaaaccagccatcttcagaataagcgccgaaaggagaataatggtagtagtattagcagtgtacttcaggcacagtttcaggatcctagtggccagaacacccaccggggttcacaaagtggttcatttgcacctgaatcaaacacttgtttcaacaaccaaacaccatggttgagttctcaaa

SEQ ID NO: 26851 - DNA, 125 bp, Glycine max
catttccttctccgtctccgtctggagaggactgagtatcactgtatcagtgtgagtgagcctcccataaacctaaaaccctaaatcacactaccatgagctggagaaccctagcttccacttca

SEQ ID NO: 26852 - DNA, 359 bp, Glycine max
ccttttaagggtaaaagttgaaacgattcctatttcataacgaagaagatcttgccagtctcagaaacagaggcgagtgagggtatcagaattggagaagagaggggtagaagcaaaaattatataagcttttgtgctatcaaatagcaacaactacagcgcatagagggttttgcagttttgtgtcatgatgatggattctgaaggattggagaatgggattgaagagttgaaattgaaggaagagaagggtaatgcacatgcacagccacagggtcaattgcagatcactaccttttctgaactcgtcaatgatgttaacctccattttcaaatgattcgatttcccaaacagatat

SEQ ID NO: 26853 - DNA, 516 bp, Glycine max
ctaattttccctccccgaattcggagccaaaaaaattgtggccgggcagtacttatccacgccagaaccagaaatcagcagaagaataatgcaaaaacaacacatggttccctcctcttttgttgttcttccacgtggcacagcctccatcatcttgattctgaattcacgaaccaccctctcttcctctccctcgcttattttacttcctctaacataatagccatctctcatttcacaaccctttggtttctggtgttggtcagaagacgaatgaaggagtgattgaataggtggcacactactagccaatgctattgaaatttcattggggaattaattccttccccaatacgaattgattattatgatctaatccaaattccgggaataatccgtttccgatacaagctgatttggcaaaagtggtaaatgcttgtgaagctgcatttccaattcgaagtggtaaatgcaattgcactttggtttgccctgtgcagtggccgcacccgcagc

SEQ ID NO: 26854 - DNA, 334 bp, Glycine max
ggaaattgttgggctccatgttgagctgaggcaaacattattgcacagtaagtgcaaactgccacttgatagagcgtttgtctttagagtcttctaaaacaggtagagatgacagcttgatagcgcaaacctgttttgagctggtaaacaattgtcctcatctaacttctttatcccttagagggtttaagctacacgattgcaaagttcgtgtactggttaagggatttaggaaactgaaatatgttgacttttcaacatcctattcaatcactggtaacttcttaagaaaccttggaagctgcaatggtgggaacttacttgaggtcttaat

SEQ ID NO: 26855 - DNA, 481 bp, Glycine max
cactgatctgcatcttcttcttcttcctttccaaattgtgtgtgtgatttagaattggcaagatcagatctgctctgagagaattgcagatcagaaatggagaagtcatgcactctggtggtccacttcgacaagggaacgccggcgctggcgaacgagatcaaggaggccctagaaggaaacgacgtcgctgcgaagatcgacgcgcttaagaaggccatcatgatcctcctgaacggcgagaccattccgcagctcttcatcaccatcatccgctacgttctcccctccgaggaccacaccatccagaagctcctcctcctctacctcgagatcatcgacaagactgattctcgcggcaaggtcctccctgagatgatcctcatctgccagaatctccgcaacaacctccagcatcccaacgagtacatccgcggcgtcacccttcgattcctctgccgactcaacgagtccgagatca

SEQ ID NO: 26856 - DNA, 369 bp, Glycine max
ctcgagccgctcagatcccagagatctgcttctgcttgtgtgtgattcagaattggcaagatcagatctggtctcagagatggagaagtcgtgcactctggtggtccacttcgacaagggcacgccggcgctggccaatgagatcaaggaggccctggaaggaaacgacgtcgctgcgaagatcgacgcgctcaagaaggccatcatgatcctcctgaacggcgagaccattccgcagctcttcatcaccattatccgctacgtgctcccctccgaggaccacaccatccagaagctcctcctcctctatctcgagatcatcgacaagaccgattcgcgcggcaaggtcctccctgagatgatcctcat

SEQ ID NO: 26857 - DNA, 437 bp, Glycine max
ggcaccagacccagttctttgggaggcctcaagaacctgaattatttgaggttaaataataacagccttacaggatcctgccctcagtctcttagcaacattgaaggtctaacccttgtggacctctcctacaacaatctgagtggttccctgccaagaatatcagcaagaactttaaagattgtgggtaactctttaatttgtggcccaaaagcaaacaactgttctactattttaccagagccactttccttccctccagatgcactgagaggccaatcagactctggtaaaaaaagccatcatgtggcacttgcttttggtgcaagttttggtgctgcttttgtccttgtgattatagttgggtttcttgtttggtggcgatatagacgcaaccagcagatattctttgatgtcaatgaacattatgatccaga

SEQ ID NO: 26858 - DNA, 458 bp, Glycine max
ctcgagccgaatcggctcgaggaaaggaacatggaaagtgagagagagattatgatgattccatgttttgattttggcaaggcattagaagaagggagtgaggagtggaaagaaatgagcaagaaagtgagagaagcatgtgagagtcacggttgcttcctcttggtttgtgatgagatgattcctaagggtgtacgtgaagagttttttagtaatatggaagcattgtttgatttgcctgaagaaagaaagatgaagcacataagtccaaagccttatagcagctacagtggcaagagccctgtcattcccctcagtgaaacctttgggatcgatgatgttcctctctctgcttcggctgaggccttcacctacctcatgtggcctcaaggaaacccaccttgctgtgagacactaaagatcatgagcttaaagatgctagaattaagttccctcgt

SEQ ID NO: 26859 - DNA, 610 bp, Glycine max
aaatttagttttgcaaagtgaaaagcgaaaattgattgagaccaagtttaggcttggcgcaaaacttgcattgctttgtgtaaggctaactctgcctaactcacgtgcttccgttcattcttaggtctgttgtggccgcatccgtgatttcaattgcagttatatatattagatctacttgccattctgaatttcacactattccattataaaaatgctcaagatcccggagcaccaggtggccgggcacaaggccaaggacggaatcctgggcccactcgtcgacgattttggaaaattctacaagcccctccagaccaacaaagacgacgacacccgcggctccaccgaactctccttttacacctctctcgccgccgccgcccacgactactccatccgctccttcttccccgcctttcacggcacccgcctcctggacgcctccgacggctccggtccccaccctcacctggtcctggaggacctcctctgcggctactccaaaccctccgtcatggacgtaaagatcggctccagaacctggcacctgggagactccgaggactacatctgcaagtgcctgaagaaggacagagagtcctctagc

SEQ ID NO: 26860 - DNA, 368 bp, Glycine max
gtgacttgattggtcttccattgaagtctccactttcattcaacgaggtcatttatgctctacccatgttgtctattctgatggataagggtactggggttgtcaccagtgtgcccagtgatgctcctgatgactacatggcattgcatcatttgaaggcaaaacccgcgctcaggcagaagtatggggttaaggatgagtgggtgctgccttttcagattgtgcccatcattgaggttccccagtttggcaatacctgtgccgagacagtttgcttgcagatgaaactcgtaagccagaatgataaggaaaaacttctagaagccaaaaagcaaacgtacttcactggtttcactgtatggacgatg

SEQ ID NO: 26861 - DNA, 333 bp, Glycine max
ttcagctcttccctctctcacccattcacacactgaaatgagcaatttccagagaatatcgcacgaatcctaccctcccccagggcacggatctccttaccctccaccccaaccgggttacccatcggcgccgcctcatgaagggtaccctccgccgccgccgcctccgggatatggtgggtaccctccaccgcatccgccgcagcgtccgccgtatgactcctaccagggctacttcgacaacgggcgtccaccgccacctccgccgccgcactaccattaccagcacgtggatcatcatcacctccacgatgagcccgggtgcttttcatt

SEQ ID NO: 26862 - DNA, 406 bp, Glycine max
cgctcttgttcctccatttgtcttgcaaactttctgtcgcacaaataactctaaactaagcacttccatacacaaattttctctcccagaagaaatattttcatttcatttcgagtaaaagtaaaacacagttcctgatccatggcatctcgccgccgcatgttgttgaaggtcataatcctcggagacagcggggttggtaaaacatcactgatgaatcagtatgtgaatcgtaaatttagtaatcagtataaggcaaccatcggcgcagattttcttaccaaggaagttcaatttgaagataggttgttcacattgcagatttgggatactgctggtcaagagcggtttcagagtcttggcgtggctttctaccgtggtgcagattgctgtgtccttgtttatg

SEQ ID NO: 26863 - DNA, 351 bp, Glycine max
ggcatgctcctcactgccccacttcccccaagccaacttttagggaaggttaaagacttcctaggagtgatgtcagaagcaaataagcggctggaacttgatgcaaaggaccatcctgagaattatgatattgaagagttaactggaaatgaatcggaagttattgaaatggatttgatgcttggtgtagctgatctccatacacaagaggcagtggctgctgctgaatctgcaatttccacttgtcagcctgtgattccattggctgctgatggtagtgaaacagatttggaagaaagtagtactgataatgacagtgatgatgatattaataacagtgatgattattta

SEQ ID NO: 26864 - DNA, 418 bp, Glycine max
ctcgaccgtgaagagaaggtttcctcgaatcatggacttcgtggaggcaagtgctataagagagtgacatttacgatcttcccacccctctcactctctcatatcatattttctcgttgaaagttcctctctttcggatcaccacatgaccgtttccttctctgttattttcccaaatacaaaaaaaaaaacaaacaccccccctctctcttctttgcgttcttggcgtcttttcttgctgcgagagttacctctcatttttctattccatgtagtttttgcctttgtgggattctttgaccgacttctttctttcctcctagactctctttttggttttccgagcccaagttagcctttttcttttgccattctcgttgtgtggaagattctaccaagtgggtgtgtgtgtttgtct

SEQ ID NO: 26865 - DNA, 317 bp, Glycine max
cacctttctctcctttttcccgttccattacctctcaaacctttctcctccactcaactacacatctctctctctctctctcttgggagtatctgcaattcgtaatcctatccacttgttgaatctgaatatttccaattcaacattttccaaatggcatcctcgtcctctatgatctcaaacccggttccgaacacggaccggtcacgtgacgcgaaacggaggaagaagaaagcgcagctgaggcagcagcaacaacggcaagaggatcagagcaatcccaagtggaaatcccaagcgcacaacaaatctactcc

SEQ ID NO: 26866 - DNA, 320 bp, Glycine max
aaggcgagacaaaacatagttttgtaagtaattttagttcaattttaatcaatgaacggtactaaacatgcttataaaactgaatttaagttttgtgtttattataattattgttgttaagcaggtggcaagtgatggttagttgaagacgattgttttggttttgttctgggcgatgattcggctgagtggactcggccgaagagagtccaactcagtggccagtgagcctgagccccaataattgattagcatgtaatttaaatgataatttgtgaattatgattaagatattttccggccccggcccctttattttc

SEQ ID NO: 26867 - DNA, 601 bp, Glycine max
agtaaatggggatgactcattaccctggtggcagaggaaaaatgtcagaatcagagagattgataatgaaaatgagtctaatggagtaccttatgcttctgcatccaatcagcagccagtccaacgcgtatgggttcctcctcaacctccccccatagctatgccggaggctgcagaagcaatcagacgaccaaaaccagcggcccaaaaggaacaggtgtctgataatcagtcagtagctcattctttagacagctctgatgacgtacatatggccccaaaactattggaatccgaaggtgcagtagagggcagcagtgtcagctcggttcccacctctagtgagatacaagaggagcatgaagtcaaatatgatgagaaatgaaggtgaatcatgcatgatctatcatgaaaaaacatgaagtcggaaataacacttgaagtagtcccatatttggaataagcttgtcacacaatctgtttcataatcatatatagttgtacttttgaactggacatcaatacaatatgcaaatgcacgtatctttctatgcaagaatttgtttactaaagcaaaagttttaattactgaacttttact

SEQ ID NO: 26868 - DNA, 627 bp, Glycine max
aaatggtgaagacttgaataccaaggccctggatgcccctctattaaatggggatgacccattaccctggtggcagaggaaaaatgtcagaattagagagattgataatgaaaatgagtctaatggagtacccaatggtgctgcatccagtcagcagccaatccaacagccagttcaacgcgtatgggttcctcctcaacctccccccatagctatgccggaggtgcagaagcaatcaggcggccaaagccagcggcccaaaaggaacagatgtctgataatcagtcagtagctcattctttagacggttccgatgatgtacatatggacccaaaactattggaatctgaaggtgcagttgagggaagcagtgtcagctcggttcccacttctagtgagatacaagaggagcatgaagtcaaatatgatgagaaatgaaggtgaatcatgcatgatctatcatgaaaaacatgatttggaataagcttgtcacacaatctgtttcataatcatattagttgtactttgaactggacatcaatacaatatgcaaacgcacgtatctttctatgcaataaatttgtttactaatgtaaaaaaaaaaaaaaaaaaaaaactcgagctcgt

SEQ ID NO: 26869 - DNA, 327 bp, Glycine max
atttcatgtcacggaccagcaaggaaaaaagataacagatagcaaaaccatcgacctcattgaaaaggctctaggaccaaagagcaagagcacagaaggggtgaaaaattggccgagcaaacacgttggagtgcattctgttggtgattatacagccattgagctaattggcagagaccgcccaggtctcttgtctgagatttcggctgttcttgccaacctccattttaatgtttttgcagcagaagtttggactcataacaggcgaattgcttgcgttctttatgtcaatgatgcaacaaaccaagttgcggatgatccaaaaag

SEQ ID NO: 26870 - DNA, 275 bp, Glycine max
cagctgttgtctttccttttaggtaaactaatgggggatgattcttttcctagtttggacaaattgagggctaactggactccatctcaagatcgatattttcttcagcttttgctgtcccatgttcacaaagggaataaaactgggaaagtgtttagcagacaagcctgggtaaatatgattgaacaatttaacaccaagtttggtttcaagtatgatgtagaagtgtcgtagaaccgtcacaaaagattcaggaagcaatacaatgatatgaa

SEQ ID NO: 26871 - DNA, 643 bp, Glycine max
tttttttttttttttttttttttttttaacaggatatttcatagctccatatatgggctataatgaggatacatacatatccgcgtagaacaacttcttcaaaagttgcaattgtgctgtctcgaaattaaggtagacaacaacaccgtctccatctgggcttggaaaaatccctaccctatcaacttgttgaaacacatgtgctaaagtgaattgcataggctttccccaaccaaaatcagcttcatacactggcatgttcatccagcttgtgaggagaatgttatgatccctagcatacgccggttttgtaccgtgtccttgtcccatgaaaaaagccctaatgtgatccacttgctcttgccctaaaccaacacttaattgtgactttacatactcacccgtaaccgcgttaactgcttcccttatcttttgagcagcataacctaatggctttgatatgatatctccctcataacatttaggtgtcattgttcttgccaaagcattcccaagataattctcagggattggtggagtcagtaacctattgcgaaaattaacactaaaccgaactatagttgggtggtttgaattggaattctcacccccctcagcacgagccttagatgcacatcaacaa

SEQ ID NO: 26872 - DNA, 288 bp, Glycine max
cgcaaggccatctctcccactctcgcgttccttcttcgtcgcctcgacttcttcgttgcgacactgagagagctgagggagctggcggcgctttgacttcttcacagtgtcactctgtctctctttttcttctcacactcacgcctcacgcagttcctaagtccctagccagtacaacctcactcactttctctctttgtctctctttctctcagattcctacattgtctgcgcactggcaccaatcaaccataagatgtgcaccgtcgctgaaatcggcctcaacga

SEQ ID NO: 26873 - DNA, 259 bp, Glycine max
agtcttttccgggtaaatcaccttgaatgcaggagatggactacaataatgaagcaagctatggtatcaagttcaggaacttatatggttctataccagatgtggtggttccattaatgtatacggaatacactactcgcaaggtcctagttatggaatggattgagggggaaaagttgtctgaagtgaaggatctctacctgattgaggtcatttatgaaactagtttcaagcaagttattctaaatttttaatctgt

SEQ ID NO: 26874 - DNA, 252 bp, Glycine max
aaggaccatttattggtcgacatagaccgcctcatccggctcaacctggattcctggtccgaccgggttcttctcatggaagaagccaagaagataacgtttgagttgacagtgaagcagctgatgagctttgatccaggtgaatggactgagactctaaggaaagagtacgtgcttgtgattgaaggatttttctcagtccccttgcctctcttctcaagtacctaccgtagagccatcaaggctaggacg

SEQ ID NO: 26875 - DNA, 401 bp, Glycine max
gtgtcaccaatatcgaaagctagtgcacatcagagatcaggacgtgctggaagaactcaaccagggaaatgctttagacattacactgagaaaagtttcaataatgatcttcagccacagacctatcctgaaatattgagatcaaatcttgccaacacagttcttactttgaagaaactgggtatagacgatctagtgcattttgatttcatggaccctcctgctcccgataccttaatgcgtgcattggaagtgttgaattacttgggtgcactggatgacgatggtaacttaactaaactgggtgagattatgagtgaatttcccttggaccctcagatgtcaaagatgctcgttgtcagtcctgaattcaactgttcaaatgagattctgtcagtttc

SEQ ID NO: 26876 - DNA, 483 bp, Glycine max
cagaaatctcagcaattgtgtcgtcgtcatcatcatcaggactttttgatgatgtgcctctgagcaaatggaaacataggacggggaagaaaagctcagggaaagatcaatgagcagtttagctattgttatttgtctgtcaagaatgcagcggagttgatgctgtggtacaagtacagttgttagcgtgaatgatgactgccaaattggagatccttagttattaacacactaataaatatgcttagcatgtcttgtagccaccctgtagagagtatataataacagcaatcatccccacgtttataaggagcaaatgcagacacttttgggttctttaggactatattcctgttaaatgacctttcataagttcaggggataggtttagcatatgatttatgtagatgtcgttcatcctttctactcaattgatataattgactcgggcaatctacaatgtgtacagctatacgtgggcat

SEQ ID NO: 26877 - DNA, 495 bp, Glycine max
cagatgaggagttgactggaggattcaatgaaatcacgacaaaggagaagaaatctaacaaaaacacaaaatcagtttccagaggaaagaggctaaacaaagagagaaacttccattatacagaagaatcagatgaagagaagcaggattgtagtgggaggctttctgaagatagggaaagtgtcccacaaggtagttctgaagagagagaagtggatgaatcaagtggagctttgagggaaaatattaacggacaagaatttgattctgaagggcatcatgataacagcaaagctgaccgtagtcctagagaaatggagaaatcacatatagagccatcaaaaagtcctgatgatgatgacgacgacacaattgctgagatttctgatgacgtgcctctgagtaaatggaagtgtaggacggggaagaaaagctcagggaaagaacaatgagcagtttagctattgttatttgtctgtcaagagcagcggggtt

SEQ ID NO: 26878 - DNA, 352 bp, Glycine max
gctccagttgagcctaattccagtgagtccaaatctgacacaacagagccacccattcctcctggttctagtcttggccatggccgtggcaagccaatgcctccatcaggtcttccttctttctcatcatttatatcttccataaatcagccacctgctggtcgtggccgacgtactgcacctcatcctcaacatgatttgcagccaccagactctggacccaaaaaacccattttcttcaaaagagaggatagtgtttctccaacagcgtcaaatgattttttgccacccaaaagatctgttgatcatgcgcatgataacaaacttccaggcagcataccaggggtgttgt

SEQ ID NO: 26879 - DNA, 866 bp, Glycine max
ttttattttacatctctctctctctctctatatatatatatataatcaacaccatccactactttctcacgcgccattaacaaagatatggtacaaacaaagaagttcagaggagttaggcaacgccagtgcgggctcctgggtgtcagaaattcgccaccctttactgaagagaagggtgtggctagggacatttgagacagctgaggcagcagcaagggcatatgaccaagcagccattttgatgaatggtcagaatgcaaagaccaatttccccacctcaaagaaccaagctgaagctgatgacaacaacaacactgacactttcttatctccaaaagctctttcagaacttctcagcacaaagctgagaaagtactgcaaagaccctgctccttccctcacttgtctgaggctagatgctgataattcccacattggagtgtggcagaaaggggcaggaccacattctggctccaactgggtcatgaggttagagcttggaaagaaacaaattaccgtggagggtagtgagtcaacggagtcaccacaaagtagtactaatggtgctactgaaaataatgaagtagaagaggaggatagagtggctttgcagatgattgaagaactacttaattggaactagaagaagaagaaaaaaaaaagggaaccttaatccgtgtcatatatagttcttgaatagtagtccttttttcatgctatccttttcaattcgtttacttttgtgctttctgtaaaaaaaatgtttgtcaaagtgctgatatctatatgatgatggccagtttgatagttacttatattatacactttttaagatatattgtgattgatggtaattatgcatc

SEQ ID NO: 26880 - DNA, 244 bp, Glycine max
caagcgggttgagctacaaaaggctcttggagatcaccttgcatggaaagataggtatcccgtgttctttgacgctatagcggcacgattacttccagtcatccccttgattatttatagacttattgaaaatgatgcgatggatacagcagaaagactgttggccatgtattctccattgcttgcttattaccctctaagatttacatttgttcgtgatatacttgcatatttctatggtcat

SEQ ID NO: 26881 - DNA, 292 bp, Glycine max
ggtcttggtgcttgatgaagctgatcatttactagacatgggatttcgcaaagacattgagaagataattgctgcggtccctaaacaacgacaaactcttatgttttctgccactgttccagaagaggtccgtcaagtatgtcatattgctttgagaagggatcatgaatttatcaatacagttcaagagggaacggaggagacacattcacaggtctgccagacgcatttagttgccccattggacaagcatttctctttactatatgttcttctgaaggaccacattgca

SEQ ID NO: 26882 - DNA, 299 bp, Glycine max
actcgagtcgaatcggctcgaggaaaagcacggaagaaagtgagaagcactccaagttttgttgttgagtgatgagtcttgaaacatgaagcagaatgatcggcgaagggagtgtttgtctaattcgaattcagaaagttgttctttctcattgatgggaagagaaccccctcagaatttgttaccttccaaacacgacttccccagacttgtccttgtggttgcactcgcatcgctagttgcttggacctgcaacttcctcttcaccccttccaaacccttctgcgaccccaacctcc

SEQ ID NO: 26883 - DNA, 247 bp, Glycine max
caattgtcttttgctcagttcaactgtgggagcaatcacaggagtcactggtgttgtgtgggttagcacacaaaaggcatggcattggggttttttcatcataaccatagcttcctccgttggcttcgtgacccttgctcttggtaaacagtgctaccgcatcaaaactccaggagatagccccactttgagaattgctcaggttattgttgtgtcttttaagaaccgtaagttgtcattgccggag

SEQ ID NO: 26884 - DNA, 462 bp, Glycine max
agaatacataaatgaactggtagaagttgataaagaaggggggaagcagctttgtggtgggacatttttgaaccctggatcatgggatgctgcacttcttgctgctgggactacactatctgcgatgaagcatttactgaatggggatggaaaagtttcctatgcattggttaggccccctggtcaccatgctcagccttctcaggccgatggctactgtttccttaacaatgcaggtctagctgtgcaattggctttagattccggctgcaagaaggttgcggtcatagatattgatgtgcattatggtaatcgcccggcagaggggttaaatcgatctaataaggcccttaccatctctcttcacatgaaccatggatcatggggtccatctcatccgcaaagtggctctgttgatgagctaggtgaaggagaaggttatggctctaactcgaacatacc

SEQ ID NO: 26885 - DNA, 257 bp, Glycine max
ggcatagatacatggaaaaaggaaacaattatgaaaaaggaagcagctaagatgttggaatcggattcctctcctggctatgtttctgaagaagactataagtctctaccagctggttcagctgatccacgagatgaggaggtccctttactaaagaacatctattggaaagaattattagtccttgcgtatgtctgggtggcttttctcattgttcagattattaagacatacactaaaacttgctccatactgta

SEQ ID NO: 26886 - DNA, 445 bp, Glycine max
cacctgttgcatatgcctcatgccccatagagacaatcaattatgtttctgctcatgacaatgaaaccctatttgacattgtgagcttaaagactccaatggatatcagtgtatctgagagatgcaggataaaccatttggcaaccagtattatagcattatcacagggtataccattttttcattctggagatgagatactccgctcaaaatcactggatcgagattcttacaattctggtgattggttcaacagacttgacttcacatacaatagtaataattggggtggtaggacttcctccacaggagaaaaatgaaaagaactggccactaatcaaaccaagactggcaaacccatccttcaggcctcagaagactgacatccttgctacggtggacaatttcttgaacctgctgtgtataagatactcttcaccacttt

SEQ ID NO: 26887 - DNA, 563 bp, Glycine max
  unsure (1)..(563): unsure at all n locations
gttgaagccatggtattggtggtcatggcctgttctgccattaggcctccagtggcatgaacaacgccgtcaaactttagggtatggtgctgacttggctgtgatacttatccaatctgcaatatatgtgggagtaatagcaatgacgcgtttggcaaggccaagcttctcaaagctatgttataggcgctctgataagagcatcacccttgttcataacagcctcaaattagtagctttgtggtgcatccttgctgcttacgtaacaccattctttaccattcctcacacggttcaccctcgttctgggttggatcctgtatttgcttgctacctttgcactttgctcaattgcaatcaatatctttatgctaccaatgttaccagttttggtaccatggcttggaattgttggggtccttatggtcatggcatttccttggtatcctgatggngtagtgagagcactgtttgtctttgcttatgccttctgctctgcaccatttttgtgggcctctatggtgaggatagttcaaggtcttcagttatctctagaaagggaa

SEQ ID NO: 26888 - DNA, 398 bp, Glycine max
ggatgatatccggtcattggaacgtgaccgatgtctgcaacgcgctgttaggcggcttcgccgccataacagccggctgctccgtcgttgagccatggacagccatcgtgtgtggttttgtcgcttcagtggttctgatagcgtgcaacacattagcagagaaggttaagctcgatgatcctttggaagcggcgcagttacacggtgggtgtggcgcgtggggggtgatattcacggcgctgttcgcgaaaaaggagtatgtgagccaggtttatggggaggggagggcgcacggttgttcatgaggggtggagggaagttgctggcggcgcacgtgattcagattttggttattgttgggtgggtgagtgcgaccatggggaccttgttttgggggt

SEQ ID NO: 26889 - DNA, 659 bp, Glycine max
gttcttatatgtttccatgatgttacccttgatgatactactgacattgcaaatcacacagggtttgctaaccgtaaaagaacatatgaagtccaagggataaacatgactggcttttttcctgttgatttcacattaaaggaactaaagtcattgagggtgaagcagaggtatagcttcagggaccaacaatttaatggaaaatttcaaatcatcacttttgaagagttcattaccatagcactggatgcacccagagttgttggaatatatccagagataaaaaatccagtatttatcaatcaacatgtgagtatttctttctagaatccaacaaatgtacatgttaggagaggggggatttgtagcaacaaagataagttgttccaaaaggcatacctgttgatatataattcatctaactgaagaatacattagaatccaccattcttattgtacatatgtatttgatggttagtgctggactgctcgtggtattgcacactcaatgaaataaattcccatctttaaattaatgctaatgagtattacaggaggtgagattatgttgctggaagtttataagggtgcaaattgcattaagaattcttctaccctgttagaatggtttatgaaaaatcttacaatttcatgcttga

SEQ ID NO: 26890 - DNA, 472 bp, Glycine max
attttctttcttgatggtgtcactctaattcatttcctttccccatcccccaactcatcggttccttctcgtcatgaccgcctctcaactcatctccgttagtcccgacgaactccgcttccactttgagttggagcagccaacattttgcgatcttaaggtcctcaataactccgagaactatgttgctttcaaggtcaaaaccacttctccaaagaaatactttgtgcgacctaacaccgctgttgtacagccctgggactcttgtatcatcagagtcaccctccaagcccaacgggaataccctccagacaggcaatgtaaagacaagtttctcttacagagtacaacagtgaatccaaatactgatgttgatgatctcccgccagatacttttaataaggagagtggtaattcagtagaggagttgaaattgagagttgcatatctctctcctacctcacctgaagga

SEQ ID NO: 26891 - DNA, 468 bp, Glycine max
ggcttgaactactacagaaacctcaatttaaattgggaactgacagcaccatggactggagcaggcatcgtagatgtaccggttaagttcatcacaggtggcgttgacttggtgtacacttctccggggatgaaggagtatatccacaacggtggtttcaagaaagatgtgccaactttagaggaagtggtggtgcaggaaggggttgcacacttcaacaaccaagaagcagcagaggacgtgagcaatcacatctacgacttcattaagaagttctgattctcatcagtgcttaatcattccattatgtccacaactttgtgccgttttctgtttcaatcaacccgaataaaatcataccgttttagtgcgcgtctagattgcaaatttggagtttgactcaagtatgtaatctttggtcaaaatgaatgttatcctgtatgatatcaatcaatattactttttatc

SEQ ID NO: 26892 - DNA, 479 bp, Glycine max
agacgcacagcgcgaaggcaccaacccggaagtccgggaccgaatcatgcgtgcgacaaacaccaacacggcccgtgagcttagcaacacatcattcaaaggctatgatgctgatatatcctcaaggagtgagagtcatcgtgcatacagcgaacttaatttatgtagattggaacaataaaagccaaggtttgtggatgcaagatcttccatggaaagatcaaaatagtctgagcaagggatctggatttgaaaatgacctggttgaatatctcagtgtgttgaagtggccagaattctcagttaaccttccattccttggaagcgtcagtatatgtccatctttcttcaggaagtttgattatagtgatgcaagggtattttcccattaattgttcttaaattatttcctttgttattaattattatgattatttgttatgttgtaaaattgtaacattgatagataagctgtacat

SEQ ID NO: 26893 - DNA, 281 bp, Glycine max
tttgtaagggagacaaattgggaggatcagccaggtgccttagaacttcttggggccctcatcaccagaaacaacaatatggggcaagaaaaagctttgaaggaaatgaaactaaccgagcaggaaaaagttaggggagttgctaaatcaaacttcttccaaaccatttggtggaccaacttgctcgcaatgcgggaagtcgtttaagcctgagaaaatgcacaaacacatgaagtcttgtaaaggaatgaaagccttgggaaagtcatccacaactgttg

SEQ ID NO: 26894 - DNA, 276 bp, Glycine max
acaaagtatgaagtagagtccaagagacacttcagtgaaattgtgtgtgcatatgtgttggcgtatctgcatgacaccaaatcagcggcagatactcacaaaacctctacctcgaaatttctcatttaaaacaaagacaacttgggagaaaaattcatatcaagtggccatgatgggggttgatttaattttccttttttcttcctctctcttcatctcctatatctctcttctctgcttcaaaaaaattttcaagaaaaaaatttccctttatta

SEQ ID NO: 26895 - DNA, 260 bp, Glycine max
ctctcattttgcaaagaggaggcaccatgacaagcactcttctgtcgttgcttttcttgctcttctcccttctcattccatccttcatttcctcttcaccagttcgaaaccctgaagaagtcgtacaagaggtcaacaggaaaataaatgggtctatagcaaggcctaggagaaacttgggctacctctggtgtggcagtggcaaccccattgatgactgttggaggtgcgaccccaactgggagcagaacaggcagagg

SEQ ID NO: 26896 - DNA, 271 bp, Glycine max
gaacgattactcctctcccaacagacacaggagctgtccttatcctcatttagccccagttcatgaagaagttaaagcaccagatctcaatggctactacagttgtgatgatagtgctctagcagttgagcaagtgattgagagtgatcactttcacctgaatcgagagcagccattgcaaactaatgatatagggaatgttgcttgtagaacagattcaggaggtacttatgtcaacagttggttcagcattgttaaggaaaaaatagag

SEQ ID NO: 26897 - DNA, 287 bp, Glycine max
atcacccataatattttgagcattcagaaacacaccaagcgaacgcgcactagcaacgacctaacaacaatggctaccaagatattatccctccttgcgcttcttgccctttttgtgagcgcaacaaatgcgttcattattccacaatgctcacttgctcctagtgccattattccacagttcctcccaccagttacttcaatgggcttcgaacacccagctgtgcaagcctataggctacaacaagcgcttgcggcgagcgtcttacaacaaccaatttcccagtt

SEQ ID NO: 26898 - DNA, 275 bp, Glycine max
tcattgcatcagtgtcaaacatcttttgtttcgtctagatccagagcatcagatataactgaaaataacaatacgagtaatgcaaaccaggatgcgtcttatggcaaaattactcatattctatcttcctcaagtgatttttctaacgcaaaggtgcagaagtgtgatccacctatgaatagcagtggttccagttccaccataatgaatttctcccatcttgcaacgcctgctgctatggtaagagctaatcttcatagcgttggcctgaagtc

SEQ ID NO: 26899 - DNA, 268 bp, Glycine max
aaaacatggagctgaaagtccaagagaaggccaaaacaaagcagaacttggaaagctgcaaccatccagatcttttgtgtcaattgataatacaaaacccaacaaccagcaacctccacatccaaatccttttcatgaatcattagatgttgcaattaagacatctaatagcgtgcagaatggcaaaagctcttccgacatatccattggtgctgttgaaaatacatcacacttccatgtagtggagaaagctcatcatgatttgcca

SEQ ID NO: 26900 - DNA, 301 bp, Glycine max
ctcgagccgcaaatttctgggcgtggcggctaaagtttgtgagtcgtctctgccaccaaccccgcactgtgtgggatcttcaatggcaccttccttatgtctatcccttccaaacacttccaccttctctgatttccacaagctacactgtttctgtttccacccaaaaaaaccgattcggcaatttatgtctggttgggtcccagaagctcggcacgtggcggcccatttgggttaccgaaagaagcttaatgcgttgagccaagatggagagagctaccacgggacgatggaggataac

SEQ ID NO: 26901 - DNA, 280 bp, Glycine max
atttataccaactagcaacatacatagtgaagtacactagcaacatcttagcaccaatggcagccaagatttttgccctccttgccctccttgctctttcagcaagcgttgctaccgcgactattattccacaatgctcacaacattacctctctccggtgacagccgcgagatttgaatacccaactatacaatcctacaggctacaagaggccatcgcagcaagcatcttacggtcgttagcattgaccgtccaacaaccatatgccctattgcaaca

SEQ ID NO: 26902 - DNA, 255 bp, Glycine max
agggagttcacctcgctcggtgtgcagtgagctcgagtactagattgttgactgcataacaaaacccatcgttgtcggatcggagatgatgagttccgtcgtcgtggatgctgctgctaccagcagcagcgagaagaagacgtcgtggccggaggtgatgggcatgtccatcaaggaggcgacggagaccattctcaaggacatgcccaacgcgtacatccaggtgctgcctgttgggtcgcccgtgacgctgga

SEQ ID NO: 26903 - DNA, 657 bp, Glycine max
cggctcgaggggatttcttagtgactcccagtcttcagtttcaccaggaaatttatcttctactgccgagttctcttggcaactcggttctgataccagtcattgcaaggttttcatggagtctgaagatgtaggacggacacttgacttgtcctgcctttcttcttatcaagagttgtacatgagactcgctaacatgtttggaatagagaggtctgatatgttgagtcatgttctctactgcgactcatccggtgctcttaagcaaattggagaggaacccttcagtgagttcatgaagacagcaaaaagattgaccattctgacggattcaaacaacaaagatagtagaagtctgttttgcagggtttggatcacaggaactcgaaatgctgaacatggattggatgctgcatcaaataagacaggtcctctcagtatatttgcttaatatggtgtggcatggcatcggagacattgtttttagatatgaaaagttgaaggacatagttattactcagttgtaagagatgctaatatgaactgaaaattccatcaatattggcgtctttgttttcgatgtccatttgtagaaaataatgatttttcctgtatgatggacaattactattctaatattaattaattaattaacct

SEQ ID NO: 26904 - DNA, 467 bp, Glycine max
cacattcctcagcccaagcaaccagaagttattcaagtgcagccagttaatctggaccttggaggaagtgatactagtgattatagtagtgatgatgccagctctgatgacgaagattgacaagtttgtgaaactgatcaatctcaaattgataactctacaggagggctatagagagagaaaaggactaagaaggatgatcagctggggttggaattgaagcaatcctagacatctagctacaataatgaatttgagaaaataatccattgcccatcgataacccacccaagatttcatttctttcgtcatttacttttttcgtccaaactcagcctgtagaagctaaattttttaacaaattgattctgatatttttgtgtatatattgttctcaattcttattattcctgtattttgtagaggtagctattgagttcaatgttttgattagaaacctctgattt

SEQ ID NO: 26905 - DNA, 409 bp, Glycine max
gtccgttttgagataggaatgaggaacataaacgaaaatcagaggaatgagtgagactgggaaccccgttttgtttcactttcctcatccccaaccccaaccccttataacactcaataacacgcacgcagacttagactcactcctttccatttccaacgcaatggacccatggctcgacgatcttaccgacgaccttcagagtcttagcttcgcctccaccgccaccgcggacatcaagcggagcaccagcttcggctccgaaaccaccaccctaacggcctcctcctccgcccacctccccgccaacagcaagccccacgcgccctcctccgacccccgctgggccgccatccaccggatccgatcggactcccccagccgccgcatcctcccctccgacctcctc

SEQ ID NO: 26906 - DNA, 888 bp, Glycine max
cgctcattttcacaaacttggtttttgttcttccaacaacccaaatctctgacctctccctctctctctcttgtgattctctttctttctctctcttcaaacttggacagtttatggcagcagctagattgtcggggcatgaattgtccgatctgtgtcttgggaaaccgccgctcaggtccctctccgtccgcgacaccgtagccgacgccctcgccgccttgaagaggatcgacgacacctacgtcagcgtctggaactgtaaccactctttcattcgaaaacaacaacctcaaattaaatcccaggaacagctccaatgctgctgcacctgcatcggtaaggtttgcatggtcgacatcatctgcttcctctccaaaccccaaaacctctcttcaccttccgccgcctttctttccccaatctccgctctcctccacgacaactccgccgtcctcgtccgccacctcccacccaccgccagtttactggaggctatagatgttatgcacgaaggggtgcagaacctggtgataccaatacaaatccagtttgaatctttgaactccaacaacgtgcaccacaatgacaacaccacctactgttggctaactcaagaggacgtgttccgctacctccttaactcaattggtgtgttttccccaacaccggggaaccccatcaacaccttaggcgtcatcgacacacaaaacctctttgcagtgtgctatgatgaccctgcctcctctatcttggacctcttggccttgtccctcatataccaaagctctgtcgccatcgtcgacccaaatggtaagttcggtggcgaaatctcccccgttatgctcaactcctacgacgaatcggtcgtgccggctatagccaccc

SEQ ID NO: 26907 - DNA, 254 bp, Glycine max
cttccaacaaccaaaatctcgcttcttttgtgattcttgttccctcgaacagtgtatggcagctagattgtcagggcatgaattgtctgatctgtgtcttgggaaaccgccgcttagggccctctccgtccgcgacaccgtagccgacgccctcgccgccttgaagaggattgacgacacctacgtcagcgtctggacctgcaaccactccttcatccgaaaacaacaacctcaaattcaatcccagaaccaat

SEQ ID NO: 26908 - DNA, 575 bp, Glycine max
ggtcaacgcatggagattgttgaactacctaaccatccttattttatcggtgctcaattccatcctgaatttaaacaaagaccaggaaaaccttctcctttgttcttaggattcattggagcagcatgtggacaattggatgctgtcttacagcgctcttcaattgttgataatggtctctcaaaaggagtcattaatgatatctctgcagtcaaaacataccgaactagaaccgcgacaaggacagcttataggtctgctgaatatgtatatgggagttgcaatggattgcatttctaaatgttacttaagggtcttcctccatcatcttagagttttcaagataaatatatgttgttggctttcagttatgtaggagagagcttgtgtgtacagtcaattgaaccttggtaggtatagagttttcagaggatacagagaagagcttggtcacggtctttttaatgggaccagctcatttaagtttataatggtttgagtggggaactctgaagcttgccttgtgtttcaggcaatgacaactcttggttttgcaaagatcttagtctacagag

SEQ ID NO: 26909 - DNA, 806 bp, Glycine max
  unsure (1)..(806): unsure at all n locations
tcgccaacaccaacgatgcctccttccccgcctcctccgacgacgactcctttgacggaaagcccccaccgcaccccaagtagcacttccaacagcagcaccaacttcctcaacgtcacgacaagaaggtcgaggccaagaagtgcaaataggagaaggaggagctcgtcaacattttctccctcattgcctccttcatctacctcctcgacttcttctccgagatttgttcttgttcttgattctcgttgttggtcattcaaatctgttcatgttcttgattcttgttcttggtcagatcttgttgttttgtggtgggggtgggtttgcgacggtggaggaanaaggggggttnngnttnnnntntnnntgtgtggntgggnttcgtgggtgtnngtgtttgtgnttttttggggttgtttttgtgttgggttgngggggnngnnnnntgngngntnngnnnnnnnnnnnnnntnnnnnnnnnttnntnnnnnnntnnnnnnnnnnnnnnnnnnnnnnnnnntnntnnnnntnnnnnnnnnnnnnnnttttnnnnnntnnnnntnntnnnnnnnntnnnnnnnnnnnnnnnnnnnnnnnnnnnnnnnnnnnnnnnnnnnnnnnnnnnnnnnnnnnnnnnnnntnnnnnnnnnnnnnnnnnnnnnnnnnnnnnnnnnnnnnnnnnnnnnnnnnnntnnnnnnnnnnnnnnnnnnnnnnnnnnnnnnnnnnntnnnnnnnnnnnnnnnnnnnnnnnnnnnnnnnnnnnnnnnnnnnnnnnnnnnnnnnnnnnnnnnnnnnnnnnnnn

SEQ ID NO: 26910 - DNA, 287 bp, Glycine max
agaaaaaggaaactaataattcactgagtgtctgtctcacgcagcaacattaccatgggaacgccgtacccaactccgatctcaacctccgaaacccgaatcggctggatcggcatcggcgtaatgggcttcgccatggcctctcgcctcctttctgctggctacaccctctctttctacgcccgcaacccttccaacccttacgccctctctctccaatcccaaggcgccagcctggcccagtccccggacccactggcccaactctcagacgtcctcttcaccag

SEQ ID NO: 26911 - DNA, 478 bp, Glycine max
tttgtctaatttctcattcttaatctttgtctccctttgccaggttttttccttccttgtacacttgatgtattttcactctgtctctgcagatggaaaattcgagaagtcagcaatagcggactttgtcttctccaacaagcttcctttggtaacaatttttacaagagaaagtgccccatcagtcttcgaaaatccaatcaagaaacagttgttgctgtttgcaacttcaaatgattcagagactttggtccctgcatttaaagaagctgcaaagtctttcaagggaaagttgatctttgtatatgtggaaatggataacgaagatgttggaaagcctgtttcagaatactttggtatcagtgggaatgctccaaaagtacttgggtacactgggaatgatgatggaaaaaaatttgtgcttgatggagaggtgactgctgacaaaattaaggcatttggggaagatttccttgaa

SEQ ID NO: 26912 - DNA, 285 bp, Glycine max
atcgctgtgtcaaggagatgactgaagtagttcaaggggaccgccgccctgtcgttaccttcaactacttcagtcatccatatgatcttcatcgctgtgtcaaggggattcgcttggccattaaggttgtccagtcaaaacacttcacaaactacactttgtgtgacaagaaaaccacagaggaactgctgaacctcactgtcaaggctaatgtcaacttcatacccaagcatcccaatgacacagcgtcgatagcacagttctgcaaagacaccgtgtcacaat

SEQ ID NO: 26913 - DNA, 389 bp, Glycine max
accagggcaatgctactgacattcattaaaggcccagaagttaagatgctgtctttccatgtaaaccttttcaaccaccgaaacggccatgtcgtacatccacacgctacttctggccttatgaccatatttggtgctctcgcttctgtcgcaagcaacgtctcttatgccatgtggcttatccttcaggcaaagatgagtgaaagatacccgtgtccttattcgagcacagcgttgatgtccctaatgggggcagtgttctccatttcgtttgctttttgtgttgaaagggatttgagtcagtggaggttgggttggaatatcagactattgactgtggcttatgcgggtatagtggtttctggagtgatggtagccgtgatttcgtg

SEQ ID NO: 26914 - DNA, 308 bp, Glycine max
ctcgagcgaatcggctcagtaccctgggattattgagactctggagcttgtaagaagagaactgactggagattctagaaaacatgtttagttgtgtgttctggccaggtaaatcgacagacaccctgttgactcaaactgtatctgtccatgctctggatctgtaaaacccggagcagtgataaggaaatcattatctgcaaaccccccacatgaccattgatcaaccacactggatgtggagaattgcaagtaatttttcagggagcaccgtcatagtgttaattggtaacaagttgtactgttgt

SEQ ID NO: 26915 - DNA, 482 bp, Glycine max
ccctcgcgttcggttatgctattatgacaacaagatcaatggatatgaattggaaaatgagggcaatccgagttttgccaatgtttcttttgcctgccttgtcttcggctacatatactgcatttgtcagcttcaccaggatgtttatccgtgccagttgaccggaggactgaggactaggagagccaacaaccagaggatgagtgtttccgatgccagttggaggagagggccaacaaccggaggacgagagagccaaaaatgcttgatttttaacattacattcatcaaaagggtgatcgcaaggaccagaaaattcttgaaagtcttagagctgaaaggaaggcaaaaattgatgagctcaaagagaagacaaattattacattactcaacaactcattcagagctgaaagtcttagagctgaaaggaaggcaaaaattgatgagctcaatgagaagacaaattattacattactcagc

SEQ ID NO: 26916 - DNA, 481 bp, Glycine max
ggccttggagttaaaagccgatcttcttgttttgttgagtgatgtagaaggtctttatagtggccctccaagtgatccacattcaaagcttattcatacgtatattaaggagaagcatcagaatgaaattacttttggtgacaaatctagagtgggaagaggtggaatgactgccaaagtaaaagctgctgttcatgcagctgatgctggcattcctgttgttattaccagtggttttgcagctgagaatattatcaatgttctccaaggacaacgcataggaactctcttccataaagatgcacatgagtgggtccaagtaaaagaggttgatgctcgtgagatggcagttgcagccagggaatgttccagaaggctccaggccatatcttctgaagaaaggaatcaaattttacataaaatagctgatgccctggaagcaaatgaaaaaataatcaggactgaaaatgaagctgatatt

SEQ ID NO: 26917 - DNA, 556 bp, Glycine max
  unsure (1)..(556): unsure at all n locations
caatttataaagagaaactatagtctatagctgccacacattcaaacagtagctaaaagcatcaaaagtagtatatatttttatgtttcagtaacaacactaccaaaaaaaaggcaaaatggatctgcaaaatgtgcaaaaccatagcatgatgcgtttggttctgtccactgatgccaagcctaggctgaaatggactcctgagcttcaccaacggttcactgaggctattaatcagcttggaggtgcagaaagggcaactccaaagagtcttatgagagtgatggggattccagggctcactttgtaccacctcaagagccatttacagaaatataggcttgggaaaagccaaccgctagaaacctgttctgacaacaagcaacaaggttactgtgaaatcagaacagtgatggtcatttcagcaaggaaatcagcattgggacccagaatcagatgactgagtaatagttataaactgagcnatatttgaatgtcttttattgatgntgcatgtgaacagntatgtacttattttatgcctagaattttcatt

SEQ ID NO: 26918 - DNA, 550 bp, Glycine max
ctcgagcgattcggctcagtaaatccaaagaaccccatctacggcatttcggattgacacaacaatacagtcacagaaacagtttccaaagaaaaaacaaagaaaatggatgcagaaacggagtctccggcgccggaaacatcgccggcggtgatccacccggcagtggcaccaatctcctaccttctgggcacatggagaggccaaggagaaggaggcttccccactatcaattccttctcctatggcgaagagcttcacttctcacattcccccaacaagcccgtgatagggtacactcagaagacatggaaactcagctctggagagcctatgcatgctgagagtggatactggcgtcctaaacctgatggcaccattgaagttgtgattgctcaaagcaatggtcttgtggaggttcagaaagggacatacagcgctgaagagaaagtgatacagcttcagagtgaaatagtggggaacgcttctaaggttaaagagataagaagatgtttccagctggttgatgggaatctttgatatgacgttc

SEQ ID NO: 26919 - DNA, 258 bp, Glycine max
atttggtgattattttggtgatgtaaaaatgtacattgaagaacgatcttttaggagatttgttgaagcctgcctggaagaaacagtggttgtttatgttgatcgtcttttaacacagaaaaattacattaaggaagaaactattgaacggatgaggctagatgaggaggttatcatggatttttttagggaacatatcagtgtttctaaagttgaaaacagagtgagtgtactcagcgacttgagggagcttgcttc

SEQ ID NO: 26920 - DNA, 326 bp, Glycine max
atcctatgtaaatactcatcatcatcgctattgtatcgtcgcagacacaacaacctaagcagaagaataacagacaaatcaacaaccactgcgttcatcagtttttacaagtcctcgcaacatgttcatgtctctcttcagccacttcgagatcgcacaggcccagaagtggaggttttctttgtcccccgtaaaaggtacgaattccaagcccaacgcggaagccacctcttcctccgcagagtccaaaaccgccggaaaagataagaatccatcacaacccggtgggcccaggtttgcgccggagttggatggactacactgct

SEQ ID NO: 26921 - DNA, 442 bp, Glycine max
ctcgagccggcttactgagaaatcagatgtgtattcatttggggtggtgttaatggaagtgttatgcacaagaccagccttgaaccctgtccttccaagggagcaggttaacatagctgagtgggcaatgacctggcagaaaaagggtatgcttgatcaaatcatggatcaaaatcttgttggcaaggtgaatcctgcttcccttaagaagtttggggagacagccgagaagtgcttggctgagcatggcgtggaccggccgtcaatgggagatgttttgtggaatcttgaatatgcattgcagcttcaggagacctcttcggcccttatggagcctgaagataacagcacaaaccacatcactggaattcagttgacaccccttgaccattttgataacagtgtgagtatgattgatgggggcaactcttgcactgatgat

SEQ ID NO: 26922 - DNA, 529 bp, Glycine max
gcaacttttcatttgagaatcagccctgtctgtctgtctctctgtgttcgactcgatcgatcacagctagaagatttagtagttcatatcacgctaacggactatccaactaagaaaaaacagagccgccgaatcacaattttgctcgatgcttcttcagatcagattgcttatagatccagtcgtcgattcgtgatctgagctgcagattggcaaataaaaaccctaacatcggtaatcggggaattttgaaggtggctcagcccttgcgtcatgctcttgcgcgtgtttgtcagattgatggtagtagtatgagagatatgcaccggaattctactggtagtactaacactaataagatatcatcatcggcaataaggctgccctcacctcaacaatctctaagacgcttgggattgtgttcccagatagctacgggggagcactcttctcctatcgtcttccctgaaaaacgtggcaaagtcaaggcgacttccaggaagaccagtgtcacccacactaccattcg

SEQ ID NO: 26923 - DNA, 728 bp, Glycine max
  unsure (1)..(728): unsure at all n locations
acgagcaaccatccttccccaacgacactaggaggaagacccctcttaagaacctcaagaagaaattcgacaaaaagaacgatgccaaggcatgggtcaacactgtcaccgaatccttatccgaacgcatccacaacaaacactggcttcaggccctccaggtatttgatatgcttagagagcaaaccttttacccaccccaaagaagggacttgcatgaaactcattgtgttgcttggaaaatctggtcaaccccaccgtgcccatcagctttttaccacaatgattgaagaaggtttagaacctactcctgaactgtacacagcgttgctcgctgcgtattgcaggagcaacatgattgatgaggcgttttcagttcttaatgagatgaagaagcttcctcgttgccagcctgatgttttcacttacagtaccttgatcaaagtttgtgtcgatgctttcaaatttgatttggttgagttgctgtatgaagaaatggctgaaaggtctatcatgccaaacacagtcactcagaacattgttttgggtggttatggcaaggcgggcatgtttgatcagatggagaaagtactgtccagcatgctgctgagcactacatgcaagcctgatgtttggacaatgaacacaatcatcagtgtttttggtaacatgggtcagattgatatgatggaaaaatggtatgaanaattccgttattttgggataga

SEQ ID NO: 26924 - DNA, 497 bp, Glycine max
gctaaagataggtcaaatccaacgctttcttcaacatacatatctcaattatgtagcattagcatacccttttttactcttttttcttttcctatgctaggctcaagccttcctagctcccttccttggctcaaaagattttcccttgattttgccaatttggtgcatatctgcttcgttttgctttctgtgtcttcaagtcttacttggaagggtcagatttgctgcaaatctctccatttccccatcatcagaaggtttaatttcttggtttactctatagctacttgaaagaagtcaaaaaagagataatggtgaggggaaagactcagatgaagcgtatagagaatgccacaagcaggcaagtaactttctcaaagcggcgaaatgggttgctgaagaaggcctttgagctatcagttctgtgtgatgctgaggctgctctaatcatcttctctccaagagggaagctctatgaatttgctagctccagcatg

SEQ ID NO: 26925 - DNA, 727 bp, Glycine max
ctcgagccgctcgagccgattcggctcgaggcccatccttgcttctctctctctctctctataagtttaactttgctagctaactcaaaagcgtgtttcaaacctcaaactccaattataagccaccccatatagatctcttttcatgctaaacacacacacacgccatgaagtccaatccaaaatcaaaaacaccaccccacttattatactaccttctaataatcctctccttactgttcttcttcccgtgtgtatcctctacccaacaattcaaagaagcccctcaattctacaactccccaaactgcccctcaattgaacacaacatatgctccgaggaagccgtccacgtggcaatgacactcgacacgacatacatccgaggatccatggcggcgatcctttccgtcctccaacactcttcgtgcccccaaaacaccttcttccacttcgtgtgctcctccaatgacaacaccaacgcgtccctcctacgcgccacaatctccagcacattcccctacctgaatttccaactctaccccttccacgacgccgtcgtttcgggcctcatctccacctccatccgcgccccactcgattgcccctcaactacgcgcgcgctacttggccaacctcatcccgccctgcgtgcagcgcgtggtgtacctcgactccgacctcgtcatcgtcgacgacatcgtcaagctcgcgacatcctcgttgg

SEQ ID NO: 26926 - DNA, 288 bp, Glycine max
gcaagcctagcctatgcctaaccttgcttgtcttggtttatgcatgaatggctcatttactggcgagcaaccccaatgcttcacagaaacttacctgctcaaacttggggtactatggtgttagaagtagaagaggatccagaaccacgggtgcgtgttacagagtgggaaggaaaaggcgaggtggtttggtgttgcaatgcagcagcacaactgatcaggatgtgaggttgcagattgagagtggtagcatcggaaagcttaagcagcattttgaatatttggtgt

SEQ ID NO: 26927 - DNA, 972 bp, Glycine max
acgaggagcagttatggttctggagggcttgggcttgggccatacggggccttttcgggttttatgagggaggagagtgggagggcgaaggtgagtggtgaatcagtgagagaagcagttactttggcggctagtaaccaagcgtttgaggtggtttattatcctcgagcgaatactcctgagttttgtattaggacctcggctgtgagaggggctatgaggattcagtggtgttccggtatgaggttcaagatgccttttgagactgaggattcttccaggataagctggttcatggggactattgcttctgttcaggttcttgatcctattcgctggcctaattcaccttggaggcttcttcaggtacacactatttcaattcatgcttgtctttgccaatattctaaagttcgaattttcatcgcaacaggttagttgggatgagcctgatttgctacataatgtgaagcgagtgagcccatggttggttgagttggtatctaacgtgccaatcatccatctggcagccttctctccaccaaggaagaagcttaggttcccccttgacgttcagtttccgataccatggttgacggccaacccctttgggtctagccctagcagcccctacgtgttgtctatctgataacgctcctgcaggcatacagggagccaggcatgctcaaattggaatatctttatcagatctccaccttaacaataagctgcagttggggttgcttccgactaacgtccaccagcttaatttgcacactgggatttgtaatggcaacatcaccaaccatggtaagagtaaagaaagtctatcatgcttgctgaccatgggaaattctaacaagagtttggagaaatctgatcatgtgaagagacaccaatttttgcttttcggtcaaccgatactcaccgagcaacaaatctctagatcttctagtgatgtgttgtctcaaa

SEQ ID NO: 26928 - DNA, 519 bp, Glycine max
aattcgattgttagaccctccacttcatgaatttcttccagagggtgacctggaacacattgtcagtgaactaacttctgagacaggaatgaaagaagaagaaatcttctcgaggatagaaaaattatcagaagtgaatcccatgcttggttttcgtggctgcaggctgggaatttcatacccagaactgactgagatgcaggcccgtgcaatctttcaggctgctgtttcagtgagtaaccatggtattacagttcttccggagataatggttccacttatcggtacacctcaggagttaaggcatcaagtgaatttaataaggaatgttgctgataaagtgttgtctgagatgggttcttctttaagctataaggttggaactatgattgaagttccaagggctgcactagttgcagatgagattgcaaaggaagcagaattcttttcgtttggaaccaccatcatctctactatatccaaatgtcatatgagtaaagtcattggttccaaacgaaa

SEQ ID NO: 26929 - DNA, 266 bp, Glycine max
cttgccagatcttctaaaatttgttctctttgctaacttctctattgttggaatgaatgttagtctaatgtggaactcagttggattctatcaaccattgacagattgcgaagttaagtatgatccctgtatcatgcctattggaagttgttctcgacaagattcggtattcaagagccacaaaactgagcataggtgttgttcacatcagtaacagtgcaaacaccaacacccataagaacaacacctatgctcagttttgttct

SEQ ID NO: 26930 - DNA, 272 bp, Glycine max
attctactagtttttgatgagacaagccttccaaatggtgttttaaggcttcaacctaaaggcggacatggacatcacaatggattgaaaaatgtaatgggccatttggatggttgcagtgctgggcctcgacttgcagtcggaattggaaatcctcctggaactatggatttaagagcttatcttctacaaaaattcagtgtagaggaacgaaagcagattgacgcttcattggagcaagcagttgcagcagtaaggaccgtagtactcaa

SEQ ID NO: 26931 - DNA, 618 bp, Glycine max
agccttgcaattattggaatggcactcaagtatgcagaactcaagccagtcccatgcctaacatattcagatgctcaaagcttgagggaaaaatgtgcaactccaattcttaaacaggtgaagagcgatgttaccagatatcgctatggagatgagcagcatttggatgaggcattgaaacggatatttcagtatggccaaggaggaggaataccaaggagaagtgctcctgttttacaatcgattcgtgaagaagtcacgcaagatggtaaatactgtttggttttagtttttgaggccaaggctctgcagttgtcagattttgaacaaagacaggccaaatttacttcattctttgggccaggaattacagctgaaattggtaagggtgagaaagatttgtatgaggttcgacttatctccaatacagaccccaatgcttctccttcatgaagttatggaccgttttatcctcttccatgttgcatggtttagtcaattacaggacttgggtcctgtaaaatatgtaaaaaaaaaaaatattatgctcaaaagtatcaagtcattgtatcaagtgtacattttgacatacaagaaaagaagaaaaatagcatttgg

SEQ ID NO: 26932 - DNA, 255 bp, Glycine max
cctcgagcctatcggctcacgaagatgtttcctcaggaaactcatagtaacggctctcagcaggggccgggggtgggttacagtctcagagagcgagtccgtcgtggcactcgctggtcacgtgcctccacttcctccgttagggtttacgaccagcaccaaccgcaacatcgacctccttgcactgatttcgacgtcgcctatttccattcctacgctcaccttggcatccaccaagagatgatcaaggatcgt

SEQ ID NO: 26933 - DNA, 496 bp, Glycine max
gtgatggaggtggtgtttttgatattgtggataaaatgaatggccatacactgtgtgggtgtagcactgtcacagcctgccaggtgggtgtaccctttgggtcttgcaagaatatttctgtacctagtacgagtccagtgactaatactgctggaagctttactggatctgttcagttctctaaatcagcttcagctgtccatcttccaaattgtttgcttgtcgtcttttacttcctgcaaagtcttgctgcaactatgatgactataagcactgttttataacttatgtaaggtagtctttaaagaaggatctctagtatcttagcatgtacactgcagtattgtctcaagctgtgaaatgtcatggaactgttactaggttagaaaaattagatatagacaaattcttgtttcttgctgaggttatgttcaaggatctgtgaagttatttgagttggtagtcatgagagaccaagaatgtatctggagctata

SEQ ID NO: 26934 - DNA, 454 bp, Glycine max
catgcgttttcgcttttccacccatcttaaaactacttgactttttgatacaacagcattctatcaacgcattctcaacaagccccacttagatttccccgttaaccttaaacgcagcaaccttaaactcagcatgacagaaattgagtccaacgacaaaacaacaaacttcccgtcagtttatgaagagggagcacccaatttggctgaaagagcaaaacaagaaactatgcgtcctaacaagcattcaagccatcatcataacagggaatctcatggactgaatagtgatattgatgagaacacctcagtggatgatgttagggcaccaaatgtatttgagcgagcaaaggaggagcttcaagctcttgctgaggtgttccatcacaagaaaagggctcctacttctgatataagggatgaagatcaaatcgccgagtcatcagaacataga

SEQ ID NO: 26935 - DNA, 273 bp, Glycine max
ctcgagccgcttgcatcatgagttggatcagtctccgacaatatccgacgtttcagatcggtatcggcattctcccctttcatcgttgcatttgtcaccgacgctcctttcttcgccggagagagagttgaactctcagcctcagccaccaccttctcggaaacactgggagattcctgacttgctgacaccaattggcgagcaccaaatttttcagttccacagaggaaacaatcggaaattccgggtctttcagtaccaattgctccatct

SEQ ID NO: 26936 - DNA, 919 bp, Glycine max
aaaaaacagagatatacttgtttattggtcttcatctcggtgtcttcctcgaaggaatgagcttgccaagaaactcctcagcttactgccacatcattcatttggcaagtgcctaaataatgttggtggtctagacatggctctttctctttatcccgaatgtgccaacgacgccaacgttacaccaaaatggtgggatcatttacattgcgccatgtctcactacaagtttgttcttgcaattgagaacacttttactgagagctacgtgacagagaagttattctatgccttagactctggtgcagttcctatctattttggtgcaccaaatgtcatggattttgtccctccacattcaataatagatggtagaaaattcaactcattggaagagttggcttcgcacgtgaaggctgtagctaatgatccagtagcctatgcagaataccatgcatggagaaggtgtggtgtacttggtaactatggaaaaactcgagctgtgagccttgacacgttgccatgccgattatgtgaggctgttagcagaaaaggtggaagaaatgcgggaagctaggttgagttttttgctaaatttgtagttctgcatgatagagattgacgcattgaatttaggtttgcaacctgtatagagattgcttgtttctctgagctaatgtacatttgaccaagaaaggcttagctcatgtgatattttattttttattgccccccttttctggtagaaagtggttgatgctatctccacataggttacactatagttgaagtgtttttgttgatgtatgatttttgagaaaaacacgtgcatatgtcaacttgatatgtcaattcatgcaaacatcactcttcattcaaaattgaaaaaaaaaaaaaaaaaaagggcggccacggacgt

SEQ ID NO: 26937 - DNA, 450 bp, Glycine max
ccctcgcgtccgctggaaggttctgggaactggccaatggatgaaatcgcaattgaaaaaacaaaatctagtttccttgtccaaattggagtgagtcttcaaaagatgtgggggatgacatgtactgccactgaggataatgtggatgtgttggtgtctggatatgcatttcgtctaaaaattttgcatgagaggggtcttagtttgctcaacaaggaaattgggaatgatcaagctaagcggattccttctgctgacaagaaactttttatccgaagtcagcatgctaacatgatcaatgggttacaacagtcgttatgcaatatttggaccagtagttagacttgcaaaacgatgggctgcttcacatctattttcatcctgcttggtagaggagggctgttgagctattggttgcatatctttttcttaatcctttgccatatgatg

SEQ ID NO: 26938 - DNA, 624 bp, Glycine max
ttttcttaaagtgtttatcttagattgaaataatttttttattagttcttttgcacagaaaatgttaattttgactactatatcaaacacatttaaagcataacacgtttcacagtttatcatattgcagtaaattggtgtgataaaaaaagatcaacttagtttaatagaaacactttaatagatcaaagtgatgtttttcaaacttaagaaactaaattggaaaaaaaaaaatcaagcaccaaaaatatatgtatgttaattattcaaatgaaatgggtaatttgaactatagatatgaaactaaaaagattagtgttgcaggaactgtgcgccactagaagtaaaggggagatttcaagggatacagaattggctagtcagaaaggagcacaggcacagcaacaaaacgtggcaatggagaacacggcattggagatgagtgtgacggaccgagcgggcctactatcagagctatcagcagtgcttgttgagttgggctacagcgtcacctctgcaacggcctggacccacaacgacagggtggcctgcattatattcctggaagacgcatcctcacctgggcccataagcgacccaaaacggttgggcctggtggaggag

SEQ ID NO: 26939 - DNA, 304 bp, Glycine max
gcagactgagcgtgtgactcagtgtgggaaaacgatagataccattaccatgttggttggataactgagagatgatgatgatttcaacttcaaccatggctttggcttctttactacccaaaacggcaccgcatgtcctttccctcacaaacccttccgcttccactcccttcatcttacctttcagtttccactgtttgcctcaccctcctcttctctctgccctcaaagctagttcctccggtggcgacgatttacgcggcaagcccctgctttctcagggaattggaaagggaatttggag

SEQ ID NO: 26940 - DNA, 430 bp, Glycine max
actttatctaaataaacctccaattgacaaccttctcacatcctcatggcctccccgccgcctacgccacgcgcttcgtcgtcgccggtgccaacttcggctgcggctcctcccgtgagcacgcccccgtcaaaccttcatcaccctcttccttctcagttgaaaaatatagattcaagacaagttatgattgtaatacggcaagaacgatttggaataagatttgcgtggatcgattttctgatgctttggctagagcaagggaaaaggcaaaacaagttactgtatcagagaatgttgctgattataaaggccacggaccaagaggaatgagaactgaaatatgggatggcttagtaggtatttggaatacaccagggtggaagaataagtctattaaagccaaaatgaatagagttgcctagcctga

SEQ ID NO: 26941 - DNA, 687 bp, Glycine max
atcgtacacaccacatcgttggtcaaccaataaccactgttgttccctttccaacgttttctcttttgcatcctcaatttcctcctccaacctttttcagcgacataacatcatatttctacgtgcacttatctctctgtttgtcaactctctataaatactgtcttgtgcttgttctcccactttcacattaatatgaactcaacttttacgatgttttcttggggcagaagattccaactctctctacggcatagcataaggccgtttggcagccaatcacaaggctccacgtcatcatcatcttcttcttctttcagctcctttggtgggtccaggcatggtgacaatagggtcagagactttgaggcctttcttagatcaatcacttctggggttgtggttgttagctccaccttaggctattggtattggtcatctttgtcttctcctggtgccaattctcttcagtcatttgctgatggttatgctaatgaagaggatcagtttcaacaaaacgatgaaaacaaacccaagttcctctttaatgatggctatagaagaagagtattcttcaattatgaaaaacgaattcgcttgcagagccccccagaaaaggttttcgagtactttgcatctgttcgaagccctagtggtgagatttttatgacacctgccgatttgatg

SEQ ID NO: 26942 - DNA, 567 bp, Glycine max
  unsure (1)..(567): unsure at all n locations
gctcccaccacattctccaccacgacttcgactctanctatggccacccccctgttctcgccacctacacccctccctcccattgccacttcaacaccttctccaaaatcgtgctccagtggaacgccacgtgcaaaggaagacaatttgaccgcatttttggtgtgtggcttggtggggttgagcttctcagaagctgcactgcagagccaagagccactggcattgtttggagtgttgaaaaggacatcacaaggtaccgttctttgttgttaagtccacaaaatcaaagctttgctgtttttcttgggaacgttgtggataaaacctacactggggtttaccatgttgatgtcactatgcacttttaccctttgggatattttgatggggagagctcaaagattggagttttagcatttgggggtggtgttcatgctgatttggtcctacccatttctagaaaccttccattgaatgatgggttgtggtttgctattcagaattccagtgatgagggtttgaaggagtttagggtgcctcagaatacctatagggctgttttgg

SEQ ID NO: 26943 - DNA, 369 bp, Glycine max
ttattttttttcacctatatatataccatagcaagggaatggtaggagagatcgatcagttactatgaacgttgaaagcgagaggaaagatgaacaagaggtgaaagggtggagaaaagctttaaaaagtgtagggaattggctggcacataaggataaggatgaatggttgaaggacatgaggggagtgctgagtttggtgtctacggtgatcgcaacaatgacctttcaaagtgctttaaatccaccaggtggagttagacccggaaacgagagtggagttgttcaatgtccaaaaaacagtgcagataataatccatgttccggagaatctatcctagctgttctttaccctgatgaatataaaat

SEQ ID NO: 26944 - DNA, 481 bp, Glycine max
tggcaagcttcttcttgtagactttgaccaggtttctgtttcatcactaaatcgacatgctgttgcgacaagagcagatgttggcatctcaaaagctcagtgccttaaggagcatttcttatctatctttccagagtgcccaatagatgccaaagtgatgttatatgattcatccactgaagaagaaattctctcaggccaccctgactttgttttggattgtattgataacattgatacaaaggtggcgcttcttgctgcatgtgtacgtaggggtttgaaggttctatctgcaacaggggctggtgccagagctgatccaactagaatacgcattgccgatctaagagaatcaactaatgatccattatctcgagctgtaagacaccgtttgaggaaagattatggtattgaaggtggtatcccagctgtgttttctttagaaaaacccaaagctaagctgcttccatttaagggtcca

SEQ ID NO: 26945 - DNA, 308 bp, Glycine max
ctttctctctcttctgttttcctttttctcgagaaaattgtgttagggtttctgtgattgagcctgcaaacacttccttgagggcacaaaagattccattgtttgcttctttcagattaatttttttgtcagttcagatcttcaagaagaagaatccagagaagctatatatacatcatcgttgttctttgccaagacaaagaagaaaaatggtgagggggaaaactcagatgaagcgcatagaaaatgagacgagtaggcaagtaacgttctccaagagaaggaacgggttgctcaagaaggccttt

SEQ ID NO: 26946 - DNA, 280 bp, Glycine max
ggacgcattcgacgggaatacttcgggagaatatgaacatttggtttggaaattaaccccgcggcgcctgcaatgattattgtcaaaccaacaatagagaatccgactcaccccgttgtatttgccctttttttgtcttgaaaaggtgaagttcaagtcttcagttcaatccaagtctaactatagagtagctatctaagagctttggagctggttcttcttttggactgaaataaagattacctgtttttatatactgagtattggttgatccccaggg

SEQ ID NO: 26947 - DNA, 267 bp, Glycine max
attgccgcagtaaagtagagttatggaaacagcgctcacttgcttcttctgtggtagactcccacctgcaactgcaagtgagcactttcgttgtaataatgcctccccctctagacacgtgcatttctctttgcctccttcatttgttattggaacccataggctaattcgaaacgccactaacaccaatgaaactaaggtggtttccagtactaatgtcaaacgtagaagaaggagaagaagagtggctttgttgacaaaacttgt

SEQ ID NO: 26948 - DNA, 519 bp, Glycine max
actcgagcgttcgctgcttcttctacgaactttccagaagacagtttctccttcccactgaaccaaaccatgtccattttcatctagcttcgcttttcaatccattgtttctcagataccgcatggctcacaattacatcgccaccgattcacctctctctcgtcgcatagttcgtgccttcctccacttcctcaactccgttgaaccgggtcctggggttgatgctgaggggattgaggttgctagggagtgtttggcagaggcttttaagcttaatcaatctcctgtggctggtgatgatgtgaaatctgattcattgattgacatattcaagtctcttgaagctaaaaagcaatgtgaacctagcaagtcagacgttggtcctctgccggattccgcggatgcttccagttcattctcgggtgagaatcctgctcgtgggaagaatcattctgaggcgtcgaaatctacggatgaagattcaacacagggccctcatgcttttgtatctaaagatg

SEQ ID NO: 26949 - DNA, 465 bp, Glycine max
tttttacttcacttcaattgactctctctctcctccaccaacccgccaatttttctctctctaaaacacacatgacatctccttatactcctcgccggcgatccagctccgaccaccgcaccaggccagaaagagcgcccccctcccccggctacgcctcctccgagttcagcacctcctccaccgtctccgcccaccggaaccccgtctccgccgtcgccaagtccttcgccggaatctttgccgggtgcttctccccgccggattccgacaactccaagagcctcggggattccgaggagttcaagtcttcttccactgtatcaaatgcttccagagctggtagtcagagagggcatggctcgaaacgaggtaccagcatcagttcatacaacatattaccagcgaaagaaccaggcagtgttgagttcaccatggaggaaatcttccgagtcacaagaaact

SEQ ID NO: 26950 - DNA, 668 bp, Glycine max
ctttgccattttttttatatattatgtttaggttcgattcaatcaccgcactgcttccccacgcgtccgtggatcgatcgagtttcaatttcctctattatctttgttgctttccatgtaaccccacctcttatccatatatatccattcttcttcctcacacttgtttaatttgcacaaatatattatactccaaataaaccgtctcataatggaggagtcaggggaaaattggccttccgataattcttatctggatgaggtcaacgatgaatttggtagtgaagatgaagagggaggttcattttctggaatgggcgagaccgacagaaagaagagaaagcgagaactcgcagagaggttccttgcactttcagccaccatacctggcttcaccaagacggacaagacttcaatcctggccaatgctagtagctatgtgaaacaacttcagcaacgtgtgagggagctagagcaagaagttcaatccaacgttttttagcaatgaaagtgcccaccagctcttgccgaggtgaactcatcccaatgaattaattacttctgggtggtgggaccaaaatgaaaattcttcccgaggtccaaagtaaagagtggttacagaaggacgttcctcatcataaatccactgtgaagaaacagaagggcat

SEQ ID NO: 26951 - DNA, 324 bp, Glycine max
ttgacccattgcctcaaccggataaataatgaccgagtttcataaatttgatgggcgtgtttcctcatcttcatccattcctaatccttgcttggccactttgcgcatttcaattcttctttcggttttttcctgttttgggaaattgcataatattctccttctgttctttcatttcatctactgtgccacgcgttatacgtaaacgaaatacgggggaacgagtgaaagaagaagaagaagaagatctatggtgattataaaccttgggaagaagaagagcgagagagaaggaatgcgacttgggaaatacgagttgggtag

SEQ ID NO: 26952 - DNA, 434 bp, Glycine max
atttttgttctcatttctcagttattgtttaataattgtaccataacactttcaattatgctttgtcagcttcatttattttagtttagctattcaaattccttaatgctattttagatatttttcggccttttgttggatatagagaagtgagacttgtgagcaaagaatccaaacatcgtggtggagatcctctaatcctttgttttgtggattttgctaatccggcctgtgcagcaactgctctgagtgcattgcaaggttataaagttgatgaactcaatccagagtctagccacttgcggcttcagttctctcggtttcctggtcccagatctggacctggacctcgtggcaagaggtgagccagttcacggaaggcatttaggttttatgcttgtcataatgtcctcctttatctgtatcgttctggg

SEQ ID NO: 26953 - DNA, 298 bp, Glycine max
gttcagatctagcaccaaatggacggggtgttaattatggtggtcagctaccagtagatgcggtttccagacctggacctgagacaggatctctacctccagatgcttcaagtactttatatgttgaaggtctcccttctgatagcaccagaagggaagtagctcatattttccgcccttttgttggatatagagaagttagacttgtgagcaaagaatcgaaacatcgtggtggagatcctcattacctttgttttgtggactttgcaaatccagcttgtgcagcaaccgctatgag

SEQ ID NO: 26954 - DNA, 397 bp, Glycine max
gaaaattctcatacacaaaccttttctttattccttctacagtgttaaagtctctatcaacacaattcataacttgttaccttatcataggtgtgtactgtgacatgggttgtttcactagaattcatttgcttcttgttgctgatagggagttgaagtttttatagctcggaacaatcaaatggatgcaatccaaaccgagaaaatctatgttgctgttgggaatgatgtgcaggatggatataagactttgaattgggctctcaagaagtggaattctcatccaatttccattgttattctccatctcacacacaatagtaccaaggattatgtccatacaccatttgggaaacttccagcaagatctgtgagtgaggagaaactacaaattctc

SEQ ID NO: 26955 - DNA, 297 bp, Glycine max
agggattgatatcctcaggaattctcacattgccagacatttggcggttagacctaagctacaacaacttttcaggtctattacctgttgagatttctcaaatgactggtctgaagtttctgatgttatcctacaaccaattcaatggatccattccatccgaatttggaaacatgactcaactgcaggcactcgaccttgccttcaacagtttgagtggagctataccctcaagccttggaaacttgagctccctcttatgggcgatgcttgcaaacaattttttaactggagaaa

SEQ ID NO: 26956 - DNA, 329 bp, Glycine max
atttctttcacttcccttcaattttccaacgcaaaagttccttcaagctcagagcaaggttaaggttattgcatggattgggttggtggctttaattctgcacattggaatgctctggttcttaatttatgtgttagattttggcttagctggtgcagctttggcatttgatatcacgagttgggggatcacagtggctcaacttgtttatgttgtgatctggtgtaaggatggatggaatggattgtcatggctggcttttaaggatatttgggcctttgttaggctctctcttgcatcagctgtaatgctttgccttgaagtttggt

SEQ ID NO: 26957 - DNA, 600 bp, Glycine max
accaaccaagaaactttctgcagctgcaccaccgtttaatccatcgacagttccagtttttggctctgttactgttccaggtttcaaagatcatggtggtattttgcctccaccagtaaatatttctcctttgctttcagtcagtccccgaagatcttcacatcagtctgctactgctagggttccatatggtccacgaatatctggtggctataacagatatgggaaccgtgttccacggaataaaactgtattcctctcaggtgaaccttcccctgatggaaaccccaatagccctcctagaataatgaacccacatgccacagagttcgtacctggccaacattgggtacctaatggctatgttgcgcctcctaatggatatatggcttctccaaatggaattccagcctctcctaatagttttcccccagtgtctcacaatggtatgcctgtgtcacccagtggatatcctgctcactaaatggtatccaagtgaatcaaaatgggtttgcaacatctccaaccagttcaactgattcagcacaagttgtatatgttgaaactgatcttgaaaacaaaagtccaactctggatgag

SEQ ID NO: 26958 - DNA, 352 bp, Glycine max
cgggttcggttgagaatgatgatgttattttgacttcattttctagcttgaagagcctagtcttggaagctgttgcttttggatctttcctgtgggagacagaagattacattgacaatgtatataagcttaaggatgactgagtagtataaaggcactagttgccaaataaattcttaagttgtcgagcgaattctccttgtatatatagtgagttttggttttagctttgaagtgttgggttatgtttatattgtatatatggcacatctttactctatatataatgtaaagttctagtgcttgaactttgtttaagttgatagattatagatattttaaatagtacaaa

SEQ ID NO: 26959 - DNA, 474 bp, Glycine max
attacgcccgtggtacccaatgcattatttctctttcccttccctagttaggagatctttctgctactctctttgcctttgctctagcttcagctactacctactacatagaaatccaacttgttctctcttgttcataagcttataactggccacacaagcaaagagattaactaccaggacaaacaccatgaaaggacttgacttgttctgttcttcctctgctcccacagcagtaaattctagcatgcaccatcgttctatggtacatcgaagcaccaaaagcttcgaccatgagcgaaggaaaagccaacttcatgttccttgatcatcccaattgcccatcaatcctaagccttataattactttgagaagcacagaaagagttcagcttcagctgataaacaaaactgtgacgtgcgtagaaaaagttctgctgatgttaacgacctttatactcatgctggtgctga

SEQ ID NO: 26960 - DNA, 334 bp, Glycine max
caaacacataatgatttcccaattggaacatgcatcagcagaacgaacattgacaacgaggactttgttaacttcgttgtgaagcattttaactgggctgtgtttgaaaatgagttgaagtggtattggactgagccacaacaaggaaatttcaattacaaagatgctgataatctgctaagcttgtgtcagaagcacaagatacaaactcgcggtcattgtatcttctgggaagtggatgaaactgttcagcagtggatcaagtcactgaacaaaaacgatttgatgacggctgtccaaaaccgcctatacggcctgctgattcgctacaagg

SEQ ID NO: 26961 - DNA, 647 bp, Glycine max
  unsure (1)..(647): unsure at all n locations
gtgaaaacaaagtttatggcgaatttctaatgaatgctcagggagaggatgtagttgctggaatcaggacacctgaagatttggaggttatgaaaacttgcatgccagaagcttataaggaacttgaggagaactgtgaaattctagagaaacattacaacgatatgatggatatcgaattcactgtccaagaaaataggttgtggatgttgcaatgtcgaagcggaaaacgtactggtaaaggtgcattcaaaatagctgtagatatggttaatgaggggcttgttgatattcgttctgcaatcaagatggtagagccacagcatcttgatcaacttctccacccacagtttgaggatccatctacttacaaggataaagtgatcgccgttggtttgcctgcatcccctggagccgcagtagggcaggttgtattcactgctgatgatgctgaagaatggcatgcacaaggaaagagtgtcatcttggtgaggaatgagactagtccagaggatgttgggggtatgcatgcagctactggaatcttgacagctagaggtggtatgacatctcatgctgctgttgtagcccgtggatggngaaagtgttgtgtgtctggttgctctgacatccttgtaaatgatgct

SEQ ID NO: 26962 - DNA, 310 bp, Glycine max
agaacgtcgtgccattaagaggtcctcttcagtttctgcatctctaatacttcaactcactgtattatcttgagtaattttgcagagaagtaaaatatgagcaggccaggagactggaattgcaggtcgtgccagcacctgaactttcagaggagagactcatgccagcgatgtggggactcaaaatatggagatagagttgttgattttggtggttttggaggaagaggagggtcctcatttggtttaactggctcagatgttcgccccggcgactggtactgtgctgctgctaactgtggtgcacaca

SEQ ID NO: 26963 - DNA, 274 bp, Glycine max
aaatccattgccactcgaactaatcatcatatttaaccactacttgatctaaatttcctagtggggaattcatttcatgtacttacatagtccaggtcccctcctccatttcacgcactgttgttttttcctaacgttatttctcaagcgatatggatgtttggagtcttcaaaagttggcgaagacagcaccatctaaagcattggtcatcagaatcaacttggtctgtcttgccatctttctggtcgtctatgcaacctttcttctccgtcc

SEQ ID NO: 26964 - DNA, 421 bp, Glycine max
caacggcttgaacaggagtatggagctcatgttatatcaactgttcctactgtgccttatatatttgagcttcatgaccgaagcaagttagaagttcagaatcccgcttcattaccctctaatcctaagcataaagtgacagcctgttgggaacctacagtattagctactataatcattcctagtgagtatgtgggacctgttattacccttgtctctgagcgtaggggtcagcagttggagtactcattcatcgacagtcaacgggtattcatgaagtaccgcctgcctttgagagaaattgttgttgacttttataatgaattgaagagcataacatcaggctatgcatcatttgattatgaggactcagattatcaacaagctgatatggtgaaactggatattctcttgaatggac

SEQ ID NO: 26965 - DNA, 279 bp, Glycine max
gttgatggtgtcggtatagtagcgctagcaatcgtctttgcagcagtggatcgtgaatgaagattctcttgtttctttagagattcgagcaatgaaattcaactctgaaggtgatcatatatatgtttttggtgtaacgcaactgtcgtagatttcaccgtctcttgcttgtaaagtcatcgatcaacacttgtttctcaccaatctctgcatataactcaattccttgaatcttctgcaagagaggttaaagaaagttgcatttagtggagcaaattg

SEQ ID NO: 26966 - DNA, 286 bp, Glycine max
ctgagtctgatgagaggaatgtcgctaatgaaaagcaattgcttcctgcaaaacgcaatggggatttacagagggggattttgcaaggacttggtctacacttgaatgcacttgctgccttaaaagaatacaacggcacacaagttgaaaaattgtcttctggaagacaactcagtctgcccagctctacttctttgcaaatctctacaagccaggaacatcagcatctatcattggtacctgtgtcatctgaacgagaattggatccatcagacattggggttca

SEQ ID NO: 26967 - DNA, 760 bp, Glycine max
ttgcagctctgcctcatgtacctaatgggtctgcaccatctgccgttaagacccgcatatgcaacaagtttaatactgctgaaggttgcaaatttggtgacaaatgccattttgctcatggtgaatgggaacttggcaaacacattgctccatcatttgatgatcatcgtgccatgggaccccctggagcaggtcgtcttgctggtcgaatggagccccctcctggccctgccgcaagttttggggccaatgccacagccaagatcagcgtagaagcttccctggctggagctatcattgggaagggtggtgtgaactcaaaacagatctgccgccaaactggagccaaactttcaattcgagagcatgaatctgacccaaatcttagaaacattgaacttgagggaagttttgagcaaatcaaggaagcaagtaacatggtaaaggatttacttttgaccctgcaaatgtctgcaccacctaaaacaacccccggtggttcctggcgcacctgcctctcatgcgaagcaattttaagacgaagctgtgtgagaattttacaaaagggtcttgcacgtttggagatagatgtcactttgcacatggagctgctgaattgcgtaaatcaggagtatgaactttcttagtcaggcacattagctagggttatgattattgctgttgtgcattgctactgacaggacttctgatgttagttttgttgttgagttgctttacataacttgttttatttccgatt

SEQ ID NO: 26968 - DNA, 525 bp, Glycine max
gcttcgaggctgaagagtggggtccgtttgagttctgcgtcatggcgaagacttcgagtgtcaagggcagtcgccatatgcatatcatgcgcaatatatggcacacctcctttctcatggacagcttgatgggagtggttaatcttataaactgatgacagtagaaattcttgcaatatatgaagacgtgtaaagccaaatgagaaaacttgaggtttgagaacttggtcagattgaactttctatgtattctatagccttacttttaaccttttaggaataaggtacaaaatttgtggagcattttgtctgtttttttggtagggtagcaacaaatgctcagctttcttccttctcttctttgatattcaaatcccaatcagtctcaagtgctttttattatgttgttaaacagtacatgctacaatacgtactgacactatcctacttaagatgattgtaaggaatgttggcatttgaactgatattgtaagcatgtgtttggtgctgcggcatgttgaactc

SEQ ID NO: 26969 - DNA, 352 bp, Glycine max
agaaaatagcgaaataaacgacgtagaaagtagataacgagtgagagagagggataaaggaataaagaaataaaaataaaagtaaaatagagggagaaatgagaagtgtgaagatggtaaaatgatctcaaactcggaccccgtagaaccagtcacggcaaccgccactgccggcgccgacgacgccaccgtctcaacaaccgcctcttcttccaatgaagatcagcctgcaccgccggcggcaccaaacattgtgatgtcctccaaggatcacgattctctcttcagcggtggcggcatcagctttctctctggaagccgaaatggaaggttcagctatggatattccagt

SEQ ID NO: 26970 - DNA, 290 bp, Glycine max
atcgagccgctcgagccgcaattgacctcaactttctcgacaagaggctctctgtcggtgttctctcccttccctttggtgtcgtgtcttccaaatggcgaacgtttgattcctctgttcaatcgggttttggtggagaaaatcgtgcctccatcgaagaccaccgctggcattttgttacccgagaaatccaccaagctgaattccggaaaagttattgctgttggccctggctttcacagtaaggatgggaagctaattcctgtggctgtaaaggaaggtgacactgt

SEQ ID NO: 26971 - DNA, 354 bp, Glycine max
gagtacacttgtggtgtggggtgtactatttaatatttagagcaagtgacgtgagaaaacgtaattgatacgtttagggatggaaggattaggaggactgggccacctttttgtgacaatgtttgtgacggggtttggtggtgtcatagttcttccggcaatcaccgacgttaccatggctgcactttgccctggccaagatcagtgttcccttgccatttacctctctggcttccaacaagctatggctggagtggggtcagtggtgatgacaccattaataggaaacttgtcggaccgatatggcagaaaagcgttgctcacacttcctctcactgtctctgtcattcctca

SEQ ID NO: 26972 - DNA, 392 bp, Glycine max
gggggttcacagttcacactatcgctgactgatacaataataatgatcttcctcctttccttcctccactgttcttaaactcgttaataaaccaaacacaggcaaaagagtggtattactgtgttagtgttaccttaccactcaggcaaaataatggggagtaagaaaaaaaatggtggaaagggagagattgtggatggttccaagattatggagttagttggaaacgagaaagttttcagcaactttgtggaccataagtttgatgaattggataaagacagagatgggaaactctccatgaaggagcttgaacctgctgttgctgacattggtgctggtcttggtttgcctgctcaaggcactagtcctgattcagatcacatttattt

SEQ ID NO: 26973 - DNA, 286 bp, Glycine max
caccggtttatgtcctcctatgaacagagggtgcaaccctttgataaaaggtatcagtacctcttgtttgctgctgaaccatatgaaatcgttgctttcaaggtgcccagcacggagattgacaagtccactccaaatttcttctcgcactgggatcctgactccaagatgttcacgctacaattgtattttaaatccaagccgccagaggcgaacaaaccgcagcctgcctctactgccaatggcacagcaccatctggtgtaccaccaaggcctttgcccccac

SEQ ID NO: 26974 - DNA, 305 bp, Glycine max
agcacatagagtgattaggctggtagcaagcgcgacatggcactgcagtgcaggttaagctcccaccattgatatcactagccatattctcctttcgctaattcccgcaagctactactcttcttcaacgctctctctgcaaaagatgcgctccaaggacagaatcgcttacttctacgacggtgatgtcggtagtgtttactttggggcgaacatccgatgaagccccaccggctttgcatgactcatcatcttgttctctcatacgatcttcataagaagatggagatttaccgtccacacaa

SEQ ID NO: 26975 - DNA, 428 bp, Glycine max
atcgattccaacaaagtcttctaaaaatattagtgttgttgggaaccaaggtgtccaaaacaccaataattaacaaagccacattcacaatcaaacccaagaagtactctcaacataatgagttctgacgcgttgaaagttgctgccgaagggaataacatacacggtctctaccaagagattcagcaggatccacgtattctggagtccatagattcaatcccatttgttgaaactcctttgcatgttgctgcaactcttggtcattttgagtttgctactgagatcatgacactgaaaccttcatttgctcagaaactaaatccagaaggcttcactcccatccaccttgctttacaatgcaaccatgacgaaatggtccttcgccttgtagaaatgaacaaagatctcgtccgagtcaaagggag

SEQ ID NO: 26976 - DNA, 610 bp, Glycine max
ccaaaaatattctcttaacccatgactttgaacctctggtggctgattttgggcttgctagatggcactcagaatggaatatagatactgaagatcgcgtcataggaagttcagggtatcttgcaccggagtatcttgacgctggaaaccttacatataaagtagatgtatatgcatttggaattgtattattagagttaataacaggtagaagaattagcgagttggaacagttcaatggacagtactcgtatctttctgaatggtttcatcccatacgcatcttagagcccagtcatatcttacaaaacgtacgttctctcaaaccatgcttcgattctgaggaatcattggaatttaatcttcagttgcaagccatggcacgagctgcttcgttgtgtcttcgtgtggatcctgatgccagacccccaatgtcaaagatcctgagagtgttggaagggggtgatcccgttcgtcctatgggtttagacatcaattcagttggtaacacaagtggccatttaagaggtttgaagtcacacactccaccaaaaggtacaataagtcattctcgcagattatcacattgatcattaattccttcggctct

SEQ ID NO: 26977 - DNA, 329 bp, Glycine max
tccttcatccgatgctgcattttcaaatgaaaggtttttgtgtgacttccttggtcagatttttatcatttattggcttaattatatattcggtcacttgattataattaaaggttcgatcggttcctcaactattaaaaagctcaatcatatcctataattgtttaaaacaccgttgagtctgagaaacccctctgagaattttaatatttcattatacaaaggacctgattgtagtattttaaacaattaaagaactcgattaaattttttaataatcgagagagcaaatagaacttttaattataattaaggggatgaatgttata

SEQ ID NO: 26978 - DNA, 306 bp, Glycine max
caaaatagtagaacaaataattatccatattatagatcatgtccaactgatatttaaaacgaagagttcattgaattagaaagaaaacccaatataaaaaaacaaaaatgatctgcatgagtttgtgtgtgtgtgtgtgtcaatttgttctcactaaaatcttatttgaattatttcctataattcacaaaaatcttaggtgtgtgtatctattaagccaacaatggtagtgtcagaaaatttagtttgttatcttttggatcaatatgatgaatgcaagtttaagctaaacaatattatgagttc

SEQ ID NO: 26979 - DNA, 831 bp, Glycine max
aaacataacacactacagaaccttctaataaaaaattttaaacaaaaaaaccaacattttacatgtagcaccacaacttaacaatttctacctacaaccctgctctggatactcattttaaacttgttccatagactataatataatctatctccactcattctttcatcaagagtgaaaaatggattcaaatgcttgtctaccacacttgctagtgttagcagtaacattggtattggttagttatgcaatgggagattcagctcaagacaaacagagatgtgcagaatccctggcaggtgctgcaacgtgtctgccatatttgggtggtgacacgaaagcacccacagcagattgttgcagtggtctcacacaagccatgaagaccaacaagaagtgtgtctgccttattctcaaagacagggatgatcctgatcttggcttgaagattaacatgacaattgctgttggtctcccttctctttgcaaaactcctgataatctctcacagtgctcggcacttctgcacttggatcctaaatcacctgaagctcaagcttttaatcaaattggtcagaaatccaatggtggttctatcagtccttcgcccactacttctgctgaaggaatttcccagaatggtagaaaccaggggacagatgaaacggccacagctaagaagaatagtgcgtcttatatcgggaagagattgttagaaagtttggttgcagttgcagggcttctaatttggctatcatgagcttaacttagatactacctatataataccattctcatatcacgttgaaacgtaaaccattgattagttga

SEQ ID NO: 26980 - DNA, 686 bp, Glycine max
ctatccttgcccgaagcaccaaaaacatcacattgacgccctcagtgctcatgggattggtactttcgatgttgtggtagtgaacctgtacccattttacgataaagtcacatcagctggaggcgttgaatttgagatggaatctgaaaatattgacatcggtggtcccgccatgattagagctgctgcaaagaaccacaaggatgtcttggtagtggttggtacagcagactaccctgcccttctggaatttcttaaaggacaccaggatgatataaagttcaggctagagcttgcatggaaagcttttcaacatgttgcttcctatgactcagcagtatctgagtggttgtggaaacagagtgtgggaggtacttctgtttctagtttgtgaggattattaattcacactcattgtgagatggaaatgtcaattactggaaaatgcaaataatttataaatataatcctagaatggtaaagctcaatctacagccagcagattaattggtgtactaattttcatatattttctagttttgaagtttttgaaatcagtgaacaaaattgaaatcatatatttaattctaaaataactggcagaatgtgttagtttaaatatctcaagtgatattattaattctgatgcgctccattcattgacttattttcattatgatgacaga

SEQ ID NO: 26981 - DNA, 626 bp, Glycine max
ccagtttcagggtgaacatctcactaaagcagatattagggactctaggggttattttgccaaccacttcagaagatggcaccttgactcctcttcagcttaccactgacttgaagccaaccattgcctttattgcagaaatttgaatgttgtttttgttagtctcatggaggcagagcatataatgcaaagtagagggcgagtattttgtttggaagatgaaccaggagtgcacagggtttggatgccaaatggtacggaatgttatttccaaccagaagcaatgaaaattgttgattcagcgtcacataaggaaaaagcagctcaaaggctggtgaaatgtgccatgcataaatggaaacgtaagagaagaggcattgctattgatgatatatcagctatttgcctcttctttcactctcacccctctcatcaactcctccccactaaaattgtccaataagaatggtgggcgattcaactgctcaattatgcttccttatgacacaaaaatactcgggcaatatttatttgcatgtacacttgggattctctgtgctttagtcttggactgtatttgcatgttgtttgttgaaacattttgcagtatgaatttgtttccaacg

SEQ ID NO: 26982 - DNA, 1121 bp, Glycine max
gatcaagggcatgtactactccatcaccttcatggtggctcgcacgtgtgcacaagaggagaggctcaacatttccgtcactcctgattggggtgtgattcctattcagactttgtacacgagcagtggttgggatcccattgcgttcgggttcaaggcggagagtgagacagtggagatgctgattcataaccctggcaaagaggaggatcccgcgtgtggcccgcttgttgactcggttgctctcaggactctctaccctcctagagctactaaccagaacatactaaagaatggtggatttgaagaaggaccctatgtgttccccaactcatcttggggagtgatcatccccccaaacattgaggatgaccactctcccctcccagggtggatggtggagtccctaaaggcagtgaagtacatagactcaggccacttctcagtacctcaaggcaagagagcagtggagctaatagcaggcaaagagagtgccattgcccaagtggctagaaccatccctggcaaaacctatgtgctctcattctctgttggggatgcaagcaactcatgtgaagggtccatgattgtggaagcctttgcaggaaaagacaccatcaaggtgccctatgagtccaaaggcaaaggagggttcaaacgtgcagcactcaagtttgtggctgttacccctagaacaagaatcatgttccttagcacattctacaccatgagaagtgatgacttttcttcactctgtgggcctgtgattgatgatgtcaagttggtgagcctgcgtaaaccatgatgagggaatttgggcttgctagggtgtgaggctaatgaatcaaagtattatatatatgggttctgagcctttgattttatatatagttaggagaataattaagaatgcttcttattttctattttttttctttagaggcttgagaggtaacgagtttgatttcatttaaatatgaaaaaaataagtgtgtatagcaagtatcatctatagacgtatagtatatatacggtggcgtgtttctataactcctttcatgtactttgaataaatggtgcgaaacaaatatagattattcacaactttgcttttatgctat

SEQ ID NO: 26983 - DNA, 573 bp, Glycine max
gagaatggaactggctaggggtttgccagactcttctaaaaatggggcacatgagattgcttccttggcatctatgaagggccaacttgtgacagaacagagcagagcagaggcgctatctgcagaagtcatgcagctttctgctcaacttgaacaagtcaaacaagcatatgatggtcttgcacgcttctataggccagtcctgcgcaacattgaaagcaatctcataaaaatgaagcaagacaactcgttggctgtacgatgatggtaatgagcagtttcatgatgatattccggttgtaattgtgaagcccttctttgaagacatttccaatgcccacagaattgtttttaaccatttgatgttattagtttggtaaaagtggaacgagatggctcagtaactggtggtaatggttcttcattcttgagctgttttgttttgtggtaatactctgcataagaagcccttgttatacccaaacgtgaatttgtaaaacttgtcattctttatactaatattaatttgtaaacaagcacaccccttttatggagtatgattttgatgataac

SEQ ID NO: 26984 - DNA, 579 bp, Glycine max
gcaaagcacaagatgttgttgaatactctgttactattatgggtcaaggccaagttagaccagtccattctggaggttctccaaccagactagtcctctccaacttggtttctttttatacaaccttcccactctcattcttcaatcaatccaacccaaaagaccctttctttcaatattcatagcatcatcatgggtgactcttccgcggctaatgaccatttgggtgaatccccggccgttgagttaaccggaaagataatgattgtggttattattatcatgttcttcgttattgtaattgctctctgccttcatctcttcgccagaaacttctggtggcgcagccctgctccccaatctcgcagccaccgccgccgccgctttgttttctcgtccggtccagacggtggaagcggactggatcccgcggtgctgagctccctaccggtgttggtattcgaaggccatgcccaagagtttaaggatggtttggaatgtgcggtttgcctctccgaggttgtcgaaggagaaaaggccaggcttttgcctaaatgccatcatgggtttcacgttgct

SEQ ID NO: 26985 - DNA, 420 bp, Glycine max
cggctcgagccgttcctcccgttagactaggttaggctaggctagggtgtcgaccagctcgcggtaatggtggccttcaggttccatcagtaccaggtggtggggcgcgcgctgccgacccccgccgacgagcaccccaagatctaccgcatgaagctctgggccaccaacgaggtccgcgccaagtccaagttctggtacttcctgaggaagctcaagaaggtgaagaagagcaatggccagatgcttgccatcaacgagatctttgagcgcaacccgaccaccatcaagaactatggcatctggctgcgctaccagagcaggactggttaccacaacatgtacaaggagtaccgcgacaccaccctgaacggcgcagtggagcagatgtacaacgagatggcctcacgccaccgcgtg

SEQ ID NO: 26986 - DNA, 260 bp, Glycine max
gcattgtccaagttcaagacactgcttcagttactgtcttcatcctccatcttcttcgtgttcgggtgttcaaagttacagtgagttcgagcatcgaacgaacgtcgactaatgcgttttcagtaaccaagtctcgaagatgaccgcgattcccccaacgctttgttgccataactcgcggaatcgacatcatatttcgacaaagtggtaatggcttatttggaggatgatggtacttctggctctggtgagatgtgcat

SEQ ID NO: 26987 - DNA, 461 bp, Glycine max
gagaccctgaacccaatctagtcactctccttgataggcttgcatcattaaaatcgacatgacaatttttaatctcttgggtatcctttcctatatggtgcagcttctatttgctgatgaagatcagaagtcagagcaagggcaaggtttgcttgacaaagcagcaggcatattctcttcaattagccggatgatgaagtctatatgatgattgatgatgatctttcatacttgttctcatcattagtgcatcctgcccccattcatgtcaattatatgtttgctccttcaaaattaattttagaaaccttacagttataggcttacagcttttatcgtatactacaattcgtgtatacatattatgatgtatttggatatgtgccagattgtcacttttgttagtcaagtgttgatccctactttctattgaaaaaaaaaaaaaaaaaggggcggccgcc

SEQ ID NO: 26988 - DNA, 610 bp, Glycine max
aaatatcggtggaaagatgctctatttagatttgcaagcttaagtgaccggaagcctgcagcaagtgacgatgaggatcgtggttatgattgttcctgagtatcacatgttagagtatgtacagagaattgcatccaatctctcaaatattccagaacctacgcccctcatcatgtggaatccacgcctgattagtgaggatgttggagttggatttaatgtccgaaagttaagacgtgtctttctaagcacttttacaactgtctatttcatgcgacctatgccgtttggagcaatctttaggtgttatcctggattgtggaaagtgttcagtgacgacaaggaaaggccagatagatatttgcttgccaaggaattcgagagccgtcctgatgctgatgacatcgaggttaatagcttcaattttaaactacattgcaggatacaaccattttctatgtacatggttaagatacctattattcctgttggtaaatttttcagagagaatttggatagtaggaaaattatcattagagaaaggaaagatagcaaatttgttggtgaataacccatagtgaagagaccctgaacccaatctagtcactct

SEQ ID NO: 26989 - DNA, 365 bp, Glycine max
gtcagaatggccccacccaattcgttagtgggtctaagttgccccttcctgatgaaaaacacaatgaagagatgcactccactcatgatgcacccaataaagaacaacctgattctgattctggctccgacacattagaatttcctgaagttcctaaggtatcagtccagccaaatgcaaatgttgccacagctccagaaatggttacacctttgactatggaacccctcgaggttgatcttgattcaccaagacattctggagatttttcagatctgaagcaggagcaagttgaagatagatcaacagttcacaaagatgaacctcacacttcaatcggcaaaatggagaataaacagtatttg

SEQ ID NO: 26990 - DNA, 1016 bp, Glycine max
tcgtctaggacgcaagataataatagatccgacgaaaagttatggaaaggtggccatgataggagttttttcaagcatcgggaccatcattctactctttggtttgtggcggttgcgtaaagttgtaaggacaaagatagcaagaaacgcaaagaaaagttcttcaaacaaaatggaggattgttgttagaacaaagactatctactggtgaagttaatgttgacaaaactaaactctttagcttaaaggaattagggaaggccactgatcactttaatataaacagaatacttgggaagggaggccaaggtactgtttacaaagggatgctagtagatggaaatattgttgcagcgaaaaaatttaaggtcaacgggaaggttgaagaattcatcaacgaatttgtcattctttcacaaattaaccacagaaatgtggttaagttgctgggatgttgcttggagactgaaatccctttgcttgtttatgaattcattcccaatggtaaccttttcgaatatttacatggacaaaatgaggacttaccaatgacatgggatatgcgtttgagaattgccactgaagtggctggagctctattttacttgcactcagctgcttctcaacccatttatcatagagatgtgaagtcaacaaatatattattggatgagaagtataaggcaaaagtagcagactttggggcatcaagaatggtttccattgaagccactcacctcactactgcagttcaaggaacttttggatacttagaccctgaatatttccatactagtcaattaacagataagagtgatgtctacagctttggagtggttcttattgaacttttaactgggaaagagccaatatcctctgcgcaacaacaagatcttagatgtttggcttcatatttcctccatacagagaaggacatatgaagccaaacttctaagctcttgtcgtttggcttcatatttccttctctgtatggaggaaaatcgtctttttgata

SEQ ID NO: 26991 - DNA, 323 bp, Glycine max
tgcaacttcataatgtctgttcagatgctacagaaggtcatgcttctattgttccctggtggactcttctccacaatactccattcatgtcactgcacaaggatccaaaagggtagcatctatattctaatcttggagagtttgaacataaagaagttcaaaaggaaggatcatggactggttcaaacactagttcaattgatgatggagataacactgaaaaatcagatgatcaagccaaaagtcatgtacatggttttagcaaaagtgaaactttaacatatctgagctaagggtgaggcctaaaacatgtgggaaagggt

SEQ ID NO: 26992 - DNA, 575 bp, Glycine max
  unsure (1)..(575): unsure at all n locations
aaaaggctgaggagctgctgagggagacacctgatgctttcatgcctcatcaatttgaaaatcctgcaaacccaaagattcactatgaaaccactggccctgagatatggacagattctggaggtaaagttgatgcccttgtagcaggtataggaactggtggtacaataacaggtgcagggaaattcctcaaggagagaaacccaaaaatcaaggtttatggagtggaaccagttgaaagtgcagtcttgagtggaggccagccaggagggcatctgattcagggaattggtgctggtattgttcctgctgtgctggatgtgaatctgcttgatgaaattcttcaggtatcaagtgaggaagctatagaaactgctaagctgttagccctgaaagaaggtttgctggtagggatttcatctggagcagcagcagcagcagcaattaaactgggaaagaggccagaaaatgctgacaaactcatcgttgtggtgttccctagttctggagagcgctacctctcttctccattgnttgagtncattagacaagaggcagaacagatgacatttgat

SEQ ID NO: 26993 - DNA, 277 bp, Glycine max
aagccatagagtctcttggtagaatgctaacagaaggcattcacacagacatcaccatcaatgcttctgatggaagtataggagctcatagagctgttcttgctgccagatcacctgtcttccgcagcatgttctcacataatcttcaggagaaagagttatcaaccataaacatctcagacatgtcacttgaatcatgccaggcttttctctattatctttatgggataatcaaacatgaagagtttctgactcataggctggcccttctgcaggc

SEQ ID NO: 26994 - DNA, 305 bp, Glycine max
tctcgagccgagttcggctcgacgagctcgagtagaaacacaacaattcacaacacagagaatgggtgagtgtaaacgctgctctctcacaattgccgccatagaacaaccttcttcaagccaacattccatttccaagaaaagaaaaaccaccgcttccttccagttacgctcttccgatacgcagtttcccgacactatcgtctcgccggaagcttccgtcagttctaccggcacggttgtttccggcgatttttgctccgatcgctcttgctgcagctccagccactttaaggacctccact

SEQ ID NO: 26995 - DNA, 570 bp, Glycine max
gtgttgaatgaatcccacatgccacagcgatgtctcattccaaaacccccgctgccggcgaaactctattttccggcacggcgttcctgattcttctccacctctttctcttccttactcccgcactttccttgacttcctattcaactccttcgccggcgtctccaacctcactctcatcaaagacgcccgcgtcgacgcctccgtcatccgcatgaacaacgactccaaccaatactcctacggccgcgccttctaccccatcaaaatccccatgaccaaaacaaactcttccatttcttccttctccacttcttttgtcttctccatcttgccgcagatctctaccagccccggcttcggtctcgccttcgtcctctgcaacaccaccaaccctcccggcgccctcgccagccagtacttcggcctattcaccaacgcaacctccccctccgttttccccctcgtcgccgtcgaattcgacaccggccggaaccccgagttcaacgacatcgacgacaaccacatcggaatcgacctcaacaacattgaatccataaacgccaccac

SEQ ID NO: 26996 - DNA, 539 bp, Glycine max
attttgaaccttacaagggtcctcatacatggtccccagagcaaagcagatgttgacattgtcattgaaagatgttcaggtgcagggcatatacgagaagatattctttattataatagagaatttgagaagttcatagatgatgatgacgaggaacgtgggtatcttatggacatgggtatcaaggctttgaggcgatattttttccttatcacattcagatcgtatctctactgcacctctcctgccaatacggaatttgcagcatggatggatgcaagaccagaacttggtcatctatgtaacaatctaagaattgataaataatatggcaatgtttataataatgtcgtcagtgttcagtgggcatttgtagttacaatttgcgccacctattcctcatgctgcacaataccttatctttgctacaaagcctcacgtgtaggagactatgcacacatgctacttcggaaaccgctattatctcaggcgagcagcatcctgcactcagtttctgtctagctttgtctgtcatgaga

SEQ ID NO: 26997 - DNA, 514 bp, Glycine max
tcgtccacgcgtacggggtatcaaggctttgaggcgagggggtttccttatcacattcagagcttatctctactgcaactctcctgccaatatggaatttgcagcatggatggatgcaagaccagagcttgctcatctatgtaacaatctaagaattgataaataatatggcaatgcttataaccatgttgtcaatgtgctgtgggcatttggtgttacaatttgtgccacctgttcctcatgctgtgcaataccttattttccccaaatgtagtagactgtgcactcatgctactttgtaaaccgctatctcaggcgagccgtatcctgcattcagtttctgtctagctttgtatgctacgagaggttggctcttacacaaggcatgaatattggtgaaccgaagtgttcatcggagacctgtatggttgtaggttacactgctgagaaatgttacattatctcttccaaagattgtatttctatttgtttgtttaggctgaaatgtagtgct

SEQ ID NO: 26998 - DNA, 813 bp, Glycine max
  unsure (1)..(813): unsure at all n locations
tctcgagccgattcggctcgagggcgtggaggaccttcttgttctatccctcggaacgggtacaactattggaggtgagttacgactttgaccgagtcaaacgctggaaggccaaggattgggcccggcccatggccctcatttcccgcgacggctcctccgacctcgtcgaccaggccgtcgccatggcctttggtcagtgccgcagcaccaattatgtccgcattcaggcaaatgggtcaagtatggggcgatgtggacccaatgtggatacagattcaagtcccggcaatgtgaagatgctggtaggaatagcagaggagatgttgaagcaggagaatgtagagtcagtactgtttggaggaaagagaattggggagcagagtaacttcgagaaacttgactggtttgctggagaacttgttcaggagcatcagaggaggagctgcagaatagctcccactgttgctttcaagcaagcaaccccaaaagcgacttaggccatccatggccaacaacagttcaaagaatcaacctaaagaaaaagtgaaaaaccgatatagtaggaagcaggagcaaggaaaaagaagggaaaaaaaaaacaaaagaaaaaggcagatagtatagtatagcagctttacttttcaagatagacaaagaaggttagggagtcgagtgaaaaggacaagtggtgtaaaaagggtggaaaatttttgtgggatactttgctctccagaggacagacanttgtgtgtccacactacctttctattagggtaagaaaccaagaaagaaaaaagccagtgttctgag

SEQ ID NO: 26999 - DNA, 468 bp, Glycine max
tagggtttatatgctgcacgagttggtggtgatcgaaaagaatatacagttgtattagaatcgagaaaagcgttaatctccgatggcttcgtcgagggacaaggaacccgcgccgccacatcatcacccacctcttctgagcagcctcgtcgtccgcccctcccacaccgaggccgtcgcagccggtggtggtcgcgtcgccgacttcgagcctggcgaactccaccgtgatccccctcctccttattcccgctccgatcgatatcccgatgaacctggatagatattgcgtgcaggttcctcaatctccagttcaccgaagagatgcagatcgccgttttgcttctgattataataacttgtcacgaagccgtggttatggtggtgggagagatccaggaagatatcgagacccttcacctccgtatggacgaggtagagtagggggcaggccaatgggtagtggac

SEQ ID NO: 27000 - DNA, 669 bp, Glycine max
atttaatagaagaaacatttgtattagaatcgagaaaagcgttaatctccgatggcttggtcgagggacaaggaacccgcgccgtcacatcatcacccacctactttgagcagcctcgtcgtccgccccttccacaccgtggccgtctcagccggtggtggtcgcgtcgccgacttcgagcctggcgaactccaccgagatcccccttctccttatttccgctccgatcgatatcccgatgaacctgctctgatgttgcctgcaagatcttgggccttcaggaaggcatgttaccatgaactcagcttgggatcatgttctgggcttttgtttattatttaaagggttaataaatgagtgggatgatggaaatagtccattctgcatgaacttggggctttgcagcacacaatctgttgcatggatttctcattttgcacagctagggtcatatgtttggtttgggatgtttgtgaaagtcaccacaatgttgttgaatttaatgcagcctgggatacaatttgaagttattgtcatacatgatacagagtggacaatgtgctagaacatccatattgttacagggtttgtaggggactgacactgaccattacaaattgttttcagcgaataacctacagttataaccaatccttggctggcatatct

SEQ ID NO: 27001 - DNA, 287 bp, Glycine max
tgttctatatgatcctctctatatctctctgagcacacacttggggcttaacagaaccggacacaacacgagagagatagagatacaacagaagaacaaactccgacatctctcgctttctctactgtgccctgtgtctattcggaagcaagcaaggcttaaatatatagatccctctttcccgtgtttttccttggatgaatctcaatctgacatggtataaggaataaaaaattcatcgtcataatcaggtatgaagttgggagcgtggtgttagtatggtggtg

SEQ ID NO: 27002 - DNA, 462 bp, Glycine max
ctcctccgcaatgcgccaccgccgacgaagagttacttcaaataactggtggaattttggctgttaagaaagcgctgatttctgtatctcattgtcttcaagattgtccgccattatgcaaagttcccgtttcttctagtatacccactgttagctcttttgataggtcgtcctctgatccaaatgctgaactttttcctcgccttaattcattgttaacctccatggaaggtttatctatatatgaacggaccacaaactccaatgaatcctctaaccgtgactcaaaaggtggagaacacgaagttgtgttcagactactttgctctaataatgtagctgggagcgtgattggcaaaagaggggctatagtcagagctctggaaagtaaaacaggtgcttctattatctttgcagctcctttaagcgagcatgccgagcgcattgtcaccatttctgcta

SEQ ID NO: 27003 - DNA, 595 bp, Glycine max
ccgttgagtacaactccgacgccgccgtgggccccacttataataacccctccgtaccccctgttttcctctttgtcgtcgacacgtgcgtcatcgaagaggagatcgggttcctgcgctccgcgctcgcgcaggcggttgagcttttgcccgagaactcgctcgttggactcattacgtttggaacgtttgttcatgttcacgaattagggtttggtgcggtgccgaagacttatgttttcaagggatctaaggatttgacgaaggaccagctgctcgagcagatgagttttttcgcgaagaagccgcgcccggcggtcggcgtggtggctggcgcgagggacgggctctccccggaaagtatttcgaggttcctcgtgccggcgtcggagtgcgagttcactatcaattcggtattggaggagctgcagaaggatccttagggcggtgccggcggatcagcgggactcgctcggtgcaccagcacggcactgagtatcgcggcgggtttgttgggggcatgtgtccctggctctgctgcaagaataatggcatttattggaggaccagctactgaaggacctgctcctattgt

SEQ ID NO: 27004 - DNA, 282 bp, Glycine max
atcatataatatatattcatgttcatcttcccacgagattctggttctctttaggccacccacacaccaccaccgctccccaactcgctccgagttgactcaatcctttcccttccgagatcaaccgccaccaccaccgctctccgccgtcaccgcaaccccgccacccttttccttcaatgcaaaactcgtcgtcaattctcgccggaaccttctcccactcttcctttcccttcgggctttgacttctgctttcttgcgattccgatgagtccctttcgt

SEQ ID NO: 27005 - DNA, 764 bp, Glycine max
  unsure (1)..(764): unsure at all n locations
ctaccatctcccatttatattcccttctctcaccaattactttccaggttccattccccccacacacaacacaacatctgaacaacatatcttattgttctcaaaccatgggtagatccccttgttgcgagagagaacacaccaacaaaggagcttggaccaaagaagaagacgaacgcctcatcaactacatcaagctccatggtgaaggctgttggagatccctccccaaagctgctggcttgctcagatgtggcaagagttgcagactcagatggataaattacctcagacctgatctcaagagaggcaacttcactgaagaggaagatgaactcatcataaacctccatagcttacttggaaacaaatggtctttgatagctgcaaggttacctggaagaaccgataacgaaataaaaaactattggaacactcacatcaagagaaaactctacagccgcggaatcgaccctcagactcatcgtccactcaacgctgcctccgccactccggcaaccaccgtcacagcccaccgcagttccatcttctaacagcaagaagaagataaagaacaataacaacaacaacaacggttttcagttggtgaattatagtgcttatgccaacacaaagattggaaccgacatgattgctgctgagattctaacaggcaganggtgcgtacaacagaagaaatccttcctctcatcaactaacttggaccttttcactaggttccttctaaccacaaatntttttct

SEQ ID NO: 27006 - DNA, 461 bp, Glycine max
cccatcgtccgaacattacaagacaaattcacagtctaaacaagaaattcagaaaattaagctttgggtgaatggagaacctaatttctttggtgaacaaaatccagagggcttgcaccgctttgggtgaccacggcgaacaagtgccttacccactctctgggactctctccccgctatcgccgtcgtcggtggccagagctctggaaagtcctcggtgttggaaagtgttgttggcaaggatttcttacctcgtggatcagggattgttactcggagaccccttgttttgcagcttcacaagattgatgagggtggcagagagtatgctgaatttctacacctccccaggaaaaggttcaccgattttgctgctgtgagaaaagagattcaagatgaaaccgatagagagactggacgaacaagacagatttcaagtgttccaattcatcttagcatat

SEQ ID NO: 27007 - DNA, 374 bp, Glycine max
gttgtgaagatggtcccttaaacaagtttacaaagttgagcctagatgcttctgaggctgaaagcttgaagaatgtacatacaactggcagtggggatgattctgcaccgaagttacctgatcgagaaccccaaaaggcacctaatgggcatgctgttatgcatgttaaggatatactgcctcgaggccttatcaactctgggaatctatgttttcttaatgcaaccatgcaggctctcttgtcatgctcacctttcgttcatcttttacagcaattaagaactcgcaaccttcctaaggttgggtatcccacattgacggcatttgctgagttcatagcccaatttgatatgccaagcacaactaaagtaaag

SEQ ID NO: 27008 - DNA, 256 bp, Glycine max
actattttcacccctttttcaatgctagtggttttctctctcccacaaatagagtcatattcattcatcatgtcacacccaaagggataaaagaaaaaacttaatagtacatgggagttgatgatgaacaagagatggaggaggaggaggaggaggagagagaagaagagaaaaagaagcataagcaggctcctccttctctcttccctattagtgtgagaaaggggtttagtggtgaaagagtgaagagagatga

SEQ ID NO: 27009 - DNA, 255 bp, Glycine max
ggggattcgtggtagaggatgtgttgcacttaattacagatgatgatcaaacaaaagatgctgacacaagaattgcttttggttgtggccaagttcaaactggtgtgtttctaaatggggcagctccaaatggcctatttggacttggaatggataatatatctgttcctagcatcctagccagagaagggcttatttcaaattccttttcaatgtgttttggatctgacagtgctggaagaatcacgttcggtg

SEQ ID NO: 27010 - DNA, 564 bp, Glycine max
gcggaacctcaagaaaatcctgtggaaacttcttctgaagttgtgcttgagacttccaagagtgaaggagctctggatgacacggccaaggaagagaaaactgacaaagaggaggaaactagtctctcgtaaatgctgcacaagtttcttcgcaaggggctcctgaagcagcagaaaagattgttgaagaggttgatgacaagaaagaatcaagcatttccaatgtgatcgaagcggaatcaaacgaagccgctgacatcataaaaagtccagagcaagcctccattgatgaggaagctaaaactgacctaaacgaagaaagagagatttatgttcctgctgctgtggaggaaaaggttgctgttgatgttgctgcaaatgatgatgttgacaagaaggaacctgaagcacctaataatgctgtccctgaatcctctcaagaggaagtggttgaaagcaaaaaggttgaggaacagaacgaggcaaaggcagctacaactgaagcagcagagagtgtaaaagttgataaagtagttgatgacaagaaggaagagaaaactgaga

SEQ ID NO: 27011 - DNA, 237 bp, Glycine max
caggaagaacgttctatgatcaaaattgaaagttgtgctaagggtgatcttaatatagtctcctctctggaagatacttcaactaacaataacatgtcaaagtgtcgtgctctagtggcagttcctgccattaacatggaggcattggcggtggttccattctggcgcaaatgtggaaatcctgactttgcacaacgccgaatcaggaggccattctctgttctagaagtagaagca

SEQ ID NO: 27012 - DNA, 297 bp, Glycine max
cggctcgaggcctctacataggatccctgggaggatcttcctcaatggctcatcccaagttgcatccttgttcactcaacaagggaagaagggcaccaaccaggatgccatggttgtttgggagaacttttgttctagacaagatactattttctgtggagtttttgatggccacggtccgtatggtcacatggttgcgaaaagagtgagggattctcttcctctaaaactgaatgcccattgggaacaaagtgcatctggtgaagaagtcctcaaggagattagcgttaatactgc

SEQ ID NO: 27013 - DNA, 311 bp, Glycine max
gcagaacgtctggcagagcttgctgctgatctaggctttgatgggtggctaataaatatggagagtaaatttggatctcggtcaaatttctaatttgaaagagtttgtagagcacttatcgttgacaatgcattcttctgtgcctggatcattagtgatatggtatgacagtgttacacttgatggtaaattgaattggcaagatcaactaaatgagcacaataagcccttctttgatatatgtgatggaatatttgtgaactatacatggaaggaagactatccaaggctctctgctgctgttgccagtg

SEQ ID NO: 27014 - DNA, 253 bp, Glycine max
gtttccaagaggatattacagatgcacatatagaaatgtacaaggatgtctggccacaaagcaggtgcaaaagtcagatgaagacccaatgatatgtgaaataacctacaaaggaagacacacatgcacccaagcaagtcacttaaacaaaacagtgatacccccatcaaagacaaaggtgaacttgctgggagaaaataagcaccaaacccatcaaattaagaatcaaccacggcaagagaaaatagaacaa

SEQ ID NO: 27015 - DNA, 523 bp, Glycine max
  unsure (1)..(523): unsure at all n locations
agtagcaaatgaaagtggaaagccttggctatggtgggactatgttactgactttgcaattcgttgccccatgaaagagaataagtactcagaagaatgctcagatcaagttattaaatctcttggtgctgatctgaagaagattaaagactgcgttggagatccccatgcagatgtagaaaatcctgttcttaaggctgaacaggatgcacagattggtcaaggctctcgtggtgatgttactatactgcctactcttgttataaacaacagacagtatagaggtaagttgtcaagaccttctgttctcaaggcaatctgttcaggctacctagagaccactgaaccatcaatttgcttaacttcagacctggatacacatgagtgttcggaaaacaatggtggttgttggcaggacacatcttctaacattactgcatgcagggacatcttccgaggatgagtatgtgaatgccctattngtcaaaatgtgaaggtttttcgagatggatatacccactgt

SEQ ID NO: 27016 - DNA, 327 bp, Glycine max
agttttcttctaacaattacctcacacttttagatatcaacttttgttgttttcttctgtcatcaagaaaagcaaagagctactattgattagagaagcacaaggagatgagttcatcacagagagcttggattgttgcagccagtgttggagttgttgaggccttgaaggaccaaggggtgtgtaggtggaatcacactttgaagtcagctcaacatgtcataaagagccatgttggatcattttcacaggctaagaacctttccttttcttcttctatggtttccacctcttcaagactaaagggaaagcaatcagaggagtcct

SEQ ID NO: 27017 - DNA, 518 bp, Glycine max
atttcatttccaggagacgtatcttagtctatttcgtcaacctgttacggttcacttcactttcttaaactgttttttagtgggtcgaaaaaaaaacgaataacattttgaggaggttcggtagagtggcgtggcgttttactcacaacatcatcaaaattatcaaatccacctcttccggcaacctcaatttctgctccctaaatcatgcttgcgtttcgatcgaagccttgttgcagttacaaggaaacagcgtccctcgcacttgcacacttcaggcacttggtgttcaactacgcacgcgccgggagctctcggtgccctccacgcgccggcttcggggttcggagaggctacatcgtcgttgcctcgttgggggacccacccgaagtctggtccggcggcgggattgtcgttcgccccgggaattccaatttcgaagtcgccggcggcggtggcgccccgaactccggcgattcaaaagaggggtgctggggtggcttccaatttggggaaca

SEQ ID NO: 27018 - DNA, 335 bp, Glycine max
aacaatttgaggaggttcggtagagtggcgtggcgttttactcacaacagcatcatcatcaaaataatcaaatcacctattccggcaacctcaacactacctacccctaaatcaaatgtccttttctatctcttcttcgattctcctcacaccccaaacatcttaaccttccagttcaacatcttactccaaccatgcttgtgtttcgattgaagcctggcagttacaaggaaacagcgaccctcgcactttcccacttcaggcacttggtcttcaacttcacacgcgccggtgactctgggtgcccgccacgcgctggcttcggggttcggaga

SEQ ID NO: 27019 - DNA, 461 bp, Glycine max
aaatggatgcttctcaggtctctgagaataattcagaaagggttacttccaaatgcatggatgtaccttcttgcttccagatggtggatggagataaggttgatatgttgtctgacaagggccctctttgcaattcccttgctcctagtgaaccaagagaccctttgattgagaatagtagtgatggcatcgaggattctattccaaatccattaccacaacagaaatcagaatgttctgaatctgggaaggttgatgaggtgaagacatctgatgttgtcagggttgatccaggactgatgtccaaaatcacagatttgccttcttccttggtgatggagcaagataaagctgatgcatcatatgatagcccactggccgctgcagaaccaaaatattgtttgactggagagaattgtgaagatgctaatgaggaaccaaatccttcagaagctgagatc

SEQ ID NO: 27020 - DNA, 632 bp, Glycine max
gttggatagagcttcttgccttgtgttctacgttctgcattcttctcagcccgaaacaaggacctgtcatcaagatggtgaagttcacaactcacaggcttcggcacataatggactgcgaacacaatattcgtaacatgtctgttattgcacacgtcaatcatgccaagtctaccctcactgattctcttgtggctgcttctggtaatatcatagcacaagagggtgaagctgagcgtggcaacactgtcaaatcctccggtatctctctctactatgcgatgccagagggtgatttgaagaatttcaaaggggaacgtgaagggaaggagttccttataaatctcattgactcaccagggcatgtggacttctcatctgaggtcacaaccgcacttcgcatcaccgatggagcacttgtggtggtggattgtgttgagggtgtctgtgtccagaccgaaactgtgctgagacaagcccttggagaaagggttaagcctgttttggctcttaacaagatggataagtgctttcttgagctcaatcttgatccagaggaggcatacctaacactccaaagggttgttgagagtgtgaatgtaatcatgggtaactatgaagatgctctactt

SEQ ID NO: 27021 - DNA, 275 bp, Glycine max
gaccacttctctctttcaatccctttatctgttggatagagcttcttgccttgtgttctacgttctgcattcttctcagcccgtaatctagctcctgtttgcagaaacaaggacctgtcatcaagatggtgaagttcacaactcacaggcttcggcacataatggactgcaaacacaatattcgtaacatgtctgttattgcacacgtcaatcatggccagatctaccctcactgattctcttgtggctgcttctggtaatatcatagcacaaga

SEQ ID NO: 27022 - DNA, 258 bp, Glycine max
gtcaaatagaagctggatcatccctttatgatctgaagcatatgcgtgttgttaactctgcatatttctctccaatatctggaaccaaaattctcactacatcacaggacaaccgtcttcgtgtatgggattctatctttggtaatatggactctcccagccgagaaattgtacatagtcatgatttcaatcggcatttgacaccctttaaagctgaatgggatccaaaggatccatcagagtcccttgctgttgttg

SEQ ID NO: 27023 - DNA, 427 bp, Glycine max
ggaacagtgggctaaatgatttcatgttcaattaggagaaaaaccaatgctcttattaatttaaataaatgactcgccttgaataatagcaagcacggtgaagtcaaatatttaaattaataagagcattggttttattcaaggcgagtcatttatgtgttttcatgctgactaggaatgtaagcctatgcatactatatgtctcacattttgagcactggtacttggattgtaaattatactccttatttctgtggttggaatcatctctgttgtaacaggttcacatttgtaattggttttctcctgttgctgactggcgccgcgctgaatgatcaacgcggtgaagagagtgtgtcctttggctactactactgctatgttgtgaaacctggagtgttcgcggggggtgcgattttatcggttg

SEQ ID NO: 27024 - DNA, 505 bp, Glycine max
caatttcagaggcttgatggcagtacaaaagctgagcttcgacaacaagcaatggatcatttcaatgcacctggtagtgatgatttttgcttccttctttcaacacgggcaggaggtctgggtatcaaccttgctacagcagacactgttataatatttgattctgattggaatcctcaaaatgacctgcaggcaatgagtagagctcatagaattggacaacaagaagttgttaacatatatagatttgttacaagcaaaagtgttgaggaagatattctggaacgtgctaagaaggaaatggttctggaccacttggtgattcaaaaactaaatgcagagggtagactggagaagaaagaagccaaaaaaggaggaagttattttgacaaaaatgagctgtctgcaatcttacgatttggagcagaggagctctttaaggaagaaagaaatgatgaagaaagcaagaaacaactcttaagtatgaatatagatgagattcttg

SEQ ID NO: 27025 - DNA, 270 bp, Glycine max
ctcccctcaatatctcatggcaaactctcttgaagtttctgctctcaatcgcataaaactgcatcttctaggagaactctctccccttccactcacaacctcctcgcaatctagctccatctgttcccaatcttcatgttctgactcatccgccacacttgaccaaatcttctccgaattcctctatttcccaacttcttcctcagaaaaccacttttctgcattggagtttgaggcaaaacccgaaataatttacctcgaaacccccaa

SEQ ID NO: 27026 - DNA, 589 bp, Glycine max
taccggtgctggtggtcttgttgtgcaggttggggaaccggtggagcttccgcctgtgccggaggaggagcatgaggtgtatcatgatgcttccgatgagcacagagatgcttaatgaaagtatagagcaatgtctatttccctacaaacttcagaaactgctcacagcagcaaggcatgtgtcaaatgaagaagaatgtgttagaattgagaagtatcttcgttgaacaaactatacattgtaaagtggtcgtttggttggttagcaattgtatgcttttgtacaagtttgtttctacagtgtttcaatacccattgaccagggttgaatgtgctacctttctactttgacgattgatttggaggctcttgatccacttcatggttggaaatcaaattatagatttaagtaacaacgaaagtcttattttactgtcttacttcccgtgaatgcctggtacaatttgttgtgcatacttcatctcacacttatttcaacacaattaatgttgaaggaaagttggatgatgacggagaatcacaaacattttaccatttgtctcggatgtcttcaaataaaacaatttcc

SEQ ID NO: 27027 - DNA, 289 bp, Glycine max
tgacactgtgtccgcgtttactttcactgttgttgttggtcacattcacagtggcctcatctgccaatgtcagctacgacggtcgctccctcattattgatgcccaacggaaacttcttatctctgcctccattcattacccacgcagcgttcccgcgatgtggcctggtcttgttcaaacagccaaggaaggaggagtagatgtgattgaaacctatgttttctggaatggccatgagctttctccaggcaattattactttggaggaaggtttgatctggtcaagtt

SEQ ID NO: 27028 - DNA, 376 bp, Glycine max
gaagaaagggcctgcgcaatttagggttttaatttggggaatacttcccctgtgcctgtgactgagcttgtggcgattctggagaagcttcttaaggtgaaggccaagaagaaggtgcttccaatgcctacaaatggagatgtgaagttcactcatgctaatattagtttggctcacagggaccttgggtacaggcccaccactgatttggagactgggctcaggaagtttgtgaagtggtaccttgaattttactccaagaagagctcttggtgaatgttgatgtgattcttttgctttgctgcccctattcttttcgctctgcttgtaatttggaggatagaggttttaccgttgtgttaggggttacggatga

SEQ ID NO: 27029 - DNA, 256 bp, Glycine max
cccaacctcagtttctccgaacctacctccaacaaaaaaccctggaacgacaacggcgccctcctcatctccaaggaccccgagaaccgccgcgacgtcgcgtttcgcgagttcgtcgatctagtcaaggaagaaaacgaggtgtcggaagaggttctcgtccaagacgtgctctatgcttgccaaggagtggatggtaagttcgtgaaatttgacggcgagagtaagcgtgatgtgatacctgattcaattaggg

SEQ ID NO: 27030 - DNA, 409 bp, Glycine max
agaaatggtgaagacagatggccacatggtaaaggtgaaaggtcggctattagcagagaagcgaaagatggaagaggctgacgagagaagaaaggctagggaggccaagagattggccaaagagattcaggctcagaaattaaaagaaagggctaagcagaaaaaggaggacattgaatctgttaagaaatggaggaagcagcggcaacaaagtgggtatgctgacaatggcaaagatgcagatatgggttttgactttgaggatggaaaagtatttgagaggtcaaataagaaaaggcccagggtgtcttccagggatcgttcaggagggaaggcaaagctagcccttggtaaaggaaagaaacagaagaaaagagatggtaagaattccaaaattggtttggagggc

SEQ ID NO: 27031 - DNA, 419 bp, Glycine max
ctcggaatagcggctcgagcggctcgaggttgcataacctacacgtgtcactttttgcgatgttatccattgctaccatagtaccaaaccctgcgtttgcaaccaaagaatgtgttttccctgccatcttcaacttcggtgactcaaactcagatactggtggcttggctgcttcccttatagcaccaacgccaccatatggagagacctattttcacagacctgcaggaagattctctgatggccgtctcgtcattgatttcatagcaaagagttttggtctcccttatctaagtgcgtatcttgattccctggggaccaacttctcacacggtgcaaactttgcaacatcagcatcaacaattagactcccaactagtattatacctcagggtggatgtagtcccttctaccttgat

SEQ ID NO: 27032 - DNA, 532 bp, Glycine max
ctctctcctagctgtgcagcttaggaatggatgattaattgtgctctgctctgctttgctttgattctctctgctcataaaggtttcctgcttttgtctttgtctttacctctctccttttcatggatacccttctaagcggttgcagctgcactctatagtcactaactaaacataacatggcaatgcatattcacacgttttattccaagtccaccatacccttcttcttctgggtataaaggggcatcactatcctgcattttcttcattgcagaacctcttcatactcattgcagttgcactacgtgcggggtgggagtgctttcaacactttctcttcaaccagcaaaatgagtcatgcacattctcacatgggctcaggtagtagaaccactcgaagagctttcgagtttgggaaaacacatgtagtgaggccaaaaggaaaacatcaagccactatagtttggtgcatggtcttggtgataatggtttgaggtatggatgtcatcatctcttcaataatggcata

SEQ ID NO: 27033 - DNA, 402 bp, Glycine max
ccttgtacgtagttcgggataattcagctaaaataagacttgaattagaagagaatggctgctggagtgtataaccaaccaattgttgcttttcaatcccattctcacatcaacaatttgaatcatcagcaaaagtttaataatttggtaagactggtgacaaaggactttatcggcagtcatttcctctcaagaacgggattgtagagtaattcactctttagcatctcaaacatctgtggttgacacagtttcatccccttcaaaaagcaaaactagtgatagagacactcacaagaaatcaaatgaagcttctttaatccttattcgacatggtgaatccttgtggaacgaaaagaacttgttcacaggctgtgttgatgtccctctaagcaagagggg

SEQ ID NO: 27034 - DNA, 272 bp, Glycine max
gacaagagaagggtcaacggtgacattctctcctctgtcgccgaactcgtcggagagggctagggagagtgtggcaatgaggagtgtgagattggaggcgtatgttgcttccctcttcatcaccatcatcatcttcttcttcgatagaaagagactatgatgccagagagaaataattcatcaaagcccaccagattctctctctcgtctcgtttaggcaagtttgtttaaaaaaattaaaattaaaaccttttattttaaaaagtaaataa

SEQ ID NO: 27035 - DNA, 476 bp, Glycine max
agttcccagtataataaaattaaagatgttgcattgcagctgccaaagttactggcagagcattgaagaaaagatgagaaagcagactgctcaatatttgaagagcaatggatgaagagtctccgcaaacatcattccagttggtgttgtttttttaatataaagatatgccttgaacaagatcaatacttatctgttggagggatagtttgtgtcttgaaaatcttgggacagtctggtgagctggatgaatgaccagttaggtatagaaagacgtaattcttttgaactttgattaagggtttttttttttttgttatctgcttagccattagaaatttcagttgccattctttgtattctcacatcaatcatagcatcgttatgagtatttttggcagtttgtcaagcattaaaatctatacatgtaaacttggacgaaaacctaaattaatatctagccgattggtctattc

SEQ ID NO: 27036 - DNA, 621 bp, Glycine max
tttgatctttcatattaattaatactagtattttgttacgtacagactttgtttcacatctgcagtggtgcagtggtggcattctatatctatagaatagtactggaacgtaatcatcaaaagagctcaaacttggaaactgaaccaggaaactagttctatgatgagtgtaaaaaattgaagatctgcatgaagatcaggtaaaatactgaagatcgagttgaagatagtcagtaaattttggtgatcattttttatcatatagtttttcacgggctgggtcatcaagactagagactcactgctaagggttatggtttcataccttgaaaaacggagctcggagaatctggaaaataatttctagttgtggtttttttctggaaaattactaatatcatattatgagtaaccttaaccggttacagattctaatgtacaagaaaaaattagatatggtgtttagggctttgtcttcttcaaattgcacttataaaacattaaaataagtacctgctgcttgcatttttaaccccacaagtgagtgaaatttaaacacttaatagttacgtaagcctggacctgtgaactaataagataagattagatcaccatattatt

SEQ ID NO: 27037 - DNA, 437 bp, Glycine max
tagaagtcaaaataaggaagaactggttttattagcttcaaatctggagtcacatgtttcccaagaaggacatgttgggagtattactgatcatagcttgttggtaagtactaaggctgaggttggtactgtcatggtaaataaaacatggttgaagaatagcatggggaaagcaacacgagtgcatctcaatactaaacctgctgttggagtgcctctcaatagcatggggaaagcagcaggagtgcatcttaatactaaacttgctgtagagaaaaaagggttgaataatagcatggagaagccagcagaaaagcctctcaatactaaacttgctatagggaaaacagggctgaagaatagcatagagaaggcagcagaaaagcctctcaatactaaagttgctgtagagatacctgatttgaacggtactggtg

SEQ ID NO: 27038 - DNA, 297 bp, Glycine max
ctcgagccgaatcggctcgagaaatgctcttgttcctctaggagttcaaccacctgccagccctgtttctcagcagaatgcccttgttctttttgatatgttttctaatggaaataatgcacctacatctgtcaactcccagccaccccagccagctaatgttgctggccaaaccagtccatatgctccccaatttcaacaacagcaaacagtcgtcacatctcaaggtggattttaccccaatggaaatgccccaaatgcaggttcacctcagtatgagcaatcactgtatacaca

SEQ ID NO: 27039 - DNA, 330 bp, Glycine max
ggagtgcaaggtggaggtccctccctcaacttcctccaatcattatctcatctcttctgacctcacttttgatagctcaccaaggcatcatgtcactctatcatcaacacttgactcagagtacaagagtgtggacatttcggatgtcttgtatgattctgctcagcttgatgatgcctttgaacccttccttgaatttagatgagcatgtccttgtttggtttgtgattttttttatataatttttactttagtgaaggcagtacaaaacaaaattgtctaatatttagtagtacttttcttagataaatgtaatatccgtgcttttat

SEQ ID NO: 27040 - DNA, 257 bp, Glycine max
gaaggaggtagttggtgttgttagttaatagatgatagcaggagatttgaagctcaaattgagcatagaatgtttataattgtttccacgacttccacttgcttgcttttgaataactcagcttcttcacccttgcttctgtcttggtgtatcgattcagttaaatatggctcgtttgctcttcccaagtttgaaagaagatgaagatgcagatggagagccgttgatgggagtggcgagaagcaatcagctgttac

SEQ ID NO: 27041 - DNA, 199 bp, Glycine max
tatattaaacattgttcatgtaattgatgaagtgatactagaagggggacgagggaaatcttctcttgtttgggatatcttctcttgttttgattacgaccgtggtgtggatgagttatttttgtaagaataaaatttaggtataacattttaagtatttcctgaggttttaaaattaaaattagaattttattttgat

SEQ ID NO: 27042 - DNA, 592 bp, Glycine max
ctgcaacaggagggatgacttggaatctcttgcatatacactgataaatcttcttcgaggtcgccttccttggcagggtttccagggggaaaacaaaggatttctggtttgcaagaagaaaatgggaacatctcccgagaccctatgctgctttagtcccctaccttttaagcagtttgttgaacatgttgtaaacttaaagtttgatgaagagcctaactatgcaaaatacatttctctatttgatgggattgttggccctaacccagatattagaccaattaatacagaaggggcacaaaagctcattggtcacaagagaggccggttggcgatggaagaagaggacgatgaccaacccaaaaagaagattcgtataggtttgccagcatcccagtggataagtgtttacaatgctcggagaccaatgaaacaaagatatcactacaacgtatcagatacaaggctatcccagcacatcgagaaaggaaatgaggatggcttatatattagcggtgttgcttcatgtcagaacctatgggcgttaatcatggatgcagggacaggtttcactgcccaagtttacgagctc

SEQ ID NO: 27043 - DNA, 282 bp, Glycine max
tgattttgatggtacaattacaaaaggaggatactccagttacatagtagtccatgagaggtactgcttcacgataccaaaatcctatgcattggcttcagcagctcctttgctttgtgctggaattacagtttattcaccgatggtgcgccacaagatgaatcaacctggtaaatctcttggagtgattggtcttggtggcctcggtcatatggcagtgaaatttggaaaggcatttggtttgagtgtgacagttttcagcactagcatatccaagaaaga

SEQ ID NO: 27044 - DNA, 519 bp, Glycine max
cagaaagaaggagaagaaagcgtttgaatgacaggctttccatgctaaggtcaatagtccctaagattagcaagatggacaggacctccattcttggagacaccattgattacatgaaagagcttctagaaaggataggcaagttgcaagaagaagaaatggaggagggaacaaatcggataaacctcttgggcatttctaaggagctaaagccaaatgaagtaatggtaagaaattcccccaagtttgatgttgagagaagagaccaggacacaaggattagcatctgctgtgccacaaagccaggattactactgtccacagtgaacaccttagaagcattaggccttgagattcaccagtgtgttataagcagcttcaatgatttttcaatgcaagcatcttgcacagaggtagcagagcagagaaattgtatgagccaggaagagataaagcaagcactattcagaaatgcaggttatggtggtagatgtctctaggagaaagatggaaagcaga

SEQ ID NO: 27045 - DNA, 457 bp, Glycine max
gagaaatagcattgaagcagcatcaaatttcgtgagccgaaatcggttgcctccaaggttaaaagagcagatcttggcttatatgtgcttaagatttaaggcagagaacttgaatcagcatcagcttattgaacagcttccgaaatcgatttgcaaaagcatctgccagcatttgtgttttgcaactgtagagaaagtctatcttttcaaagacgtctcaaaagaaattcttttgtccctggttgcaaaaatgaaggcagaatacataccaccaagagaggatgttatcatgcaaaatgaagcaccagatgatatttccattatagtctctggcgaagtggagatcatccatactgaaatggagccagaaagaattttggggactctacatactggggactgtttggagaggttggtgcacttattagtagacctcagagctttacctacagaacca

SEQ ID NO: 27046 - DNA, 248 bp, Glycine max
attatcattcacttcatcattcatctcctgtaccagagtctttcaccgctggaaatgcaacactcttggagcatcttattatgacagtaatcattggaacccctatccttggggcatctttgatgggatatggatcagcaagcttgatatatggctatgttttgatttttgatttcctgagatgcttgggccactgtaacgttgaagttgttcctcatcaattgttcgagaaactcccatttcttaga

SEQ ID NO: 27047 - DNA, 251 bp, Glycine max
cttcctcatctcaaacttttgcatctatgcccacatgaatcggagtattatattcaagtataaaaattcatactgtgagaacaagcttatatgtgcattcacctctgtctacctccaaccattttcattaagcgtttagatgaacttgctttcttttattttgaatgcaaccaaaaaaatatttgtgtcttgacttcaaatacaaataaatttcaattaatcttattttatttaatagcgttagtgagaaa

SEQ ID NO: 27048 - DNA, 245 bp, Glycine max
cggttgttcactttaaaaaaggaagaataatcattcatttggagatctagaaatccaaagggttcaaaataaatccaattcatcgctgccattctaagggaaggtagtgcagtcagtgtgactattgttccccggttccgttctcagtttgtgtctttgagccagagttgaccgttggatttcattcatggatcttcctctgcctaaaccctccttcaaccccaacaagcatctcatagaagaat

SEQ ID NO: 27049 - DNA, 244 bp, Glycine max
cttattttttttttttcagaagccaacaaggccaagcgctgagaactaaaaggttcagaaatgggtttatacacgagcgtgatggaagagataagtttttacacagggctatctcccgctgcgtttttcaccattttggctatgatggtcgtcgtttacagaaccgtgagcggcatgtttgtgtcccccgaagactacaacaagccccccgtcgtttcggcccgagccaattcccggttagacg

SEQ ID NO: 27050 - DNA, 241 bp, Glycine max
atcagaaagacaatgtgatgtggaacagaatgattctgctaggaaatctgtacaagtcaaagggaaaacgagtagagttattgctaatgatgatgcttccacttccaatttagatcctgccaatgttgaagagaaattccaagtggaaaaagcaggtggatcattaaagactaaacccagatcttcccttaaatctgctggtgaaaagaaacttagtcgcactgttacttgggcggatgag

SEQ ID NO: 27051 - DNA, 289 bp, Glycine max
atggttgtgggcgaaactgcttgccagaaactgagcaaagaagcaagtaaagggcggtttggaaattgttactattattttctctcttacatgtgttgaggatgatgatgaagtcaatttcattcactctgttttcttcttcttcttccttgtggccgattagggttattattctttctggctgtggaacgaaccatgctgttgttcgagaatggatgagttgaactgcgcgatgacgacgacgacgacgacgacggagaatagcaatgcggagctggttcaatgggag

SEQ ID NO: 27052 - DNA, 299 bp, Glycine max
gtaccagagaccagtagttgactggtgggctgaagatttaactgtgcttagaattgacattttccaaagagtcataattgcaatgatggcaagagggtttaaacagtatgcaattggccccattctaatgctctatgcacagaaatctctacgaggtttggatgtatttggaaaggcaaggaagaagattgagccgcgacaagagcatgaaaaaagggttgttttagagacaatagtgagccttttgccaagggagaagaattcaatgtcagtacgcttcctttctatgctgcttcggg

SEQ ID NO: 27053 - DNA, 465 bp, Glycine max
atatagtgtctgcagtgctgttggagtattgcctttatccctacaatatggtttctcagtaattgagaagtttttaaagggagcttccagcattgatcaacatatgtattcagaaccatttgaaagaaatctacctgtgcttttgggaatgttgagtgtatggaatgtctcatttcttggatatcctgcccgggctatcttaccctattctcaagccctggagaaatttgccccacacattcaacaggttagcatggaaagtaatggcaagggtgtttcaattgatggtgttccactaccatttgaggctggtgaaattgatttcggtgaaccaggaacaaatgggcagcacagtttttatcaacttatacaccagggacgcgttattccttgtgattttattggagttgtgaaaagtcagcaacaagtttatttgagtggtgaggttgtgagcaaccatgatga

SEQ ID NO: 27054 - DNA, 431 bp, Glycine max
caaatatgccaagtaaaggccaaacaccaacattggcctctgcaccagaagcagatcctttcctcgacgatggggaagaaaggagggagctggttctcgtcggtgaagaaagttttcaagtcctcttcttctaaggactcgccggtgccggagaagaagacagagaacaacggaagagcagtggcagcagcatgtggcgccagaggaggtttctgtggagcattttcctgcagagagttctccagatgttatcaatgaaggaagtgccacgtcgtcaacaccagtgactgaagatagaaaccatgccgttgcctttgcagcagcaactgccgctgccgccgaggcggcggtgcgcagctgctcaagcagctagctagagttgtaagattggcgggttatggacgccagccgaaggaagaagagctgcaata

SEQ ID NO: 27055 - DNA, 686 bp, Glycine max
  unsure (1)..(686): unsure at all n locations
ctccccatcttcaacattaatttaccttcatctttctctcagcttcaccttcaccttcaccttccgaattgtatcaaacctcaaaaaatggatcatcaaaacaaacacgtagcagtctttgctttcccctttggcagccaccttatgcctctcttaaaccttgtcctcaaactagctcattcccttccaaactgttcattctctttcattggcacacacaaatccaatgcaatccttttcccaaaaccccacatcccaaataacatcaaggcctatagcataagtgatggaatcccagagggtcacgtcctaggcaaaaacccaactgaaaaattgaatctttttctccaaactggtcctgagaaccttcacaaaggtatagaattagcggaagcagagacaaagaagagagtcacatgcatcattgcagatgctttagtaacctcttctctcctagtggctcagaccctcaatgttccttggattgcactttggcttcccaattcatgctcactctctctctatttctacactgacttgattcgccagcactgtgcaagccgtgctgggaacaaaaccttggatttcattccagggctgtcgaagttgcgtgttgaagacatgccacaggatctgcttgatgttggagaaaaagaaacagttntttcaagggaactaaattcgct

SEQ ID NO: 27056 - DNA, 456 bp, Glycine max
gttggatcaagaagccggccacagttgaggaggcctacttggattattgttctgctttccatagtgtgtgtgtttctgattgctgcctatgtttaccccccgcctagcccttcttcgtgctccgtcttttcctcacatggttgcggtagtggtgcttttgatctgcctccggctgctcatacccgcgaattgactgatgcggaggttcagtcccgggttgtcattaatgagatcctgaactgttatcctgtgcacaccaagaaacctaaagttgcttttttgtttttgactccgggctcgttgcccttcgagaagctctggcacatgttctttcagggtcatgagggaaaattctctgtttatgtacattcatcaaaggaaaaaccaatacatgtcagccccttctttgttggccgagacattcacagtgaaccggtaggctggggaaaaatttct

SEQ ID NO: 27057 - DNA, 295 bp, Glycine max
cggctcgagataatgtaaagcattctttctttattccgttcttgttctttctacatctgaaattaacagtatcccgttacagttaaagttaccgggggagggaacgatcggtgactggctgtgttagggcttttgaatcctcttctgctaaacccatgagttggtgtgatagcgttcaggaaccacggattctcgtcgcacccgatcctggtactgatggaaatggtctgggacagatgatatcgctccgccatcccaaatctggaaatgcaacacaatatctgtttgtaaatgg

SEQ ID NO: 27058 - DNA, 518 bp, Glycine max
cggctcgagctcctgtccgatttatgtttctgatcttgatgacagtgtgctcagtttggacctaacatcctgtaccaaaatgttcgatatcgttacgccagtttcggcatacgggatgcagcgaaattcgttggatttaagatggtccgaagcaaattgtagtcagtgcaaagcaaaaggcaagaaatgtaaatggaagaacaacagaggtgacatcgaatgtttcgactgcaaggacaagcgaaaaactattcatgttcccaaatcttttatttactctgcaccaggttcgattcttttggggttcgtggttattgtcgtttttaagatcatataccattttagacagaaacaagaagaccaagcaagggtggagaagttcttagaggaatacagggcagaaaagcctgcaagatttacttatgctgatgtgaaaagaatcactggtggttttaaagagaagctaggggaaggagctcatggggctgtattcagaagaaaactttcaaatgagattc

SEQ ID NO: 27059 - DNA, 310 bp, Glycine max
ctggcacgagagcgcattgagttgtggtcaacagagagaaagtaggagagaaaaaaaaaagcctcaccgacttcggcgaaatggatctgccgccggcaccgatccggtggcgcgcaaccgcaatcccattctttgtggcggttctctttgtatccaccatctccccttcgcgcgcaatctactgcgacgaagatgattgctacgatctacttggggtttctcaaagtgccaatgcttccgaaattaaaaaagcttactacaagctctccttgaagtatcacccagatgaaaaccctgatccggaatcgcg

SEQ ID NO: 27060 - DNA, 298 bp, Glycine max
cacgatggagatcattatgccaagtttggagagagacttaaatgacacgagggggtattatgagagtggaaagactaaggaagcgtcctggagagaatcgcagctcaaagggttgcgtcgttttctcattgaaaaacaagaagatatcatgaatgccctcatgcatgatttagggaaacatcaacttgaagctttcagagacgagataggaacgttgattaagaccttaaatctggcggttgaagtttttgaaacattggatgtcaggcaaaaaggctgcgttgccgcaattagcatt

SEQ ID NO: 27061 - DNA, 259 bp, Glycine max
gcaacctaccagagactattttcaaagatgaaaactccctattaacaaatggagatttgagccatagtgatctgacaggtaatgaaaaccagaaacctacccgtaaagcctcaaatttgacgaagcaggagaatggagatgacggcttaaagaacagtccaaaattaccaagttatatggcagcaactgaatctgccaaggcaaagttgagggcacaagggtccccaaggtttggacaagatgaaactgagaaaaacaa

SEQ ID NO: 27062 - DNA, 316 bp, Glycine max
gagactacatgaagcaaaatgttcaatgtccagaagcaaattatccaacatttctttatgcaatgcccatgtcccatacaaaagtgttctttgaggaaacctgtttagcatcaaaagatgctatgccttttgatttactaaagaagaagctcttttcgagattaaatacaatggggatcagaattaagaaaacttatgaagaggaatggtcttatatcccagttggtggatccctaccgaacacagaacaaaagaaccttgcatttggtgcagctgccagcatggtgcatccagctacagggtactccgttgtgag

SEQ ID NO: 27063 - DNA, 343 bp, Glycine max
atccacatccacctacacaatcaaacaaacctcttttatatatcactcactcctctcctttcccataattaaaagattcatgatgcttacactctcactctctgtgcctctgcagaagcaatacccattttccatctctcagcttccttcctctgcttacattactctctgcaaatggggtcttttcattctcagcctactcctcaccgctctcatcttccgcttccgccaaaacgcaactccctttcctcttatcatcgctcattgtgattatagccacacgacgatgacgacgaaatctactccacatcggagtttgaagatgacgatgacgaagaagaag

SEQ ID NO: 27064 - DNA, 397 bp, Glycine max
gtgaaaaggatgttgctgagaaagtgacatccaatgttactgatcaggatggaaaatctcctactggggttgaaactcctgtaaaaaacttagttgctgaggatatgtctattgggaaaattgatagtgaagagggcaaagataaagaaataaatagttctgaagataaacctcaaaacaagccaaatccaacagtaaatgcagttgtgagtgatccttctgtgaaaacaacaaagaagaagaaaattattaagcgggtacctaaaaagaaggtggtgggtgaggcttctaaatctcttgtacctgaacctaaaaaggatgagaatcaaggacaagatagtacccagagctctggaaagcagctgcagatgcaaataccatagtgaccgaggagaag

SEQ ID NO: 27065 - DNA, 475 bp, Glycine max
acctcattcacagtcacgctctacctgaaaagttcatctctgcccaaaaccctcacagtgacgccgtcatggtgccacactgccactttcactgattattcgtcgacggttccaactcaacaatttgtcatctctctgcgacttctacttacaagtaacaagttgttggaacttcttacgagttaagagccatttattctgcatcctgtttttgcttcaataaaatggagacaaaatcatccagttcctctacaaacttggtagaccaatcagtgtgtcctggagatgtgattcttgatctgtctaacatgacaaaccagacaattaaacttggtggtggtctacgacaggcactgtgatgcgatttctgtaatgaaggctggcagactaaggttctcaaagcctaataaataactgggttgaaaattctcagaagaggtatgtgccacatgcagaggattctgttcttggaatt

SEQ ID NO: 27066 - DNA, 365 bp, Glycine max
aggctactcaatagacctcgaattcggaaccccgtcacaaaccttcccctttgttctccacaccggtagcaccctcgtctggctcccgtgctcctctcactacctctgctccaaatgcaactcctcctcaaacacgccaaagttcatccctaaaaactcgtcttcttcaaagttcgttggctgcaccaaccctaaatgcgcctgggtcttcggcccagacgttaaatcccattctgcaggcaagacaaagctgcttttaataattgttcccaaacatgccctgcctacaccgtccagtacggcctcggctccaccgcgggttttctcttatccgaaaatctcaactttcccaccaaaaaatactc

SEQ ID NO: 27067 - DNA, 373 bp, Glycine max
gaccaagccgccacgtgctagggaacatgagagtgataatggaagtggaccagatgagtctaataagaaaacatttgctgtgccttgtgcgatgccagagaagccaacatgcttggaattgagtggtggtactagtactaattgtactaccccactttggggttgttcatcggtttgtggaaggagagaggagatggaagatgctattgctgttaagcctcatctttttcaagtcacttcaaggatggtaagggatgatcatgtgagtgcaaacacaaaatactcaccaacccatttttttggtgtctatgatgggcatgggggcattcaggttgccaattactgccgggaacatcttcattcggtgttggtt

SEQ ID NO: 27068 - DNA, 559 bp, Glycine max
caccacgccaaatcacaatacccatcaggtaattctgctctttttgtctttacgctgaatctgtttgttccccttccttgaacgtttttcattggggttgcgaccaactatgttggagctcaatactaagttagattccttgggatattcatccattatctgtgattaggaaaacccatgtcaccattttcacaaattgtgggttttagttggatgttttcaagagtttgattctagggttttttatgcaaattttgggggtttttgggaattttggctcagttgagatctctgtgaaacgggttttggaaaaagttttggtcttgagatttatgagatattaactgtgaaagatagatgatgggtgagaagttttgtgtgaacgacgaagacaagggtgtgttggagtctgtgctgggtgcagaggctgttgcgttcttatttccgcactttccaataatctcttttccagtgtggttgcgccatcggccagtactgacccgggtctccgacagcggttgtgccagcttgttgagggttccaagtggaattatgctgt

SEQ ID NO: 27069 - DNA, 534 bp, Glycine max
ctcagaggcgtgtttggctttggggttggggttgcgaatgaaggagtgagagcgagtgctgtatagaatcccatatttgattagggaaattaaaacagaaaacagaacccttcgaaaacccaaaaccctgtttggcgtcgtggccatggatttccaagtcgtcgttctcggcggtggcgtttccaagaagctcatccctctcgtttcgcaggagcttccgaacgcgttgcttccgttggcgaatcgccccgttctctcctacgttctcgagtacttggagcttagcaacctcaaagatctcattgtggtggtcgaaggcgaagaagcggctcttcatgttggggcttggatttcgggggcttatgctgatcgcctccacgttgaggttgctgcagttcctgaggatgtggggacagcgggtgcaattcgggccatttcgcatcacctaactgctaaagacattttggttgtcagtggtgatcttgttactgatgtgccacttggtgctgttgcagctactcatagacggcatga

SEQ ID NO: 27070 - DNA, 804 bp, Glycine max
tgatcgtggtagtcgtggaatatatttcattctctcctctatggtgttcaatgtagtacccaccatattgagagatatctatggtggcaggtatactggcctacaaatttggagctccctttgcgctgattacttccttatctgttgcggcctatgtcgcttttacactgactatcacacagtggaggactaagttcaggaaagccatgaataaggcggataatgatgctggtacaagggttattgattcacttattaattatgagactgtgaaatattttaataatgaagtttatgaagctgataactatgacaagtacctaaagaggtatgaggatgctgctctgaaaacccaacgcagtcttgctttgttgaactttggtcaaaatgttatatttagtactgctctttcatcggcaatggttctttgctctcatgggatcatggatggcacaatgactgttggtgatttggtaatggtgaatgggcttctcttccaactatctcttccactcaatttccttggtagtgtttatcgtgagactattcagagtctagttgacatgaagtccatgtttcagttacttgaggaaagagcagatattagggataaagaaaatgcaaagcctctgaaatttaacgggggaagaatccaatttgagaatgtacattttagttacctcacagaaagaaagatactagatggaatatcatttgttgtgccagctggtaaaagtgttgcaattgttgggactagtggaagtggaaaatcaaccattcttagattgctattcagattctttg

SEQ ID NO: 27071 - DNA, 419 bp, Glycine max
ggcttatttaaacagcgaataaccaaagatgggcaggaggaagttgctgatgattggcttgagatgggcaatccctgggagattatttgaaatgatgtttcatatcctgtaaagttctatggcaaggttgtttcagggtcagatggtaaaaaacattggattggaggagaagatataaaagctgttgcacatgatgttcccataccaggatataaaactaagactacaatcaacttgagactttggtctacaaaagctgcatcagaagaatttgatttatctgcttttaatgctggaaggcacactgaagcatctgaggctctagcaaatgctgaaaagatatgctatatactctaccctggggatgaaccaatagagggcaagatccttcgcctcaagcaacaatatactttatgttc

SEQ ID NO: 27072 - DNA, 538 bp, Glycine max
tcaagatagatagccagagaaaggtaatagaagctggtaaaggttggataacaggtaagaaggaccacttgagagtgagagagctgaatgatagattgatgatggctgagcgtgcattcactgacagagatggcctctttggaatgtcatggtataagcatttgatttatggaccatcaaaacataatgactacggctctcaatctttccctggaatcgatgatgctgttaaaatggccaaaaatctacatactgcagaatcgtggcatcgtgtacagcacgaagtttggagagtctcaagagtcatcaaacaagcctcgctagttttattcggtctactatcatgaatatcaatttagttgtatatttcgattcatggtaaattatatctccgtaagaataaatatgtatatatgtgtgatgattcataaatctcaataactcaagaagagatttaggattttgtttttccccgcttctctcatctgtcaaattcacttcgcaattcgaataacaagttgcaaaatatatttttttc

SEQ ID NO: 27073 - DNA, 551 bp, Glycine max
ctcgaccgattcggctcacggctcgagggcaacactcctattcttccatttaatctcccacttctgagttgtcacataaaaaccctaattcccaattcctttctccaatcgctcctccctccgcgccacgtcgctaggctctgtagggttctgagttccgattcgcgagggaaaatgagcacgcagaagaagcgaccgtaccacatagaagcgttcaagcaccgcgccgtgggggatcccaagtacgccgagaagacatggaaggttctggaacacgctattcatgagatatacaatcacaacgctagtggccttagctttgaagagctttacaggaatgcttataacatggtgttacaaaaatttggggagaaactttacacaggacttgtgacgaccatgacttctcatctaaaagaaatttctcaatcaattgaatctgctcaaggagaaattttcttggaagagatcaacaggaagtgggtagatcataataaggccttacaaatgatccgagatatactgatgtacatggatcgaacttttatacc

SEQ ID NO: 27074 - DNA, 531 bp, Glycine max
ataaaaccccctttggttaaaaaaaacttcaaattaagtccatccctaatttgaattgaacaaaccagtgcagtgcagtgcaatggaggttctgtacaggaagctctatgacaagtacaccagactaaagtctaacaaactttctgatttggatcacctcaacgaagaacaagaactcaaattcagaaacttctcgtccgctgcggaagagttgatagagcacttgatgaccgaaaaggaagagcttcttggacaagttcatcacttgagaagcgagctcgcttcccttagggctgccaaagacaaccaggttgccgattatcagaggcttttggctgaggaaacccgcaaaaatgaagctcttgccgaagaagttgagaaattgctgaagcttcgccaggaaggagcatgtcatgatttgaattataacagtaagatcatgactgtagatggtcagtttaaggctaactctaacagctcatctataagaatgacaagaaaacgtacaaggcaaaatactttggagaaaga

SEQ ID NO: 27075 - DNA, 449 bp, Glycine max
gttatatagaagtctcagttttagtttaataggcacatcacactcacatctattgaagttcataattccacctcttgtgttttttccaaggctttgccaacaacaattctttggcttagagttatagagcatggtggggagcattatgggagtggttcacaatgcatacacaaatggaagtgttggtgtacaaaattgtaatggggtggaggagaagcttgattgtttgagaaggctaattgggaagggtgatggtgaccctttgagaattgtgagtgttggagctggtgcttggggaagtgtttttgcagctttgctacaagacacttatgggcaatttagggataagatacagatcaggatatggagaagggcaggaagggcagtggatagagccactgctgaacatctctttgaggttatcaactcaagggaagatgtgttgagga

SEQ ID NO: 27076 - DNA, 301 bp, Glycine max
gccactcagtttctctttcgtatttctttttcttttctccttttcttcttctttcacttatcctattagtatttccctcagtcggtttattcattctctctgtttttttccttccaccgactgctagttttcgtttacaccactaacttcaaggttggtagcattatcttctcctttaaattatactaatcttacttcccttaactttcgtttggtctttattcttccatttattgtattttacatcatgaagaagaggcttttgggcaagtcaaggttctttcttctttcctcggttccc

SEQ ID NO: 27077 - DNA, 252 bp, Glycine max
ggaaagtagtatctgcaacatcagaaggcaataatggtcgtgaatcaatcaacactggagggggttccaaactttcatccctgcagccaccaccacaacactttctcccaaccagtcctggtgagaaggtcattattaatccggctataactacacaagtaaccaaaagacaagtcatgtcaaattccatcagagtttatactgttgcgttgcttcaacaatatacaaatagcttttcccaagaaaactgta

SEQ ID NO: 27078 - DNA, 339 bp, Glycine max
gggttcctacctgtcaaaagattggttgagacaacctgtatttattcagtcatttgctccaacttcactcgtgtatatatcaaataaaacggacttgcccaaggttttcttaattgatgatgttactgttccaactcaagacactaatcagtcatattgggagattacatctgatgaatacctagagtacataaagcaatatgttgtgggaattggaccttggaaggacacagtggtacctgtggtaaaaaattatatgacaaatcctactaatcttgttgccagggcacatgctcataacctgcaggtgcatccatatacttaccgaaatgagttccc

SEQ ID NO: 27079 - DNA, 249 bp, Glycine max
atatgaaaagataagatgcgtagcacaaaccaaaccagcctcatattcttgattctttaggtggcttcagagagtgagctttatggttttggtgcttccattttgttcatcaagatacatttctagagttcaacctctatatctttcagcaagtgaatcacacgcactatagatgaattgcaaaataaactccttaagctcaccaattccatgcaaactttacaccaagaaaccaaggcttagaagaac

SEQ ID NO: 27080 - DNA, 396 bp, Glycine max
cccacgcgtccgcggacgcgtgggcaaagtcacaccaacaactagcagcatagcactgcattgatttcttcctcttcataattacttcctcccaatttcaacctctacttcatcatcttccataaaagatcaactcatacaattaataatatcctcttctatttacacacacatggcttctgttctgcctatttaccacaactacgttaacctcccatgtcctcttcccctttcaaaaccatccaccaccttcaacacacccataattctcttcttcccaaaaaccaaaccttcactaaccctcaagtgctcctcttccgcttcaagcctaaccccggaactggaccaagaagaagaaacatttggtaactctgatgagcctcccttgagcgaatc

SEQ ID NO: 27081 - DNA, 345 bp, Glycine max
tctgtgattgatgttggttcctattctatttggtaagattatcaactttaactaatttgcagctgtttagattggttcctactacacacttttctccattttttttcttcattttccattgaattcaataaaactctttctatttcttggtttcctcatatatttacttttgtatttttagctttaatgttcagggttggcactcgatgctgcttcttggaataagtgctgccataagtattcgtgtctcctatatacttggcaagtcgcatccaagagcagccatatactctttctgcgtgacaatgtttcagtctctcctcctcggcatagttttcatgactg

SEQ ID NO: 27082 - DNA, 275 bp, Glycine max
ttctcactgaaaaggttggctggcaggatgaggccatatacgctatcaatcgaaccgtgtcccgttgtagatccggcgctggaaagcgtagtagtggctcacatgttagagcagacatatggcttgcttttctcggaccagataggcttggaaaaagaaaagttgcatcagcacttgctgagattttatttggagacaaacaaagcctaatcactgtggatttgagctcccaagacaggtcttatccaacaaactcgatttttgaattccaaaat

SEQ ID NO: 27083 - DNA, 290 bp, Glycine max
tgtcgaatcaatactgtataaactacttgtggcagcagatttcaatgttgcagcagctcaacaaggaataatttacattgatgaagttgacaaaataactaagaaggccgagagcttaaatatcagtcgggatgtttctggtgagggtgttcagcaggcattattgaaaatgctggaaggaactatagtaaatgttcctgagaaaggagctaggaagaatccacggggggataacattcagatcgacacaaaaaatattctttttatatgtggtggagcatttattgatc

SEQ ID NO: 27084 - DNA, 297 bp, Glycine max
ccaaaaagttagcattattgggagaaccaagaacgtaacggttaacagcaactactttgtttcacatggacgagagacaaagaatagatccaaggagcggtttcaaccgcgcttccagaatcttccacagcctcaagccaccactccccctccctcctcccaacgccaccttctccgccacaacctacgccctctccctccgccgcaactcgctatttcccgactccaccaccgccctcatcgatgccaccaccggccaccgcctctcccactacgaggtcatcaaccgcatcgaaa

SEQ ID NO: 27085 - DNA, 434 bp, Glycine max
aatagttcaagaatgttatgatgtaaccttgtcaccatggcatggatggatttcgtcagccgctttcagagtggctaaaaaactagtgccagatagtaaaactttcatggatctcctcaaggaaaaagatgaaaactgtgaaaccctaaaggagaaaatgcagatcttggtttccctgcttgttccttttcttgaggatgttcattgtattcttaaagtgtataacttggacaggattaagtcaacctgaagatagaagaactaatgtgcagttttgtgtagggtatattttggcttcattcccccactgttttcatgtaaatagcttgtatagtaaaatcttcgtcaacacagctatgtcgtaattacaagtttggtttctgctgctcgatatagattttatacatcaaatttgtaaatgttgaattccaagt

SEQ ID NO: 27086 - DNA, 450 bp, Glycine max
acgtgaccgcaggaacgggttatggtgtggcggaacagagagggattccgggtgttcaatcttatctgactcaatcataccttgatgtcaacaactttgctcttccttttctccaacaaaatggcaaagataccggatattgagaagtgcttagatgtcgttgctacattgcaagcaaagagggggtactgacacttactgctgattttgaggtgttcagaagaaaaatattcacaagcttgtgtagaggaaactgattcagtgtgtttatggctgggaccatttgttatgtcggaatattccattagaagaggctactgatcttcgacagaaccaggataatgctaaagccagtttagaagttcttgccactgatatacagttcttgagggaccaggttataattagaatgttcatcgacggaaaattatacaagctggtgccataaca

SEQ ID NO: 27087 - DNA, 299 bp, Glycine max
tttgaaagttacggacttcgttggtatagcaaggaaattggaagatgatatattgagattaaatagtaaagcctcaattttggacttgagagtggaatgtcaggatttggaaagatattctgtcatcaaccgatttgccaagttccatggaaggggacaaaatgatggggcagaggcctcatcatcttctggtgcaaatactaatgctcaaaaatcgttccccctaaaatatgttactgcagttccattgcctaggaatctccctgacagggtacaatgtttttcactttgataattaa

SEQ ID NO: 27088 - DNA, 492 bp, Glycine max
  unsure (1)..(492): unsure at all n locations
tgagaattggtggtggagtttttcctgtgataaaggagcctgattaccttgtcaatggagagtatcgtgtagataaaggagcagctccaaagatgttgaactgtcttatgtacaagctgtcctattatcggtttggggagctgacaacagaatatggcaaaccacctgggtatgatcgtgctagaggtgttgaaattggaaataaggacataaagcttgagtacttggaagaggcgttcactacacagaattggatagttcgtatttataaagtgaaaccccctaaaaacaggtggtaactccaaaaaaacaaagactgttttctctgcgggaaatgatagcattctagtgaacttgagcgctgaaaatcttgttagcaatgttacaggttgtggactttttttgatctagaattagttgaggtaatttgtggatttttgaaatggtacaggttttatgactaaaanaaaaaaaaannnnnnnnnnnnnnnn

SEQ ID NO: 27089 - DNA, 365 bp, Glycine max
ggagcagctccaaagatgttgaactgtcttatgtacaagctgtcttattatcggtttggggagctgacaacagaatatggcaaaccacctgggtatgatcgtgctagaggtgttgaaattggaaataaagacataaagcttgagtacttggaagaggctttcactacacagaattggatagttcgtatttataaagtgaaaccacctaaaaacagatggtaactctaaaaaaacagccccaaaaaaacaaagactactcttcgggaaatgatagcattctagtgaacttgagcgctgaaaatctgttagatgttacaggttgtggactatttttgatgtagaattagttgaggtaatttgtggat

SEQ ID NO: 27090 - DNA, 252 bp, Glycine max
caggagttcgagaaactttggtgctcccaaattgtgaaagtttatgcattccatggatgttagcagaaaaggatgattgggttcctcgaactgttgctccattcatatggattaaccaagaatatggaaacgagagatccacttcaattgataccaataatcaaccttctggtggagtggaagctagtttggaggttggtgcaagcacctcaagtaatgatccagagcacaaacaacaaaatccagagagta

SEQ ID NO: 27091 - DNA, 479 bp, Glycine max
gtgttggtgattatgcaagtgggacaaaccatgtccttcctacgtacggctatgcaagaatgtatggtggtgtgtcattggactccttcctgaagtacataactgtgcagtctctctcggaggaaggtctaagaaggcttgggccatatgtagcaaccatggctgaagttgaaggccttgaagcccacaagcgagcagttaccttgagacttcaggacatagaagccaggcaggtttcaagatgagatgatgcttcaactcattgttctctttatctcttgtaagctactagctcttagtgtttggcaagtctaggaccatttgcctggcgagattacctagatttaggtggtattagtagctagaagttgccatttcaagttcatgtaacaatatggattcatattctgtaataacaaacatatacaagtgcctaatttgtcggtgatctttggaataatgcatccgatgtatttgct

SEQ ID NO: 27092 - DNA, 534 bp, Glycine max
tggaaaacatcgacaaactcgtaaatactatgctacctacaatgctctcttggaaataaaagaattgatgctaaaggagacatctttattgaattcgatcatttcccagtttcaagaggcctttagtagcactgatggacgtataacacttgttcattccatggaaggacttgtcaagggaagtcaacagaagctagaaagggttcatgtaggacttcacgaagaagagagaattcgtaatgatctgaaggataggtatgctgcagcaaccggtgagcacaagcactgctattctctgttgaaagcttttcaggcccaatgtgcgaagaattagaggtttcgatgacaagacaactttgaggttgagttgcacaaagtactgtatcgcgtcaaagcgtagaggttgcgttcatgctcataaaatctgtattttaaagctgatgccatgagttgtatgtagttatgatgattcacattctttcattgctatttacagttttattttacagtaatataaaaccttctttatggttc

SEQ ID NO: 27093 - DNA, 390 bp, Glycine max
cttatacattatattaaaatatatacttatattgtccgtttggtgtggacattaattttaatagatataaatgtgattcttctgtttatctttgatcgctaaatgtgctttctgtaatagttttaactgctgcactaatgtgcagaagctagaaagggttcatgtaggacttcatgaagaagagagaattcgtaatgttctgaaggataggtatgctgcagcaaccggtgagcacaagcactgctattctctgttgaaagcttttcaggtaagctttttctgttcatcggatgacatgtaggtggtgccatggtgcagagttaagcttgtttatgatcctttgtgggtgataattctgtgtctatctgataaggcatcggttgatttaag

SEQ ID NO: 27094 - DNA, 368 bp, Glycine max
gtctgtccgagagctgagtggacagatatgccagatttgtggggatgagatagagattactgtggatggggagccatttgttgcctgccatgagtgtgctttcccggtttgccggccttgctatgagtatgaaaggcgtgaagggatccaggcttgtcctcagtgcaataccagatacaaacgtatcaaaggtagtcccagggttgaaggcgatgaagaggaagatgacactgatgacttggacaatgagtttgattatggggatgttgatgctctgggcccacaaccagtgtcggaatccttgtattctggacgccctaatactgggcgaggtgctgataacggatcttgcatggcgacaaacttgg

SEQ ID NO: 27095 - DNA, 640 bp, Glycine max
ctcgagccgctcgaagcaagtcgacgactccaaccccaaactcctcatcaccgtcccagaattatgggacaaagtcaagaacctcaacctccccgccgtaattatcgatacggaaacagctcaaggactcgtgagtttcgagctggaggcgctgctgaaggctattgagaagcagagggtgacgaagctgtgggtggtgcctccgatcctgcttggtctggcgaaacagagcgtggttggaaactacgatctttcctcgttgaggcgtataggttcgggtgctgctcctctcgggaaagacttgatggaagagtgtggcaggcgttttcctcatgttgccatttgtcagggttatggtatgacagaaacttgtggcattgtttctgtggagaatccaagagtaggggttcgtcatactggctcaacgggaacgctagtttcaggagtcgaagctcaaatagtgagtgtggatacacagaagcctctccctcctagacagttgggagagatatgggtgcggggacctaacatgatgcaaggctatcacaacaatccagaggccacgagattgactatagataaaaaagggtgggtacatacaggagatcttggatattttgatgaagatggacaactttat

SEQ ID NO: 27096 - DNA, 283 bp, Glycine max
agttcccgctctcggttggtagcagcagcagtgaagggaccaaaccggttttcgtttagcattcttatccctgataatgagcagttcaagggagagctccccggattggttgcgttcttttcaggcgccatctcattcgcggttgacgctgtcctctgattctgggtcttcacgtggtggtggatcttggaatgaggataaaactgatgttgaaggggcttctccaaagtcacccagatttctgaaggtcacaaagagcaacggaaagacaccagaagctgca

SEQ ID NO: 27097 - DNA, 474 bp, Glycine max
cttgagagctacacttgcacttttccacttgacaaaaaatttggactttttccaacaagtgacagttgaaacaatggccctagaggccgtggttttcccacaagatccattcacttacggtttcaacaacaaagacttcttgtactcgttagtaggaggtgatggtggtggtggaggaggaagccacgagtacggtttccaagcatcatcagaagacaaaccccatgtgggaatcattatcaacaacaacaacatagaccacaccctgcatgcaaattgggattcatcttctccttcggtgttgcaaagtgtcaaagaacaatgggattcacactcctcccctgaagcttgcactgttgatcaatccctccccagagccttccctcttcctccttcttcttcatcccccgaagcattcgccaccggccgccgcaaacgacgtcgtaccaagagcgccaagaacaaggaggagat

SEQ ID NO: 27098 - DNA, 334 bp, Glycine max
caataatgctattgcttttcttgttcctatttctccccacggtttaccatagcatctgcatgatgagacgaatgcacaaagtcacaggctacatctttggcactatttggtggggcttggtctcaatctcatagcttattttattgcttctcatgttgctggagggtgctggtatgtccttgcaattcaacgtgttgcatcctgcctccggcagccctgtgagagaactaatggatgcaatctttctgtgtcatgctcagaggagatatgctaccagtctttgttaccagctagcgcgatacagattcatgtggtggtactcaacagtggtaag

SEQ ID NO: 27099 - DNA, 271 bp, Glycine max
tgatgtattcaaatgcacgtattatcagatttgttcgtgatgatacctttaattgtcactacctctgaggccatgtcttaccctgaatgtatagtctatgttatatgagtcttgtgtcatatgtcctaattatcgtttttgttcaaggattgctgtaaagttgcttttatatccttaatttttctttatagtggtatagtgggtttatttgagtaattttgttcttcttttacagggttctatattgtgtattgaatctgacaaactagct

SEQ ID NO: 27100 - DNA, 341 bp, Glycine max
gtgctatcgatgtatgcagatttgatatgggagagccaaaaggatgcttcgcgtgctgagacttattttgatcaagcggttaaagcagctcctgatgactgttatgttctggcatcttacgctcattttctttgggacgctgaggaagaggaagatgatgaagtgcaagaagattactctgaaatatctcccagtttcttacatggagctgctccaccaccacctcctcctttagctgctgcttcttaagctggttccactgctgtctggcttccatatataactttctaacttttgtttatactgccttaaccttgtaatatttttggccgatgagaaca

SEQ ID NO: 27101 - DNA, 401 bp, Glycine max
caccctcataaattgcaaacaccgatcagaaagaaaaaatgagttcccttcgtctggctttatgctgtgtcgtggtagtgcttggagcactaccacacttctcatatgcacagctagatccttccatttacgatagcacatgttcaaatgtgacttcaatcgtacgtgaggtgctctcaaatgtctcccagtctgatccccgcatactcgcaagtctcatcaggctccattttcacgactgttttgttcaggggtgtgacgcatcaattctgctgaacgacacggacacgatcgtgagcgagcaaagtgcagtgccaaacaacaactcaataagaggtttggatgttgtgaaccagatcaagactgcagtggaaaatgcttgtcccggcatagtttcttgt

SEQ ID NO: 27102 - DNA, 339 bp, Glycine max
gctggatgggtgtttgtttcaattcgatttcttctcttctctgcagaaaatcgaatcaatcgatggatgctttaatttcgtgtggttattgagtgtatgctagaaatttcatatccgcaagggcagagagtagaaggaagaagagagaaagagggaagctgctgctgaatcgtaatcgatcttatatctacactctaccatggacattgatgatgatttcacattttgtcaggtcagtgcacctgttgatgttgaaacaaacaagcttgcttcagatatagctgatatttccattaaagaagaatcttcaaatgcaactaatactactcaggatagtgc

SEQ ID NO: 27103 - DNA, 270 bp, Glycine max
aaagaaacatcagattaatttttaagtgaataataattgtagatttagatgtgcatatatattattcaagcagaggaagctagctagctatagctagatagatacattaattttgacagcagctataacttcccattttaattatctcatactagtatgtatgctccttcatatgaacatataggctacaaagaaaatttgcactgattttactggtgcagaaaaaaaaataaaaggggggcccgcgaatatgtggcctcttaacccggg

SEQ ID NO: 27104 - DNA, 314 bp, Glycine max
ttccgctctagcttcgagcaatcttgccatactgccctcaggattctctattattcctgatggtcttgagtcaaggccattggtgattagttcaaggcaggaagaaaaaaataccgagggaggatctttgtttacaatggcattccagattcttaccaatgcttctcccgctgccaagttaacaatggagtctgtggactcggtcaacactcttgtatcttgtacattgagaaatatccgaacgagtctacaatgtgaagatggctagtcagaatcagataatcacttgatagagagtcatagactttaattag

SEQ ID NO: 27105 - DNA, 265 bp, Glycine max
atcctatcgtagcaaagaaagatagattgaaaaccctagcttaccttttcaactttcaagatgcaaatctttgttaagacactcactggtttgacaatcacccttgcggtggagagttcagataccatagataatgtaaagtccaagattcaagacaaggaagggatcccaccagaccagcatcgtctcctttttgctggcaagcagcttgaggatggacgtacacttgctgattacaacatcagaaagagtctactctacacct

SEQ ID NO: 27106 - DNA, 318 bp, Glycine max
atgagaatcatttatttagcgaaaaaaatacttatttgattttttctacaaaattttcttgagccagcaagagtcacacatcataagaccgtgatctttaagcaggacaatacaaaatctatcaaggaagccatataattggtatccaaattccaaacttgtgttgggtttggttccttgagttgagaggagtgaaaaaatggatcacagtgcggatgctcaacgcacggacctgatgaccatcacccgtttcgtgctgaacgaacagtcgaagcacccagagtctcgtggcgatttctcaatcctgctcagtcacat

SEQ ID NO: 27107 - DNA, 375 bp, Glycine max
cattgctcaagacccatatctcactttctcaaaaaagtaatggcattcatttacatggcttcattatccagactccacttagaaagaatggaggatctcatcttctaacttcagttactgaatctgttaaattttgtataggttgtaaagattttgtaatcttgtcaatgaggcagagaggggggtttccccattctgaaagagagtctagttattttcatgcatcatcttttggttccaagtatgggggagcaaatggcatgtggatttgatttgacctcaaaaagggtcagtaagtataggtactcactcgcaagtgagaaagcttgtgttattttttcaatactcttgctcctaaatataggattttaatgc

SEQ ID NO: 27108 - DNA, 606 bp, Glycine max
atacacttctgcagaaatggcagccattcagaagtttcttcagctctcggattctgttccttgcaaaattcgtgccaagcggggctgtgccactcaccctagaagcattgcagagagggttagaagaactaaaattagtgagcgaatgaggaagctacaagatctggtccccaacatggataagcaaacaaacacagcagacatgttggacttggctgttgagtacattaaagaccttcaaaaccaagttgaggcactttcggacaatcgggcaaagtgtacgtgtttacacaagaagcagcaataacggaaaaggaggagggtacccgcgtcattccctgtacagcttagtaataatttggtctagaaactagcgcacctttccgataattatctagctacatcacttcttctgcgcttgtttgggagtgtggtggcaaaagttgagtttatatatgatcgatcaatatttgatgcccactattcaaggcatggtgtacaaaattttctgatatgtaagtctatttgcctttactcttaggggcccccatttacggggatgatggaggatggggtgagttggacaattgaaattttcatttttgc

SEQ ID NO: 27109 - DNA, 320 bp, Glycine max
actggaagttcatgaaaaaactaagcaccactgagctcttgggaaacaaaaccctcggacacttcctacctattcggacgagggaagttcatgacatcattcaatttttgttccataaatcaaaggcccaagagagcgtgaacctcaccgaagcgcttttgagtctttccaacaacgtaatatcgcagatgatgttgagcattaagaagctccggtacagacagcctggcagagcaggcacggactttggttcgtgaagtgacgcagattttcggggagtttaacgtgtcggatttcttaggtttctgcaaaaacttgga

SEQ ID NO: 27110 - DNA, 629 bp, Glycine max
gttgaaatgcctccagcgtgagtttgacgaagtcttaaattcagaagaagggaaggatctatatatcaacacagtagatgccttccaaggtcaagaacgggatgtcattataatgtcttgtgtgcgtgcatccagtcatggtgttggctttgttgctgatatacgacgaatgaatgttgcccttacgcgtgcacgaagggccctttgggtcatgggaaatgcaaatgctctgctgcaatctgaagattgggctgcgttgattaacgatgcaaaatctcgaaattgctatatggacatggactctcttcctaaggactttcttgtatctaaggcaccttcttacacatcattgcctggtaagccttcctcaaatatgaggggcatgagatcaggtggaccaagatatagatcaatggacatgcatatggagtcaaggttgggaccaccatcagaagaagatgagaatatgggtgctccagttagctccagaaatgggaaccttcgtcaatcgcggtattcaatggagaattccttagatgattttgagcatgggggtgacaaatcaagagatgcatggcagtatggaatacagaagaagcagaactcatctggatccatgggaaagagag

SEQ ID NO: 27111 - DNA, 252 bp, Glycine max
gaattagctctttcttcattgaaccaatgtgttaatggatgggtgcaaaattagtatgggcactgcgcaattttatcgtctttgtttgcatggctagcactgctatcattagtcttatttccataagagattattctggagggatagaacacgtaattggagcaaatgaagcaatcaagattgcttccttggttgtgtttgttcttcttggttttcctcttgcgattacctatagtgttcccttcgctgtta

SEQ ID NO: 27112 - DNA, 612 bp, Glycine max
ggttccaaaagcaacttgtgaagcagttggacagagaaagaagaataaaacagtttttagaacattgcattcagtcactttgttgcacagcttaaactattttgaaagaaacgaatcctgaagcgtgtcactcccactctcactcaatcgttcagccccttctcttcaattttagggttttatcacaaactaaaatcctcaatcatgggcaccaaggttaggagaccctcccatgctggctcttggtacaccgacaatcctaagcagctttcagaggagcttgaagggtggttgcaatcgtgtggtttgaccaaatcttctgatgtgcggggagtgatagcaccacatgctggttattcctattcaggaagagctgctgcttatgccttcggaaacattgatccatcaaatattacacgtgtgttccttcttggtccttctcaccactattacactccaaaatgtgctcttacgactgcaactgtctacaagacacccataggggacctgcctattgatttggaagtaactgaggagcttaaagctacggggaaatttgagctgatggatattcgtgttgatgaagctgaacatagcatggaaatgcacctg

SEQ ID NO: 27113 - DNA, 281 bp, Glycine max
ctcgagcgaacaaagttttggtgcagaaataggccaggacaccctgcccgtgatagatttaacactggcatcccaggatatgctgaccaaaatcctgttgttggtcggatgggtggtaattttacaatagctgaaggcccaacaactccaggaccatttgcccctgggctgactcgaaatgagggtaccattccaggtgttggagttgcaatgcccttgtctattccttctcttgacatgcctcaaggggagcagaagcaaccccatcctgtttcaatggg

SEQ ID NO: 27114 - DNA, 255 bp, Glycine max
acgcggcaaagtatctgccaaggaagatagagatgtagaaaggttggagagagagagagagagaatgggtttagaagcagagagagaggagcagaggagcatagcaaggctacccttgttctccatccagtccccagagacagagagatcaggaatggccactcctccacttcacaccttagcatcagtcccatttaggtgggaacaagtgcccggaaaaccaaggccatgcagtgcccttgtgtccttctccaa

SEQ ID NO: 27115 - DNA, 245 bp, Glycine max
caaataaagctataggacagaagactggtggtcaatatttggttggtggacttgattgtacagtgcatagaaatttctttggcagccagattcaaagctttgaggcagagctttcagtgccggagctcgtctccaaggaaggaggtcctgaaacatttcgtggaatttttattcgtgcccctgcaattcttgaagcagggccagaagttcaagtgctggctgattatcttgtaccttctagcaga

SEQ ID NO: 27116 - DNA, 657 bp, Glycine max
cgaatcaaggaaagctagcagttgaagaggcattaaggaagtggcggtcggagggtcacaaacggcggtcctccatacttaactctaccaagtttaaaaatgcttacccttctcaccatcggaaggattctcggttactcgatgtcaatgggttgaatctggtaaatgatgaggccaagccagttctaaagccggcactgtccataggacaaatattgagcaggaagttgatgatgccggaagagtatgaagccagcgggatgcttagagaaagaagctcggcgaaacggaaggtgtctcttggtcagatgctaggcaaacaaaacggggattcatcctttgacaggcaagctgagaaggaaaatggtcagaaaccgttttctgcaaagagaaagaaatttggatttggtcgattctccctacttttgacaaaacaacaaaagaagaagaagccaacactgaacttgaggtgatggcttgcttgatcattttgtgctgacaaacattgagactatatttgcatcttctgtctgtttccatctcattcacttattgtgcaagcttgactagattcttgtttgttgcttgcttgtatattaactaaagtttgtccctcatttgtgacttatcatgctacttgtagaggtgatttatgtg

SEQ ID NO: 27117 - DNA, 282 bp, Glycine max
gaagaaccgtgtcaagggtttgttcccatccgcaagttacagataacagactcggaagttgatgattatgattctgatgggaagatggggaatggtttctactgtcaagagatgtatcctggcgaggatggacaactatcatggttcaatgctggtgttagagttggtgttggaatcggccttgggatgtgcgtagggcttgggattggtgttggactgctcatgcgatcgtaccaaacaacaactagaaacttcaggaggagatttttctaaactgctata

SEQ ID NO: 27118 - DNA, 333 bp, Glycine max
atcgaatcgaaattaagtggagagtgtgtagaaactaaatggggaacgatgacatgacagagagagtagttttcgtgaccgtagggacaacgtgcttcgatgctctcgtcagagccatcgattccgacaacgttaaaaaggccttgtttgcaaaagggtacactcaccttctcattcaaatgggtcgtggatcctatcttcctactaagtctgaaggagatgattgttcgttggctgtagactacttcactttttcttccagtattgcagaccatctcagatcagcttctctagtcattagccacgcaggatcaggtagcatatttgagacct

SEQ ID NO: 27119 - DNA, 313 bp, Glycine max
tagtaataaccaattacaatacccttttctttcttttgtgtttcttgctttcttcttcttcgctttcgtcccttttcggagtatccctcccaaccatggacgttgatccttgccaatacgaacaaattgctataaatgaaaaagatgtcaacaacatcattctgtcataccttatacataattgctacaaagagtcatcagagtcattcatttcttgcactgggatgaagcagcctgcagatcatttggagaacatggaaaaaagaaaaagaatctttcaccatgcattggagggaaatgtacttaaggcgat

SEQ ID NO: 27120 - DNA, 369 bp, Glycine max
cggctcgagattccattgctaccagtttaacagaatgcatagagttttataataatatcatagaaacaaactgaacacataaaaattcagttcagagaagcttctcttcatcaaagcttcatatttttatttttattgtataaactctaattctcaaccttagtttctgtttccttatctctctcttgttttccacttttttgaaaagaagtgatactgtgtggtagtagtgtgagctgaagtttgatgtctgtgtcattggagcaagaaggctatgtaggcttatcagaggttcctgcaatggaaggttgttctgagaggactggtggtggcttgaacctcaaggctactgagctgaggcttggtttg

SEQ ID NO: 27121 - DNA, 860 bp, Glycine max
  unsure (1)..(860): unsure at all n locations
gctaagcgaagatggtgtttgtcagggactcctatccagaatgcaattgatgatctctacagttacttcagatttctaagacatgacccttattctgaccatgcatcattttgtactagacttaagagcccaattagcagaaatccagcaaacgggtatagaaagttacaagctgtcttgaagacaataatgttacgccggaccaaaggtacacttcttgacggggaacctattatttccttgccgcctaagtatatagagctgaaaaaagttgatttttcaatggaggaacgtgatttctattccaaactagaggctgattcccgtgcacagtttcaggaatatgctgatgctggaactgtcaagcaaaattatgtcaacattttgctgatgcttctgcgccttagacaagcttgtgatcaccctctgcttgtcaagcgatacaattcaaactctctatggagatcttcggttgagatggcaaagaagcttcctcaggaaaaacaaatctctcttctgaaatgtttagaggtttccttggccctctgtagcatttgtaatgatcctcctgaagatgcagttgtctcagtttgtggccatgttttctgtaaccaatgcatctgtgaacatctttctggtgatgacaatcagtgccctgctgcaaattgcaaaagtcaactgagcacatctatggtattttcaaaagccacactgaacagttgtctttctgaccagggttgtgataattcacccagttgctctggtcctgaagccgaagaagctgaaccttggtccgaaagtaagccatatgattcttcaaaaataaaggctgcacttgaggttntgaagtcattgtgtaa

SEQ ID NO: 27122 - DNA, 646 bp, Glycine max
tagactatgggcatctccagcactccatacacaacaacaacaacatagaagcatacccaaaaaagaaaaagaaaaaaagaatgggtgttgcatagcgagctgcgagaatctatctgctcctgttgccgctagtggtcttgagcgttgaatgattcactttcaggaacagaaaagcccttgacgctagccatcgtcgcttttattgatagaaaaaagaatacaacatatatttatttttcccactacctttttccttcaccaccctttttcttctccctgaattacccggatttggttccgcatagatctgagcaaaattttcctttggttccttctctccgtgcttccccgcacgtgccaacattgaaaaacaatggagtcagatctcgagcaacagccgcaggtgaattcctcgggtttaactcggtaccgatcggcgccgagttcttatttctcgaacatcattgaccgcgagttctacgagcacgtcttcaaccgtccctcgagtcccgaaacggagcgagtgttctcacgcttcatgaacagcttaaacagtgaagaagaagattcgctccatcatcacaagctctcaactgattcttcttcttcttctgcggcggttaaggaagaggttgttaaccaacat

SEQ ID NO: 27123 - DNA, 602 bp, Glycine max
  unsure (1)..(602): unsure at all n locations
tctcaagtgatattttcatgctgatgttgctttctttttttgaattttcctacatatagaatttatttggttgtgttactgttattatcattgctaaagtagttggttttagtttgcaacctttcagcttgatttgttcacatttgcactgaaaagtttcaatttttatgagctttgattttggtggatgtaattttagatcttcagccgatccagcttaacagttgagattgggggagtgatgtgacatgcaatacaattatacaaatgagattgtttgaaagtgggtattagattctatgaagatcagacaatagtgacaccaaaaactctgtttttaaagttagtctttttcttcgtgtaaaatcattatcaatcacatgttagtgttagatccgcttgcatgtgtgctagaagaaaataaaacaaagttcggatgaaactatagttgaaagagagttaagctcgtttattataaggtcttcttctgctagaaattgtgcccccaaactaccttatagattctaaatcagntctagtaccttttttgttaacatataaattctttgtgcttagataattattagatctattttgatggt

SEQ ID NO: 27124 - DNA, 333 bp, Glycine max
agaaaattaaagtgtttgaatgtgattcaataataaatgaggatcgtgatatccactatccagttgtggagatggctagcaggtcaaagttaagcagtatatgttggaatacatacatcaaaagtcaaattgcttcaagcaactttgaaggtgttgtacagttatgggatgtaacaagaagtcaagtaatctctgaaatgagggagcacgagcggcgggtgtggtcaattgatttctcatcagcagacccaacaatgttagcaagtgggagcgatgacggttctgtcaagctatggagtatcaatcaggcaattccatttttgcacttggtgg

SEQ ID NO: 27125 - DNA, 306 bp, Glycine max
cactcgagccgaatcggctcgagcttccattgatggcttcttgatcactgtgatctgtgggaacccgatctttctctttgttgctggtcttgaaattccctataaggacgctgagaattatctcgtaaacattgtttggagaagcaattggatcatatgaggtgttcacttggttgtatcggttctctagcagccaattcagatgtgcaatttttgcaagtttgctataataaggaaatttccctcagagtcacacaggtgaacaaggcaagactaaatcctttgatccaaggaagcactgttttg

SEQ ID NO: 27126 - DNA, 393 bp, Glycine max
gtcagaagagaagaactgagacgaagcaaaagctgaaaagcttaaactggcgaaatttaaagacccatccaaaagcactatacgaaatccaatcccaccactctcttttttcttcttccttttcgtgctctctctcaaattcaacacgagagacacaaaacaaaacattctcgggaagcgtaaccgcccagaattccgaccattttcacagaccttgttttctgctcttgatgtttttcaccccccaaatgtggcaataaaaaacgggtggcttaatttgacacaatcggtggttattgcaaagttgagatgccaggtaatagtggttcagaggggttgggcgatgatttcttcgaacagatcttagcattgcctgaagctggcacagtggga

SEQ ID NO: 27127 - DNA, 400 bp, Glycine max
ctgcaacggcttggtttgcttgctcgtctcgtaccgctatagtcatagtcactttgatgaattctgcgtccggttttggacccccgcaacgagggtcatatccgacgattcgccgcgcgtatatctccataatgatcgccccaggcgatacaagcgctacatgtttgggcttgggtatgatgagtggagtgacacataccaagcagttgttttggataatagtgaaccacagaatttggaggttagagttcactgcatgggtcacactggttggaagagcactttaacaacaacttgtcctgcttttcccattctgagtcaagatggagcgtctgtgaggggcacggttaactggttggcacttcccaattcgagttctgattaccaatgggaaactgtt

SEQ ID NO: 27128 - DNA, 316 bp, Glycine max
caaacaccaacaaccactctcaccgtaccaaatgtacgtgccttccgcttctctatccggttactctgtggcgatgaacagcttaacggcgagtttcacagctcgaatatgcgccacgcgccgcgacctactactccctatacgacaccgttcccttcatcctttcactaccagacgcgtcgccaccacactcactcctccaagaatcgtttgcatggcgggaccttgtctgataacgaaggatgagtccgccggagatacgtggatagattatcggtcaagctgctgatccagacgagtttctgatccaaaggta

SEQ ID NO: 27129 - DNA, 250 bp, Glycine max
ctcagaatatgaaaaatcatgatctcgattcatcagatattcttcctgctataaatggttcatctgaacaaactagtgggaaggacgatctgtggtcaaacaaggtgaagacaagggaattgtccctagatgacgttggcggtagcattggtagttcaagtgctccatcaggtattggaagttctctatcgaatagtacaaaaggaaagaggagcgagagagacagagatggaaaaggacagagcagaga

SEQ ID NO: 27130 - DNA, 309 bp, Glycine max
gatcacccaaggtcttgcaaggtcaagaaaatgcaggttttgggtcactctactacggatgtgacacagtaaccaagccaccaggttttgagatgagctctcaaagtcatccaaatcttggatcagctgaagtaagaccgcttacctcttctgagctgagtagtgtgcaccctttcagttatgcaggctttgtggaaaccaacaggtttccgagggtcttgcaaggtcaagaaatatgtccattgaaatccctgacaggaaaggttgatatgaaccttggtgcttggggaatgcccaatcttagttgca

SEQ ID NO: 27131 - DNA, 202 bp, Glycine max
ctccgtagtaaaacggtatgcctcagagtcctctcatgcaattccagtgacctctgatgatgtagcacttgcaaaggccaacaaggaggtgaagaatgacaaggtacattttatctggactcagttttcagagctacactcgtacttgaagaaacaagctgaagattctgagagcttgaatagcagacttgcagagatgatt

SEQ ID NO: 27132 - DNA, 507 bp, Glycine max
  unsure (1)..(507): unsure at all n locations
caggcccatgtgttgtggnagaggagcatgtagcgagcgcgggtaccggtggttcccctgcgtcgtgttgtgtgagatcaaaccctagtttttagacactgcaacagtagcagcagcaaccatggcgagtaggaggtgcctgcgagcgttaactcaaacgagaccgtttctcttccgaaaagcatcctctcttcgctcactcgccgtgcttccatttcccaactccaacgcttctccacacgctttcaccgcccgcgcctctgtttttgcgcaatgcccgcacctccgttgtttctcttccgacaaaaaagacgaccacagcgacgaagaagatgatagtgacgaggattacgatgaagaagaggattatgttgacgatgatgacgtcactgtgtcaagagggaaaaaagtatacacggcggaggagaaggaagcggaagcggcggctattgggtacagagtggtgggtcctcttcaaaaggaggaagatagcgtttttaagcctta

SEQ ID NO: 27133 - DNA, 485 bp, Glycine max
gcacaatccaaaggtggatggagacactgaaaacaatgttgcggagttactgtcggaagaactaaatcttcgggaaactgaagctttgaaaaatcagcattgtgctgacatggctctgctggagtctaagaagattgcatctcagtatcaaaaagaagcggacaagtgtaattcaggaatggaaacatgcgaggaagccagggaacaagccgagatggcgttagtggctcagaagaagctctctgcattgtgggaacagagagctcgtcagaaaggatggaatgaagggcttgccaaatctaagaaacagtctaaagggaaagtacacactgcttagacttggtgtggcctccatctagttattgcatactagtttcagcgaagtgatatttagtactggaagtagtaaatcatcatatatagtccatataattaaagtattcataaaatgtcaaaattgtaaaaagccaatagagatgtcattg

SEQ ID NO: 27134 - DNA, 666 bp, Glycine max
ccaatacatgcacagcggtccctttgagttcgtttccaattattgcaagagcaagaagtggccttttccttaccttcaattaagcaaacatgaagcaaaaaatagttatcaagctgcaaatggactgcgacaaatgcagaaacaaagccctaaaaattgcagcagaagtacgaggtgtaactacggtgtccctggaaggggacgacaatgatcgcgtggcggtgagcggtgtgaacgtggacatggtttgcttggccaaccagctgaagaagaagttcagctccgtgacgattctcaccgtggtagacctagttaaagaggaggaggcgaagaagaagaaggacgaggaggagaagaagaagaaggaagaggccgagaagaagaggaaggaagaggaagaaaggttgaagaagatgctgcgttccgttctttgcaaaaagtgtaaaagctccagttgccatggacatgtatgagtaagactacttcttggagtattattgcaacatgcaataatacctttcatacaattggattataaaacatttgaacattaatcagtatattctcacggaagtgtgtggatcgatcctttttcttatcttttgagaatactgattttaataacttaggtcgtacacatattattgtttgataatttaatcagat

SEQ ID NO: 27135 - DNA, 529 bp, Glycine max
gacgaggtgcgggtgagaaaatctctctacaccgtaatcgctatttggcatcgctgcaacaatctgcgatactctttcctctctccgcttcgaatttcttctcacactctctgcttcgccgcaaacagtgactcactgaacaactttccgaagcattgagtagtagtgattgggtggtaacaaagagagagagagagagaaaaggatgaaccagaacccgcaatcgagtgaaggaaggaacgatgacgattctgccctttctgatttcctcgcttccttaatggattatactcccactatacctgatgaattggtggagcattacttggccaagagcggtttccaatgtcccgatgttcgattgactagattggtagctgttgccactcagaagtttgttgctgaagttgcaggagatgcacttcagcactgcaaagcaagacaagcaacaattccaaaagacaaaagggacaagcagcagaaggataagcgcctagttttgacaatggaagacctttcaaaggcattg

SEQ ID NO: 27136 - DNA, 378 bp, Glycine max
cggcggcgttaaaatcgttaaatcgaacggttccaaacgctggacgttgctcaaaggacgaacgtgcttccacaacgcgtggagcccaacggagaagaacgtgatatacacctccgtcggtccattcttcgagtcggtttataaaacggttcaaatcgcgcgcatcgagttcgacccggttcatttaactaacgaccgtgaagaggttccgtttaagttaacgattctcacgagagaagacacagggaacaatgcttttccgtcatgctcccctgacgggaagagcattgtgtttcggtctggaagggaaggatacaagaacttgtacatagttgacgctgttaaaggggagtttgacggcgggataaggaggttgac

SEQ ID NO: 27137 - DNA, 792 bp, Glycine max
atcagaaacttgtcttcctgctagagaacaaggttgggcaagactgaggaggaagtttgctagtggattgctcacatcccccaaattcatctgtgatgctgattcaaccccatgcaatgatcatcaacctagtgtatctgaggaagctgcatatgagcctttgtcaccatcatcaattcctccgtgtggttcaccggattcctttgaatgctatccaaatagggaaaaaggtagtcctgaagcccgggacttctctgttcatggtgttgcttcatcattgccactgtctcctcccggcacatcaaatccttttccttgcttcataagctgcagtccaaaattcaattccaagtcaccaacactctcaccttcaagttctgattacgccagttcatttactttttcgccttcctctaccaactggtccgacttgtccttggtgtctcctcggcagccatcgccatccggccttgaatcggctgaacccttttatgttaaagacgcgtctttctcagaaaattcctctttacttcacaaagaagatgtcccttcacccttggaggaattttcagctaatcacacatttggaggggcgaactccaatttgccgttgaaaggttctttcctctccatcgccgagcgcagagggaatcatccaccgcctctgatgttgctaccctcagccagtgaatcctctcatgtccccaagaacaacgtggtaagatcactgtctttctctttgcctgaattagatgataatgtggcgaaggatgatgatacttgcaaacaatc

SEQ ID NO: 27138 - DNA, 428 bp, Glycine max
aaagggaccaaggagaggacttcagcagaagacattgctctgtctggtgatggaaaagcagggaagggtggtcaattgaagcagttgacaaaaaagcgtcatggaagacaccataaacatgattgtttatgtgctatttgtgttctaaagcgacgtaggaaggaacgggaagagaatgctcgaattgctagaggcaattttggatctagtggtgataagcatgctaatgaggaatcaatacaagtagagagtcccggtggtgaggattcgtcatcaaatatagatgaatctatcggcactgacggaggatgcaatctgtagagaggagtaaggtggcaataatatttattagcatgcacagcagcaatatcaatattgttcacaggaaaaagaaatatttttcttttcttttttcttctttatacatt

SEQ ID NO: 27139 - DNA, 559 bp, Glycine max
tcttgcttggctgactcatttggaatgctatggtctggtgcccagcaatatggaactcctggggctgaatttccagagtgttgggtcactgcacctggcatgcctttaaacccatttactccactacccccgtatccacgggacaacaaagattgtcaaccttctaatactaatgctatgataattgatcaacctgctcaagttgatcagggggataccagcggtatggttaattgtcgctctgatgatatgattcccagcccaactggtgttaaccctgaagactctaaccttctgtttgaggacaataaacacataagtcaacgattgatgggtgactcaactgatttgggaacgaggtactttagacagcagaaaatacaccgaccatggttcaagaggaatgcatggaaatgtgatgagaacaactctagtggtgatatgtgcagtatagatgtaggagatgtaccaaaagagtcaaaagttacttgtgacgcggaggatgcaatctgtagagaggagtaaggtggcaataatatttattagcatgcacagcagc

SEQ ID NO: 27140 - DNA, 427 bp, Glycine max
ctctgaccatgatgctacattgatgcattcaatctctgagatatctgggggtacgttttctttcattgaagctgaggatgtcattcaggatgcatttgcacagtgtattgggggactcttgagtgtggtggtgcaagaattacaagtagaagttaggtgtgttcaccctcaattgcaacttagttcagtaacagcaggaagttaccaaacaagcttgatggcgaatgcaagactggctactatcagtgtaggagatttgtatgctgaagaggaaagagattttttggtgacagttaatgttccagttgataagtcaagtgataagacatcgttgttgatcgtgaaaggtctttaccgagatcccataacaaaagaaatggtggctttggaagaaaacagtgaagttagaattctgagatctgatgtc

SEQ ID NO: 27141 - DNA, 273 bp, Glycine max
atatgccatggatcctagaattggaaaattgcaaggtgaccaaaggttcaacatgaacaacagcaataacaatagtccttattatggtgatggctgcataatggcttctactcctgccacatatgatttaccagagttaggtaacattgccgtcgatggccacgtgtcgcttgcattggaattgaggaactgtgaaagtcaaggatttggtgtgtcaaatgatgacatgcataaacgacataagacaacattggcttcttccccagagactga

SEQ ID NO: 27142 - DNA, 891 bp, Glycine max
gttctttttttcttttctctcagttagaaaaatggaataatttaatttgggccttgaggatccagctttaaattgggctcagatccaacgacaaacaatgtaatagatagtactgtacacgtgtcaaacagaggttggaaccacgtatgttagtttgaaaccacacacagaacagttgaagttccctccttgacttgtggagtcgaaacgtttggtacaacaatggcatccacagcgtcgccgatgacggttcaggcgggtcgggttcggaccctgaaagaaggttctcgcggagaatcgggtttgggtccggtcgtgtactggatgttcagagaccaacgtgtgacagacaattgggctctgatccacgctgttgctgaggccaacaaagccaacgttcccgttgccgttgttttcaatctcttccacacctttcttggcgccaaatcccgtcatttagggttcatgctcaggggcttgcgccaattgtgccaccgtatgcaacactctcttcaaatcccctttttcttgttccagggagaggcagaggagacagtgccaaagtttcttagagaatgtggagcttcacttttggtgacggatttctcacctttgcgggaagtacggaggtgtaaagaagagatatgcaagagggtaagcgattcggttgctgtgcatgaagtggatgctcacaacgttgtgcccctttgggttgcctctgataaattggagtacagtgctaggaccatcagggcgaagataaccaaaaggctttctgactatctcgttgatttccctgacattgaagttgagccaccagctgggaagtgggtggctactgagcaccattccattgactgggatgatctcattgctgatgtgttaaggaga

SEQ ID NO: 27143 - DNA, 501 bp, Glycine max
aacaagataaaagttaacatgaatgcttctaaggagaaggctcctgatacaaatctgttgcagccttctcaagcagttcaaggacacacgccaactaattcaatttctacagctacttctgcaacgggctcacctaccacaattgatctaatctccgaaagtgagtcactaaggaatcaatagttcataaagaataagagaatgacataggtttgtgtttgtgttgaaaaggtagagcagtatatagtttcttgtaaaaatttccctgtatgatattatgttaataaattcaattgtagcatgaataggatacaacttacgagctagtcgttgtcgggctacgacccagatcaaaacagcaatggagttcattttggtttcacttttaatgaaagtggaatcaaaagctatcactttttaatatcacatccagttctgttcattttttaatgtacgaaacataaaacagaatttttatgttatattctatctcattttagc

SEQ ID NO: 27144 - DNA, 233 bp, Glycine max
ctctacattaatttattaacatagagaaaggaacactacggtagcgtgtggctcgcctgacaaaacagaatggagttcattttggtttcacttttaatgaaagtggaatcaaaagctatcactttttaatatcacatccagttctgttcattttttaatgtacgaaacataaaacagaatttttctgttatattctatctcattttagcaaaaaaaaaaaaaaaagggcggcc

SEQ ID NO: 27145 - DNA, 262 bp, Glycine max
aaaagccaaagcatgctactactaattatgtttctaaagagacatacaaaatccttttctctcctttggcttcgattattgctaatcttgctgagcattgcttcagttaatggaaatgagcagaagaacttttacattgtttttttgggagctcatacagagagcagaggcaatgcacttgacacttatttaaatgttctatctgctgtgaaggagagcttccttgaagcaaaagaatccatggtatatagttacacaaaga

SEQ ID NO: 27146 - DNA, 674 bp, Glycine max
tcgggattgtaggggggataggttgagaaggaagcacagaacctctcataaatgtccttggatcatatgtaccctacgaatcactatcacagagtcaacctctggaaaacaagaaaggtcagcaacagaagctgacaagggtgtgtctttacaatcaaaacttgctaagcaatgtggtgtgaatgtcaaaatagcaccagagatagctataaatattgacaccaaccctttttttcatgacacgagcaggaatcaacaagatagagcaggatgaccgaatagccatagagacaaagttgctgcagtcaaaggctcatcaatatggtgggattagtaccactgctcatagaaaggttggacctgttcagtatggcatgacaaggttgttctagaagaatgttgtcttgtgaatagtttggccaggtggagcgttccttgtggagaataagtaaaaggttcttcatagtggagaagtagctgtctctggtggtgctttgtgtaagacgatgatgatgacatgagttagtgcttccccagatagagccagctttctctgggcaaaccttgtgaacattggtttcagttatcaataaactgtacaaccgaatttgagtcctatctttgtaattcaatccacacattcctttcctcgggatttttttattttattttat

SEQ ID NO: 27147 - DNA, 607 bp, Glycine max
ctgaggtctaattttctgggcaccaagttcacaatcttggatggcgagcccgcgcatgaaacttcacttccactgaattgcaagttgcagcaaagagtccatctgaagcaggtacttcctaacaaggttgctgctgctgctaactacaaagtggccacagtatcttatgaactcaatgtcctccgaacaagaggtccaaggcgaatgcggtgtatgatgcacttaatccccatatttgcaatccaagaaggagggaacgcccctactcctttgaagcttaccaccaattatcttaatgatcatgcgtctaccaccaccgagcatgcatctaccaccacaccagactcaaaaggaaagaaaccagaagttgttgagtttgactcaactggcactgccaatactccagaatcaatccagcgggcaagggaaccattggttttgaaaaacaaagctcctagatggcacgaacaactgcaatgttggtgcttgaatttcaagggaagggttacagtggcctctgtgaagaacttccagcttgtagcagctgctgaaccatgccaaaatgtttcagctgcagaacaagaaaaagtgatactacaatttggaa

SEQ ID NO: 27148 - DNA, 248 bp, Glycine max
cgatcatttccaagctggaggagattgctcagttggttagtttttcggtgaggaagaaggactgtagggtgagtttggagggtaccagagagggggttagggggcctttgactattgctgctcgcatatttgagttgacaccttctctggttgtagcggaggtgtcgaagaagggaggacatagagctgagtatgagaggttttgtaaaactgagttgaagcctggactgcagaatttgatggtggag

SEQ ID NO: 27149 - DNA, 337 bp, Glycine max
ttttgatagatgatatccctcttaaagacttggacatcatgtggtcgagagagagaattggatttgtgggccaggaacccaaactcttccgaatggatattagttcaaacataagatatggatgtacgcgagatgtaaagcaggaggatattgaatgggctgcaaagcaggcctatgcccacaactttatctcagcacttcccaatggttatgaaacacttgttgatgatgatctgttaagtggaggacaaaagcagcgaattgctattgctagggcccttcttagggacccaaaaatattgatccttgatgaagccactagtgcactagatgctga

SEQ ID NO: 27150 - DNA, 380 bp, Glycine max
ccttgcccattgatactcttagaagatctagaggactccctagtgagaaatggggaagtgaccaccctagctgttgtatgtgaatttgcttttgcaaacaatgccaatgtatcctgatggcctcattatgcaattccaacgctgtgctgaatgatctcattcttaattttgtttacaaagagtatgtatgaggtctgagatttaagctgatcaacaaatatggagatggaggtgagtcaaaacattgccgctgttgcagatctcattgaattttaccattgatgtccacttctatccctttcaagatttcttactctgctgattccttgtggtaaaggagcatcatgagatctaatgaattgcacctgataaacacctct

SEQ ID NO: 27151 - DNA, 253 bp, Glycine max
aggcaacgccatttgcctatggatctggtcacatcagaccaaaccgtgccatggatcccgggttggtgtatgacttaaccaacaatgattacctaaactttctttgtttctctatctataatcagagtcaaatagagatgttcaatggtgctcgttatcgttgtcccgatataataaacattctggatttcaactaccctacaataacaataccaaaactctacggctcagttagtgtgacacgggggtgaaa

SEQ ID NO: 27152 - DNA, 252 bp, Glycine max
ggtggttgcagagtagactaggaacagattcgtataacttctcgttcgcagaggtgctgtcaccgtcaagggtcatccctgcggctgtgagaagttttggcacaaccagccaatctagcacgaagcttcttcctggggctgaataacttttttcttcactaaactcttgtgcaaatagaaattcactcttgtgcatgctcgagtcatcgaatatatttattttgaatatttcccataattatttcaaaaaaa

SEQ ID NO: 27153 - DNA, 293 bp, Glycine max
ccatttagcaatctgagattccattttctccgttgttcccaatggaaatggattcccttcccaacggcaacaacaccgccggaaccccgatctccgccaccgccaccgccaccgccaaccccgcgccgcctccgtcgtcgaaccttccccaactgacggagtctctgaagctggagcaccagttcctcagggtccctttcgagcactacaagaaaaccctccgtgccaaccaccgcgccgtcgagaaggagatgtccgccgtcatctccggcgtcaacgaagccgccgccacc

SEQ ID NO: 27154 - DNA, 357 bp, Glycine max
ctattggagcttacccagaagaatggctgccagaaaatggaaatcactttgtttttgccctaatgttctcaatatctgtagtagtgattgcatgtccctgtgcacttggcttggcaacaccaactgctgtcatggtggcaacaggggttggggctaacaatggagtgttaattaaaggaggagatgccttggcaagggctcagacggtgaagtatgtgatatttgatgaaacaggcactctaactcagggaaaagccactgttactgcagccaagacattcacaggaatggaacgtggagaatttcttaaattggtggcttctgtgaagctagcagtgaacacccactagcaaaagc

SEQ ID NO: 27155 - DNA, 328 bp, Glycine max
agagatgctggtgttgtgtttgagcaaatggatgaaaagagtgtggcttcgaggagttccatcattggtgctcatgctagtgtggagatgtggcatgagtgcttgatgcttcttggggacatgagcggcgagggacgccatagggctgaagagagcattctggttagcgcgctctctgcttgcactcatttggggtctcctaatcttggacggtgcatacatgggatcttgttgaggaacattagtgaactcaatgttgttgtgaagacttcattaattgatatgtatgtcaagagtgggagccttgagaaagggctttgtgtattcc

SEQ ID NO: 27156 - DNA, 756 bp, Glycine max
atttcaaataagaactgaaaaccctcacccaccctaaacccccttcttccaaattcccaatttcttctgccgttcgatttcagactcttcattcgggatttgccatagcgattccttggttctcattcattcgttgcgtgctcgttcggctgttctcgtcgttccagtgaagagttccgtttcagtcatacaaccttgcatgagaattgatggcgccaatcctgcagagctctcagccatgggtcgagaaataccggccaaagcaagtgaaagatgttgcccaccaagatgaagttgttcgagtactgacaaacacccttgaaactggaagttgcccccacatgctcttctatggtcctcctggcacgggaaaaacaacgactgcccttgctatcgcccatcagctttttggtcctgagctctataagtctagggtgctggagctgaatgcaagtgatgatagagggattaatgttgttcgaacaaagataaaagattctgctgctgttgctgttggtactaatcagcgtaaaagtggttatccttgtccaccatttaagattattgttctagacgaggcagattcaatgactgaagatgctcagaatgccctgaggcgtacaatggaaacttactctaaagttacgtggttcttttttatatgcaactatgttagcaggattatagaaccacttgcttcaaggtgtgcaaaattcaggttcaaaccattatcagaagaaatcatgagcagccgga

SEQ ID NO: 27157 - DNA, 368 bp, Glycine max
cagagattcccactaaagcgtatattgactttggaagtggaattgatgaatttacattaaagcatttatatggttccactgggccttctagagctgaacaaacctatgagtatactcctcctgaagctttgctgaatgctacatggtatcaagggccaacaagctcaactttgaaatatgacatgtggagcgttggtgttgtgatgttagagttggtcttagggacaccaaatgtcttccagataaatgctttaacacgtgctcttttagacagacaactagaaggttggaatgagggtgtgaaggagctggcatacaaacttagatcattcatggaattgtgcattttaatccctggaatttccagg

SEQ ID NO: 27158 - DNA, 697 bp, Glycine max
cggctcgagataatggacaacttcaaaattcagatggtaacaaagatctaaaaattggtaaagttcggatccggatctcaaccctggaagctggtcgtgtttacacaaacgcttacccattactagtcctacatccttcaggtgtcaagaagatgggtgagttgcacttggccattagattctcctgttcctcaatggttgactctgatgcaacagtatttcaagcctcacttgccaaaaatgcactataagaggccacttaacttaatggaacaggaaaagctgcgacaccaagcggtcaatgttgttgctgctcgacttagtagggcggaacccccgcttagaaaggaggtagttgaatacatgtgtgacacagattctcatctctggagtatgaggcgcagcaaggcgaacttctaccgtctgatgacagtgttttctggaattctctcggtggtaagatggttaggggaagtttccacatggaagcatcctataacaacagtgctggtgcacattctttttctgatgcttgtgtgtttccctgaacttatactgccaaccgtgtttctatacatgtttgtcatcggcatgtggaattggaggttccggccaaggtgccctcctcacatgaacatcagactctcctatgcagaaagggtgaccccggatgagcttgacgaggaatttgacacat

SEQ ID NO: 27159 - DNA, 357 bp, Glycine max
agctgcacacatcatttgcagggtggaagcctcatgatgctgctgtaaagctcagtgataaagaacagatattacaagtcttggaagattgtgatgggaagcccttgaagttcatcagtgaagtggaaaagaaaaatgggaagctttggattgcatcagtgttgatgcccttcattggcatttatggtttataagagctgtatcatgcatgactagatggcactgttttggatcaccttttccaaataacatgtagttattgcgtacgcagattatgtagccttgtgaattcctttgagtggttgatgaggctagttttttctgtgttcactattaataaaacactacgttacactt

SEQ ID NO: 27160 - DNA, 475 bp, Glycine max
atgcatattccatcgtcaatgatatcatcacaaaaccttccacatatggatttgaggttgtagagaaggcgtgttgttcgacaggaacatttgagatgagctacttgtgcagtgacacgaatccacttacatgcacagacgccgaaaagtacgtgttttgggatgcatttcatcctacggagaagacaaatcgcattgtctcaagttatttgattccaaagcttctagaaacctttagatgatgattatccattattttccatttgaaaaatcacatagtcttgcctagggcgacatgaaaaaaaaatacatttagcgagatttaatgtcgggttgccatgcttgatatggatactttttttgtgtgttcaattgttataacaaataaatttacacctgaaatcatgtagtcatgtacacccacatttgaccttttgtaccttcccatgctatactgtgcttgggttttttcttc

SEQ ID NO: 27161 - DNA, 415 bp, Glycine max
cactcgagccgattcggctcgagggggtacatctcatcctctacaaaccctacagtgatgggacctcatgcactgggcttcaccacccctcccctcctcctcttttgtttgtgccttgcatttgaatcttatacatattgctaaattactttgaatgttttggtttcctaaattaagataaaaatgatttcttctttgtgtgtgattataccatcctgatctaaattagatcattccatggatccttatcccataggagtagcttgaacatgatttctgtgtttgattttgattttgcaacacagaaagattgcttgataaatgttaagcaatctttttaggcttcaatcaaattgccatttttagctttaatcttttacatataaaaatttaatttgttcatttcctccacaca

SEQ ID NO: 27162 - DNA, 349 bp, Glycine max
ttttgtttcacttagtagcgatcctttcgaagccccttccttccatcagaaaacacaaatcccgataaaaaaaattgcatgttctaaagtgtgaacgtcaacactcagaagtacacaaatttcctcacccttttcaaatttctttgtcacccttttacgagaaagcatgcaggcatcaacttttggtgttgaaggagccacttttggggttcaagagcgaagggggttggtgggttttggagagttcagaaatgggagtgttctgagacccagaagagtgtgcatgacaaagaataatactgatctttgcgggttaaggcttggttctgtcactatggaaacttgacta

SEQ ID NO: 27163 - DNA, 439 bp, Glycine max
ttctttctcaatccctctttttcttttttatgttttaaactcttttaaaagcttcttccctctttgccgaattttccataaaccacattcttgttggttctctttcaatggagtctaagcttttaagagccaccaccatctcagtcccttcaacaccctcatgcgctttccatcgcacaactcgcaaggcttcgatttccttcaaccccacctcggatttcgccccaaaaagcaatctttctctccaggcacatgcggcttccatcgagtcagtgccaacaaagaaaagaattgatgagagtgacaacctgacccttgatcatataagacgttctttagttcgtcaagaggatagcataatcttcagtctcatcgagcgagcacaatactgttacaatgaagatacatatgaccctgatgccttctccatggatggatt

SEQ ID NO: 27164 - DNA, 246 bp, Glycine max
caaaacagtttttagttcacatagcaactggagcagaagttgaaaaagatcttcgaattcagaagagcatgctccctgcagttggccagatagaaataagagctgatctaatggacgcccacttgtatgcattcaaaagatcagttctacaagaagttctagatcagaagagtgcatttcatagcttaaagcatgatgtattgccatatctagtccggagccaactgaaatcagaagtattattaa

SEQ ID NO: 27165 - DNA, 384 bp, Glycine max
ggagctttgaataatcagccctggactgtaccttctgtacaagggcacgcaaacacaccaatgcctcatgcatcgcaccttgtcccaaagcctgccaatgaggctaaatccagtgttgttttacatccttctacagtagacataaaaccaagtggaagaagtgagcttcctgaggatctattcactgtaaaatattcaccgttccctgctccagtcccaggttggcaaatgggtccaccacctagcatgggtatctcaattcaatacaataatgcagtgcccatgccaagttatgcacaaccatcaaaatcaacaaatccatttgatgtcagtagcgaaccaactccagttcaagccccaatgtttccttccatgtcatctttg

SEQ ID NO: 27166 - DNA, 310 bp, Glycine max
tggagcgaagagagaccaaactttagcttgagtgagtactcgatgtatagcactgaggcgagttcatgctctcatgtgattgctaattcaggcaagagttgcaagccatacttgtgtatggcgtgacacctgttcgtgtacatatactgctaactcggagtataagggatggtttcctctactagctatccacttgtatgatttcgctagacgtagacacatgtaggtaaggtttccagcgattagagtatgctggtgagtcagtcggcacataccacagatcatggtgtaatgttcaaattcatttttt

SEQ ID NO: 27167 - DNA, 557 bp, Glycine max
cttcttgggagtgattatactgaaggtgtatgtttttttggcattgttaatgctattgaggttgtgaatgcattccctgaggaagatggcctcctgaaattccggcaatgggttgagtcaccggatcccaccatccttggaaggttggaatgcaaatagtggttcaaattccagaaagaaaggggtcaaaaattgaagaaaagatgaattcctcaagttgcaatgttaaagagtctgcggtgatgcaaaacatctgccatgctcaggagcaaaatgagttgtcagattacatccaagaaataaaacaaactttcttcaataagcatagaaatgttagcaagaattggcacattccttcttcttttccaagtgatactgttatatctgcttactattctccccatgttgataaatccactgagccattcacatggggaaagccagatcatcttgttcttcgaaaattgtgctgggagaaatttgggtggactggccagacagcagatgaattgatcctaccagtcttaaaggagtataacaagcgtgagactcaattg

SEQ ID NO: 27168 - DNA, 479 bp, Glycine max
tacagcgtgaagggaatacctggctttatgaacccaacctgaatacacttagagagaagctgcagctgcccattggttcatgtgaactgacagttcctttgaaagctaaagaaaatttttattcataaaggccacaccgagaagcttatgcaaccatcctgcactctgcacagatgtatgtttgtggagccattactgcagctcagagtattcgcatgtcgggttcaacacgagatcttgtgattcttgttgatgaaaccattagtgagtatcatagagggggcttgaacgctgctggatggaagatccatacaatccaaagaatcaggaatccaaaagcagaaccagaggcatataacgagtggaactacagcaaattccgtctctggcagctaacagattatgataaaatcattttcattgatgctgaccttcttatacttagaaacatcgatttcctttttgagatgccagaaata

SEQ ID NO: 27169 - DNA, 498 bp, Glycine max
caacctagaaagggcgcaattggaagatctgaagccgaagatatgcaaacccgacaaccttttggacccacgcagatgactccaacaacaactcaagtcatcggatctcagtattgtaaaccgtctcccacctcactggagattgttcgaacggcgccgaatacgttcgctaatgaattccgtgtctacgaccacaactccgttttcaccctccaaagcgcttccttctccgttcataaacgctgtatcttagtccatcaagggaaccccatcgtcacgctacgccgaaagagaatgacagcacataatagatggcaagtttttaggggtaaaagcgaccaaataagggatttgctcttcagtgtaaagcgacccaataaaggatacaacatattccagccaaacacggcactagaattagaagtgttcttagcccaaaatactgaagaaaaagtttgtgagtttaagatagaaagaaattggtccaatggatcttgt

SEQ ID NO: 27170 - DNA, 334 bp, Glycine max
gccttattctcaagcgtcagatatgctaagagcttcagtggttcagtttgttttcatcatgctattctctcacccttgggatatgagacggcaatgtttagagggctttcagaacatatagattgttatggagctcctgcacaagaactattgcaaaaccctaatgaccacaaaaccgcgcgcctttctgagtttggagaaatggtcagagcagcttttgggctacctttaaatgtaaaccatgatggaaaaccactcgctggacataatgtcctcttgttcgtcgcgaagattatttagctcatccacgtcacagtggaaaacttgaatcacg

SEQ ID NO: 27171 - DNA, 333 bp, Glycine max
aagagaactaggttaaggttttactgagaagaagcgcgtgcgggaacacccaaaccttgaaagcttcttatcatgggcagcacagcttggaatatcagactcaacaacacgcaccaaccaacctcagcactctctttcctcatgtttgggttcttctctatctgtctctcattttcctcacactggcgggagaggtttgggtgctgtgagagaccttaggaggggagagattgttctcagagttccaaaatctgctttaatgacaagagagactgttatggaagataaaaagctctgtgatgctgtcaatagacactcttctctcttctcagc

SEQ ID NO: 27172 - DNA, 258 bp, Glycine max
gccatttgacacagaaccaccttttacaaaccataccacttttggggaaatcgttggactaaccaaatggatgagtttctacttatgtgggttaggtgtcaagcaatcaaggttagagtaattggatctcaagtgaaagctatcaatacttctaatgggaggaatttgcctgaatgcccaactttaatctttgaattttgttggacgtggggtttgaaggtgcgatcgaaggttcagttgacgacttctctgaagtgt

SEQ ID NO: 27173 - DNA, 684 bp, Glycine max
tttgtctaatccaatccggaaggatttgcgtcatctgtgtgtcttcagtgtggaccctccaggctgcaaggatattgatgatgcactccactgtcactctcctccaaatggaaactttgaagttggagttcatattgctgatgtgacaaattttgttcatcctggcactccccttgatgatgaggctgcacaaaggggtacgtctgtctaccttgttgagcggcggatagacatgcttcccaaacctcttacggagggaaatgacacccgaagcagatattattgccacctcatacacaaaaagtgtcataaaatcttctgcggcattgtcttatgttgaagcacaggcaaggatggacgatagtcgattgatggatccgattactgcagatttgaggaatatgaatagtttagctaagaaaatgagattaaggcgtattgagagaggagctttgactcttgcatctgctgaggtcaaatttcaaattgacacggagactcatgacccccttgatattggaatgtaccagatccgggaggccaaccaaatggtggaggagtttatgcttgctgctaatgtttccgttgcacaacaaattcttaatagttttccattgggctcattattaaggcgtcatccaacaccaactagagagatgcttgaacccttgttacagactgctg

SEQ ID NO: 27174 - DNA, 309 bp, Glycine max
tcaaggggagtgccaggatgaacaaaggggtacatctgtctaccttgttgagcggcggatagacatgcttcccaaacctcttacagaggacatatgttctcttcgttctgatgtggaaaggcttgcattctctgtcatatgggaaatgacacccgaagccgacattattgccacctcatacacaaaaagtgtcataaaatcttctgcggcattgtcttatgttgaagcacaggcaaggatggacgatagtcgtttgatggatccgattactgcagatttgaggaatatgaatagtttagctaagaaaat

SEQ ID NO: 27175 - DNA, 396 bp, Glycine max
tttttcgatgtttcctaagtaattcttcatggtccaaatttgagcttggttttcctgttctgagctaattatcagctatccttttgccatttgtttatcttgtttgcatttgtgtgatgaattaagatctttgtcatattaaagtgttttgtttttattttaatttttcttgctcatcattttgtgctcatcgtggtgaggtttaacccttcatgtctcaccctctctcataatcctcaccacactacatatttctctaagcaagtgacagttaggagcagttatgggaaacacatgaaaaggggtggccttggaagaaggcctcagatagtgtcttcagttttggggaacagtaacactgaaggggtgagtgtgtttgtggtgtctgacttgcac

SEQ ID NO: 27176 - DNA, 435 bp, Glycine max
ctcatccaaatgagtgttcgggaagtgatctggatggagatatctactttgtttgttgggaccatgaattgattccttctcccccaattgatccaatggactatactgctcctgcaactgtggaattggatcatgatgtgatgatcgaggaggttgaggagtattttgccaattacatagtcaatgacagtctgggaataattgccaatgcacacactgtctttgcagataaagaacatttgaaagcaatgtctgatcaatgtgttaagcttgcaaggttgttttcaacagcagttgactttcctaaaactggtgtccagctgttatacctcctgaacttcatgtcaaagaatatcctgacttcatggagaagcctgacaaacccacatacaaatcgcataacgtgataggagagctctttagggaagtgaaaga

SEQ ID NO: 27177 - DNA, 510 bp, Glycine max
gttgagttatctcttatgaatttatctggaagcttgtctcttataatttttccaacgtgccttgttcccatcctcacggtcatgggatggaaagttgaaagaaataagcattggattgggtatgagtgagtcggagaatagagagatagatggcgaaatcggggaataagaatatgggatcaaccgcaaaagttcacccttccaatgatcccgaactggatcccgattcttacgccctggagaagttcagactctacgaaaccagagcgaggttttacctaatcggaagtgatcggaacaagaggttcttccgggtattgaaaatcgatcgatcagaggcgtgggatctgaatatcagccaagaccccgtgctgtattctccccaggaaatcaagagcttgctccagcggattgctgaaggtaacagggccactggcggcctcacttttgtcgtaaggttttcgggattgctggctgcatcaagtttctcgagtcctactatttgattct

SEQ ID NO: 27178 - DNA, 280 bp, Glycine max
aattcagctcgcgacttattgaaagttgaacgaaaacataaggcactggattgggtatgagatggtgaaatccgggtctaggagtatggcatcaaccgcaacagttcacccttccaatgatcctgaactccatcccgactcttacgccctcgagaagttcagactatacgaaaccagagcgaggttttacccgatcggtagtgatcggaacaagccgttactcagggtgttgaaaatcgatcggtccgaggcgtctgatctgaatatcagccaagacccc

SEQ ID NO: 27179 - DNA, 421 bp, Glycine max
cgatacctagtataacatctttaataaacaaaagtatcgaagaacttgaatcggagatggatcatcttgggagacctattgctcttgatgctggggctcaattatacaccatcctagaactttgccgagcatttgaacggatattcaaggaacatttagatggagggcgtccaggaggagataggatatataatgtctttgacaatcagcttcctgctgctttacggaagcttccacttgaccggcatctttctctccagaatgtaagaaaagtggtgtcagacgctgatggttatcagcctcacttgattgccccagagcaaggttacaggcgcttgattgagggagctctcggttactttagaggcccagctgaagcttcagtagatgctgttaactttgttttgagagaactcgtaag

SEQ ID NO: 27180 - DNA, 272 bp, Glycine max
agggctaaactacaatctacaacaccactgaacactcacatacccaaacgacacacacacgagaacgagtcaccgcctcggattcatccctgactcactcgccgccgtggccaaccacaaaccactgcaaatggactcttcctccgacgaggaagacgtccaccgcaacctcgtcgacaacaaccaccgcaagccgccgtcccctcccccctccgccgcattccacgtcgaagatctctcttcgcgcttccgccgcgtgaccttcgcgctcc

SEQ ID NO: 27181 - DNA, 377 bp, Glycine max
ctttagagactggagacttgatgttgataacatgtcatacgagcaattgattgacatgggtgagagaatcggttatgtcaacactgggctcaaagaagatgagatgggactcaacataaggaacgttaagccttcaagtcaaatgatgcatcaaagcatcaactagacaaaaagtgcagtgtttgtcaggaggagtatgaatcagatgatgagctggggagattgaagtgtgaccacagctatcattttcagtgtataaaacaatggcttgtgcataaaaatttctgcccagtttgtaagcaagaagttgtggttcgacactaagtggcactatcctcaacgttttttacccttaaattggtgtatagtttttcata

SEQ ID NO: 27182 - DNA, 481 bp, Glycine max
tcaaatacgaggcgaagttagttggaacttggatacgcttggagattttgtgataatgaggagtaatggtcagcctgtttataacttctgtgtaacggtggatgatgctaccatggcaatttcccatgttatcagggcagaagagcatttaccaaacactctgaggcaggcattgatatataaggctctaggatttcccatgccttattttgcacatgtttctttgattttagctcctgatcggagtaaattatcaaaacgacatggggcaacatcagtgggtcagttccgggagatgggatacctaccggaagcaatggtgaattacctagcattattaggttggggcgatgggactgaaaatgagttttttacacttgatcaacttgttgaaaaattcactatcgaacgtgttaacaaaagtggtgctatttttgactcaacaaagttaaagtggatgaatggtcagcatttaagagca

SEQ ID NO: 27183 - DNA, 528 bp, Glycine max
gaaagaattcgagctttctcatttggaaacatgtgaagtctgtaccggtactggagcaaagataggctccaagatgagagtatgttcaacttgtggtgggaggggtcaggtgatgaggactgaacaaacaccttttgggttgttctcacaggtttcagtatgtcccaactgtggaggggatggtgaagtcatatctgaatattgccgtaaatgcaacggtgaaggacgaatacgggttaagaaaaatattaaagttaaagttcctcctggtgttagctcaggcagtattctaagagttacaggggagggtgacgctggaccaagagggggccctccaggagatctgtacgtatatcttgatgtgcaagtgatacctggaattcaaagagatgacattaatctcgtctcaataatatcaatcagttatctcagatgctatactgggggctgttgtgaaggtaaagacagttgaaggcatttcagaactacaaatacctgctggtacccaacctggagatgtccttgtcc

SEQ ID NO: 27184 - DNA, 379 bp, Glycine max
  unsure (1)..(379): unsure at all n locations
tatgtttctatatgcttttcattccagaaaggagacttctcaggcaatacccaagttgaattgagaagcggctcgcaaaataggccctgcttgtctttgtcaaattttacaagcatcactcgatcagtgagcatagcataaagaaatgttgcagccatgctaatcatttgattccccaaaccattagcaggtgtccagataaggtacttacacaatgtagctgcagcacctttgttctttgagcgtacaatctttctcatgcttctgtcgtaagctctactattaggtccgcaccttctgtgaatatcttcatagttccgtagtttagatatcaaatatggagcaggtttatgaggngnagctttgagaaacaataggg

SEQ ID NO: 27185 - DNA, 514 bp, Glycine max
cttgcggcagcgcaggtgtccctattacctgacttcttaattctcccgcttcttcttcttcttcttcttccgtccagtgcttgttctcttctcaagatttatagaatagaagggttctcagggttgttcgattcgatgacgactcgaattgcgcccggtgtgggagcccaatttgctgggtcaacacgccgccgagaggaatcaagacgccactgcttatgtcggcaatctcgacccgcagataagtgaggagttgttatgggaattgtttgttcaggctggtccagttgttaatgtctatgttccaaaggatagagtcaccaaccaacatcagggttatggatttgttgaattccgcagtgaagaagatgctgactatgccatcaaggtgcttaacatgattaagctttatggcaaacccatccgtgtcaataaggcatcccaagataaaaagagcttggatgttggggcaaatcttttcattggcaatctagatcctgatgtagatgacaac

SEQ ID NO: 27186 - DNA, 513 bp, Glycine max
  unsure (1)..(513): unsure at all n locations
tgcaaaaccctaatttcatatttcactctggagaatttgtgaaccagaatttttgtttttctctgtaattgtagaattttttttttcaaaaaatttgttttattttttttgaagctctttccgctctctgcaatggtggagatttgagttactgtgtcgcgtctttctcggagttcaacctcaaccgttcaaaattatgcttctgggttttcgtcatttcagacaaaagtttctatttttgaggtgtttctgagcagttacaactttttctgtgcttaaacgtcattgtactgtttctgggtacgtcagttctgcattcaagtacatttgtcttcactgagttaaaaaagattcaatcttttctgctgtttatgattttgttaatgcttgaatcttcaatgggtagggtttaagtgtgttttaaggttttggggtgtcctagtttttctttgattcacaaaaaaatggaggaaagagagatttttagttctgggcatgctgntaatcttctcg

SEQ ID NO: 27187 - DNA, 144 bp, Glycine max
gagaaagaaacttgctttgcttagtttgtgtggctgtgttgtagccttgacccttttaactttcactttccgccacaccgcaactcattctccaatgattagtgcgcttgagaccgttcatttcaacaacacctgccccggttt

SEQ ID NO: 27188 - DNA, 283 bp, Glycine max
gacccaaaaagaaaaagaaaaaaattctcaccataacaccatcccctaacatatatcaattatgtatacttcattcaagcccaattctcacaatcacaaacaccagaaagaccacaatgtaacaacaaccacaacacccaacaccaaatacagcgagatatcacacttcagccacaaacaacacaacctagcgtttgactactctgaatcccccttcaaatgtgacgggtgcaaggaactaggcatagggtcacgctacaagtgctccatctgtgactttgat

SEQ ID NO: 27189 - DNA, 680 bp, Glycine max
cagtattctagaaccgtatacttagtatcctacatgggtgaccacatacatcctcgtggatggttggagtggaatggagactttgctttgaacacattgtattatggtgagtacatgaattatggaccgggtgcagcagtgggccaacgggttcaatggcctgggtaccgggtcattaagtctaccatggaggcgaatcgattcacggtagcccaatttatatctgggtcagcctggttaccatccaccggagtggcctttgcagccgggttatctacatgaattacaccacaaagtatataagaaggtttgacatgctacaaagtccaaccaagcctacccaatggggggaaaaagggaatggcttctacttttatagtccttattttatttttgccaaaatatattattttgggcctattttttttatcaatggtgctagtaataaatataagttgtaaacaggactttatgtagtagcactttgtatttttttcttcctgcctcaaaaccaaagatgttataattgactcaataaattttagtacatgttcttaccaaaaaaaaaaaaaaagcaaaaaaaaaaaaaaaagggggggcccccaaataaggggcccggtacccggggaattatttccggggggggactttggggggtaaaaatttcccccaaggggggg

SEQ ID NO: 27190 - DNA, 441 bp, Glycine max
cagcattacaacaaagatggttctgtcaataacagtcgttgtacttgtattgcttgggtgcctggaggtgatgctgcctttgttgtagctcatgctgatgggaatttgtatgtatatgataagaacaaagatagtgctggtgattcttcatttgcggttgtcaaagatcaaacacaattttctgtttcccatgcacgtaacagtaagagtaatccaatagccagatggcatatatgccagggttcaatcgacagtatttctttctcaactgatgggacttacatagctactgttggacgagatggttatttacgagtatttgattacttaaaagaacaacttatatgtggtgggaaaagttattatggtgctttgttatgttgtgcttggagcatggatggaaagtatattttgacggggggagaggatgatttagttcaa

SEQ ID NO: 27191 - DNA, 395 bp, Glycine max
gtctaccacgtcaccgtcactcttttgttctacaacaagtacgccggtagggctcccgttagggttccgtttgtcccgtgccccgaggcactcaattttgatccaattcaatcgagatcacgatcgcgatctcttgttcaggaaccgggctccagaggcgtgaacgaatcaccggcggatttgattattccgatctccgacgacggacggcgagggttctggttcaaattggaggaagaaaaaggttcttgttcccggagaattcgaattccgcggaacacttaccgcgcggtgcttgagttatacgtttctttccacggaaccgacgagttcttctaatccaacccgccgaattcgtacatcacggcgaacggtttagaaacggagcgtggtaa

SEQ ID NO: 27192 - DNA, 316 bp, Glycine max
gggcttgcaccttctatgcccattttcttggaggctttatccgcagctatcagaatttaagagattcaccattagtacataactatgtgcgttaggtttacgcttggctttggcatcttaaaagggacatcaagcaaaccatagttttgttggttggttatggattgggatgggaaagagtttgcttgggatccacgtgggttggagctggctaatggtgaaggccagaagagtgaagcagcttcagtggatttgaggcttggtgaggaaaaaacagccccagatgttgttgctaaggacacaaaagactcaaaaa

SEQ ID NO: 27193 - DNA, 262 bp, Glycine max
ctcacgtgagtcctgcaactggtataataagaccagatcaaattgttgaagtatcagtgcatcatgaggaatttcagactctggaagagtttgttgatggcgttgtacaaaattcttggtgcgaagactccagagacaaggaagctattttggttgttaaggtgcatggcaattacactatccagccaagaaatcaccgagtccgtgttcaccactgttattcatccaagaaggaatctctgattgactctcaaccagacgg

SEQ ID NO: 27194 - DNA, 335 bp, Glycine max
aatggaatctttgtggggttgttttatttctaaagaaagcttcttcttcttcagcattatgtgctgcattattttttaggtctcaaaaagaggaatggtttttactccagaacttaggaaaaaggctattttttgaaaacttgtttgtttctttttaaacccagttgaaagtttggttctctctacctgggaaagctccctccttttttgtcagagaaaagagcaagagcctttcttactccatcttcaaaaagcatccaacccttgttaagataaaggagcactcactacactacattatacattagtgtttgtgcgtgtgtgtgtgtgtgtga

SEQ ID NO: 27195 - DNA, 372 bp, Glycine max
gtgcagcattacaggacctgaaagccttctacgcttatgaatatgtgcctaaccagagcctccatgatcacttttctgttagaaggacttctcaaccgctgacttgggaaatgaggcagaaaattatattaggaattgcagagggcatggcctaccttcatgaggaatctcatgtgagaatcattcatagagacataaaattaagcaacattctgcttgaggaggacttcacacccaagattgctgattttggacttgctagattatttccagaagacaagtctcacattagcacagccattgctggcacactggggtatatggctccggagtatattgttcgtgggaagttgactgagaaagcagatgttt

SEQ ID NO: 27196 - DNA, 571 bp, Glycine max
gataaccagagagtgcatttatcctttagcaaaagaaaaaaagaaaaaaaagagtgcatcagattaattcagaagaatgggtgaagaggtgaaaagcttggttgttgaagaggaaatgggggtggtggaaagcaaagaatggtacttggtatcttatgctccacacggtgttccaaccaccgatcatcttaaactccgcaaggttcgtctatcaattgcacctgaatcaatccctgacgcccatgttgccattgagatgctgcttttctctgtagatccatatcttcgaggcagattcactggaaccttagatggcctttattttccgcagtttgaactcaaccaggtgatcacaatatttgggattggaagagtgaaacattcaaatgacagtaaatatgaagagggagatattgttttgagtgcaagttttcctgttgctgagtattgtgtgatgccctccagtgagatcgatgcaaaaattgatgctgcaagtgggatttcattgccggattatctgagcactctaggagtgcctggatttgcagcatggctggggatagaggtggtg

SEQ ID NO: 27197 - DNA, 327 bp, Glycine max
atcccaataactttgagaaagctagctagagagctatagctaactttgaaaatttgcccaatatacatgttctactttgcctattgcaacatatcctatagttagcttcttagttcttacactacatacatggaagttgacttagttcttgctctccccactcaaaattccgttgaggaattcaagcttaacaagtcgaaacagatagtgagtttacagttatggagagccagttgcggttcagaaagcgaaaaacgtgtcaaacacaataagcgcagcttcgaagagtcctttggacattttttgaaacctttgcctttactagtt

SEQ ID NO: 27198 - DNA, 427 bp, Glycine max
cctcgagccgattcggctcgaggaactcatattaattagttagcaaagtctcactacaaacattcccttctgtttcattaattgtgaccttaagcttttatattgaaccgtgtcaatggccgttcctgtgaggactttagctcttgttgctttgcttgttgccattaatgcaatggtgtgtgaaagtagagtggtaagaaaggaccttggtttggaccttggtggggtgggaattggggtgggtgctggggttggattaggccttggtggtgcaggttctggtgcaggtgctggctcaggctctggctctggttcttcatcttattcaagttctggctcttcttcttcatcagggtcaggatctggagcaggttctgaagctggttcctacgcaggatctcatgctggatctagcgctggctcaggc

SEQ ID NO: 27199 - DNA, 438 bp, Glycine max
atatgatcttattgtcatagagttacttaccgtaagagacaccgggtggtttaagaagactaagagcaaaagaattgagtaatctgcgaggcaatggagaaggagaacgcaagagctttgaaagaatatacgagtacgacatatacaatgacattggagatcctgattaaagccttgaacttcagagacctcctttaggaggtaacgagcgaccttatcctagacgttgtcgaactggtcgtccacatagtgaagcagatccattgtcagagaaaagaagtagaaagttttacgttccaagggacgagtgcttctcagaggtgaagcagctcacgttctcaaccaagacattacactcggtgttgcttatattgctcccatctctggggaaaattatcaaagaaaaggagcttgcattttcctacttccacgacatag

SEQ ID NO: 27200 - DNA, 270 bp, Glycine max
caaaaaataaaaaggggtggattcgatccattgctgcgcaaacccaatccccaacccgtaactaaccgcgctagagtcaatagagaaaaaagtcatctttctattgtgggatacaatttgctatctcgctcttcaatttggacaactaaaacaggatcaaaagtctatattaatctcacttatcccttcgagagaagtcactggaagaagtgattccacagcttggatgaatcactcagggacacccaagtcttcaagttctgaattgga

SEQ ID NO: 27201 - DNA, 788 bp, Glycine max
gttctttacactcacgagatcttgctcttttctgtcaaaaagcaaaaataataaattttctgaaagtgcactaactcatctttttgtatacgatacatatctgcttgtgggtgtttatctgttccgcttctgcacaacaccgacccctcaacctttccctttataatccctccttgaattttgtgcaaccaaggttgccttttccttcccaattgggttgcttctcatacacacgcccacacaccattttttcacttcccattatgattctatagccttttaatgttttttttatcgataaatgttaattttactaatttttgtttgtaagaaatttaaacccgtcacatctctccttttctctggcctcttatataaccttgactttgttccctttcgtttagcaaacactaagttattatggattcgaattcgcgttaccatgttcagcagcaacaccaacaacccaattctgggttacttcgatttcgctctgcccctaccgcgaatctcaaacaacaaggcgaagttgctgccaatactaatgggagcgcgtgggagggctctgaaccgcttttgagattcttgaattccggggacacccacgatacgacgtcgtcgcctaccttacgagaattcgtggataataaggtttctaataatagtaaacctgcgaaggagtcatcagcatcatcacctctgagtcgcatgaattcccaacaggggtatagcgcttctatgttaccctctcggagtactggaacttcagctatgatgttgggttctat

SEQ ID NO: 27202 - DNA, 698 bp, Glycine max
cgtttttcgtttattccttctttcatccattctactttcttttcctctcgctagtgtttagtgctaggtgattgattaacttagaaggactttgtgtgttacaagaaaacaagggcaagtttcatgtctgaatttgacacgaacatcccaactgcttttgatccctttgctgaggcaaatgctgaggactcaggtgccgggacaaaagagtatgttcatgttcgtgtacaacagcgcaacggaaggaaaagcctaacaactgttcaagggttaaagaaagagtatagctatagcaagatactcaaggacctgaagaaagaattctgctgtaatggtactgttgtccaagaccctgagttgggccaggtcatacaacttcagggagatcaaagaaagaatgtttctactttccttgtgcaggctggcatagtaaagaaggaacacatcaagcttcatggtttttaaggcctagccaacagtggcaatttagcttcatgctacatacatataaccaacagcagtagcagtagcagtagcagcagcagcttataaatctgaattcaagcaattatcagtcacagcaacgtctgttatattgtagttaaagagtcatatataatctgctgtggtactgattacctattctggatagttactacttgattatatggtaaggataatatgtctgcttctaagat

SEQ ID NO: 27203 - DNA, 382 bp, Glycine max
cccccattggtgaacctcattgtggcacagatgaaggagttaatatctagtgctatgagttctgtttgggtggtggattgtggggacagtatcagcctggtggtagagagtgttgtcagaaaagaggttgtgggcaaagggtgggttgagcttatgggattggagatggatattttggtgaaggaagtagaggggaagctgctagaagaacttgtggaggatgcggtggttgatttgacaggcagggcctgaatggttgacaaccctgacatggctttccgctttggctttgctcttttttataatatatattgtaactctactattgttgtattcgattatcaacacaaggccctacttactaatttattaaatgctactg

SEQ ID NO: 27204 - DNA, 311 bp, Glycine max
tctgcccattttggagattcaacaccgtagcatgttgaagcgtggatacaaaccaaagccatggagtggagctcagaattgccgggtttctgtgttcctcatgttttttacattggttctaatgttagtggttttccttttagtatttcgttatgacagtgatggtgctaatcccattttagcttatgaacttcctaaacaaaaatggaatagctttgactctttggtgcatttgcatccaacaaaagagttccggaatgaaactgatttgatatggcaagtgcctgaatcacctaaaggtgttctctttc

SEQ ID NO: 27205 - DNA, 307 bp, Glycine max
gcagacacaacgaatcgtgaatggtgcactgttcctgatgactctgggtggtaacgacttcgttaacaactattttctcactcctgtctctgccaggtctcgccaattcactgtcccccagtattgtcgttacctcatcaccgagtatcgtaaaattctcatgaggttgtatgagttgggtgctagaagggttcttgtgaccggaactggtccattgggctgtgttcctgctcagcttgctacaaggagtagtaacggagagtgcgtgcctgagttacaacaagctgcacaaattttcaacccactt

SEQ ID NO: 27206 - DNA, 497 bp, Glycine max
atttcatcgttcttcaaatcgcgcgcgctccttacttcgagtcttcgactttcctcctccgaccatctcgccggaatttcccgcagcggcgctccttgtcgccgcagcttctctctctactgaaaccctagagagagaaaattcaaaaaccattctctactctgaaattcataaaccctgaaattcaaaaaccctaattcccctgtcaagctcgtagcacagtcacagccatgtatggcggtgatgaagtatcagctatagtaattgacttgggttcacacacttgtaaagctggttatgccggtgaagatgctcccaaggctgtgtttccctctgttgttggagcaattgatcaaatggatgttgatgaagcagataatggtgaaaagaaccctggctctgctccggaatcaaataataataatgttagaaatgctgattctgacaaggccaagggaaagaggaaattgtatgtaagatcccagtccttggggtac

SEQ ID NO: 27207 - DNA, 285 bp, Glycine max
ctcgagccgctcgagccgtccagcctcaggcacattagttcaagccttcaagcacaaaaatgataaccattgtcgcttcttacaatgtcactccaaatcagccaactcccagtgatcctatttggctatccgatagtgatcaaattgggaacctacgtcatgtaaacactatctatgcctacaaatcaagacccaacaacaccattgatattgagaggatgaagaactctcttagcaagattttggtgccatactatccaatagctggcagattaaagctgacaa

SEQ ID NO: 27208 - DNA, 330 bp, Glycine max
aataaacagattttaattgatgccgttgtccatgctgtgaatgaggactatgctgagatggctaatgatttcaccagattaggcttcctgaccccagggactgatgtgactcctataattcctgctttggaagcaatttggcagaactctgctggaaaaggactgtcagattttaattttcgtagtgtcacaggacagtctaaccagtgggtttacaattatcccattcgaatcccagaaaggttttcacttgtaattcgttctttattgacccaagaaggcatctgttttaccatgaaacctgacttcaaatttcttgaggttgcctat

SEQ ID NO: 27209 - DNA, 273 bp, Glycine max
cacaaaacgccaacaccataaccaaaacgcacactcacacagatagaaaactctttctccttcttctgtagttgttttcttctcttccagatcttcggcgcagaagaacctcctgaaattcgatcgctttattcattcgcgttttgctttcttcagattttcgtcaatattagagattctacgttcgcgcgattatgaagatgatgctatagcagcagcagcagtagaattcgttattgcaaaagacgaagaaaatggacgatagaggtagct

SEQ ID NO: 27210 - DNA, 297 bp, Glycine max
cgaaacctgaaagcgaaccatgccagaacgagaatccaccaatggttactgcagcagcagcagcggcgaagaagacggtgacgccgcttggagagcagccatcgattccattgctcaaaccaccacctatgtcgcttccaccaccaaacacactcaccctaatcatcatgatgatgatgattacgatggccacaaacccaacacacgacagcttaagcactaccaactcaaggcacaaaaccttctgaatgaaatattggaaaattcaatagagatagtgagaaaacctgtccctgt

SEQ ID NO: 27211 - DNA, 296 bp, Glycine max
gccctttcgctccaaaacaacaatcccctccccacctcccccccaatctaccacaccgctaggcttttcacaagccccgccagatacaccttccccgtctccgacaaaggcacccacatcgtgcgcctccacttccaccccttcaccaccccaaatctcgatctgggtctcgcccaatttcacgtcttgctcaacgcccacgtcgctctcagcaacttcactcgcttgctaagcgacgccacaaaccctagcatcgtcgagtatctcatctgggtcgacgcggagaagctcgaaat

SEQ ID NO: 27212 - DNA, 299 bp, Glycine max
atcagctacaaaattggcacacaagttctatccaattattaaagccacagatgctaaattggcgagtgcaagagctgaagacgcggtgctgtgccagaatgggaccctggatcccaacaaggcgaagggaaagatcgtggtgtgtctccgaggaataaatgcaagagtggacaagggagagcaagcttttcttgctggtgctgtgggaatggtccttgctaatgacaagactactgggaatgaaatgtatagctgatcctcatgtccttcctgcttctcatatcaattttgactgatgg

SEQ ID NO: 27213 - DNA, 382 bp, Glycine max
actgactctatgttgcagtttaaaagagggttggaggaggctagtaagtttcttcctcggaggcctcagcttttcactgggttggagagcaccgcagtgtctgcagagccaaagggaaaaggtgtagctctgaagatggagaattcaattggggtgaggagtagaaagaatcatgcgcgccaagatgaagaagaagaagaagaaagaagcaacaagcagtctgctgtgtctgcggtttgtgttgaggaggagagtgaaatatctgaaatatttgacagggtgttgcttagtgttgaaaatgtgccactgtgtgctgaaaagaatggatcagtggcacaagctgagaaatcgaatttgtctgatggagggaaggttcgatcca

SEQ ID NO: 27214 - DNA, 295 bp, Glycine max
cttcttcttcagtctcctccaatggctcccgcaaggcagaaaccctctaagccaagcaaatcgccgaagaaccctaggaagacccatcccaagcacgattctacctccgaatccgaagaagacaccccgccgcaactgcaaccggagcaactcgagctcggcgacgacaactccgattccgcgtcggagctctcctccgatggcgacgatccgttagccgatgatttcctccaaggaaccgatgacgacgaagaaacaggctcaggttcggagtcaggtttggagtcacgttcgg

SEQ ID NO: 27215 - DNA, 126 bp, Glycine max
gcatgagagtggcagcatgcttggcgccactagacgcgtggttggattcattcctcggaggttacgatcggtgcggcaagtgcatggagatggggatggcgaagaggctctacgtttccacacgac

SEQ ID NO: 27216 - DNA, 412 bp, Glycine max
aactatgatatgaatctttctctctataaactgtattttctgaagtgacactgccgattgtttttgttaaaactccattttccatcttagtctggattcaattttgtttgatctctcagtctctcaactcgatcttgaacctctctcagacgtgttgtgtgatgattttagaatggaggtagtatctgatgaagacgccttcttgtttggcatggaactagcgggtgcctctgctgtctctatggttctcaagtcagctttggagcttggcatcttagaaactatagccaaggctggtcctggagcttacctttccccttctcacatagctacaacatacttacatactccctccatcaactgcctcatggtaaggctgaaaggcactatggtcttcacccaaaagccaaat

SEQ ID NO: 27217 - DNA, 300 bp, Glycine max
ctcgagcgctccgatatttttaatgtctacattatcctttggaaacgcaattcctcctctagaaactggaaattggacacgtagtcctacacacacagagcatcacactgcttctaataccatgttttcttcgtctccaccgtttccttcttcttcttcgccttcagttacgctgcctcatgaacaagctgctcctgcagtggcatcctggtcttctagttctgcagctcagcattttcctacctcagttcttttacaagagcagcgatgagtataagcccttactgcacgtgcataata

SEQ ID NO: 27218 - DNA, 486 bp, Glycine max
tttcgatataaagaaacttaatttttaagctcatttcactgagagaggaggaggactattcaattaaggatgaagtgactacagaattggatatttcccaacacatggtgaaggagcatctgtttcacaggcagtttaaagagaagctgtactcatggcttcttcacaaagtaactgagagtggtaaagggccaaatgtattagatgaggatgggcaaggtgtgctacatttagcagcttttcttggctatgattgggccataaatccaattatatctgctggagttaatatcaacttccgagatgtgaatggatggacagctcttcattgggctgcatcctgtggcagagagcgcacagttgctgtccttgtctccatgggtgcagattgtggagcactgacagatccatctcccgcatctccagctggtagaacagctgcagatcttgcctctagctatgggcacaaaggaatttctggttttc

SEQ ID NO: 27219 - DNA, 383 bp, Glycine max
tcgtcagaatacattcctggtaatggtgtggtcttcttattctacaaatggtaaatcactctaacatttcaaccaatctgtactcaagttcaagtgcttccatctgccgttagctgaatatttagttgagcagagcaatgatgaacatcgtgccttttgtccttagttttcaaacaagaaaaggagactgacctcttgtgttcttttctgcactgggtaaaatacaactgggagtattgcattctcttcctcttctgtttaatttcttaactagcatgttttttatgttaaattttgttcttggctaaggctagagcatctgtatttatcaaaaacaaatcagccattgagaagatgccactgtattttctacattacctata

SEQ ID NO: 27220 - DNA, 438 bp, Glycine max
cttcataaatggtgataatgattcaaaatgtaggtagcttagggaaataaaagtttgtccaaactgggtattctgcactattttaaaaaaacaaaaactttagtcattttttttttttgggttaggattagaggaaaaagcatgaagaacttgtactggttcaaagagatttctaacaacgtgagatcagggagaaggctttcactaggggaatacaagagagcagtgtcatggtcaaagtatttggtctcttctggggcggccataaagggagaaggagaagaagaatggagtgctgatctgtctcagttgttcatagggtcaaaatttgcctctggcaggcatagcaggatctacagaggcatctacaagcacatggatgttgcaattaagctggtgagtcaactgaggaggatgaggacttggctgttttgcttg

SEQ ID NO: 27221 - DNA, 335 bp, Glycine max
atttactcgtgcagtggaaggccaacactgatgagctcaggggcggtgacgatggaggatttgtacgccgaggaagagagggagctattggttgagttgagagttccagcatcgtcaggaactggggcccacaaccacgtgatgacggtacggtgtttgtataaagaccctgccacgcaggagatcgtatacggtagggagcagggtcttctggtgccgccgccccagagttccggtacaaggattgagaggctaaggaatctcttcataaccgcccgagccattgcagagtcgaggaggctccttgagcatagccctgacttcaccagtgctca

SEQ ID NO: 27222 - DNA, 614 bp, Glycine max
tgatgttgatgatcctcaaactacaaatctttatgttggaaatctctcacccaaggttgatgaaaattttcttctccgtacttttggaagatttggacctattgctagtgtgaagattatgtggccaaggacagaggaggagagaaggcggccgagaaactgtggctttgtagctttcatgaacagagctgatggacaggcagcgaaagatgaaatgcaaggagttgtggtttatgaatatgaattgaaaattggatggggaaaatccgttgccctcccatcacaagcactacctgcacctccaccagggcatatggccatcaggagtaaggagggtagtactgtgatcttgtctggtccttcaggtccaccagtaacaactgttcctaatcagaattctgaactggttctaactcctaatgttcctgatataatggttacaccccctgaggatgaccatttaaggcatgtaattgatacaatggctttgtatgtcctggatggaggatgtgcttttgaacaagctattatggagaggggtcgtggcaatcctcttttcaatttcttgtttgttctcggctcaaaggaacatacctactacgtttggagactct

SEQ ID NO: 27223 - DNA, 314 bp, Glycine max
agtgtatcaaaattgagagcagtggttgaagtgaagcagatcgtcaaataatcatgagtttaatgagtccgagaacagagaagctggtgagaaggctaacctttgtcaccactgttgctgcttcctattttctcttaaccgctgattacggccccaaacccaatgctctcgatcctattaagaagcaaatactttctgcacagagcactgttaaagagtatattgtgggatcaaagaaagaatctcaagaaagccatgtggggagattggacagcaataaagataatccataaatttatgatagtcttgtatag

SEQ ID NO: 27224 - DNA, 374 bp, Glycine max
atcccctgaaatatgaaatttcaagtcatccaaaatcaagagaaaatctgacttctgttgaagtttgcagaagtcaaggattcgatgttgaagttgaaaatgctggatcccttctgcagaaggaaacatttggaggatactgtgtgccaggttgcaatagcaaagctaatttatgtggtgacaataatattgattccagggccagggccaccaagtcatctagtgatactgtacaagatatggttattggccccctaccgagagattgccttgttgaggattctaatggtggtcagaattctagaaacaaaatcatgctgtcggagatggagtcaagggatgatgcgaaacaaatgacatcaaggactagaaat

SEQ ID NO: 27225 - DNA, 346 bp, Glycine max
cacgccttcagggaatgcctattgattgatcctagagagcatcctatgcttcttgcagagccttcttctaactctcaacaacagacagataggacagcagagctgatgcttgagaagtacaaagcacctgcattgtttttggcgaagaatgctgttctgacttcttttgcatcagggcgtgctacgtcattagttgttgatggtggtggaggatcaattacagttgcaccagtacatgatggttatgttcttcaaaaggctgtggctacctctccaattggaggagaatttcttacagactgcttgatgaaaagcttggaaagcaagggtattacgataaaaccaa

SEQ ID NO: 27226 - DNA, 453 bp, Glycine max
atcttactctgtctgaatggaaaagaaaagcgtcaccgtgcagatccgtgattgagcaaaacgacgtcgtgctgctacgcatcgcatcgaagttgcaacaatggcgagttccgaatcgcaagagcatcatccatggatctcgaatgcagttcctttgttggtggttcttctaattgcacttcacgtcttcgctttggtgtattggatttatagattggccactgacaataagccacaacagcagcagcagctacaacaacagcaacagcaacatcaacagagaacaaaggctcactgaccgacaacaacaacaacaacaacaacaaacgttctcattcaatttcattttcttcaaacaattgttgtatgaaattgttaattgtgtgcagtaaaggatatgatttttttgtttttttggtataacagtgatgaatgaagttttgtttaattttt

SEQ ID NO: 27227 - DNA, 454 bp, Glycine max
ttattatcttggaggactgaaggggttcaaaatagcaatattatggttgggataataccttggctgatagtgtctaccagggttagcagatttatttgtagactcacctatggcaaatagattgtcatgatattcaattcttcatctagaatgacataaaattgctagctgcttgggttggtatcctgcatttaaagtggaagggacatatgaagcatcttgaaattcgttctttcgctccatgtctggttgataagttttttgagtttcattttattttagtacagacgtgtaagatccattctgcatatgcaagcaaaatttcatgcttgtaatatgatagcattaagtctcttacaacctccaccctcagttttggtctttattaaggaaatttgtctttaaatgcttatggacttaatcatatttatttattcatttatttttgaagttg

SEQ ID NO: 27228 - DNA, 460 bp, Glycine max
acctgaaacccaaaaccactaacacactccactttctctttacatggatgaccaccgaaactcaacaacaaaaaacgccgttggcctctgcctcctcccacaagaactcatccaaaacatcttcctctccctcgtactccccgaaatcattcgcttaaaactcctaaacaaatccttctccagaataatctccgacaacaccttcgttcgccagtacaacagtttatccacctccaccacgtggctcttcgtctacaaaaaacgctggctccgcgacgccgcgctccacgccttcaccgaccggagctccgaccgatggttccgcatccccatatcagagcttctcaaaccgatccactttcacggcgaggacctctacttcctcgccgcctccaacaacgtcttcctcttcgcctccaacaccgtcctcgaagtcgtcgccgttagactaatcaccgtc

SEQ ID NO: 27229 - DNA, 357 bp, Glycine max
ccaaagaagcctctggaaagtcctagaaaatccccaccgcagaggtgaacagtgctcaaaagaagattctctctcgttttctcggaaaatttggttctccggttaccttggcttagctggatgtggatgctaacatagttacaatttcagggtagggagaacttgctaaatctgaaccagaaagagagaacagaaaaggctaacgaacctgaagatctgctttctccatgtgatagtgactcatgcagagaacataaaaagctaacatcagataatacaaggatgtctgatcattgtttgaagagcagcaagtagattctagtagtagtgagctttatgcagatgataccatcttag

SEQ ID NO: 27230 - DNA, 318 bp, Glycine max
cttctttctcgttattttctatcttcagcaagaagacagataagagatgtcttccatagtgaaaggcatactcataaggagcacagcggatgtgtgcaagaatagcatggttttgaagaagcagagcgacattgtagggaggagaagcacaagagtgcagtggcagttgcatcttagatcaaaatcaaacacatggaagagaggtagtcggagatcatatcagcctccaatacgtggccaggccatccttaccccagcaacaccaccaaccaccaaaaagcgggtattcacttttggcaaaggtagaagtgaaggaaa

SEQ ID NO: 27231 - DNA, 340 bp, Glycine max
gacaaacagaaaaaacagttcattcattttcactttgtgtcagaaatgaaaatctgcaccaccttttgtgtgtcactggccacggttttggtgatgatgagcaacatcgtcatggcagtggctgagactcacattcccaccaccctggatggcccatttgacccggtgacccgacggttcgacccgtcactgcgacggggcagtgatgacttgcctatgactcatccaaggctcagaaagaatgtcacttcaaacttccctgaacagattgctcttgcaatttcttcaccaacttccatgggatgcacagattggcctcaacgtgaccccagtagaatct

SEQ ID NO: 27232 - DNA, 181 bp, Glycine max
ttaaataagtcaagcgagagaactatgtgtggtcgacgaaattgagtagaacgtgtgtgaaaacacattcgatcattttgtcaagatttattactcactactgacagatgatctctctaggcctttcgcatctcctccaaattctcacatgcattctgctttagactcgatcattttctaa

SEQ ID NO: 27233 - DNA, 287 bp, Glycine max
ttacaatatttcttagttcgcaccattgcaacacgcaatgttgttgctgattcagttcgatccagtcttgtctctttatctctgcagaacctaaagggtggttttttccgggcaccaaaatttgtggggttcatcaaagttcgctcctttctgcaaaataaatttggcccaaaagtataatcaatactttgtatttcattttggataatgattgtggaggacgaaaattgtggtgttggttctgggggaggaggaagatggttgcggggttttggaagcttgattag

SEQ ID NO: 27234 - DNA, 356 bp, Glycine max
cttctccgcttgtccctctatccatcactcgaagcagcgatacgctgccatggctaaaaaacgcagcgcatcagacgccaccgatgatgcacaaaacgacaccgtatcgctgcttccctcccaacgcaagaagcccaagcactctgctcctaaccccgacgcctgcttcgtcggaaagcccattccttctgccgaggcccgcgccaaatggccccaccgatacccctccgaggagaaaaagaaagctccagctagaagctcagaagaggctacgagtgaaaacagcgaggctatgctggctaggtgtcattatcgccaagctaaagtagatggagttgtttataacctctatgatg

SEQ ID NO: 27235 - DNA, 1649 bp, Glycine max
  unsure (1)..(1649): unsure at all n locations
cagagatgcttcgcagaggccaggttgagcatgttaaagccgaaaggaatctccttgcagaggttgacagcaattgcatagtcaagctttattgttctttccaggatgatgaacatttgtatcttattatggagtatctaccgggtggggatatgatgactctacttatgagaaaggatatcttgactgaagatgaagccagattttatgtaggagaaacagttttagctattgaatctatacataagcacaattatatacatagggatatcaagccagacaacttattacttgatagatatggacacttgaaattgtcagattttggactttgtaaaccattagattgtagtacacttgaagaaaatgatttttctgtgggtcagaatgtgaatggatctacacaaagctcaactcctaaacgctcacaacaggaacaactgcaacactcgcaaataaacaggagaacacttgcttattccacagttggtacaccagattatattgctccagaagttcttttgaagaaaggttatgggatggaatgtgattggtggtcacttggagctattatgtacgaaatgctggtgggatatcctcctttttattctgatgatccaatgttaacatgcaggaagatagtaaattggaaaacttacttgaaatttcctgttgatgctaggctatccccagaagctaaagatcttattagtaaacttttgtgtaatgtcaatcaaaggctggggtcaaaaggtgcagatgaaataaaggctcatccattcttcaaaggtgttgaatggaataagttgtatcaaatggaagctgcatttattcctgaggtcaatgatgagttagatactcagaattttgaaaagtttgatgagtctgacagccaaactcaatcatcttcaagatctggtccatggaggaagatgctttcatctaagaaggatttgaattttgttggatacacttacaagaactttgaaattgtaaatgattatcaagttcccgggatggctgaactgaagaagaaacagtccaaaccaaagaggccaaccatcaagtcacttttcgaaacaccagaggcgtccgatacgtctgcaaatgatcaacctgctcaaggaagctttttgaagctcttgccaccccagttagaggtatctcctcatcgcgacaagaatcttcctcccaggtcctaacaggccccaaccacatgatctctgcagcagtctgacagtgtaggaatcatcataactcagcattttgaccatttccgcgtttaaaatatcactcttgatgcgttggatttgttctaagttacacgaaatcactaatatggcttggaccagtctcttgtcagtggccacaactattgatttgtaaatctctcactaagtatccgttgtcacacatgctacactaaaacagacaataccatgtatattcgcgttcttttaatgatagcaaagcatttatccctgtaacattggagtgtaatgattcacaagttatttagcagaacaagatatgtttgatttttttttaaaaatgtcaataatctgtaatttgttgtggttcgtttttttaatattattttttataatggacgagattcctctnnnnnnnnnnnnnnnnnnnnnnnnnnn

SEQ ID NO: 27236 - DNA, 398 bp, Glycine max
ggaagagatcaagctagagcagattagatcttctgtcagcttcctttccattcattttcgggtagcagtgaaaagtcagaacctacagaagaaattcctagtgtagcatctgaaatgtcagaaccgcagaaacctgtttctgatgtagtttctgcctctccagtagatgagattataatgctagaatcagatacgggtgcaaaggatatggagcagaataacctagaaaactccaatgaacacagggagaaagattctgttgtgtccacttcgggaaaagaggatgaagatgagccagtatcactgtcagaattgtcatcgaatttaaaaaaatgctttcattcaaatgatcaaaataataaaatcagacagcccaagaaaactgaacagcccagtgg

SEQ ID NO: 27237 - DNA, 689 bp, Glycine max
tgagaacaccatgtcagttaccaaattcaacgccatgatctcgggcttattccagcttggtagtgcatacgagtgggtggtcaccaagaaatctggtcgttcctcggagggcgatttggtttcattgattgagaaaggaccaaagcatcaaagagggtcctcagcacctgatctagaggaaatgaaagaggaacttcgaaagcaggagcagcaaaaggcctctaagaagaagaaaaaacataacagaatatatatgaaggagcttgctttggcttttcttcttctaacagcctcagcaaggagtcttctctctgctcaagggattcacttctactttttgttattccagggaatatcattcttgttggttggtctagacttgattggtgaacaggtggactgaaagaaaaataaaaatgaaaaaatttgacaggacagtgtacttttacatgcacggaaaagcacaaaggtgcgaaagccaggccttatgaaattactgaagacacttatttgggggcaatggagagtgtagaggaggacggacccatagtgctgctttttcttgctcatgctcctccctccaggctcgtaaatcaaatcccacccaatacgatactttattgtgttataatggaccgaaaaggacttaattgggaaatgggtgcaattgaggccaaattcaatgtgta

SEQ ID NO: 27238 - DNA, 291 bp, Glycine max
aaacaaattactctcttcttctgcactttacttttccccttcactcctcttccgttttctctcactaacctcatttctccgtcggcaaaccctaaagcccattcattttgttcgccggcgactaatttaccggcccggcccggcccgaaatattcgacccgaaccgcgcgtggttactgttttctctggagagagagagagaagggggtggtggtggaaatgtacaagaaccagcttcaagagctggcccagcggactgcttcaacctgccttcgtacgcgtacattcgag

SEQ ID NO: 27239 - DNA, 381 bp, Glycine max
cgaagattggtgagagggtagagaaattaaagattttagaacaaaacagagtccaaaacaggtgtcttctcggtgtctatatgccaattgaacttgtcatagagaagagggttgatggggttagcatttataggattctagaggataaggctcttttttgctacaaagcaaactaaaaaaaacctatggaggaaataacttcgacggttgcagtgccattcacacttgggaatttaatacaaaaggagcaagcagtgacaacccacatggagataactggtctcaaactcagggcaaatacatcatcatctttgatattaaatcctgcaattgaaagtgaaaagcacacagatattgggccacaaacccaaattgaagtgt

SEQ ID NO: 27240 - DNA, 729 bp, Glycine max
aaaaataactttcattgactttttggggtttgttacattaagtgcactaatacatgaatatatttttgagagaaaagataccaatttttttctgtacatatatgtttacatttaaagcacttataaaaataatatgattctaattatttatgaacataaaaacaaatagtttattaattgctccatattttcgacatggggttgcataaaaatcatgagttggttgctgaaacaagactcatctagattcgtggcatagatactttggaatttttagtgttagcgggaatgaaaaggtatcatcgatcatgttaacgccaagtcattccttacgttagtattgagcatagaatctcatatccttgcgcatgaaaacaaataaataagtatggctggatgatccatataaatgctaggcactagaacacaatatattagtcaagaaggaattgaactatgatgaacgatacatcatctgattctgaaaatgaaattatcggagcacgggcaaagctctttggacatgaagaaccgattcatgaagttcctggaggaggaaaagtggcagatgtgttattatggaggacagatatgtatcaggtgcgcttttgggtgggatgactgtgatatggtttctatttgagatcgttgagtacaataccgtggcactcctttgtcacatttccatcaccaccatgcttgttctattcatatggtccacggttgcag

SEQ ID NO: 27241 - DNA, 490 bp, Glycine max
ctcgagccgcgcttctctctttcaaaattgacctaccttacgttcttcttcttttggtggttcgatgggagcggtgacgtcgtcgatggcggcgaagttcgcgttttttccgccggatccgccgtcgtacacggtggcggaggaggtggaggggagggcacggatggcggaggtggctctgagggaaaacgtcgacgttttgaaggtgaaaacggagagagggaacagcgttgtggcgatgtacataaagaacccaacggcgtcgttgactttgctttactcgcacggaaacgccgctgatctgggtcagatgtacgagttgttcagcgaactcagtatccacctccgagttaacctcatgggttatgactattctggatatgggcagtcgtctggaaagcctagtgagcagaacacttatgcagatatagaagctgtttataaatgcctgctggagaagtatggggcaaaagaggaagatattgtttta

SEQ ID NO: 27242 - DNA, 273 bp, Glycine max
cttcaccttcagtcttcactcacgcgcgccatcttctcagtcaccaccactccacgcccacgctgagacaaggaatatgggtgatcggcaagtagttgaccaacaacacatgggtgatccacaactgccatcttctcctccctcaaaggatgatatggtttcatgtgttatggctttggaggctgctttgcttccctgtttgccagccagagaacttcaagcaatagaccgttctccccacccctcacatcaaattgatgtggataggtatgc

SEQ ID NO: 27243 - DNA, 309 bp, Glycine max
ctcgttccaatttggtgatgaatagtttctatccgtgacattattatctctgtctcagaacagacgaagaagaacaattaacattaacatagattgcatgaaagagagggaattgaattgatcgattgattcattccaatatgggtgatcacttggcgagggccgaggattttgagaacaaggcagagaagaagctcagcggttggggcttgtttggctccaaattcgaggacgctgctgatcttttcgacaaatccgccaattcttataagctcgctaaatcatgggacaaagcaggatccacctaca

SEQ ID NO: 27244 - DNA, 588 bp, Glycine max
ctcaaggagactctcaaggccctccactaccttcaccgccacggccacattcaccgcgacgtcaaggccggcaacattctactcgacacctccggcgctgtcaaactctccgacttcggcgtcgccacttgcttgtacgacgccgtcgacaggcagcgttgcagaaatacttttgttgggaccccttgctggatggctcctgaggtgctgcaaccagctggaagtggctataattccaaggctgatatttggtcttttgggattacggcacttgagttggctcatggccatgcaccattttcaaaatatcctccaatgaaggttcttctaatgacaatgcagaatgcccctcctggacttgatgatcgagataaaaagttctctaagtcttttaaggaaatggttgctatgtgcctggtgaaagatcaaacaaaaaggccatcagcagagaagttactgaaacattccttcttcaaacatgctaagcctcccgagctctctgtaaagaaattgtttgctgacttacctcctctttggaactgtgtaaaatccctcaagctcaaagatgcagcacaactagcagtgaag

SEQ ID NO: 27245 - DNA, 409 bp, Glycine max
gtttgggaattgggaactaaactcaacgtcacaactcaatccacttgaaggaatttttgtatatactgacaatattggacattgagattgaattagggttttgatgttcttcgaatgccgatttttgatgacttatgaatggagattttctctgtcttgtcggaaccgtttctcgtcgccctcgccgtgaccgcgctctgtttcctcttcgcgctcttcgctctcctccgatcctccttctccctgccccgcagattcacgcccccgaggaagcaccactgcgattgcgcctccaattccgacgccggcgccgtgccctacctcaacggcggctgcactgaaatgctcgagccccgtcccgttccggcgccggcggtgttgacggagcggcgaacggggtcgtcgatga

SEQ ID NO: 27246 - DNA, 412 bp, Glycine max
tttggttcatgtcagcctggttcctattctccatgttgttggtgaaccgaaaacaaagccaactcagcacagtgttcgtcaacttagaggattaggtttgacccctaatcttcttgcttgtcgcagttctaaggaacttgatgacaatgtcaaggcaaagcttggtcaattttgtcatgtgccgctgtcaaacatacttactctccatgacgttccaaatatttggcacattcctttgctattgaaagaccagaaggcacatgaggcgatcctgaaagcattaaacttgctaggtgttgctgcagagcctaatttgaaggagtggacttcaaggacaaaagtttatgacagatgtcatgaaattgttagaattgcaatggtgggaaaatacactggcctttcagatgcatat

SEQ ID NO: 27247 - DNA, 322 bp, Glycine max
gcaatcaatacctttgccaaagcaagtggactactactcacaagtgcatgaacaactgatacaacaaataggagcatctactctcgggaaacacctctcaaagtccatcttcattgtggtgattggtggcaatgatatctttggttactttgactcaaaggatcttcaaaagaaaaacacccctcagcagtacgtggattccatggcttccacattaaaagtgcaactacagagattatacaacaatggtgcaaagaaatttgagattgctggtgttggtgcaattgggtgctgccctgcatacagggtcaagaacaaaaca

SEQ ID NO: 27248 - DNA, 383 bp, Glycine max
tgttgaaaccttagtctgaatccaacaacaatcaatcactcaatccttgtctcatcctataaatcagagcctgtaagccaaaccaagtttcacaaacttaagattcatctccttgtcctacaaaacatggttccaaccccccaactcaagtatgttcttctcctcttttattgtacttttgcctttaacttgttatccactcctgcctgtgccctcaacataggagctgaaaccactggagtcgctgtctctgtgagcaaagagtgcagtagacaatgcgagtcaagtttctgctcagttcctccattattgagatatggcaagtactgtggacttttgtatagtggatgccctggggaaagaccttgtgatggccttgacgc

SEQ ID NO: 27249 - DNA, 412 bp, Glycine max
cgaaatagagaaagcaacaaataacttcgattcttcaagaatattaggagaaggtggcttcggtcttgtttacaaaggtgacctagataacggcagggatgtggcagtgaagattctcaaaagaaggaccagcatggagaccgtgaattctttgtagaagctgagacgcttagccgcttgcaccatagaaatttagttaaattgataggtttatgcacagagaaacagactcgctgcttagtctacgagctcgtccctaatggcagcgtggaatcccacttacatggtgctgacaaggaaaccgaaccacttgattgggatgcatggatgaagattgcacttggtgcagctaggggattggcttatctgcatgaagattgtaatccatgtgtcatacatagggacttcaaat

SEQ ID NO: 27250 - DNA, 446 bp, Glycine max
gcaatgaagcaccttcttttccgttctttggattctccgaggaaggagcctttgactttttcgccacttgcaacatcacgcacgtgcttttcacctggatcctcaaagggggatccacaagaggctagagaggtaattaccagtgagtggtaataactgctgagtgacttggtcggtgaataactgaatttgcattggcaatgacaaaggcagagttaggtttaatttatttatcttggtttagttatgtttaatttgtatttctcagtgaccttgttgtttaggttggttaattggcttgttttgtttctattttgtgactttttcgactgaacggatgatttggttggagtattccttccttgatttcagtctaaaaatgtcatggaccttcccttctttacctctatgaaaccagattcaggctatgcctgacattttttctc

SEQ ID NO: 27251 - DNA, 502 bp, Glycine max
gaagtagtttcagaaaatgattggaatcatgtagtggtctctgttgatgttgatttcaaatggaacccaacagagccgcttgttgtgcggactggactccatgtaatcaaaccaaaaagtagcgtggaagatattcgattcattgatccttataaacccaccttcttataaagaaaaacatatattagatgacttgggagtctcaaagaccatttgtgtgacgcaaaaagaattggcgtcatttgattcattgctaccacattaacaaagtggtggagactggagggtgattttcgttgcttcaaccctctagcattaaaagataatgtgaattgggattcaactttgatggcatcatgcatcccagatgagtagtacagctggtgttcaatgtaagtttgcatgttgcttttttttcctgtgttgtactaactactagtactattaacatgaaaatgttaaaagtgattatttgtaatatatggtttgtcaaatatgtttg

SEQ ID NO: 27252 - DNA, 401 bp, Glycine max
attacgacgagcaacttggcgtgctggaaccggagtcgtgaactcgttctgcgatcgtcatcaccgaccatcatcgcttgttcttctttactttctcatcagagtctctcactgtgccaaaacacgatttttgtattgtacctttcttttgagttctgcgcttttcgatcttaagaagacataaaaaggagcaacaacatgttggagaagatcgggttgccgtcaaagccttcgctgcgagggaacaattgggtggtcgacgcctcacactgccagggatgttcctctcagttcaccttcatcaatcgcaagcatcactgtaggaggtgtgggggaatcttttgcggcagttgtactcgacaaagaatggttctacgcggacaaggtgattcacctgtgcg

SEQ ID NO: 27253 - DNA, 328 bp, Glycine max
ttctttatattgatttgtctgaggctgagattgagatgaaaagaggagaatgctcttcagcaaaacctcagtctcttcaccacttggctctgcattctttcctacattcaatattttttatcattgaagttttcaatggctccatatagttggaaaagtagctcggctcatcatgtaggtataggccaaatgtgtatttctttatggtatggtttcctcttttgtcattatcattttgctgtagagatgggttactttgttgtcttttgttaatagatccagaatgtatgaacgaaatgaaatgcttattattatcccttggcgtgcc

SEQ ID NO: 27254 - DNA, 716 bp, Glycine max
cttgcacagacataaataacataacttctggtaatgattgcctatacgtggagggagcatctgaggttcttccatcgtcagtggccaaggtgactttcgatgatgataaatcaaaagcagtggacttcaatattatttggtcttcgtcacccgacagtttaaagtatagttcctacatcagtaaaccagagtttattgaatttccaactgaagttccaggtcaaaatgcctatgcatacttttatccaccatctaatcctgatttccaagctagcaaagaagaaaagcctccattattattgaagagccacggtggaccaactcctgaaactcgtggaattttaaacttgagcgttcagtactggactagtcggggttgggccgtcgttgatgttaattatggtggaagcactggttatggcagggtgtacagagaacggcttttgcgccagtggggaatagttgatgttaatgactgttgtagttgtgctacatatttggtggacagtggaaaggtggataaggagcggctgtgtattatggggggctctgctggtgggtataccaccttggctgtccttgctttcagagatacttttcaggctggggcttctttgtatggtatagctgacttgaacttgttgagagcagaaactccataaatttgaatcccattacgttgaaaacctagttggagatgataaggatatgtatga

SEQ ID NO: 27255 - DNA, 414 bp, Glycine max
agtaaaggaggtacataaaattactgttttggacataagactggctaatgcagataggcatgctgggaatattttgatcagcaaagaggaggacaacaaccagtctgttctgattccaattgatcatggatactgcctgcccacaagctttgaagattgtacctttgagtggctttactggcctcaagctcgccagccatactccccagaaactattgactacataaagtcactggatgctgaagaagatattgcccttttaaagtttcatggatgggatctgccagttgaatgtgcccgcactcttaggatctcaaccatgcttttgaagaaaggggtagagagaggattgaccccttttgccattggaaacctgatgtgcagagaatccttgaacaaggaatctgtgattga

SEQ ID NO: 27256 - DNA, 370 bp, Glycine max
aaccgggcctggcccgaggcactcttgcaggccttcttcggggcctcaaagagcgtgtggaaggtgcacttgttggccaactcgctgcacccgagtctgccgatatttagagtggagaaaggagtaaggtacgattcgggctgcagcgaggatatgggtggtggtggtggtgacaaggccacttccaacttggtccctgctctggtcagaataatgcttgcgccaggcttttatgtctatcgcagtgcagtcaagtgtaaggtcctttgcaggtacttgagtactagtagtaacaaggacagacgaaccttaaccccaaccccttcttgactttggatgaatcactttctttctggtgttgtttttttat

SEQ ID NO: 27257 - DNA, 290 bp, Glycine max
tactgatggtagatggcgagcagctaaatgattcatcagttataattgataagctgggacataagattctgtcaaagataattgtagattcaacttctgaggatgaagagacaaaatggcggcggtgggttgataatcatttggtacatgttctgtcaccaaatatatatcgaaatacatctgaagcacttgaatcctttgagtatattacgagcaatggcaatttcagctatcttgaaaaattttcggtgaagtatgttggagctgcagcaatgtattttgtgtctaag

SEQ ID NO: 27258 - DNA, 283 bp, Glycine max
cttctaaataaggctggtgcagctcttgaaaagtacaagatgacatgcagttgttgcaaatgaacttgcaagtcgaaaggagcaagtagtggttgtcactagtgccgagaaggttaccgttcagcgtgataatagtcagtctgataatgatgttgagaatcccctgattaaacttctttcggagaaacatgccacttacattgagtgattctggtagatgagtctagggaatgactttggcttctcctcgttacagttacagttctagacactacaactcatt

SEQ ID NO: 27259 - DNA, 281 bp, Glycine max
ggaaggactaagcatgaaggagccatacttttgtgacagaccgacaagttcaagcatcttctcttcttctgctcctccaccagaggctcccccaagtccaagtaccccacttcagcatccacatgaaaagaagacacagctatgtgttgaggaattagaagaggaattagaaaataaggagccaaaaaagcagcatgttagtgttacccttttggatctgaatattatctcaggtgaagatgataattcatgcactccagaaggaccagaactcaacctca

SEQ ID NO: 27260 - DNA, 324 bp, Glycine max
gttggctgtgacaaaacacaagttgaactccaattttgctcaagaaatacagatggacgtcttgttgaagatactagtttcgttttcttgcgtggagtattttcgccatgttcgcttgccagagtatatggagaccattcgcaaggtggttgcgggtattaagaacgaggatgcttgtacttcttttgtgaactccatgccctcttatgccgacttgacaagcagcccagaccagaaaaccaattacttatggtcgaaggatgaagtgcaaacggctcgcattttgtattacctacgagtgattccaacttccattgaatgttt

SEQ ID NO: 27261 - DNA, 289 bp, Glycine max
tgcaattacaattactctctgatcacaacgccatcgccaaagggtttcaggttgaaataagtgatttgttataatcaacatgtcatctccaagcaagagaagagaactggatgtaatgaaactgatgatgagtgattatacagtggagacgataaatgatggactcaatgagttcaatgtggagtttcatggtccaaaagcaaagcctttatgaaggtggagtctggaaaattcgggttgagcttcctgattattacccatacaaatccccttccaatggcttcgtgaa

SEQ ID NO: 27262 - DNA, 266 bp, Glycine max
attcacgctacctttctttctctctcctcttcactgttcatttccgaaattcaattttgatgattattgagaatcctaatttgcctgacctaattcgctgcgaccgagaaaccatcgaggcttgatttcatgtctggttgttccgatgaggaggagatttcgttctcagaatccgatcgtcaccgttacgaaggaggcagtgacggcgacgacgacgattccgaaatcagaaagaatgaacatcgcagcagcagaagaagaatggg

SEQ ID NO: 27263 - DNA, 258 bp, Glycine max
cttggtgtagaatatatggtataaactgtattgtggcatgaatgctgcaggaacttttgcccgatgcaacaattgagagtcctgaagatgctgtaatgaagcaacatatgagaaaagacgtacatgatctcctgaaaggcttgaacttaagggaaaggaaaatattatccctacgctttggccttaatgataaccagcctaggtctcttcaggacatagggacacttttcaaagttagcaaagagaggataaggaaga

SEQ ID NO: 27264 - DNA, 1272 bp, Glycine max
atctgcctgcgggtactggcttctcttatcccaaaacagaacgtgctgttcagcaaagtagctctaagcttgttcgccatgctcatcaatttattaggaagtggctaattgatcatccggaatttctctcaaatgaagtctacattgctggtgactcatactgcggcattcctgtcccagttattgttcaagaaatttcaaatggaaacgaaggtggtatgcatccatggatatacatccagggatacctgctgggaaatcccataacaacatcaactgaaaaaaactatgaaataccatttaatcatggcatggcattaatttcagatgaactctacgagtcactgcaaaagaattgtagaggagagtatcgcaacatagacccaagaaacgcgttatgtctaagagacatgcaatcgtacgaggagtctatttcaggaattgaaactggccatgttttggcacccctttgcgacgagtccgatctgcgtaatgatatggaagtcacttggagaagaagttctcttgctcataaaacctcagcgtttttcagtcctcgtctcacattgccacccttatactgtcgatctcatgcatatgtcctctgtagctattgggccaatgatgataatgttcgcaaagcattgcatgttcggaagggaagtataggaaaatggacgcggtgtaacgatgacttaaaatctaagtttaatgccgatatccctagcagcttccaatatcacgtaaatctcagcagaaaaggctatcgttcattaatatacagtggggatcatgacatggtagttccattcttggctactcaagcgtggataagatctttaaactattccatcgtatctgactggaggcagtggtattacgatggccaagtagcaggttatacaaggacttactcaaatcggatgacatttgcaactgtgaagggtggaggacatacagctcccgagtacaaacctgaagaatgtttagccatgttcagtagatggatatctaatatgccattgtaggaatacccgactgagtcaatgtgatacaatgctacggggcaattgctttatcctaatgtcatgtcaagaaaaactagcaagtttactggccattttgtcattcagtgaatcaatgtgtatttctctcattataacaggaaagctgttggtttttagggaataaaggcagtaaaaaaaacaaagaaataaaattctggagaatataaatattttgagaaacagattgtgggagttcaatttattc

SEQ ID NO: 27265 - DNA, 313 bp, Glycine max
atcaaatcaaattttgatattaaaggattcgatcgaagagagtgaaggatgcccgagatggatgagcgcctggttatacagcaacctctttcagccatagcagaggcgtttgagaaactgtccaagagggtgaaggagaggaacaacggcaacgatattcgcttggacacgttctgcgaggcagcgtctcccgtctccgttctcgtccgtctcttggcctcgccttcaaatacgctgaattggaatacgtcgccaagctacatggactattggaagcatcaaagacatgttccactctacccgatattcttaa

SEQ ID NO: 27266 - DNA, 1037 bp, Glycine max
ccattgtgtaaggcacatggtggggggaagcgctgccttttcaatggaggtggcatttgcccaaaaagtgtgcatggaggcactaacttctgtgttgctcatggtggtggaaagaggtgtgctgttgcaggttgcacgaagagtgcacgtggtcgtactgactgttgtgtcaggcatggtggggggaagcgatgcaagtttgaaggctgtgggaagagcgctcaagggagcacagatttctgcaaggcacatggtgggggaaagcgatgtagttggggagatggaaagtgtgagaaatttgctaggggaaagagtggactctgtgctgctcacagcagcttggtgcaagagccggaaatgaacaagggcagtctgattgcacccggacttttccgtggtcttgtaccttctgcttccacggcctgtagcagttttgagaacaattcttcctcaggcgtcagtgttctgtccgactcctacgattccgtggaaactccagcaaaaagacagcacctgatacccaaggaggtgttagttccgctctcgatgaaatcaccgtcttattcaaacttcttggctgccaagaagccagaccaagacagaaactgccaaagctcggctgctggctgcagcagtgctcagaaaggcctcgattttaatctaccggagggcagggtccacggcggcgacctcatgttgtattttggagggaatctcaaaaatgcactcgacggcatctgaaatgggggagggagcctggtgtctcgcaagttgtagattcattttagggattagggaccatttccatcatggaattgtgcataaggctttgttgctgcttgttcaataactttgtgtatagttgggtgttgattattattagccattaggctcttattgttcgtagtgctttgtctggctttcattattcaatgtataaggtggcaacgttcttgaaaccaaccaagtccacttccacaaacagcgtcattctaagatggtggacttgctgcaattgaatgaatcattgtattctt

SEQ ID NO: 27267 - DNA, 345 bp, Glycine max
aaaagcgcaatgttgttacttgttgaaatcgaaaaagtaaagtgtttccattgaatcaatggggttatgggaggccttcggcaattggttacgcagctgatcatgacaatttatctgtctctaaatgaacttcatgacttgttgagcaaaccttctttaagtgggattcctatgcttattttgggtaataagattgacaaacctggggcattgtctaagcaagacctgacagagcagatgggactgaaatgcatcagtggtagagacgtttgtttcttcatgattctctgtaacaactccatctacattgatacaggtattgattggcttggaaaacattctaaa

SEQ ID NO: 27268 - DNA, 421 bp, Glycine max
ctcgaggtgaggatatcacttggttagaggagcattgccaaggacagatctccaacaggaaatgcttgctagatcggttattgaaatcggcttcagtgacaaaagaacttcaagaaaaggattttgaacaaaatgctcttgacaaacttgtgatgatggcttatgagaaatacatggctagccggggtcctagctcatcaggtgggaaaaatgcaagcaacaaaatcgccaagcaagctgcattgggatttgttaaacgaacattggaacgatgccaacaatttgaagatacaggcaagagctgcttcaatgagcctttgtataaggatatgttccttgctgcttcttcccagctaagtattgttcggcaattagatggcatagaggctgaatccacaaaaccttgtgcttccttttctct

SEQ ID NO: 27269 - DNA, 279 bp, Glycine max
cttgtcattcaacaatgacaggaccttgaatcctagtatttctggaactgaacaagtttctcagtgttctactcaaagagctcatcgattatccacttgttcagaagagaagatctatgaactatctgtaggttgtgtccgtggcaaatacaaaactgacaaatcaaaagccactaagttctcaaccgttgacagaacaccaagatctagagcagttacggtttctgccactaccaaaaggcatacaatagcaacatcaaagacaacccattctggtcc

SEQ ID NO: 27270 - DNA, 406 bp, Glycine max
tgactgcccacctgtttttaaatctatttgtttgttgggaagtgaaaggcaaaggccaaccagtgcagccccagaggaagctgagtacaatttctggcgtaagccgtgctgtcctaaatgcccagatgttaaaatttctcctgtaatgatagctaatcaggtcaaaaggcaagcagagaggtttattttaatgtactacagaggtttactagtgtgtgatgatgaaacgtgtaagcatacaacgcgaagtatcagccttcggttggttggtgattctgagagaggaactgtttgtccaaattatcctcgctgcaatgggcgtctagttagaaagtacacagaagcagacttgtacaagcagctctcgtatttttgccatgtgttcgatactgtttcttgtatagaa

SEQ ID NO: 27271 - DNA, 428 bp, Glycine max
aaatagattaattttgagatagccaaatgaaaatgggcatcgtccaaagactgtgttctagttggagtaacgttttcagattgggcaacaggaacagttacagttcttttaataaatctgttgatcccacaaacccatcatgttccagttcttccttcctcacgcatggaatccacgtgtttcaatgccccgatgcggttggaattgtagccaatctatcggattgcattgcgttgtcgggggggcaacattctctctgctgatgtttttggacctcaaaataaacgagtcttctactccagaaatgtttttgtttttgatcctgtcatgtggcctacaatgcagatggaggaggatttactaaggatctctataacattcaatgccatgagatctgttataagggtgccagctctggatcctaaata

SEQ ID NO: 27272 - DNA, 544 bp, Glycine max
aacaaacacaaaagtggaaggacctcgattctcccaagtgaagccacgtcatcacggtcaaggcttttgaaccctgctggctcctctattgtgctccctctttatggcaacgtttatcctgttgggttctataatgttactctcaatatcggtcagccagcaaggccttattttcttgacgtggacacgggtagtgatctcacatggctccaatgtgatgccccttgtacccattgctctgagacaccccatccactccacaggcccagcaatgactttgttccctgcagggatcccctttgtgcatccttgcagcccactgaggactacaactgtgaacaccctgatcaatgtgactatgaaattaattatgcagatcagtactcgaccttcggcgtgcttctcaatgatgtctaccttctcaactccaccaatggagtccaacttaaagttcggatggctctcggatgtggatatgatcaagtattttctccttcttcttaccatcccttagatggattacttggccttggaaggggaaagg

SEQ ID NO: 27273 - DNA, 310 bp, Glycine max
tagagaatctttagcgtatcatggttgtgcagaactgttccaggatgtacataccgaacttattcaacacaaactatgacacgtgataaaacgtgggattgtcaaggggaagctttcagtcaactcagccgaagaaagactaaaaggctcctgtcctataatgcctcaggaggtaagaaaatatttttaaattttagatagtcaaattgttcattgtcaatgaattggttggataaacttggcaaactttggtcattcacatttgttgccaatttatactaatgccatatatttagagagagagagagag

SEQ ID NO: 27274 - DNA, 533 bp, Glycine max
tcgtattcactagaaagcatgaaacttttttgttttttacagggacagaaaacgagggaaaaaacgttgttggcctttctcggttgtatgtatttgctgctgcaccgttcgagagctcgccctttcccttagctgctgagagaacacgaagaaaagaccctcttgatggcttcaataagtacatttatggatggaatatcactagcagtgattattgggcttctgtggcatataccgcagctcctttgttcagtattgcagcagtctggttcttgggctttggcttatgcttagtgatcatcggtgtttgctacttctgtcataaaagagagccatatggtgattcaccaacatgctatgccctttcccttattctcctgatattattcacatttacagcattgattggatgtgcagttctctacattggccaaggaagttttcatcatagcatgacacatacattgcagtatgtggtacatcaagctgattctactgtggataagcttaggaacgtgtcagattatcttgct

SEQ ID NO: 27275 - DNA, 327 bp, Glycine max
ggaagttacagaaatatcagaaaaacaggaaaccaaaagtcgccctgttggtctaaacacagtgaatcttctgaaggttgcttcaagtgctcttggatttgggcctcagatggctatgcaactagctgaacggttgtatactcaaggttttatcagctatccacgcacggaaagcaccgcataccctccctcatttgactttcgtggtgtactctctgcacaaacaaataatccaacttggggtaattatgtacaagggctacttaccaatggttatcaaaaacctccattgggaacagatgtaggtgaccatcctcccattactcc

SEQ ID NO: 27276 - DNA, 666 bp, Glycine max
cttcctcatttaccaagtttttgctttgtggtttgcagaagtaaacgaggaaaagggcatggaaaatcatagtattttgtaactaaatgcttttgttcttgtgaattaattttcattcactttcagatttctggtttcatcatctattcaaatagcttccagcataatattttgaatttgactgctaaggaaagcccccatttttctgagttgtaaagtggcttatattttttgagctgaaagtatatctggaatcaaggattgtgtgcttagtcgaccagacttgctatctcagcaatttatgtgagatccacggggcaaaaaaaggagcaacttggccttatactattcatcagatgtctgcattctggagctgaggaaatgggttcttgcgtctcaacaagcagtaggagtacttgtagcagcaagagcaatggagacatggtctctccatcttgcttagaaactggatgctgtggccaaaagagaacaaggagaacattctctgatcatgttatttctctccaccatttaccatccttacctaacagaattttcaccaatggaaagagccgcagttcatgcatatttacacagcagggccgcaagggtattaatcaggatgcaatgattgtgtgggaggatttcatgtctgaagatactatc

SEQ ID NO: 27277 - DNA, 396 bp, Glycine max
tatggctcttctgtctgttctgcttttgcaatgaatgcagcatcacaacgcttatcatccacactaacctttccttattaatactcaaaccctctctttctttcactccctttctctttatcttcaacctctcactccaactctcttctctgatccacaaccttaactttctgcattctgagaaagctggtttcatcatctattcaaatagcttccagcataatattttgaatttgactgctaaggaaagaccccatttttctgagttgtaaagtgacttatatttttttgagctgagaggaatatttggaatcaaggattgtgtgcttggttgaccagacttgctatctcagcaattgatgtgagatccacggggcgaaaaaagaagcaacttgg

SEQ ID NO: 27278 - DNA, 310 bp, Glycine max
caagagtaattgaggaggagatgtttgggcttgacaatttgtgttggatctctgcaaaggcaacattagaagcttcaaagcgtgcagagtttttaattctgcagacaggcatgactgcttttgggaaagcatattacaaaaactatagtgaccttgtgcccagtcttgcaacgaagcttgaagcacttcgagatcgagtatatgcgttatgctacagagaagtgctcatctgtgctaaaagagtaccatttggctgttgagacaatcacagatattttgcttgaaaaggggcaaatcaaagctgaggaga

SEQ ID NO: 27279 - DNA, 271 bp, Glycine max
cctcgagccgattcggctcgagacacagaccactttccttgaccctaccaaagtgaagaagcatcagggtgttcttgggggaactggctagagtactacttatatgtgttcatggatagttttttattattttgctcaatttattattattccttgtgtttgtttcaattccttagacttgtgcaggtctcatggtcattgaattattatgctcgtgtcaatgtagagcaattaataaatttgcatgctttatttgtcttccaaaaaaaaa

SEQ ID NO: 27280 - DNA, 250 bp, Glycine max
cgacagtgataaatgggaggatgttctagataaaagacaccatcatctatgctacagtgtgaaatgctgcaagcctaagaatggtcccctgaaatatttgagcaagactgtgttcaatgacatttcatctgagatgctaagaaacttctacatggacaatgattacagaaagcagtgggataaaacactggttgagcataatcaactgcaggtagacaaatctgatggtactgaagttggtcatacaatt

SEQ ID NO: 27281 - DNA, 269 bp, Glycine max
caagatgatgaggcaaagaagccacactttgtgagaatggaagaagctcttgagaggctggaagaagtgttcaacaagtgcagtgaaggaagggcttattttggaggagatacaattggaattattgacattgcttttgggagcctttggggttgggtgagagtgatagaggagatgaatggaagaaaagtgtttgatgaagcaaaaaaccctgctttggctaaatgggctgataagttttctgctgatcctgctgtgaagggtgttct

SEQ ID NO: 27282 - DNA, 1074 bp, Glycine max
ggctgattccacagacacacaccgctttactattatgcaagacccttctcgccccgcccctcctcccttctaccaccaaaacggcggccagcctcctccccccgccgcctccgccgccatcgccaccggctacccctacgcttgcccaacaacaatactacaacaccacttaccctcctcctcgctcctacgcctcccgctccttcttccgcgctttcttcgccaccatgatctgcctcgccgtcgtcttcggcgtcgtcctcatcatcacctggctcgtcctccgcccctccctcccccacttcaccctccactccctctccgtttccaacctctccagcacctcccaatccctctccgccacgtggcacctctccttcctcgtccgcaacggcaacaagaagatgaccgtctcctacaacgccctccgctcttccatcttctaccgccaaaactacatctccgagtctcagctcgctcccttcaggcaggacaccaggtcccagaccacactcaatgccaccctcaccgccgccggcacctacctcgagcccaaactgatcgacaatctcaacgccgagaggaacgccagctcggtcctcttcgacgttcaggtcgtcgccgccacctctttccgctccggctcgtggaggttcaggacgagggttctcaaggttctgtgccgcaaagtacccgtcggcgtctcgtccaagtccagctccggtgatttggtcggcggagatcgggaatgtcaggtgtggacgtgaattttctgagggtgatgtttttcaaaaccctaggtttggtaatggggggaaatttaattttctgattttattatatatagttaattgatgctttcgacggtttatatttatgcgatttggtttaggtttcaatggaattttgttggtagtttatatgattgtatatagttatcagcaaccttatattgtttgcttgcctttttagagcactcagtggagatttgaaactttgttagtggaaaattggccattgtatgttaattggaaatggagacaaaaaaggaggcagatattcatatttatttgg

SEQ ID NO: 27283 - DNA, 229 bp, Glycine max
tgagcatgttggcaccaagtcgaaagcgcaatgcattcttcatcttctccgggtacccggagatgatggaaagttggaaaatatcaatgtttcaagtttgtctttgttatccaatgtgaagaatcaagaggatattggaagattgcattgtttctcaaatggagattcttcaggacctgtgcataacagccaagattctgatggcaggcttcctttcacaaattctggg

SEQ ID NO: 27284 - DNA, 214 bp, Glycine max
caaatagaagttaccagacagccttctcctccacctgtacttgctgaagtaaaagatttggttcctgcagtgttatctcatgttaatgaggaaggatgtaagacagagattctaacatcagatagtattgttcgtgctgagtctccactgcaactacacatttcaacttctatgatggagagttttatgaagcttgccaagtcaaacactgata

SEQ ID NO: 27285 - DNA, 285 bp, Glycine max
attttccctaaattaattgcttcattgcgtcagtgttctctgttcaattgctaaccgttaatggcctttgggagtttcgtgtaataactctggcgcgatgtctctgaatttcatgaaacgattcttctcattttgtcgctctgagaggtttaacccttgaatttcctatatatataaatactttattattgttattggtttctgttagaatgtggatttaagcctaactcaacccaaaagtaagctcacagcgtaaggcagcatggtaacagtaggattagagtt

SEQ ID NO: 27286 - DNA, 417 bp, Glycine max
ggtgtttatggtgttgttagggatgttttcctcccttggtataatgcatatcggttccttgttcaaaatgcaaagaggcttgaagctgacggtctagcaccttttcgcccctttgatcaggccacacttctgaactcatcgaatgttctcgatcaatggatcaactcagccacccaaagccttattcattttgtccgacaagaaatggatggttatcgcctttacacagtggttccttaccttctgaagtttcttgataaccttacaaatatttatgtaaggttcaatcgtaagagacttaaaggtcgttctggggaagaagactgcaggatagcactatcaactctttaccatgtgcttttgttatcctgtaaagtgatggctccttttacacctttcttcactgaggtgctctat

SEQ ID NO: 27287 - DNA, 533 bp, Glycine max
catttgttcaagaaactaccaagtagcaagcttgattattattattattattatcattatcccattgagcttctaaaaatgtgcaaaggtgcagaaggagaaaagcaacatggtttctgcagcagctatctacataaagaatgtgcaaccagaagtgctacatgttgtgagctatgtgggttacaggcttcattgtattgtcaagctgatgatgcatacttgtgtagaaaatgtgataaaagggttcatgaagctaattttttggcccttaggcacattaggtgctttctgtgcaacacatgtcaaaaccttacgcgaagatatctcattggagcatcaatagaggtggttcttccagccaacattaactggaccattggaaatctccctagcaacagaggaatccacagaaagtgctcaagaatgcataacaacctttccctcttgttataacttccatctttctttttttctccttagaatatcttctgtaatagacaaggttagtgagtaccatctcaggtacataggga

SEQ ID NO: 27288 - DNA, 439 bp, Glycine max
ctcagccactgagggattcagcgttaacctgattcgaaaaaactcttcccatgcccatgtcctccattagacgacgtagagggaggacatgggcatgggaaaaactcttactccacaatccccaatatatgcttacttggtcactatctcatggagctctctattggaactccaccattcaaaatctatggcattgcggacacgggcagtgatctcacatggacctcatgtgtgccatgcaacaactgctacaagcaacgtaaccccatgttcgatcctcaaaagtccaccacgtataggaacatatcatgcgactcaaagctatgccataaacttgacacaggcgtgtgttctcctcagaagcgttgcaattacacctatgcctacgcatctgctgctataacacgaggcgttttggcgcaggaaacaatcacactca

SEQ ID NO: 27289 - DNA, 533 bp, Glycine max
agtgcactgaggtttggttggtttttcatgctctacttgcttcatattggattttgtatctttgctgcaattgcacctcccattgtttttcatggaaaatcattaacgggcatccttgctgcaattgatgtcttctcagaccatgtattggttgggatattctatttgattggatttggcatgttttgcttggaggctcttctaagcttttgggtgcttcagaaaatatacatgtatttccgggggcataagtgagactttctcctcaggattttgctccgggcttctataatgtctgtcacttcacaatgtggctcagcatattctttttgtctatcctcatttttctcttacaatatctgggtgtgatattggtcgtgttctttgtagttaccagtgtttagtttgtactatacagtataatgaattctgtgaagttcagtatctctacttgtgtgtttccctccagtgaaaagaatatttgctttcgattagcagatatatagtgaatttccaatgaactattaatttaa

SEQ ID NO: 27290 - DNA, 380 bp, Glycine max
agcacagaaggataaacatttgaccaagcctgaagtgggtcattttagggctcaaggagttccaatgaagaggaagcttaaggagtttccagtgacggaagatgcactacttcctgtgggaacatcacttaatgttcgccattttgttccaggccagtatgttgatatcacaggaataacaaaaggaaaaggttttcagggtgtgatgaagcggcatggatttagtggagggccagcatcccatggtaattcattggcccatcgaacacttggttctgtaggtcatttaactagtcatgggaaaggtttttaaaaataaaaagatgcctgggcgaatgggtggagaccaaagaacagttaaaaatgtatgggtctacaaa

SEQ ID NO: 27291 - DNA, 518 bp, Glycine max
atgatatttggggtttatatcgtcatattctaaggcagaataacattccaggaagtcttgggattgcaaggcagcatggttttggtgaaattagagtggaatcgggctctgaccaagctattgggtttgtgctagatggatgccctacatctacatctacatctacatctacaaggcagcattgtttcccactctctcaagtcttgaaagctctaacctctgctacaaatagttcatacttgttttacataccgtacaatgctgctgctgattcctttgccaaattcggtttatccatgaaacagcaggccgcgtcaattttttctgcatgtccctccttttgccaaaattttattggaaaaaaatatagataaatgttaaataaataagtacctcaatataatatttatttcttacttttttgtttagttttagatttgtccttacaagttccactatataaacaattgaatgatatttatgtaataaaatatattaatgattattgaagtagtatc

SEQ ID NO: 27292 - DNA, 380 bp, Glycine max
tttcacttcgagaaaaagaaagacagaaaggttttgcgaaactcttccttctccccccatcatactctcattcattcacatttcccagttctgaaaaaccctaaatcagtgttcctcctttctctcgccggaaaagcacctcgggatgaggaatcgctgtggctggtttgggtgacgtggatcgaaatgggtgtgtggcaggcacggttgttgtcgaccaacctgcttctgttgcaccctaacgccatacacggtgtgttggagatccacgacaacaacaacaacaaagtccgtgtcttggtcggtgatttgctgcgtaatgctatttgggctgggcctcatatctctcttaacgggccacgtggcctctcatctcgaat

SEQ ID NO: 27293 - DNA, 271 bp, Glycine max
accgaatctaagtgtaaactgtacaccacaaacaaaagagagtctctgtctctttcattcacatttcccagttctgaaaaaccctatatcagtgttcctcattctctctctcgccggaaaaccgcctcgggatgaggacccgcggtggttggtttgggtgacgtggatcgaaatgggtgtgtggaaggctcggttgctgtcgaccaacctgcctctgttgcaccccaacgccaaacacagttgttggagatccacggcgcctccgccgctg

SEQ ID NO: 27294 - DNA, 283 bp, Glycine max
cttttgagcaaggtagtttttgaggcattattattactggtgccgctgagtcaagctgcaacagcagcgggggtcgcaagagaaaggttctgatggcgctgagaaggttattgttgccgttaaggcatcacaggaaattccaaagactgctcttgtttggtctctcagtcatgttgttcaacctggggattgcactacactactagtggttgccccttcacaaagttcaggcagaagattatggggttttccgagatttgctggtgattgtgccagtggtatt

SEQ ID NO: 27295 - DNA, 250 bp, Glycine max
gcacacaattgatatcatcaatggcattctattgctagccattttctcctttcgctaattcttcttctacgctctctctgcaatagatgccttccaaggacaaaatcgcttacttctacgacggtgatgtcggtagtgtatactttggggcgaacatccaatgaagccccaccggctttgcatgactcatcatcttgttctctcatacgatcttcataagaagatggagatttaccgtccacacaacata

SEQ ID NO: 27296 - DNA, 399 bp, Glycine max
gtttacattacactgaactgcggactggtattagggatggacttccaacagatttagccaaaccattatatgttggacaacgtgtaattgctcttcatccaaaaacaagagagattcatgatggtagtgtgcttaccgttgactatgacaagtgcaggattcagtttgaccgtcctgaattaggtgttgaatttgtaatggacattgattgcatgcctttgaatccatcagataatatgccagaagctctgaggaggcatattggttccccaatagcctctttcatgaataaagagccacaaattagtggaaattcaaattttggggggtgcgaaatgaatcattcctcacccgtgaaggcaaaggttgctaccgttgataatctctgtgcacaagcag

SEQ ID NO: 27297 - DNA, 389 bp, Glycine max
acgaggttatttcggattgcgggagttgttcttcctatatacttcatggttagagcagtggcattaatccagcggcatcggagacaacatcgagagcatcttaatgcctcggccagttcgtctgacgatgaaagcgagccagcagatttgcagcctcagcctcagcctcatgtcatacgtgtactgtaaaaatacagtagccagtagccacctgaagtaaatgaattatgaaaagctcttgccttgagatgctgcactttgtcttctgattttttatgtatattagatggggacaacttccctgagaacctcgagtttgctaagggatgggaacactgaaattcagatgtgcaacagttgttgtagctctcataagaagaagcattgca

SEQ ID NO: 27298 - DNA, 362 bp, Glycine max
ttctgcttcagcagagtcaggttcaggaatactgcagacacctaaccatgttgcccagcagtggcaaactgataggttaggcgctggttcaagtgccttggatcaagatcgtcctgataaacttgcagcttcagcacagtcactatcaattcccctagtagctcagcagtttcttccaagttctgcttctcctggtgcctttcctgggtccatggctataccatcttctgttcaaccagctaaccaagctcctggtgctcatttattgccccttccttcatctgacacccctgaacagttgccaccatatccattattcccacctggcctcattcctggaatggttagaaagatgcagattg

SEQ ID NO: 27299 - DNA, 320 bp, Glycine max
tttggtcataaagactacttctaatccttatgtgacacggtggaaattggtaatgatttctatctgcttggccctgattttggcagttaccttgaggcacaggctgctgccgataaagcatttgttgaacccagagaagtggatcaagatgagtatccttagtgttgctggctctgggagatttagcagtgcacagaaccattcaagattatgcagagaggacatggaaaattgatccctgccgatgccctctctgatctcattattagaaattttagttttgtttggggaggccagaagaaaagggacaatgaaaattg

SEQ ID NO: 27300 - DNA, 455 bp, Glycine max
tctttccacgcgtccgcccacgcgtccgcccacgcgtccgcccacgcgtccggaaaaacatggatgatctcccaccaggttttcgattctacccaacagaagaaaggattagttttcttctatctacacaaccagcgagagggccaaaatacacgacacaagcagagtcattccagtcattgacatcaatggcgtagagccatggaaccttccatgtactactacatgcataccactttaattctttaattttgttagttgttaccactcattctttagtatgtttcaaacccaaatgagttttgctaaaatggtttggtttgttttgttgtaatcagcacttgcaggggagctttgtcgtggagacacggagcaatggtttttcttttcaccgagacaagagagagaggccagaggaggcagacccaacagaaccacagcaagtggttattgga

SEQ ID NO: 27301 - DNA, 283 bp, Glycine max
aagatagagcagaatcatctgaattgcagtcattttctgattctctgcggtccagacttaatgcggtgtccatgagatacaaagagtcaatctcaaagggcactaggggatggaaggagaggctgttctcgcgtagttcttccatgtcagaacttggttcagaaacaaggaggagagagatgaatgctggaattgctagtgtatcccgattgatggaatcccttgaaactagtgaaaataatagagctgtgggtacttctttgtcaaatcaaaatcatataga

SEQ ID NO: 27302 - DNA, 602 bp, Glycine max
gttctcatcaatgtaaatccaaccaaagaagagctttcaccagagtttctccggtggttgggagagaggaatctttcaagtgatgaccgcatcatgcggctggaagaagggtacatcaaagaaggcagcacagtaagtgtaatgggagttgttcagaggaatgagaatgtgcttatgattgttcctccgccagatccaatcactactggttgccaatggaccaaatgcatttttccaactagtcttgagggtatagttttaagatgtgaagatgcatccaagaatgatgtgataccagtttaacagtatgtgctatgagaatgcttgtagcatcttctaattggtgttcttagatagtattcttttcccctccattattagtgggggtggaatatcatagtgccaaattatcatagattaagatggcaaagttgtgtgggcgcgccccttatttttcccctttaaattgttgtatagttcgggttgttttgatgttcttctagggtttgttaatgtttggggcagtaaaatttcttacttgtacgagcatattgtcattacgctaacatgctaaatagaatacaatcttttttgtgtttgcc

SEQ ID NO: 27303 - DNA, 265 bp, Glycine max
gtttttgttgctgaggtggtgaggaagaagatataaaagttagggtttcttgtgattgagatctgagtagagtagtagaagaagaagaagaagaaagggcagattgatgggagaacgaagaagaatcagctctcctcctctcccgcagcaagcgttcttcttccacattcacttattgccttctcctcttgatcgcttccatgttcctcctcgccgtctacttctcctcctcagcaaccgccaagctccaccaccccgtggtgat

SEQ ID NO: 27304 - DNA, 435 bp, Glycine max
  unsure (1)..(435): unsure at all n locations
ccgctcccattttcgctctcttccctctccctctgctgcgccgaaaaccgatacgacaccgctcgccgttgaatcttccacgacacgtttcgattcattctcgatgacgtgttttgattggtaaagtacgcgcggcgaaacgaggcatggcgaaagtggctaaaccaagttctgtgccctcgagctcccaccaacttggctccggacctttgaaaactggatctatggctagaaagaagacaccgtcagaacttaggactcggcgattaaggtcattctatgatgttgataatagcccagaatctttgctggcttttagtggcaacaacaatgtacatgctntatatgactntntactaaantacagtttttgtgacggaacctagctcaattggctggaatgttgccttanatcaacttgtgaaaagccagaat

SEQ ID NO: 27305 - DNA, 671 bp, Glycine max
atgaaatcctcgtgcgttccgcagcttccttttttcttcctttttctctccttgttacactgctatttcttcgttctttcctttttaatgctattttttacacttatacgcgttcaacagcaaattaaaactcattcatcttagttattcttgatcctcaaagttcacaacttattcatagaacagcacttaatcaagaaggacgttacctcggttaatttcattttctagattgcttatcagtctccaagttgagactttctgagtcagtacacttggatcactacctctggcattggcagagtattccttcaaaggggtaattcatcgtccaaaaattgttggggacaccttgtctttcgagggattgtttgctctacacaaggaattaaacgttatagaatttagtctgcagagaaatttgcaattctgatcagccacattttacctcacttacatccagcatcccaacgatcctgcaacattggtaattacctcatgagattgaggcgtgatatctttgtgtgctgtttcactagcacatcttcagacacaatgcaaaaggaaaagcacagtaagttgaagtggcaaatctttccctacaaggaacttagaaaagccacaaataattttgatcgatttcatttcattggaaagagaggtggaaagac

SEQ ID NO: 27306 - DNA, 241 bp, Glycine max
tgaaagcacaaagcaaaggtcgcagctgctgctgaatctggtttaacgcaacgcaacattctccatcaaatcaaatcaaagttccagatttggtggcaacccataatagggacaacaaatcgcctcctcctctcccaccttcttcttcccgttacgtgaaatcggaacaacaagcttcattatcagcatcgtcgtcgttcagccacgacgacataagcggaatgccggagaatccaccgaa

SEQ ID NO: 27307 - DNA, 274 bp, Glycine max
cgtaggattagatgcattaatccatagaaagtaagaccaaagacaagaggccttgaatgcacagtcacagggtgttaaatggggagttgcatcagcagtttaccgtccttgaaagccatacagtgagggttgtctggtgtcttcacctccaccaccagtcaaatattatctatattttcaaactaaaagaattttctctaaaccccataaaacacatactaaaaagaaaaggagaaactctttcctcttattattcagaaggcaagtgtgtttt

SEQ ID NO: 27308 - DNA, 267 bp, Glycine max
ccttgatgaccagtgttgaccattctatgccaaaattgagggaggtcaaactgtaccgaggctgttttgttcgaaagatgtggtcatgatcatgatcttctaggtagtttgcgagtctgttttacttcatgaagtccatttgtgggtcgtagcttgtgtttctttctttttgagtttctgtaactagtggaacttgtatggtctgctgaaataaattatcgatgactattagtagctagaactactcctatgttttatctgaagtgt

SEQ ID NO: 27309 - DNA, 701 bp, Glycine max
taattttccttcagggttcagattttacccccaatcaatgtttctccctctaactttttaattgaatttaatgtttatattgttttatcttctcgtacaagcactatacagagcaagctacgaaagtttcgtgttcttggcactcacaacaactacccccaagattcagaagttgaagagaagagtttgattatcaaattgaagttcaaatccgttttgggtggctattatttcagcaagtttgtgtcatcatcatcatcattcatcaataaacatgtcaaccaagtttggaagattggtgcctttggttttttccaagaggggattttccacctccaccagcgttcaaaaggtggtggtggttctgaggaaggtttgaaatcattgaacctctgttctgcaattaatcaggctcttcacattgccttggactctgatccacgttcttatgtttttggagaggatgtaagctttggtggggtcttccgttgcacaactggattagcagaccaatttggtaaaaagagggttttcaatactccactctgtgagcagggtatcgtcggttttggcattggtctcgcagctatgggaaatcgagccatagcagaaatccagtttgcagattacattttccctgcttttgaccagattgtcaatgaagctgctaaatttagataccgaagtgggaaccaatttaa

SEQ ID NO: 27310 - DNA, 263 bp, Glycine max
cttggcttttgcagcaatggagatcaacccccatctctaactcaagcgcaaatgccactctcaacaatcaggatacggacaaggcaaactggggatggagttggttggaacgttggatggcagctaagccatgggagagtagattaatggaacaaacccatcatgctaatgccacagagaagacccctcctcctccgccaaagaaatgtgttgactcctcaaattcaaaaacatcagaaccatgcaatgtcaaaatcagaaag

SEQ ID NO: 27311 - DNA, 566 bp, Glycine max
gtcaaggaccatgtttgactgcataattaacgaggaacagaacagaacagaacataactgcaaagtgtttgaactctgtttcaatgagatgcaactgtttgaactcttgtgttcgattcaatgcaactgtttgaactctgaatctgtagattgtttgtagtgtgccaaatgatatcagaatggagacttgtaccgtgaaaggaggctgccccagtgactacatagctattgccctatccattctttccttcactgtgcttctcttatggtcaatttttcccttcctagttcacaaggttcctcgtaccaaaggcagtggcttctggttacctgttattcaagttgttgccagcttcaaccttcttctatcgattgtgatgtcaaataatttcttgaaaatgggaaagagacattggttgcggtcatgctacctatggggagtctgggttgaaggtccactagggtttcgttccctgttgagctgtcgcatcccacaagcttcacaattatattttatcttcgtcacgaggcgtttaccattgataagatcatatatttttcttcca

SEQ ID NO: 27312 - DNA, 319 bp, Glycine max
caaggagcagcggtggacgacttcactgcagtaggggggacgagagggaactgcaaatccgcaattctctctcccgataacatcgcatcacaccatagcctcctttgcttcttcggaattcacactgcaatctaatctcttgtccatctaaagatggtagaatatgcttcgagaacaaaccttagctactgtcgagattatgacattgaggaggactccatggatggcatgcctttaaaaagtgatcctgaatgctatgacgatgatggccgtcttaaacgaacagggaccatttggactacaagctcccacataataa

SEQ ID NO: 27313 - DNA, 396 bp, Glycine max
agaggccaacttagcagtttgattcaatccatattgccattgctttctgctagtgttagttgataatcgtttcaatttgattacccccgctactccttttatccatttcagctgattgtttgttttagggtagcatttttatcaattagcatccaagggtttttggtgattactatttacgtagagatattttctattgaatagagacaaattgcttggccaaaggaaaggctagttagagatttaaaaattcgttcatatatgtatgtgtattcgaagttgtggctttgagacttgtactaatctcaacaaagaactggaaacttgtgtattggttaataattaattaaatgtcttccgagttgactttgagaaaaaaaaaaaaaaaaggggggg

SEQ ID NO: 27314 - DNA, 354 bp, Glycine max
aacaaaaggcattctcatgctccatctgtgtctgcatctgcttcaattacagctttacttgaaaagctccgcagaaacagaaacaccaaggtagaaaatcatgggaatattgttcatgatcaagaaagggatattgtggcagaagactggaaccagggctgtggcttaaagaattcccctaacttttacaaactcacttctatcattgatagggctacaggatcaccaagtttgactgacacagaaccatatgttatgaaactaactgaagatcaaatggcccagctgctttctgccttttggattcaagccaatcttcctgataatttaccttcaaatattgaagctatggct

SEQ ID NO: 27315 - DNA, 345 bp, Glycine max
gctccaatattccagttgggcacttctaaaactgcacaagaagaagaagcttcaaccccaggaataagcacggtttctaaaatgttttgcaattttcacattattcttctaattgctcttgcacttttggtacaaatatcatctcagcttggctccaaggtagaagtgcttcctggctttgaaggccctcttccttttgaactggaaacagggtacgttggattaggagaaaaagatgatgacatgcaagtgttttactactttgttaagtcagacaatgatcctcagaaagaccctcttatgctttggctaactggtggtcctggctgctcttcattttcaggt

SEQ ID NO: 27316 - DNA, 285 bp, Glycine max
ctgaatcctcctctgcctccgtgcaaagatttcaagactcatcaaacagctggggcaacctgagacacactcgctcatccaacaaaacctcatggccaacgtggaaatcctcgttctacttgttgcagcggcattattaatgccattgcgacacaccacagaagctgcagagcatgttgtgggtggttctgccggttggattattccttcccaaggagacacctccttatatacctcctttgcagctaataacactttcagactaaacgacatactcgtgttcaa

SEQ ID NO: 27317 - DNA, 453 bp, Glycine max
ctttgagccacacacaaaacatagggagaatgataaaggctcactttccgcactctcagtttattgtggtttccttgaaggaaggcatgttcaataatgcaaatgttcttttccggacaaaatttgtggatggtgtttcaactgttcagcgaactgttgcagctacacaaagcaaatgatgtgtttgcttcaccgatctgttacaagtcttgcacttgtgttcatcttcagggaacctagaaatgtaggtaatgcctgtaatttaaaagcttttatgtaatttgaacatcagtgtaaaggtccatatgtgatagtgttgtttctataaagcaattttagaagttccaataccgaggatgggggtaacatggttgtgtttgaatatgaatgctctggttttgtataagaaaagtatataagaatgaggaatgagagtcaaatagaggaacatgc

SEQ ID NO: 27318 - DNA, 448 bp, Glycine max
ctctctggcggctctcaattcccacatccccaaaccctagttttgttccatttcttaaatcgaaatttatgcatacttcagacacctagtttcatatcatcattctacacacacacaccttatatatatatataaaaagagttacagagcaagacaagtgttgttgttgttgttgaggttggaggaaggaacgataatggaggattctgcggcgcagaagaggaagcagcgagagtttgcgctagcgtcggtttccgaggtgtcttcggctccttcttctgcttcgccgggggtttctctcttcgccggtgatcgtcttcaaattctgaacgaatctcgccatgttgctctcaatgcttatctttcagctattcagctattcagattaggtcctattgaatcggtttgcatggtggaagagtctgaagctgacaaacagacgtcatat

SEQ ID NO: 27319 - DNA, 390 bp, Glycine max
gggtgtctcaaatttttcatctttcacatcatgaacatcacataaccatcatgctcttaccttagcaaattttctttgtatctttatgctaagttgctgctattgctaactctgtccctctcataagatcctatctaaaaattcatggcaccctcaattgttttgtctctactaccccttcttctggtttcaacttgttgttatgcgcaaccccttgaagagggttttatctctggggtcatatctgacaagggtcttgaatatgccaaggagttgttgatagagaaaggtattgcctccattgttatgcttcagctgccagagattgagaattctgcccaagtccctttggttggaaatgctaaagtggttctttctgacatcacaatc

SEQ ID NO: 27320 - DNA, 328 bp, Glycine max
ccaagaattagttgaagcaattgttttgccaatgacctgcaaggagcggttccaaaaattaggagttcgtccaccgaagggagtgctcttatatggacctccacgaactggaaaaacactaattgcccgtgcttgtgcagcacaaacaaatgccacttttctgaagttggcaggtccacagctggtccagatgtttataggagacggagcaaaacttgtccaggatgcctttcagctggcaaaagagaagtctccatgcattatatttatagatgacattgatgcaattggaacaaagcgtttcgatagtgaagtaagtggagacagg

SEQ ID NO: 27321 - DNA, 563 bp, Glycine max
ctcttcatgaccgaaatgtggttcacagggatattaaatgtgcaaatatattggtggatgcaagtcgatctgtcaagcttgcagattttggattggcaaaggcaaccaaattgaatgatgttaaatcaatgaaggggacagcattctggatggcgcctgaggttgtgaaaggaaagaacaagggttatggccttccagctgatatttggcgtctgggatgcactgtactggagatgttaacaggccaacttccgtactgtgatttggaatctatgcaggcattatatagaattggaaaaggtgagcgacctcgtattcctgattctctttcgagagatgcacaagattttatcctgcagtgccttcaagttagtccaaatgatcgtgccactgctgctcaacttttaaaccattcatttgtccaaaggccactttctcagtcctctggttcttcatttcctcatattcacggccggaagggttaaactgtcatcttcaactatgaaacattagggagttctgtctttcattgcatgtaacatttccaatgttcagtcttgaag

SEQ ID NO: 27322 - DNA, 534 bp, Glycine max
  unsure (1)..(534): unsure at all n locations
gacatggcctcactccacccatgagagatgctcgcaagcgtagatttcgcagggagcctgatcttaatcctgagcttgtctcccgtgttgagaaagatcttctcatcatcatggctggaggaacagcggacaatcttgatgtggaaacagctgagcaagaagaaggggatgagaatgcccgaggtgctaataaaaaatctgcacctaagcctgcaccaaaacatgatattccagagaatcttactaatgcaggagaagctgacaggagtgattctgaggaatctgatgactcagtctgaccaaatcaactaccaaaagaatatttatatcacaatgatgaaatgaaagcctgtatagtataactttcgcagttaaatttgaattccatccagccttaaaatctcacctacagtagattttccattgtaggtgatctgtatacactgttttgtattttacaaatcgntgcatttctcgctatgctttacaaatcgtgcatttacttgtctaaaaaaaaaaaagaaaaaaataaaa

SEQ ID NO: 27323 - DNA, 587 bp, Glycine max
  unsure (1)..(587): unsure at all n locations
ggactggtgtcttggcatggaattctcgcattttggcttcagggagcagagataggaacatacttcagcatgacatgagggttccaggtgactttgttagcaagcttgttggtcacaagtctgaggtatgtggattgaaatggtcctgtgatgacagggaacttgcttctggtggtaatgataatcagctcctggtatggaatcaacactctcagcaaccagttttgagacttaccgagcacactgctgctgtgaaggccattgcttggtcacctcaccaaagcagtctccttgtgtctggaggtggaaccgctgataggtgcattcgtttttggaacactacaaatggccatcaattgaactgtgttgacactgggagccaggtctgcaaccttgcttggagtaaaaatgtgaatgaactagtaagtactcatgggtactcccaaaatcagatcatggtgtggaaatatccatcattgacanaggttgcaactctaactggccacagcatgcgagtgctgtaccttngcatgtctcctgatgggtcagacatagtaactgggtgcagggatgagactctangtttt

SEQ ID NO: 27324 - DNA, 433 bp, Glycine max
gctgtcacacccacgcagtcactgtgctgcgtttcatcattcggcggtggttcgcgatcggatcgggattcgagggcggaacgaagtagattctggaggcaccgacacggtggcgctagctccgttcgttcgttttggtgctttttttttttttttttttacagtgattcggtcgatccagaaaatcgacggtgattgattggaacgatggcgtatcgacggagacagcagcaagggttttcgaagccttctttttcgacgtttgaagaagaaacgactcggaaccctaacaacccctttccgctgccgaacgacgacgttgaaggttccgcttcgtcgtcgtcttcgtcttcgcttgctgcgaaagctattagagcttcttcggcccgtcgcgactcttcgctgtcctctcttacggtctctcctctgcttc

SEQ ID NO: 27325 - DNA, 394 bp, Glycine max
cggaactatgatttacttctttgccataggcttcacattgttggtgaggtgcaattggctactaacctcgcccttctcgctctgcctggcgtcagaactgagtacctaaaacgggttctaagtcattcgcaggcatttgaattgagtgatgatttcctgactaaattaggtgttgccagacagaacgttgatgacacagctggtgctgctcagattatagcttcaaatggtctgtatgatgccggtgcgattgctagcattcgagctgcagaaatctatgggcttaatgtactcgcagaacgaatccaagatgattctgaaatcatcagtcgttatctcgtgcttgcaagggatccaataattccaaaggctgataagccctttaagacaagta

SEQ ID NO: 27326 - DNA, 493 bp, Glycine max
  unsure (1)..(493): unsure at all n locations
caatcctagtcttcaattgggttgctctctattcattccattttcagaggccttcaagaacagtgctagaacctccatggctgcaaagcccttcaacattatcttcctcctcctccctttactctctttggtggtggtggggcatgaaactgtgaaatcggaacagtacccattggttgtgagcacgtggccctttatcgaggctgttagggctgcatggagggctgttgatgctggctcttcagctgtggattctgtggttgaaggatgctcagcttgtgaggaactcagatgtgatgggacagtcggccccggtggaagtccacatgagaatggcgaaactacaatcgatgctctgataatggatgggtggatgcataggtgacaatggaagtaggagctgttgcagccatgagatatgtaaaggatggaattaaagctgccaggttagtgatgcaacatactgaacacactntgctggtaggagagaaag

SEQ ID NO: 27327 - DNA, 406 bp, Glycine max
aaaaaggcacggtcattccttgtttatacgagacagagcattcaatcgtagctaacagaccccaaagtacacataacacatgcaatgcagttattattttatcttatacgaatattttcattttcattctctctcccaatctcacaagcaaacatccctcttgattctctcttccctcttcaaaccttgcgtgtctctgtgtccttttgcatgtctctgcgtgtacaagccagacacactgtgagagagaacataacaacacacatcactctcttgttttctttcaagtcagcaaaaaaaatataggaaaaaaagttcttttctctgtttctgctctgcattaaaacagagtcccctgtttttggtatttattgcaatgaagtatattaggagcaacagcttgaag

SEQ ID NO: 27328 - DNA, 494 bp, Glycine max
caaagggatttttagaagttagtttttcccttgctggaaattcttgttgagaaccccagcaaacagccaaccccaatatcttctatttgacctttcctattttcaaggtttcacttgtggttcgagttcaatttgcaattcaattgataagtttctgttatctgctattgaggatgacctcacggttttgtaatacagcaagtttagacgtggttcagcgaacacattaaaaaaatcgtgtttttattttatatttatactgtatctacagtttttatgtatttcagaaattcagtatacgtagttttttattaagttattttagttattctttatgtatacatagttttatgtatttacatctactgatgtttatattgttccgagacgcatggataattggaaaatcatgccagttgtcggtttagatgttaattgagccataccaaaatatattatcagcccagtaaagtagttttaatctttaatggtcc

SEQ ID NO: 27329 - DNA, 227 bp, Glycine max
actgtggatcatagcgtagacctttgtccatcttcaatgttctgttcctaaaaccacaccatattctgactcatctttctaactcccccaagaaaagttcctttttcccctttccccttctcttttcttcttcaaggtcaactccgtttactataaataatgaccactcttcttcaacttcaataatactcacctttgaatggattcttcttcttcttctccacaca

SEQ ID NO: 27330 - DNA, 336 bp, Glycine max
agctgctccaaataagctggtgcagaaacaagaattggaaaaaacacggaggtgggttaatgaaaattttggatgggactacccctgcttttaagagacgaagctttagtttacagatgtgtatggtggccatcctcgtcctttccctcaccctttccctcgccctcgagtggaggtgctcctacgaagcttccatcactgctccaatctagcatggcaaggcggatctgcactggtggacatgctggccagtgggtctggtttgtggaatgggctgagggaaatagaggaaattttgaattcaaaatttgttcggaattttcccccaaaatttcg

SEQ ID NO: 27331 - DNA, 397 bp, Glycine max
cctcgagccgctcgagccggctcgagcggctcgagtttgaacccaaccaatttgcaaggaacctaggaggccaggatacgacgcccatccagacctgcaacatttccgaagagatgctgattcagactacatataggatctgtttggatacaagcactttgagagctttcttactgaaaatatagttttttcccgtaacttatagcttgtatccaaacaacctcatagtatagttgtcgtaatatgtggacaagttgtgtcaagtcaatttactaaaaacaacttgagcaaatactagttctattgacaagttctgcatgcgtattttctttcagggctattagttttatgcgaggacagggaaatatgtcaaaatttaattacatatttatagttt

SEQ ID NO: 27332 - DNA, 461 bp, Glycine max
tttatgaggtggtttgccgctaagaagatggaggaagctgcaatggcagcagaagctgttgctctggccgaaattgaggctctatgtaaccctgagatatcattggaatttgctcctccacaacatcagaaagtgccatttgccttaggggagcgctctcctctgcaccccatagttcaaattcctcaagagtcaaccttggagaaggtgattgattccaagttccaagttgataaaataagttcttctaaactgagtatcttgaaaaaattggaggaagcaacagaagaagttacacgcagcaaacaaatcttaaatgaggcattaaacagtgttgaaagtgcaaacagaaagcaacatgctgctgaagaggcacttcggagatggattcctcaggatgatctaagaggtcagccagtgtacaactatattaagcccaagaagttcaatcaagctggaaa

SEQ ID NO: 27333 - DNA, 714 bp, Glycine max
gagaaagtcaaactcaagccatcaccaagaaagaacaagaaagtaggcagggaaagggatctctacaagaactcttcacatgcttgtgagacccttctgtccctgatggttgacaagaagcaacgtcgtaaaacagcaattctctcgctgaagaaatccgggcctgagcttcctggagctcctgacacaattttctgccggcattgccggtaccggccttgcagtcctgctatctgtgatgtgtaacctagcttgtggaagggctaccttttgtacttctagcttgttcaacaccgggtttggacttgggttggtttggctttctggggtagtaaataagctaagggccacaattgtcaacatcagcaagaatgcaggaaagttgggtttgaaagaagaggaaatgatgcaaaagctggataagagcataagagatatttactatactgctgcagccttgctagcagtggtagtgctaaggcttgcttgagtaacatctccaatgatgtagttatttctggctggttggatgttacagtgatggcttttggagaagcagatagttagaaccaaggttaggcaccaagttgataagcaattggctgttgtagttaatttgctactttcagttaacccaggaagcattgtttggtgttatagttagcttgtactatagaattttgcaatggaatcaataaactgactttctttatt

SEQ ID NO: 27334 - DNA, 426 bp, Glycine max
gtagtaaataagctaagggccacaattgtcaacatcagcaagaatgcaggaaagttgggtttgaaagaagaggaaatgatgcaaaagctggataagagcataagagatatttactatactgctgcagcattgctagcagtggtagtgctaaggcttgcttgagtaacatctccaaagatgtagttatttctggctggttggatgctacagtgatggcttttggtgaaagaaagcaaatggcaaagcaaatagtaagaatcaaggttcaaagtagttccacggtgagatctttaaggcaccaagttgatcagctattgggtgttgtagttaatttggtattttcagttaacccaggaagcattgtttggttttgtagttagcttgtaatatagtagaattttgcaatggaatcaataaactgacttt

SEQ ID NO: 27335 - DNA, 588 bp, Glycine max
gacaacttctacagagctgccagaaatctcaattcagacatctacatgccttatagaagcatccccaatagacccagcaattccaatggacccttgccttgcaatctcaacaggccctgaacaggagatgtcaaagaaaaagaagaaaaggaagagtaagcttgaaagtgaagcggcagaactcaatgaacactacaagctgcctgaagctgctccgcctgaggcccctgttcagaaatctatataccatacagatgcaccctcaatcgacccagtgggcccatctccccctgttgacacagaaaccccaatagaccaaggtcagcagatgaccaagaaaaagaggaagaagaaaaagaggattgtgatcataattgaagggacagaaaccaatgaacacggtgtcaagccacctgaaaccctagttcaaaaatttgcatatcctacagtaacaacctcaatagacccaacaatcccagtcccagctcccccaatagatcaaggtcagaagatgaggaagaaaatgagaaagagaagtgcccttataagcaaaggagcagaacctgatgaacatgatgacaagccacc

SEQ ID NO: 27336 - DNA, 771 bp, Glycine max
tgtatcagtactccatctacttcctctgccactgccaagttctctacagtaagtgccttgaaaccagaaaggtccgtaggaaccttaaaccttggtcgtgtatttgggagtaatgcccgtgtttcaagcagttggatttctttactacgccgaatttcttatgccaaatagtaggatttgaaggccacttacagattttttttttttttgcaaatgtactgtacatatgttgtccaccagaggaacattatgactgtaatgaaaagcatgatacactgacatgacaagcttcctgcacatgacactattaccaaatgtattggcagatacattgttgtggagtgaggtggatgctctcaattttaagatttggaaagagggaaagtaagggagtatgaacgattttgaacctcgtgtgtagacatccacagcatacctcgttcttcagggtaatttggttggtgggccttaaaatgtgagagtttggcaggttttttctctcctaataatgatgaatcaaacatgtatgagtgaggggaagccacaatcattcttattgtacccgtctttttttttcctattcatcttttgtttttcaaacattcagtatacaaattcggttgtcttttcctttgtacagtttgttttgcatacaatataatcacattgtaccccaatcccaacaagggaattattcacaagtcaatcccattcatagttatttgatactaaaaaaaaaaaaaaaaaaaaagggcggcccggacgcgtggg

SEQ ID NO: 27337 - DNA, 502 bp, Glycine max
caaatagtagaatatttggctgtgccactgccttggtgtgtttctcaaggcgtcacttagagctctttttctcttttgcaaatgtcatgtacatatgtaactccaccagaggaacattacactgacatgacaagcaagatacactgacatgacaagcttcctgcacatgacactattaccaaatgtattggcagatacattcttgttgagtgaggtggatgctctcattttttaagagttggaaagagggaaagggagtgtgaacgattttgaagatcgaggtatgctggtggatgtccacacgaggctcagggtaattggttggtgggccttaaaatgcgagagtttggcagggttacattttatttttatttttctaatgatgatgaatctaacatgtatgagtgaggggaagcattcttattgtacccgtcttttttttctattcatcttttgttttttcaaacattcactatacaaatttggttatctaatcctttgt

SEQ ID NO: 27338 - DNA, 566 bp, Glycine max
tttcttgcgtccgatttgaagttctactttcactcccttttttcatacacaaaatagcacaatggaccaacaattctatgaagaggttcaagagccagtgagtcctcctggacaatatttcaacagttcggtgatatgttcctatgtttttggctttcttgagatggcagttccaattgatgactcacagactatacctttgcttaaagatgtcttcctccctatcaacccacgtttctcttctattatggtgagagaccaagatggtagaatgaaatggaaaagggtacaagtgaagcctgaagagcatgtaaaggttcccaaatttcctgaatgcaattcacctgaattatatgaccaatattttggtgactacgtgacaaggattctaactgaacggacacctcaaaacaaaccactatgggaaatccatattattaattatccaacaagcaatgctgcaggcacattaattttcaagcttcatcatgcgcttggagatggttattctctcatgggtgctcttctttcttgtcttcaaagaagtgatgatccttctcttccac

SEQ ID NO: 27339 - DNA, 480 bp, Glycine max
attcctcacaagagtctctgcattcttgatttcacaagaacataccctctctgcaagaacccgtttttcacttttccagcttcgtatattcggattctcgggagtgaaaaagttccatgcgctattctattccaagtgcaaatcacggttgaagttaacaagaaaaggagcgcggtgcggagatttctcaagaaagacatggccgaccttcttgggagttcccttgattacaattcatatggaaggagccccaaaagccttacgagattagtatgctataagttcagcctcgttctttcttctcttcaacacaaactcaatttcttcttacactcaatttctctctctcttcttctttaattctcacacaaaaccaagaaaccatgaaatccgacagagagaaggagagaaaccatgaaatccgacagagagaaggagaaagagaaagagaatgatcactgcatcagttctcatatgcag

SEQ ID NO: 27340 - DNA, 432 bp, Glycine max
gttcttgacaatactgcactaaatagaattgctgtggaacggcttcatttatcaaatccatcatttgctcaaacaaattccttagtttctacagttatgtctgccagcacaacaactcttcgttatccagggtacatgaataatgacttggttggtcttcttgcctctctgattccaacaccaagatgccattttctaatgacaggctatacgcctttgactgtggaacgccaggctaatttaattcggaagactactgtacttgatgttatgagaagacttctgcacgcaaagaatatgatggtctcttcttatgctcggaccaaagatgctagccaagcaaaatatatatcaattctgaatatcatccaaggagaggttgatccaactcaggttcatgaaagtttgcagaggattcgtgaaagaaaacta

SEQ ID NO: 27341 - DNA, 401 bp, Glycine max
tgagcccattttggcaggttgggttggatatttttggctgatcttggatctggggtttaccattgggccattgacaattatggcgatgcttcaatcccaattgttggaacccaaattgaagcctttcaaggtcatcacaagtggccttggaccatcactaagcgtcaatttgctaacaatttgcatgcattggcacgtgcagtgaccttggcagtgcttcctgtagtccttctttgccatgaccctattgttgaagggtttgttggggtgtgctaggttgcatcatgtttagccaacagtttcatgcatggtcacatggcactaagagccggcttccgccactcgtggtggcattacaagaggccggcgtgctcgtgtcacggtggcaacatgccgcacac

SEQ ID NO: 27342 - DNA, 1133 bp, Glycine max
cgggttcgaagccatttttcgtgaaaaaaataggtgttttttttagttcgtcgttttgctcttcgtgttgttgaagtgcaacgccatggatccagatcagggcacttcaaaagcccggaagcccaagttcaaacccaggaatctcaaagcagtccgagctcccaaaaccgaagcggatgataagcgaaacgaagatagcgaagtgcctcgagctctctcgcgtcgacgacatgaaaatcctgcaaaacgcgagcctaaagtcgaaagaaaatctagcgtggaagttgcatttagtcttggaagttcatcatcacattccctcaggacatatggcacaagcaaatctatagatagtggcacaagcagtggttcaccatctaaatattttgccaatgaacaaattcgttcaattgctactgaggatcaaaatgatgcttctaatgcatctgccaggaaaatcaaaagagagtacaaggaaccatgggattatgaaaactcttactatccgactactcttccttggaggaagccaaattctggagatccagaaattcttgatgagaaagaatttggtgaagctgctactagtgtggagtatgatgagaatactgttaattctgctgcagaactcgagatcttgattcctactcctctgcctatggacaagcagagtaataaggggaaggagaaaattggtacatcaacagtatcgggagaggccacaaagtcaaagaatgccttggaagagttgccaaggggatatatgggcaaaatggctggtgtacaagagtggagcaatcaaactaaaattaggagaaactctgctcgacgtgtctccaggttcaaattgtcgatgtgttcaagatgttatggctgtgaacactgcacagaaacagtgttgcaatcttggcgagattagcaaaagggttgttgtggttcccgatcttgattcaattgaactgtaaaacactctagacaaatatgactaatgcaccacatacagggatagtacagtaccttgttggcttatgtgaatatatgtgactaaaaagacacggacaattggcaagtgccaattggatactagacctagcatttgatattaatgaaatatcaagtggatgattgaactc

SEQ ID NO: 27343 - DNA, 277 bp, Glycine max
gtgtgattaccggccaaaacagcatcgtttcaccacttactacatcttgtctgcttctctgcttcatgcccccacaatcgtctcatcttgttgcttctgcatataagttgactaaaggttcgatgtcaacaagttggttgcatatgacctttttgcttactgttcaggaaagaatgctacatatgcatcctacttatgatttggaggagtctaaaggtggatggctagaatgtagtcattggcttgctgcatctttgtgaaattaagttaaattggg

SEQ ID NO: 27344 - DNA, 310 bp, Glycine max
ctgaaacggagtccctagcaaatgttacagagatacatgatggttcggatttttcatcaaatgatgatggaggatactcctttggaattttctgtgtgaaattctcaaaagatgggaaagaattagttgcaggaagtagtggtgattctatatatgtatacgatcttgaagcaaataagctctcacttcgaattttagctcacacgtgtgatgtgaacactgtatgttttgctgatgaaactacccactcttatttactctgggagtgatgatagtttctgcaaggtctgggatcggcgttgcttgattg

SEQ ID NO: 27345 - DNA, 349 bp, Glycine max
ggggcttgcaaactctccttgagtctataaaggaacaggatgcagataaagtatctgtgagccttacatctacactggatactgtagcagagctagagttgttacaggcaccaggattatcatttttgttgccagagcagtatgcacaacaatatccacggctttcagggagaggaactgttgcgttcaccattgagaaaggagatggttcaacattttctccagttgggggagagcataaaaatactgccaccattcaggttgttattgatggatactcagctccactaactgcagggaattttgcaaaactggtgatggatggagcctataatggcacaaagctcaa

SEQ ID NO: 27346 - DNA, 397 bp, Glycine max
caccgccaccgcccttgtcgccaccaccaccacctcccccggtttcgcctcctcctcctcccccggcaactcagaacaacaacgaggagcggcgcttcaaggagccttccacgtccggccggcgcgaatacgagcattccaatcacggcattgctcacaagcagcacaagcagcagcagcctcccctgccggtgaagaagatgaacaacgggcctcccggcagggctgagaccgatgaagagaagaggttgaggaaaaagagggagtttgagaagcagaggcaggaggaaaagcataggcagcagctcaaggagtcccagaacactgttctgcagaagactcacatgttgtcctctgggaaggggcacggcatgattgcagggtctcgaatgggaga

SEQ ID NO: 27347 - DNA, 333 bp, Glycine max
gttgcattggctgtatttcaactcattatgactcttgggcatgttttccttggtatgggatggccagggtcaatgtatgttggcacgttactagttggacttggttatggagctcattgggcaattgttccagctacagcctcagagttgtttggtttgagaaactttggtgctttgtacaatttcattactatagcaaaccctgcaggaaccctcgcttcctcctctctatttggaacttccttggccgtgtcggaggaggttacatatctgagcttgttgtgagggatcatgcatatccaaggccagttgcattggctgtatttcaactca

SEQ ID NO: 27348 - DNA, 979 bp, Glycine max
  unsure (1)..(979): unsure at all n locations
gtcaatttgggagggtttaccaggactattgtgatgccatgagcaatctttctttggggataatggaacttttgggaatgagtcttggagttggtaaagcatgttttagagagttctttgaagagaatttctcaattatgaggctcaattactaccctccttgtcaaaagcctgacctcactttgggcactggacctcactgtgacccaacatctttgaccattcttcaccaagaccaagtgggaggcctccaagtttttgttgacaatgagtggcattccattagcccaaatttcaatgcttttgttgtcaacataggtgacaccttcatggctctttcaaatggaaggtacaagagttgcttgcatagggcagtggtgaacagcaagaccacaagaaaatctcttgctttctttttgtgcccaaaaggtgataaggtggttagtccaccaagtgaattggtggatgaattgacaccaaggatataccctgaatttacatggcctatgctgcttgagtttactcagaaacattatagagctgacatgaaaacccttgaggcattcaccaactggcttcttcaacggaaaatgagctgaaatgaaattttcaagcacatatgaatggcatattatctattagcctttgatagtctcctatgaatgaatagtgacaagtgtcaagtggaagaagtgtaattgatggcggagaaaagggcaccagcaaaaaggccctgagttggaaaaattgaaagaaaattcatgttttcttcatgaattgagtgttgcccgagtagtgattggagtagtattgaccaaaccaagggaaatgagataaaaatatttataaggggtcaatgagaaaaaatccccagctaatttttgtaatttttctttggtgaaatagaaaagttattttttnnnnnnnnnnnnnnnnnnnnnnnnnnnnnnnnnnnnnnnnnnnnnnnnnnnnnnnnnnn

SEQ ID NO: 27349 - DNA, 564 bp, Glycine max
ctcgagccgcaagaagctgagagttttgagttttgagatttgactcacgagaggagagtaatgtgtgggaagtagaagtagaagtagaaggagagaagcaccactacgtcagcgattcctttgcctttttcttctttcttagactcgaagacaagtttgatcctattttgagaatcgcattcagatggaaagcgcatcagagcttgtggaattcccgttgttgctgacaccaatcgattccaactacagagcttgcaccattccttacagattcccctccgataaccctcgcaagcccactcccaccgaaatctcttggattgatctcttcctcaactcaatcccctctttcaagaagcgtgcagagagtgatacttctgttcctgatgctgcagctaaagctgaaaaatttgctcaaagatatgctgatatacttgaagatttgaagaaagatcctgaaagtcatggtgggcctcctgattgcattcttctctgcagacttcgtgaacttgtgcttagagaattgggattcagagatatcttcaaaaaagtcaaggatgaaga

SEQ ID NO: 27350 - DNA, 356 bp, Glycine max
ctagttcagagaagaattcaagatttgtgtttgacatatgctggtcgcaggagtaggagcagcaattgttcttctgtttgtgggcactacctcattgtacttgatataccagaaaaggaaactcgtcaaacttagagagaaatactttcagcagaatggtggttccattttgctacagcaactctctacaagtgaaaactcctcccgaattactcaaattttcacagaagaagaactaaagaaagcaaccaacaacttcgacgagagcttaatcattggtagtggaggttttggaactgttttcaaaggatatcttgcagataacagagttgttgctgtcaaaaagtccaaaatag

SEQ ID NO: 27351 - DNA, 440 bp, Glycine max
ctcgagccgattttggatcagcaatcagctgaagaacttgcatttatgctacaagcttacgaacagcaaggttagcagtttgcaatatcaccaggacctgtttttcaccgattaatttccaagagtattgtggaatgtcatcgctaatacaaggaccttagaaattgtagttggctgatcagtggtgcagcagaataagatctgatggctctgcttctggttctccatttgtatctttctctggttatatttatattcccactctctctccccctctttctgtctcctgtaaataggtatattgcatacattatctcatcagcccaaatacagcttatgctgctgctaattgggaaattgatgttaagtgaaagtgttcttcacctatgaaaatatttgtatacaaatttacatttatttgatatccttcatatattttg

SEQ ID NO: 27352 - DNA, 272 bp, Glycine max
aataaattcaagcatataatgagggagctccagggggctataattattggctccgctttccaaactttacttggccttactggacttatgtcgctgttagtaaggctgatcaatcctgtagtcatatccccaactattgctgcagttggactttcattctacagttatggcttcccattagttggtacatctattgagatcggtgcagtacaaatattagtggttattgctttttctctttatcttcgtaagatatctgttcttggacatcg

SEQ ID NO: 27353 - DNA, 699 bp, Glycine max
tcgagaatagctgcacgcctctttcttgcttttttatgtagaagtttataaggtgaatacattttaatattttttattattttctttattttcacataaataatagcttatatatttcagggtattcttcttgatggttcacaaatagccgtaaagagattatcaaaaagttcaaagcaaggatcaaatgagttcaagaatgaagttttattaatagccaaacttcaacaccgaaatctagtgactctaattggtttttgctttcaggaagaagaaaaaatacttatttatgaatatgtgccaaacaagagccttgattactttctatttgattctcaaccgcaaaagttaagctggtctgaacgctataatattataggaggaattgctcaaggaattctttatttacatgaacattctcgactaaaagttatacatcgtgatctcaaacccagtaatgttctattagatgaatgtatgattccaaaaatttcagattttggtctcgccagaattgttgaaataaatcaagaccaagggagtacaagtgtaattgttggaacatatggttatatgtctccagaatatgcaatgttcggacaattttctgagaagtcagatgttttcagttttggtgtcatggttttagagattataagtggaaaaaagaatttcagttcttatgaatcacaccgtatt

SEQ ID NO: 27354 - DNA, 300 bp, Glycine max
ctcaaagcagcagcagcaagagcatcatcaagatcagggttgctacatgtttggtgctggtcaagttgtgaaagaagaacctcagaaaacggttcatcgcttctttgatgaatggccacacaaaggaagagaaggctcttggcttgatttggatgacaaatcttccacaacccaactttcaatttccatccccacatcttctcatgatttttcaactttcagttccagaacccaccatgatggttgagtgtaggtttccaataatgggtcctctgtacggaaatcaaaggccaaaaatgt

SEQ ID NO: 27355 - DNA, 762 bp, Glycine max
aacagagttccgttaccgttggctgtgaatgagaacaacattcacaacaaccccaataatgggaattttggttcctatgaggcattgcctgcgttcagagatgttccctcttctgagaagccaactttgttcatcaagaaacttaggatgtgttgtgtggtgtttgacttcactgaccccgccaagcacatcaaggagaaggagattaagagacagacgttggtggagctcttggattatgtgacttctgcaaatgctaagttcgtggagaatatgatgcaggaggttgtcaaaatggtgtctgcaaatatattcaggacgctcagtcctcagccgcgcgagagtaagattgttgatggcgttgacgtggaggatgaggagccttcgatggatcctgcttggcctcatttgcagattgtgtatgagctttttctgaggttcgtcgcgtctcctgagctggatgcgaagctggccaagagatacattgaccagtccttcattttgaagctgctggatttgtttgactctgaggatccgagggagcgtgagtacttgaagatgacgctgcaccgcatctatggcaaattcatggcacatcgccctttcatcaggaaggccatcaataatgtgttctttaattttatatttgagactgagaagcacaatgggattgctgagctcttggagattcttgggagcatcattaatggttttgcactgccattgaaggaagagcataaactgtttcttgttcgtatactg

SEQ ID NO: 27356 - DNA, 272 bp, Glycine max
actcgaaacgctcgagcggctcgagcgggctcgagcggcccgaggagacgcaacattgaaaagcccaatggctgcaacttattatctcacttccaactccgaaaactttctcacctctcctcagaaatccactttccattccttcaggtcatgtttcactgttgggttcattggactatccattccattgttccagcagaagaggaaatagtgttgaggccaattgcaatgcaaagaagaagaacccttggttagacccttttgatgatggg

SEQ ID NO: 27357 - DNA, 615 bp, Glycine max
atcgagccgcctggatcaatttaagcaatgatgtgggtgattttgacactggagttgtcaagaacaaaaaggaatcagttgtaaacatggttggtagccgcaaaggaaccttcattgctgcctactcgtgccttgctcttggcttccttgggctgacttggactgctgttgtggaaagaaacatacgttcaatattgtttcttgtttgtgcaattatttgtggctatatatatcagtgtccaccatttcggttaagctaccaggggctgggagagcccttgtgctttgcagcatttgggccttttgccacttgtgccttttatttattacatggcagttcaagggtgacgaaccttcctcccttgaatgtcttataatatttgatttttcatggttttgatatggaatgatttggacagtgtgatgaaccatttccccttaagtggaacggttctttcagcatcaattcttgttggcttcacaacatctcttatcttgttttgcagtcatttccatcaggtggaaggagacaaggaggttgggaaaatgtcacctttggtacctgcactttctttaaattgaacttttttctaatccatgttaatgatgtgaatc

SEQ ID NO: 27358 - DNA, 681 bp, Glycine max
tgcagcttggggcttttttagctggagcaattttagcagagacaaacttcaggacccagattgaagcagacataagaccatttagaggcttgcttcttgggttgttttttctaactacgggaacttcaattgacatgcagctccttttgcgagagtggcccaatgtactttccctcttgggaggtttaattgttataaagacattgatcataactgcaattggtcctcgtgttggacttactttaaaggaaagtgtaagaataggattgcttctatcccaaggaggcgagtttggatttgttgttttctctttagcaaataggcttggggtgcttcctcttgagctcaacaagctgctcataattgtggttgtattgtcaatggcattaaccccatttctgaatgaagctggaagaagggctgctagctttattgaagagaattttgaccctgagaataaacagaatgtttctgagacggttaacttcaacattagtgaacccgttgttatccttggatttggacaaatgggccaggtccttgccaatttcctgtccaatccattagcttcaggaggagatagtgatgaagtaggatggccttacgtggcatttgatcttgacccctcagtagtaaaggcagctagaaaaattggctttcctgtactctatggggacggat

SEQ ID NO: 27359 - DNA, 362 bp, Glycine max
ggagttctgacgtttctatattcacttcctctgaactttagccatatccctcatcaagttagttttcgcttagtatatatttcattgatacaactaccctaacactgttcttggatagccatggaacacaaagtagccacaacaactgaaggacaatccataagatgtaaagcggcaatttgtcgcaaagcaggtgaaccactgagtattgaggagatcattgtggcgccaccaatgcctggtgaagctcgcattcgtattatatgctcctctctctgtcaaaccgatatcagttttcggaacatgcaggaccatcctgccatttatccaagaattctgggtcacgaggcaataggggttgt

SEQ ID NO: 27360 - DNA, 270 bp, Glycine max
gagggttttgttcttcaatggaaagccagaagcagaacagtaaaaagcggaaacaagttttcccatacggcaactacaagagctactatggctatcgaattggtcaaggcgtggatgaggaccctcgattgaaggtgctgaggaaggaatggtttgaaggcaaggactgtcttgatattggctgcaacaatgggatcatcaccatacagattgcacagaagttttgctgtcagagaattctcggagttgacattgattctgatcgagttg

SEQ ID NO: 27361 - DNA, 260 bp, Glycine max
acacgagcaaagcaaattaatatccatttggcgtttcatattcaagaggatcttctattgactattgaatgatgaagatgagttccaaaagcgagacaataaaaccaaagactgattttgaactcgttctaaattattctaatcaaggtatttggaaagatgactcgggtgcaggtgcaaatgcagcttgtcgaatagacaagacattttctgccactgaccccctatctgaaatagtttggtctccagataaaggtttc

SEQ ID NO: 27362 - DNA, 417 bp, Glycine max
tcgagctggtgatgtttatctgccaattgctagtgtgaaaggagacattcagatctggggaggaaagggtaagggccagggtggctctggagcaaatggaactataactgggaaggcttgccccaaagggttgtacggtaccttttgtgaggaatgtccagctgggacttacaaaaacgttactggatctgataaatcactttgtcacagttgtcctgttaatgagcttcctcatcgtgctgtttatatttcagtccgaggtggtattactgaaaccccttgtccctaccaatgtgcttcagacagctatcttatgcctgactgctatacagcccttgaagagttaatttacacatttggtgggccttggctatttggtcttttccttattggtctcttgatcttgttggcactggt

SEQ ID NO: 27363 - DNA, 369 bp, Glycine max
agcaaatcagagaacgagcttgcagtgagcaattgaagcatttgaaagaagctcgtaatgaatatagagaagaggttattgattgtgttaggcattgtgcttggtaccgcatctctctatcttctcgacggaagcagagaggactgtatgcaatgtgcatgtgggttgtccagttgctactggttcttagcaatatggattcagtgtttatctacatccctgaatattatctggaagctttggttgattgctttacatgtgttgcggaaaagtgatcctccctttgttccatccacaattttgatgaaatgaggactttcttcatttgtcacctttgtagttacccatttcaatgatccaagaatatca

SEQ ID NO: 27364 - DNA, 312 bp, Glycine max
atataatgaaagccaagacagaattctattccacctcagatgtgctttccatatttcgtcagctttgtgcaggactcaagcacatgcacagttttgatcctccttatgcacataatgatgtcaaacctggtaatgttctcataacacacagaaaaggacaaccacctcttgccatactgatggattttggcagtgctcgtcctgcaaggaagcaaattagctccaggtcagaggcccttcagttgcaggattgggcatctgaacattgctctgctcctttcggagctcctgagcggtgggcttccccaagcc

SEQ ID NO: 27365 - DNA, 574 bp, Glycine max
aagcagaccaaacatgaatgtttgcatttcttctttcagatggcaccccttgctttttctttttcatctcccaacttagaaattgaattcaacccaacactactactccactgtgcctgactcacttggaaacctaacctagggctcttctttttttgtttatatattttttggattgttgtgtccatccatcaagtggtgtttgtgtataaattttgtgtggtttgttttctggattaggatttggtttctgtgtgctgtgttaaaaatagtatcaatcaatcagaaaggaaaaagagagagttagggaagatgagctggcgcagggtattgaattcagcacaggccttggctgcacacactttccttttgtgcttcactctcttcctcgttctcaagctcgatcacaacctctcttgttcttggtgggtaatattttcacctctttggatgttccatggtgttgtggctcgaggaaggttttcattacctgcgccatctgctccacgtaatcgaaattgggctccatgccatgccgtcgttgcaacaccattgcttattgcatttgaattgc

SEQ ID NO: 27366 - DNA, 217 bp, Glycine max
aggttcaaacgtgcacttacagaaggaacttatgatgatagtgtaaaaggaatgactaagttcaagggacaaatccaaagcactgtaatacttcaaaaattgtatttacaaatattgtgttcttgtaaagactctgaacaaggcaatgacaacaatgatacagaaatgagtcaataataaatacacattttagtcgtctactagttctagatcgcga

SEQ ID NO: 27367 - DNA, 304 bp, Glycine max
ggagactatccatttttcatcttgggaatcagatcctcaacacaccgaaataagaatcaaagtagcgtgcgtgcgtgaattcgatgatgtctgggtacgttacacgagcattctcgtaccggaacatgctgtggctccgaaactcaggtgttgttcgtggttgcgacgtgtggtctcccattcagatgtgcgatagcagcagagtgttgactcttccggcaacgcctaattttgttgcggaaagtcgcagagcctttgccaaagggcgaaagtcaaaggatgaagggggtgccagtacaattga

SEQ ID NO: 27368 - DNA, 514 bp, Glycine max
gtggttacctgaccaatggactcaccatactgtctcaaaagtggaaggcacattcggctaccttcctcctgaattcttcatgcatggtatagtagatgaaaagacagatgtctatgcttatggtgtgctattattggagctcattactggtcgacaagctttggatagctcacagaaaagtctggtgatgtgggcaaaacctttgctaactgcaaataacatcaaagagcttgtggatccagttttggctgatgcttatgatgaagagcagatgaagcttgtaaccttaacagcttctctctgtgtagaccagtcctcaattcagcgaccggttatgagccaggtgttagatatactaagaggggaagaagagagcttaagaatcatgaaagaacgatcgaagtcaaaacttcagaggacatactctgaagaactcttagatgcagaagagtacaactcaacaaagtttttgagtgagagggatcgacatatggagactattctaggctgcagt

SEQ ID NO: 27369 - DNA, 311 bp, Glycine max
ctgacctctacaatcagggaggttaaagctttgaacattggtcagcttgtaagactttctcgtattgtgacacgttgttctgatgttaaaccattgatgaaagtgcctgtatacacatgcgaggattgtggatttgaactttaccaggaagtacctgctcgggtcttcatgcccttgtttgaatgcccatcaaagcgctgtgatacaaaccgaagaaaggggaatgttatccttcaactaagagcatcaaaatttttgagatttcaagaggccaaaattcaagaattagctgaacatgtccccaaaggcca

SEQ ID NO: 27370 - DNA, 368 bp, Glycine max
gtcctttatagcagcaacatacccaaagttgacgcgccaatgtctttaaatgcaatggcatttacaaaacttagagtttcatcgtttacaagctcacttgctagtaacaattcaaggccatccatttatcaaccatggaacttatcgttgcaatcatcaaaaataggaatggtgccaaataaattatccatcaagtccgttgcttttagtgacaaggtgcctagtcaaacttatcttggtacgaaagatttggatcaagttataagaaaaggccaagaggcattgttaaactcaagtgatccattgagaacattgaagataattgacaccatccaaaagttaggaattgagcaccatttcgaaaagga

SEQ ID NO: 27371 - DNA, 269 bp, Glycine max
tgaattactatcaagatctttccttcaagattttttcgatggtggcactttgtgtcaatttaaaattcatgatttggtgcatgatcttgctctgtttgttgcaaaagaggagtgcctacttgtaaagtcccacattcaaaatattcctgagattattcggcatctgtcttttgctgagtacaattttcttggaaattcattcacctcaaaatcggtagctgtgagaaccataatgtttccaaatggtgcagaaggagccaacgttgaag

SEQ ID NO: 27372 - DNA, 469 bp, Glycine max
attgaacctggtcttgagcaacagattgctcttccacgggattcctaccttcagggttatttcagtaacatatccgagtaccttagagttggaccacccttatattttgttgtaaaggattacaactacagtttggaatccaaacacacaaaccagctatgctccattagccactgtgattcaaattctcttttaaatgagatatctagagcatcattagtgccaacatcaagctacatagccaaaccagctgcctcatggcttgatgattttcttgtatggatatcacctgaagcttttagttgctgtcgaaaattcacaaatgactcttattgtccacctgatgatcagccgccttgctgtttaccagatgaagggccatgtgggttgggtggagtgtgtaaagactgtacaacatgtttccgccactcggatttggttaatgatcgtccatctacggcacagttca

SEQ ID NO: 27373 - DNA, 339 bp, Glycine max
catggatccaaccaggttggccatatctgctgcagatttgaatttaaagctgatgaggtggcgtgctttgccttctttaaacttgaatgccttatcttccatgaagtgtcttctcctcggagctggaacacttggatgccaggttgcgcgcatgcttatggcatggggtgttcgaaaaattactctagttgacaatggaagggtggctatgtctaacccattgaggcagtctctttatactttggatgactgtcttaatggtggggaatttaaagctacggcagcagttgaaagtcttaaacggatatttccagcagtggaagcagaaggcattgttat

SEQ ID NO: 27374 - DNA, 332 bp, Glycine max
ttggatagggaggagaagctgagggatattggatctagaaacttctttatgtgtccgaggaagtgtggcggcggcggcggcgacggtagaggaacgacgccgtttgcttcatgttcaagagaggccgacaaaacgaccaagggtggcgcgtttggttggttaacgttcatggatttctcatgatgaatattattattggaggctaatgttttccctttggcgctgccagccacagttatttggagatattttcattattatttttagaatgaatcagtgaaatggtttgttgcttgtaaaaaaatatgtgggccatggttgtagattgtagg

SEQ ID NO: 27375 - DNA, 405 bp, Glycine max
gaccccgttcgttcctctttccctccgtcaccatcccccaaaccccatacggcgccgtttccctctcttctctcgtttctttcgcctcttccctccgatgcgcttctccatctcattcctcgttgtcgttttcgtcgcgctttgcgattcttcgagtcaacgctcccgtttcgcttctcttagttctcgttttgtcgattcatccgcataaaatagcaccctcttcacgcgctttcttcgtcgttcatctgccaggctcaggcactccctttcattccgaatttcctttatctcaattcaaagaaaccacaactgccacgtggtgacgcgaaatcgtacactgctacttatttcgttgaagaaaaaaaaaacacgttctaatcggtggtttttttatgcctaaaa

SEQ ID NO: 27376 - DNA, 547 bp, Glycine max
tgaaccgcccatcgaaattcaaatttcatttcatcacgctctcccgtccgtaaaccctaacaccaccaccagcttcaatcgaagcgattccttctccgaagcctcacatggcttcccgcatcgagaacaggcctcctcgcatcctctccaataaaaagggggccactgaagaagttttctccgacaagcgtagaaggattgggtcggagagaatggagagacagggaggccgaggcagggctcccttgggtgctctaaaggcagacgctaataatgatggtgccagtgccgagggctccgagtgcagcaccgttgacttcaccaaagaggaagtagaggcgttgctgaatgagaagatgaacacgaaggagaatcgttatgataataagaaaaaaatggacccagatgggtgatctcattaaacggcttaaactctgccttcgatggtttaagagagtcgaagaaggctatatccaagagaaagagaagcttcagactgacctagaatctgctgagaagaaatgtctggatattgagaatgagatga

SEQ ID NO: 27377 - DNA, 247 bp, Glycine max
gtcaattgtgtggaaaatatcactgaattttcatataagtgaagtttcctaacatggggtttgcttagctgttgtttctgtcttttctctttctctaagttttgccccagttggaggctcttatggtttgcggcatctgtcatggaggttttgggaaatgggtggagggtggtgtctggaaattggtggctttgaagagatgctatattaggacatgtctatcacctaaagcttcatgatagtcagg

SEQ ID NO: 27378 - DNA, 256 bp, Glycine max
aacaggttgtagaattctaaagctaacctctcgcattttgattcatggtggctgtgagtggtttggcataatggcgaaatggatttccttccccatcatcttctttgttgtatttgttgcaagcaccttcctcctggaaattaacctttccagaataacaagaacttcaattttcaagacaattataatattcaataagcaacaacctcaattcccacttaactgcacggatggaaacttagcaaaaacttgttca

SEQ ID NO: 27379 - DNA, 283 bp, Glycine max
attttgatttttgagtcaaagaccttgtttgccccaaccatctcacattccccgatttccctctttcactgctagcaccggttcgtgttgagcagagagagagagagagatgaacccgctaacactagtgaagcgcactcagaacatcaatgccagagaagctgcactcggcatcggcgagcaagcctcgtggcacaccaagtacaaggattccgcttacgtcttcgtcggtggcatccccttcgatctcaccgagggtgacctcctcgccgttttcgctcaa

SEQ ID NO: 27380 - DNA, 361 bp, Glycine max
agggattccatttggatactacctagagccgtccctttccactgttgatcgattccctccgtcttcgaagacaactctgtgacccagcgtcccatttggtcttcacccagagttcaatcgtaggaactgctaggggcttttattttgcctttatcgattttctgctctgcggcttcaatatctgctaaccaaacccttagtcatctgggatttaaagggttggtgttgagcagatagagatgaacccgccaacactagtgaagcgcactcagaacatcaatgccagagaagctgcactcagcatcggcgaccatgcctcctggcacaccaagtacaaggattccttacatcttcgtcggtg

SEQ ID NO: 27381 - DNA, 351 bp, Glycine max
tatattatgcagcttcttcacacgcctcggatttctccctgacgcggcctccttctccttcttctttctcacctcttagtccttttcacttccttcctctttcttcttctccttctcttcttcttccccgcgcaagctatgccgacatttactgcaatagcatttgatagattgatagagcctggagcttcaaaacctgcttataaatctgctccggtgccaatgcctgtcccaaagaagattgagaggcgaactagtgaaccaaccataaggaagaagccccgtcctcgtcctcaattaaagccagcactctatgccactcctgaggtgacaccgcttccggatgcaccc

SEQ ID NO: 27382 - DNA, 335 bp, Glycine max
cttcctctttcttcttctccttctcttcttcttccccgcgcaagaagattgcgtccccgcgctaggttagaattgtgcaaagattcttctgatttcgatgtactcaaaggaggagagaatagggggcattatataagctatgccgacatttactgcaatagcatttgatagattgatagagcctggagcttcaaaacctgcttataaatctgctccggtgccaatgcctgtcccaaagaagattgagaggcgaactagtgaaccaaccataaggaagaagccccgtcctcgtcctcaattaaagccagcactctatgccactcctgaggtgacac

SEQ ID NO: 27383 - DNA, 312 bp, Glycine max
gatgagtcaattagcaagttggtgcagcaactctataagctagtagagctacatgaggttcgtgatatcacccacttgccatttgctgagcgagaattgatgctaataaagattgctgtaaatgctgctgcacggcgtgatgtccttgatattgctagcactttccgggctaaagccgtcgatgtatctggtcacacaataactctgctccttactggagatttggacaagatggttgcattgcagagattgttagaaccatatggcatttgtgaggtggcacgaactgggcgaattgctctagtccgtgag

SEQ ID NO: 27384 - DNA, 416 bp, Glycine max
tttttactgtttgtgtgtgattctgtagcaccatgtccgaaatgggtcactggccttttaggtatggatcattgtcatgcaaccgatgaatccgagacatggagaacacggaggaaaattttcaagctgggcaagactgctccattaccgtcttcaaccaattatagtactttgagtgatgtcacgaatgcccaacagaacaatattctgccttttcgtgtgatgtctccatattccatgttgccgaatcagacatcaatgtcaactgcaacacatacatgctccccagtcaattccatacctcaaaatcaatcctcttcgccaattacaatgcgtacgtgctcctcgatacattctagcttccagaaccaggtatcctggccaaataatgttcccttcattgccaccaactttac

SEQ ID NO: 27385 - DNA, 478 bp, Glycine max
gtgtttttcttcttccctcactctttctctaacgcaactcagttctttctctccgattctgtatccgcttcatggcagttacattgcgcagcaccaccaacaactttcttccgttaagctcttcaaattgttggctttcgaatggttccccttatgcagggagaaaagtgtcggactttcattgcgtactattgagtaaatggtggagttctagaaagggatgccttatacgtcatgatgttctatcgagcagtaatcatggtctgttgggctttagaaaatgctattcggttttttctaaacctagaagggggttgcacttgttaccatttgcctcctctgatgatggcgtgactgtaaatgggagcctccaagctagctccggtactgacctagaaaaaatgagggtgaaactgaataggtcactggaagatgaagagttttgtgatggacttgtccaagctttatatgatgcaac

SEQ ID NO: 27386 - DNA, 417 bp, Glycine max
tgctaggcttaaggatttgcctggttctagtggtattatgcaaacaattgggagggaccagagactcaagtatgcagcatcatttgaaagttgctacttctttaggcttctgtattatgcaggaacccagtatcccataatgggagctatcaggatgacttatccataccaatatgatctgtacaagagggtagatgaatcgcctggaaaggagaaatatgtaattttgtctacctttccagagaggcctactacagatgaaattaatgatgcttttcaaggaaaaccaaggtaactgatgtctaattttctttatttttttaggctaaaagttacaaacccaatccgtattatctgactttctattgtagcatttaagcttggcaatgtgcaattccatttaattgtttctctgac

SEQ ID NO: 27387 - DNA, 504 bp, Glycine max
gtggaagaatcatcatcatcgtcgtcacgcttcccaatcaaacccaccacccatctgaatcaatccagggatccccttcttctgtttaggtgggatagcttgattctgatgcaaggacaaaggaggactgttgggtcgttcccagcaattgtcagtatgatgcaagggcccagttctagtggcactgatatgaaccaccagtcttccttgaatcatgtgcaaaatgcagtagatttctgtttgtcagattataggggatcttctggtgagactgcatgtttacgtggtactggtcataatgttcagagcttcagtggctggaatactggtgaatctagttcaagactcaatctgatcaaccaagtcaatgatgaaggtctaaaatcagaacatgggctgtcttcttcgtataatgctgctaccgaggatgatctcaggtctgaggaaggacaattcaaagcaaataatgtaatttttcctgttagttcaaatactaatctacat

SEQ ID NO: 27388 - DNA, 927 bp, Glycine max
cttcatttgaagaaaaactgtggaatggtacgtattttaactatgacagtggatcaagtggtaacagtaaatccattcaagctgatcaattggctgggcaatggtatacagcgtcctcaggactgcccccactttttgaggattcaaaaatcaaaagtgctctccggaaggtttatgatttcaatgtaatgaaagttaaaggaggcagaatgggtgctgtaaatggcatgcatcccaatggtaaggtggatgagacctgtatgcagtctcgagaagtatggacaggtgtgacctatggtcttgctgctacaatgatacacgcgggaatggaagaagaggccttcgcaactgccgagggaatatttctagcaggctggtcagaagatggatatgggtactggtttcagacaccagaggcatggacaatggatgggcactacaggtcccttatgtatatgaggcccctagctatttggggcatgcaatatgcaataaatcggcccaaggcaattcttgaggcccctaaaataaatataatggacagaatccacttatctcctgttattggaggatactctcataatgaaacaggtgtgagaaagattacaacaaaagcaagatgctttaacaattctgtatttcattgtgcttgctgatagttaacaagtaagaacataaaatttttgtataggtaacttttttcccattgtttcttacccaaccctcacctagagaagctgttaataatggcggtcaaagtctggggaaaaatgttttagaaataagcagagttcgattgtaacttttaatttatatagccacttaataggttacccactctatggcctttgctgtaactgttgtactgtacattcttatttatttgagctctcaagatataatattaattagcacattccagctttt

SEQ ID NO: 27389 - DNA, 514 bp, Glycine max
tctctctctcttctgtatttgtcttgattccgatgcgaatgggtatcctattttatctggagacctgacatggtaaaacagtaacataactatgttttaagctgatttatagactttgccctctggttccattgaattctgaaccatatttatgatgggcaaagggcggcggtaatttaagtcagatgaaaattcagaacatttttgtgggcaaagaggcagaagttattactaatggctttgagggttatagcaatttcagtggtttctacagtattaagctttgtgggtctgcagttttgcacagacttgtctttggataaacttacatcagatgggctagtcggctggaatctaattcacttggacaatgccagccaagacattgagttgcctttgggtttgtacaccaccatagggctactggtgaattgcatgatcaatgtatttatccttctcaatctttgcctcaggctgtgtttttacggagttatatgcttctgaactcgtaact

SEQ ID NO: 27390 - DNA, 358 bp, Glycine max
ccatggcttcccacgttgctcttcttcgtgctcctcctcctctttcaatctccactcaacgcttccatgccaaacagatttccattaacggactcaaattcacttcttcttcttcttgttttccatgttccataacaacacagagagggtcttgttcctctgtgattacatgttcatcttcgaatgacagagacccgaattcggtggatgatgaagatgtaaaacaagtggagcgcattctcgaagacaaacgacgagctgcattgtctgctaagattgcctctggggaattcaccgtgaagcagaaatctggtctactttcaataatggagggctggcaaaggtgggggtgccaatg

SEQ ID NO: 27391 - DNA, 700 bp, Glycine max
gttaaaacttatttgaagccagaacatcctagtacctctgtgttctctgcggagggtgtctctgttgtcccaggtaacatcatcttgaatggcagtaataatggctttgaatggttattattacaacaatataaagttgggaaatcaacgaagagcaccacacagtctcagtttgccaggatcaatttcagttcataaattgccaaagaatagaaggtcaaaatcttacgagtcagggaatgataaatttcctaggttcctggtagaaatgcgacagacagaattaccttcatcaaaatatggtacaaatggtagagctgttaaaatggttccagcaaatgaggtagtgaaaagaaagacaatgtcagagaataaagtggaaatggcgaggggttcaaagcaagctgttaatggagcaagtttggtagaaagagatcctagcctggccttgacaaagacaaagaaatctacaacctctaaagaacttccaccactggaagagctaaaagttttgccctcagatgaaggattcagttgggccaatgaaaattacaattccttgcaaagatcaattgatgtttggtcttttgttatttctttacgtattcgagttctgttggacaatgcaaaatgggcatatttgggtgactttacagaagaaaaacagaaaagcagaaggcggaaaactgctgcatggcta

SEQ ID NO: 27392 - DNA, 377 bp, Glycine max
cttttccacttctacaaagatggtgtcctgttggaagcattcccaaccagagacaaagataggattgttgcagccatactcaagtactcatctcttgaaagagaagatatcttaggttaacttcaagggatggtatggtcacggcaccctccgagacagtggtgcactgcagggaaattagtcaagtattgtacgtgacaaagttcgttaaacatgttgtatactcaaaataataatacacttcagggcttgccaacctaattcactttgttaggatccaatatttgcttgcaaagtatctagtgaagagtttaatgctaactatgatactcccttctctttccccagaggtcataaataaaattttctttctgctt

SEQ ID NO: 27393 - DNA, 305 bp, Glycine max
gtcgagcttctgttttgcaaaggcagtggaaggaacacaatggcggtttctctatcggcgctcacaacctccctctcttcactctccttctcttcccacatttcccagagaccctgcactctctccttcgccagaaccgaatccctctctctctccgtctcccccttccccaaaaccccctcctccctcgtcgtcaccgccaccgcactcgccgaaccggaaactgaggacctgaagaagtacgtcaagtcgaggctcccaggtggattcgtcgcgcagagaatcattcgcaccggccgacgtaa

SEQ ID NO: 27394 - DNA, 298 bp, Glycine max
agaggattcccttgccgtgggagattctgcagccttcgctcagaatcctggggcactgtctattgggaccgttgaactctcaggatgtgaaggacgccgcttccttcgcggtgcggtgcttgtacgcccgcgcttcgcacgatttggtgccgcaggcgatactcgcgacgaggagtctcattcagcttgatgtgaggactcgagaggctgccaagacgaatcccgccactaactcgaacgccaacacccccaccaaggccacgaagccggagattcttctggtttccaagtgaggagg

SEQ ID NO: 27395 - DNA, 1122 bp, Glycine max
ctcgagcgttttgctttgccacccttcagccagaacactgtttaagttcatgtcatgttggccaacttcggattccaacttttgtttccttgtacttcactgtttactaggttaattaatctcacttcctagaattttcatttttcaacaacttttagtccaagagaataagcatatattctgttagtggtgtgtgctttcactttttgcttttatgacgggtctgataggcatcttttcactgctgctttgcaactactagaattgaacaaagtggtagtgagtctcctttgttgtaaaagggtcatctctaatttggactactactactatgcctccttcacacttccctcttcgttgggagagcacaggagaccgatggtggtatgcatctccaattgattatgctgctgcaaatggcctctatgatctggtcactgagcttctccaccttgacaccaacctcctcattaagctcacttcccttcgtcgaattcgccgccttgaagccgtgtgggacgacgagtccaagtttgaggatgttgccaggtgccggtccaaggttgcaaggaatcttatgattgagtgtgagacaggaagagggcacaactctcttatccttgcaggctatggtggatggcttctctacactgctgcttcggctggggatgtagactttgttcttgagttgttggggagagaccctcttttggtgtttggtgagggagagtatggtgtcactgacatgttttatgctgcagccaggggcaagaactgtgaggtctttaagctcctgcttcattctgctctttcaagaaaggagtgccttggtggcagtgaagcagaattggaagagaagttggatgaaggttctaaggttttcaagagggatgtgatgaatagggccattcatgctgctgccagaggagggaattgggaaatactgaagcagattctaggaagtgtttctgtttctcaggttttgtcttatagagatgccctaggatgtactgtcttgcatgcagcagctgcaagaggccacgttgaggtggtgagaaatctaattgaatcctatgatatcatcaactcagctaatgctcaaggcaatacagcattacatgt

SEQ ID NO: 27396 - DNA, 299 bp, Glycine max
cttcactcttactcagttctggtttacatttcaaactgggttttctggtcagagattctatgatgattggtttcagtcattatataatgttatcttcacagcacttcctgtaatcattgttggattatttgacaaggatgtcagttcatctctatccaagaaatatcctgaactatacatggaaggaataagaaatgttttcttcaaatggaaagttgtggccatatgggctttcttttctgtataccagtctctaatattcttctattttgtgagtactacaaatttaagtgctaaaa

SEQ ID NO: 27397 - DNA, 164 bp, Glycine max
accaccagccctactcaccgtcatcccaatctctccgcgccctccatgttggagcggactctctcctcccgccgcgtcaactcctgcgccgacggcgacgccgacggagacgccgacgaatccaagacaaagaagaaccaacacattctcttccacacaacata

SEQ ID NO: 27398 - DNA, 1831 bp, Glycine max
  unsure (1)..(1831): unsure at all n locations
acttcccaaaccaaacgttaaacaatacttgttttattttattttaatttactcttcttttccattagttctttcttccactgataatccaaaacaatctcncttactttaaatcagcaaacatctcaagagagtgtgtgtgagagatggcaggtatcgctggtacatgtcctttaggagcattgctcagaaacagtgtctcagaaaacaatgggaagatatctgtggttcattatgaggggcttagattgcagcagagaatgcaaatgccttcaccaagccagtacatttcagcttcttcatcagctccaagatgcagaacaatcaaggccatggcttccccaactgttggagcaccaaagagagaaaaggatccaaaaaagcgggtagtaataacaggaatgggtcttgtgtcagtctttggtagtgacgttgatgccttttacaacaagcttcttgagggagaaagtgggataagcctaatagataggtttgatgcctcaaacttctcggtccgttttggaggtcagatacgtgatttctcttcagaaggctacattgatggcaagaatgaccggcgccttgacaattgctggaggtattgcattgttgcaggcaagagggcccttgatgatgccaaccttggaaagcaagtccttgacactatggacaaaacaagaataggagttctggtgggatcaggaatgggaggtataacggctttctcgaatggtgtggaagctcttgtacaaaagggatataagaaaattactccatttttcattccctactccatcaccaacatgggttctgccttgttggctatagacacaggcctaatgggtcccaattattcaatttccactgcttgtgcaacggcaaattactgcttttgtgcggctgctaatcacattagaaaaggcgaagcagatatcatggtggttggtggaactgaggctgcaatcatgcctagtggtcttggaggcttcattgcttgcagggctttgtctcacagaaacgaagaccccaagaaggcttcaagaccatgggacaaagatcgtgatggttttgtgatgggtgaaggctctggtgtgctggtaatggagagcttggagagtgcaacaaaaaggggagccaaaataatagcagaatatttggggggtgccataacgtgtgatgctcatcacatgactgatccaagagctgatggtcttggagtttcatcttgcataagcaagagtttagaagatgctggagtttctcctgaagaggtgaactatgtgaatgctcatgccacgtcaacactggctggtgacttggctgaggttaatgcaattaaaaaggtttttaaggacacatcagaattgaaaatgaatgcaactaagtcaatgattggtcatggtcttggggctgctggtggtttggaagccatagcaactatcaaagccataacaactggctggttgcatccaagcattaacctagataacttggaggctagtgttacaattgacactgtccctaacgttaagaagaagcatgaagttaatgttggtatatccaactcatttggattcggtggacacaattcagtagttgtctttgccccattcaggccataagtaggattcaaactcaatctgagtatttcttttactttgtcttttttttttctttacacattttgagaaccagtgatttttggacacaaattcataggactatgagttatggactgaaaatagttgtttcattatgtattgaaatcatatacccagatcgtgtggtctaatgtaatgagccctgaagtcaataaaatgtaattttcagc

SEQ ID NO: 27399 - DNA, 247 bp, Glycine max
ggctggttgcatccaagcattaacctagatgtaacctcctgaaccagaaattcatcctatcctattaatcatatgttacattgtgtaacttttgttgattcccacaagatcttaatattaagtgtctaattttctcacttttccgcagaacttggaggctagtgttacaattgacactgtccctaacgttaagaagaagcatgaagttaatgttggtatgtattttctcttcaattgaatagaggta

SEQ ID NO: 27400 - DNA, 423 bp, Glycine max
gagaaacttgacaaatgaacagcagcagcaattactgaagtatctcccagtggttgatactgctaaatttcctgatagccttagaaacatgttcaatagcttccaattcaaggagaacttaatctattttcagcaacttctcggggaaggagtctttaacatctctttgttgggggcaaaacctgaagaatggaagacattagaaaggcttgcattatctaatctgtcaaagtcgaaatgggtagaacactataattttcttaagaaatgtgaaaacaaatctggaaaatctattggtttgggttctactgctatggaatcaagtaatgttacaactggcaaaagaatgcgtgagcatgacagccgaaatcaaaatattccagaattgaagacaacgatgaggagccccaagggtgatcataa

SEQ ID NO: 27401 - DNA, 282 bp, Glycine max
ctcgttcgcttctttctctctctagggttttgggggttctgagtacacgttgtaaaacatgcagctgacacttgaattcggagggggattggaacttctttgtgactccaagaagattcataatgtcaatattgagcaacacaatggagaagacaagttaatcatgaaagatttgctttcttgggtacagaccaacttgattaaggagaggcctgaaatgtttatgaaaggagataccgtgagacctggagttcttgtccttgtgaatattgtgattgggag

SEQ ID NO: 27402 - DNA, 276 bp, Glycine max
cggctcgaggaaaaggttgtgctgcttctctctctgtctcctcgttcgcttctttctctctctaggctgttgggggttctgagtaaacgttgtaaaacatgcagctgacacttgaattcggagggggattggaacttctttgtgactccaagaagattcataatgtcaatattgagcaacacaatggagaagacaagaccaacttgattaaggagaggcctgaaatgtttatgaaaggagatactgtgagacctggagttcttgtccttgtgaatg

SEQ ID NO: 27403 - DNA, 282 bp, Glycine max
taatttaatagaaagtgtgatagggccatgaattgctctgtgtttcacgttatttgttgttttatgtgagacgaacttctaagacatgttggagtaccctgctggtgtttttgtttaaaacttggaaatggtttcacataggagaagagtcgtgggagtatcttctttcccagccagaacttgaggcacttcatagtatcaacattcaactaagtgggaagagagatggataagattctggaggccgatgcaaatactatgtctcacattcctcgtcttcag

SEQ ID NO: 27404 - DNA, 447 bp, Glycine max
gaaacaggttccatgtcggccaggacttgggggagcaattgttcctcgatcttgtgatcatgttcctcagcctggtgaagaaccttgtccaattgatccctggctcgtggttcctgacaagagcagatatgttgatcaacaaactttgaagatgcaagaaaatccagaggatgttccaactggagaacttcctagaaacctgcttctctctcttgatcgacatctggttcagacagtggtgcctggctcaagattgacaatcatgggaatttttagtatctaccaggcttctaactctaatacatcccacaaaggagcagttgcaattagacagccttatattagggttgtaggaatagaagaaacaaatgagaccaactctcgcggtccagctgcatttacacaagatgagatagaagaattcataaaatttgcttccgaacctga

SEQ ID NO: 27405 - DNA, 471 bp, Glycine max
ccttaaacaagttttactccaaaggcgcggaaagagtcgctgattgagatggataaactacttgcggcctgacccgaagagaggaatgttctctcaacaagaggaggatcttatcattagtcttcatgaagttctaggaaataggtgggctcaaattgcagctcaattaccagggagaacagataatgagactaagaacttttggaattcgtgtttgaagaagaagcttatgaagcaagggattgaccctgcaacacacaagcctctcctcggtgctgaagaacacataattataaaggaagagaaggaaaccatattggagacaccacctaatcctattctattacaagtgtctaagggattttagtttcctcaaatgagtcaccacttgtagtcaacaattcaagttactatgatggtggactgaatgtaacagaagaagcttcaagggacgttttcatgagcaagaat

SEQ ID NO: 27406 - DNA, 659 bp, Glycine max
ccaaagcaaaagttgctgtcagctgtgaacacgaaagctttgaacacagaagctttgaacacggaagctgtgaacactgacagtcctacatttgctgcttctcccaagagtgatgatacgtcaaaaaagccccagactaccaatgaacagggagttggtaatggatctgtttataataaaagtgaagatgggtctgtaaaaagtgctcccaatagtccatttgctagcagtgctattggaagcccgcatggggattttgattctgccattagaaagacagctggtgaagatagctcactccgtgatcaagataccatacaagaaacccaaagtgatcatggtggtgtcaagtctgtgttttctggagacaaaatttttgatgaaccaaattggggaacctttgacacaaatgatgatattgattcagtttggggattcaatgctagtagcttcactaaggaggagagagatcttgatagagctgggaacaactatttctttgattctggggaactgggcttaaaccccatcaaaacaggttcaccacaggctggtgatttcttccagaggagcagtggattcggttttgatgattctgttccaagcacaccactttacagctcaagtagctctccgcaaaggccaaaagagtggttgga

SEQ ID NO: 27407 - DNA, 484 bp, Glycine max
ttttaatggaaactacacagccaatagcatctaccaaaccaacctcaatacccgcttatccaccctcacttcccacacagaaatcgactatggtttctacaatttgctcgcatggccaaaactcagacaaagtatacgcaatagggttatgcagaggagatgttaagccagacgaatgtcgcagctgcctcaacaattctagagtgagtctcacacggttgtgtccaaagcagttagaggcaatcaattgggaagagaagtgcatgtcgcgctactccaaccgcgcaatttttcacaccatggatgcttctttttcgtatcatatgaacaacgtaaacaatgcaacggatgcggaagagttcaataaagtgttgggtgagttacttagaaatctgagtgacaaagctgcatcaggtgactctcgtcgcaagtatgccgcggatactgcagtctttgcgaatctccaaaccatatacggtcttgt

SEQ ID NO: 27408 - DNA, 297 bp, Glycine max
ctcgagccgctcgagccgctcgagccgattcacagacaagctcacagatacagaacctgtctcccttctctagtgtaatggcttatacaaattctttgcccagtgcactgttggcttcaactgttcaaacagcaagggaggatatcccatactcacccttccctgcaacacaatcaatgcctgcaaaatatagcaatattgcttcttcaattggtggtcccactataaacatgtcagaggctctaagggcaaataacatttcaacacctcaacctaatccacaagccctgcctggtg

SEQ ID NO: 27409 - DNA, 361 bp, Glycine max
gatatgtgatgcagttgctgtggctggactactaaatgcaactcttcttattcctatatttcatttaaatagtgtatggcgagactcaagcaattttggtgacattttcgatgaaaatttcttcatacaatcacttggaaatcgtgtgcatgtggtgagagaactccctgatgacatacttcaacgatttgacaataacataagtactattgtcaatcttagagtaaaaggttggtccagttcagctcactatcttcagaaggtccttcctcagcttttggaaatgggggctgttcgcattgcacctttctccaacagattagctcaagcagtaccctcaaaaatccaagggcttaggtgc

SEQ ID NO: 27410 - DNA, 1027 bp, Glycine max
ggaaaaagagctccctcgtgaagttgtgactgaaatcaaattgctccgactcccatctcagccagaatccacacctaatgcaatggaagcggagtccttgaatgaaaagagtatcaggagaatccacaaggcattggactctgatgatgttgagctactgaagcttcttctaaatgagtctagtgtcactctagatgatgcacatgccctgcactatgcttgtgcctatagcgattctaaggttattcaagaagttcttagtctaggcatggctgatattcttcgtagaaattcccgaggatacacagttctccatgtggctgcaaggcgaaaggctccatccattttggtagcactactgaataaaggggcgcgtgcatcagataccactccagatggacaaactgctcttgcaatttgtcagaggttgacgagatacaaggattatcaagagcaaacagtccagtgtaaggaatctaacaaggacaggctctgtgttgatgtcctggagagggagatgagaagaaattctatgactgtgaatatgtctgtctcatcacagctaacagccaatgatttgcacatgagactggattaccttgaagatagagttgcatttgctcggctgttttttcctgctgaggctagggtagccattgagaatgctgaagcagattcatcgtcgatgtacgcaaactcatcggctttgaagggcacaaatggcaacctgaaacaagtagatctaaatgaatctccctctgctcataccagaaaacttcagttaagattacatgcccttatgaaaacagttgagaatggtaggcgcttctttccccattgctctgaagtgcttgataagtttctggaagatgacgatatgccagatgttttcttcctagagaagggcagtgaagacgagcagagaatcaagaaagcacgcttcatggagcttaaagatgatgtgcaaaaggcatttcacaaggatatggctgaaaataaccattctggtttttcatctacggtgtct

SEQ ID NO: 27411 - DNA, 248 bp, Glycine max
gtcttttgatactccagttgtggaagttgattcagctgttcaagatgaaagtctcaaccttggtggacatagggctgcttgccatgaaaaaattgatatttccaagatgtcagaatctacccctcttgaatcatctgtctgtgatagcagttctcttgctgcaactcctggaagtgttgtatgggcgaggacagatgctcaagtgtggtggcctgctgagatcctggaagacacatctgtgctatcca

SEQ ID NO: 27412 - DNA, 374 bp, Glycine max
aggggtacctcgatcccatgccatgtgcggatggggcattattatttcactttgtaaatagtaagtgtgtctctcaaacaaagatgagatctttggtgttggatttttgacgaatgaaataatagtattatggagaagaagaaggaagaaggagggaaagtggggctgagaaagaagccatgtgggtgtgtgtgatttttttagttctctctgacaccaccccatctaatcttaacacacaatgagagcacaacatggaagaaaagcacttgagatagatctaaacatggaacatgaaacatgagagagtgagtggtgttgtttttgtttgatgcagttgttctagatcttgttgagaatgatgagtggtagga

SEQ ID NO: 27413 - DNA, 475 bp, Glycine max
atctctcattctcccacccacccacgctacaaaacgccataaaactcacacagcacccttcttcccacttcatttccacgatgatggaaccaccaaatataactaattgctgcaattcacccgaatttgagttctggatgctccgaaacccttctttccctcaaccgaatcttctctccgccgacgaactcttcgtcgacggcgtcctcctccctctccatctcctccctaacaaaccagaccctccccaagcctccaactttataactccgatccaagaacccgacccggaacccgaacccgaacattcgccgagcataaccgaatctacctccaccaccgcgctctcatcctcgaagcggtggaaggacattttcaaaaagagtgataagaaaaacgcagagaacaacaacgaagaaaaagagaaagtgaagaagaaagagagacaaagtggaagcggaagcggagcgagttc

SEQ ID NO: 27414 - DNA, 387 bp, Glycine max
aatagaaccagttgctgcaattcacccgaattcgagttctggatgctccaaaacccttcttttcctcaacccaaccttctctccgccgacgaactcttcgtcgacggcttcctcctccctcttcacctcctccctaacaaaccacaccctccccaagcctccaactttataactccgatccacgaacccgaaccttcgccaagcataaccgaatccacctccaccaccacgttctcctcgtcgaaacggtggaaggacattttcaaaaagagtgataagaaaaacgcagagaccaacaacaacgaagagaaagagaaagcaaagaagaaagagagaaaaagtgcaagtggagcgagttctgcggaattgaacatcaatatatggccc

SEQ ID NO: 27415 - DNA, 852 bp, Glycine max
  unsure (1)..(852): unsure at all n locations
ttcatttgaattgtttgagttgttggtggggccattcgccatgtcgacgaatccaaaggaaaataagggaaatagtcatctttttccggcaggtgacctagacagctccaagggcgttacaatatagaactttttttttcttcttttcggttactttgcaacatgtgaattgaccgttctaattgtcccgaaccatgttttactctgttaggatgtgggttttatttttggcgtgaaagataatgaaataacgtgatttttaatggtttttgaaggtgagggggtataaaaatgagncgaagggaagtgatagagtgaagaaaatgttcaaccgggnctgtcaattgatggggttaacgtggcttcttgcaaagaacaaaacggcgtacatacccaccgtttcggcggtgctgcgtgcgataatgtacagtgcgcaccctcacgagtccaagtgtagtcccgaccaggagaacatgccgctggccgtttattcgcttcagttcgagaacggccacgcgccatcgcggccgtccaagttttgcgtgacgattttgcccctcttggttttcttattttccgcttttgttgtgtaaaaaaaaagggtgggcccccttggtggggttagggtctgtcctcttctctttctctctctctcgctatcacgtgaaacttagctactcgacaaaacatgcaaacaaacgggggtagtttgttttttacttgaaagggtttttctggctgtaaattttcaaagtccattgacatgtttgtgtgtacagtgtcccccacttacataaaaaaaagtggttttttnnnnnnnnnnnnnnnnnnnnnnnnnnnnnnnnnnnnnnn

SEQ ID NO: 27416 - DNA, 899 bp, Glycine max
gctcacgcccgcaccgctcttgatgtctccgccgcccctcctccgtcctccgccgaccttccgatgatgcccgacgactcccaaaaatgcgtcaactcgctccaggattcgcttctctcccgcaacatccgaatccctcagcccaacgccacgtgcgacgctattctctgcttctgcggcatcagactccaccaaatcacgtcgcttacctgcaacgctgcgtttaacgtctcgctttctcacaggaacgccaccccaaccgctgcggttcgcaacctcgagaataattgccgtaactcctcttacgctggttgcaccaaatgcctcggtgccctacaaaaggtgaaggggtataaaaacgagacgaagggaagtgatagggtgaagaaaatgttcaaccgggactgtcaactgatggggttaacgtggcttctggcgaagaacaaaacggcgtacatacctaccgtttcggcagtgctgcgtgcgatgatgtacagtgcgcaccctcacgagtccaagtgtagtcctgaccaagagaacatgccgctggccgttgattcgcttcagttcgagagcggccacgcgccatctcggccgtccaagttttgcgtgacggttttgcccctcgtggttctcttattattttccgcttttgtgtagaaagggtgggtccacttgctggggtttagtgtctgtcctcttctctttctctctcgctatcacgtgaagctgagctactcgacaaaacatgcaaacaaaacatggtgggttgtttttgtttctgactagagggagggtttttctcgctgtaaattttcagagtccattgacatgtctgtgtgtacatgatgctagtgcggtagtgtcaccaacttacatagaaagaagaggtttttttt

SEQ ID NO: 27417 - DNA, 594 bp, Glycine max
ttgcttgattacataatctgtgcagagagtgatgtatttgttccgtcatattcaggaaatatggcgagagcagttgagggacaccgcagattcttaggtcaccgcaagacaatcaacccagacaggaaaggacttgttggaatttttgatatgctggaaactggagagctagtagaaggaagggaactgtcaaatatggtgcagcgcatgcacaagaacaggcaaggagctccaaggaaaacgcacggttctctaccggggattaaaggccgagcacgatttaggactgaagagcccttttatgaaaatccatatcctgagtgtatatgtggttctaaaagcaaactagaaataacataacgacaaaccaaactgctgttctaatctagaatttttggaaggaccggctaatctgtaaatttggttttgatcaactgcgtaattataattagccatttctggtgtacttggtttgtctgtgaccaatagctatacccttgatcaccaactcataatgttggctgcttattttacaatatttgttttgtatttcttattcttcatagaactcaaaaaacgaattactttattgtt

SEQ ID NO: 27418 - DNA, 441 bp, Glycine max
cacccacacacgcgcgcagacgcagagtgagtgggtaaagcaaaatcatcaagtgttgttcctccctgtcacttgctctcttcttcttcttcttagtctatcattccttccttccttcctttcgatttccgcattcattcaatggcacttacaacactctctctgctcccaccctccactcctccctgcttctgcggcaccctccatctccgctcccacaacagcttcctttccatccattctccttcttcttcttctccctttccttccttctcctcaatttcaattcccaaccactctcccacgcgccgccgctttcacactgtcttcgccgcttcctccgactactattccactctcggaatccccaaatccgccaccggcaaggaaatcaaagccgcctatcgaaggttagctcgccagtaccatcctgacgtgaat

SEQ ID NO: 27419 - DNA, 287 bp, Glycine max
ctctgattatggtaaatggaatgccagatggaccatacacatcttatgatctcaatactttactcaaagcaacagctggacaacgacgagcagtccttataggtcaaggagataaactagtgggagaggccagcagaattgtggttgctgaagcttgcgtgcaggcactagatcttgaagtcactgaaaaccaagtatatgaacgttaactctgttgagggggaaggtcctggaaatgaagctaagaagtggcaagaattattcgaggctgcaaactcccgctaatt

SEQ ID NO: 27420 - DNA, 408 bp, Glycine max
aggggataacacgaattgaccacagcagtcttagtggtgttgggaactctactagaaatctgcctgctactgagatgccaaaacaagggaaacaggctcaggttattcatggtttgccagattttgctgatgtttacagcttcattggaagtgtttttgatccagacacagaaggccatgtccagaagctgaaggaaatggatcctataaattttgaaactgttttgttgttaatgaaaaacctcactgtcaatttgtctagtcctgactttgagcccgttacgaaggtcatgtcgtcatacgatgtcaatacaaaaacagtaggagttaccgcagaattgacgtcaagaagcagacaaatgatctatcatgtcaaacagcttgacaaccattaattgaacttattat

SEQ ID NO: 27421 - DNA, 439 bp, Glycine max
cttagggtttatcgattattctgaatttttcatactgaattttaatttaatctcataagcatgttgtgattattgttctggaaattcgcagattgacgagttaccagacttgcattgaaatcgtatcaaacaatgtcgtagctgttttctttttcaaatcctgagttgttagtgagtgtgcccaacaatggcagctgttaggtcttcctctgtaagaaggttaggaagcacaattcagggttcttttaatatggaattagttcaacactgtcactatcaccatagtatgtgtatgaatcttgcaaggttgccaagtgattcactgagtcatccttattacaaaagagagctacagtttgctaagaatcggtttagtaatttggcctctgaatcccttggaagtagtcatcactttggcactagagccagtgtatcggta

SEQ ID NO: 27422 - DNA, 290 bp, Glycine max
gttacattctttcgtcccttcctgtgtctgagcagaaggagttcgcaaccgcttcccttcttcctttttagcggcgtctctgttgtgcaacatggaggacaagatagagactgcagacaaaaaggtgctggttgatattgtaaaattagcacaaaaaagaggcttaaagggtaatctgggaggctggaaagaactcttgaacagtcatgataacaagtttggcggcaggtctgagtgatccatcaaagagatcccatgaggtattggctgcatttctaaagacattttca

SEQ ID NO: 27423 - DNA, 282 bp, Glycine max
cattgttattagaaaatattgactatgcacttgacacgttcctaatttatatgctaacactgtctattttccctggatccctcttagaagatactggatcacatagtttaggcccctggtatgctcttgttttaattgctatgtataatgtgtgggatctgattggcagatacattccactcttgaaatgcttgaagttggagtcccgaaagttgatcactataacaattcttagccgtttcttacttgttccagcattttattcactgctaagtatggtga

SEQ ID NO: 27424 - DNA, 331 bp, Glycine max
aggctactttggctcctttaattggatcctctattcagtcagctactggggtagtgtataatattactggaggaaaggacataaccctgcaggaagtgaacagggtttctcaggttgtgactagtttggctgatccttctgctaatattatatttggggctgtcgttgatgatcgctacactggggagattcacgtgactatcattgcaactggcttctcacagtcttttcagaagaagttgctaacagatccaagggctgcaaagctgcttgacaaggtggctgagggccaagaaagcaaggtagtccctcctcccctcaatcctcaaac

SEQ ID NO: 27425 - DNA, 447 bp, Glycine max
gtaacggtgattttttgtgagtgtggcatagatcattgaatcaatggccttcgccaccagcgccttggtttgttcaaacttgctcggaaggaaggttctagtcacaagcaaatcatccactccactaccatttcttttcaagagaagcatcttaaaagctcagaattcagagcaagtcaaatccgcatcttcacgggctgctctagctgcacttatcgtctcctccgcgagcctctctgtgaccccagaagccctagccgctgataacttgacccctccccccggtgattgaagcgcaacagagccaaccctcatcccctttctcacagaacctcctcctcgctccgcctaagccccaatcctcttccgacctccccgaaggcaccaattggcgctacagcgacttcttaaacgccgtcaagaagggtaaggtcgagcgagtcaggt

SEQ ID NO: 27426 - DNA, 388 bp, Glycine max
caggatttgttgctatgcggtgtatatgcacgaagagaggctacttatggtaacattgatcacgcaagacaagtgtttgacatggcattgttatctgtagaagagcttcctgtggaactacagtccaatgctcctcttctatatttctggtatgctgaggtggagcttgcaaataactctgctaatgatcgtgaatcttcatctcgtgcaatacatatattatcatgcttaggaagtggtacaaagtacaacccatttaaaagtcaagcatcaagtttgctactgcttagagcacatcaaggatttaaagaaaaactgagaacagtgtggtcatcttgggttcgtggtataataaatgaccagtctgtagctctaatatgttctgctg

SEQ ID NO: 27427 - DNA, 641 bp, Glycine max
ctcaaagtcaacatttgattgaagtcctttatggtggtggctctttgggaacatggtgggatgaacaaagaatatggattgtaaagtcaattgttggaggcatatttggatctatactagcaatcaagacacgttttgggttaaacaaagcaaaattcattttatcaaataaagttgttgccaaagagaagtttgagacatatgaacaaggtaagttcgagttcgaaggtgcagctttgttcatgtctccattggttggattactcatagtgaatattctttgcttctttggtggtttatggagactatttaatgtgaaagattttgaaaagatgtctggccaactttttctacttggctatctggcggcgctcagttatcccatttttgaggggataatacccatgaaaagcaaggtgcaatagtagtttgtcaatgattaggctaatttaggtatttgaactttgttcccaaataatttgcttcatatgaaaatctaaagtgcatgctaaatgtttgtatcttaatatgtaattagcgggcttttatttcatgcatgagaatatggctatcgattttaattaggagcaaaatgtatgttcttactccatttttaatgcaatttctttattttcttgccc

SEQ ID NO: 27428 - DNA, 287 bp, Glycine max
atttcaacataaactgacaagcagtgcccatcgcttcaatttgatggttcaggacttctttgaggatgtaggaccactgcttagcatgcagttgggaggccaagctctcgaaggattgtttcaagtatttaactcctatgtgaacatgctcataaaagcattgcctggatctatggaagaagaagcaagctttgaagatgctggaaacaaaattgtacgcatggctgagactgaggctcagcaaattgcgttgctagctaatgcctcattaatagcagatgaactac

SEQ ID NO: 27429 - DNA, 420 bp, Glycine max
tgttttgacaatgcagcaatggaattttcacttgaaacattacaaccaacttatagaatcctttggggatgtactggtgattcaaatgcgttaagcatagcacaatctattggctttgatagaaatataattgatcgtgcacaaaaatgggtagaaaagtttaaaccagaacagaagcagagcggagaggaatgctctatcagtcactacaggaggaaagaaaccagttaaaggctcaggctgaaaaggctgcatctgttcacgcagaaattatgagtgtgtacaatgagctccaaggggacgcagaataccttgatcaacgtgagatggaacttatggcaaaggaaacacaacaggttccacacgacatacgaatttaaaaatctcagatagaaactgtgatacagaaatttgagaagc

SEQ ID NO: 27430 - DNA, 448 bp, Glycine max
agcacagtccaaatagaaaattgccagtgagtctgacaaggaaacagcagcgcagcggagtgagcaatgccggagcttccagaggtagaggcggcgaggagggccgttgagtataactgcgtcggaaagaggataacaaagtgcgttgtcgccgatgattctaaggtgatccatggtgtctctccctccgacttccaagcttccgtcctcggcaagctcatcgtcgctgctcaccgtaagggaaagaacatgtggcttcaacttgattctcctccttttccttccttccaattcggtatggctggtgctatatacattaaaggagctgcagtaacaaactataaaaggtctgctgtaaaagacgaggatgagtggccctcaaaatattcaaaaattttcattgagttagatgatggtttggagttgtctttcactgacaaaaggcgat

SEQ ID NO: 27431 - DNA, 485 bp, Glycine max
gacgcagcaagatctattcaatgccatgggatcgatgtattcggcaatcctcttcattggtataacaaatggcacagctgtccagcctgttgtttccgtggaaagatttgtttcttatagagaaagagctgcagggatgtattcagctttatcatttgcatttgctcaggttgtgattgagttcccttatgtgttcgcacaggctattatatactcttcaatattctattccatggcttcctttgtctggactttcgataggttcatttggtacttattcttcatgtattttacgatgttatattttaccttctatggaatgatgacaacggctgtcacaccaaatcataacgttgctgccatcattgctgctccattttatatgctgtggaaccttttcagtggttttatgattcctcacaaggtatggaaaccgatacttcattggtactcaattgataattttttgtcattgactgcattca

SEQ ID NO: 27432 - DNA, 459 bp, Glycine max
cgtataagaaatatgaatcgtgactcagttaagtttagagatgaaccaagtggcgaggtggcaagccaaaatctctcttttccggtgcttctaccaaagataccaggtcgcttttactttctatttgggaagcccataagaacaaaaggcatggataagatgctaaaagacagagaaagtgccaaccaaatgtacctgcagattaagtcagaagttgaacacaatttaaattacttgatcaagaagagggaggaggatccatacaggaacttcatcgataggaaaatgtatcagatattttatcctcctgaaactgattcaaccccatcatttaatccctgaaaaatgttttgatatatataatactgatttttatgtaatcataattatttttaaacaggtacatgtacatgtacatggccattattctaataaaatatggtgctttctatgtaccct

SEQ ID NO: 27433 - DNA, 257 bp, Glycine max
ctcgagccgtgaaggttttgtgagactttcctcttttgaagtctatgatacaattttaacgttgatgaggagttacagaggaaatataaacagtctgtagaaaaatcacaaattcaagttatgaagttgtcatgaatcataggttgatattttacccattagttagcttttggaatttagtttgatccaagtttttttgtttcaaaggagtaaaggtcctccttggcctcaacaaaggttgtaaaaaatataggtaa

SEQ ID NO: 27434 - DNA, 407 bp, Glycine max
acgagacgaaatggctcaggttcctcaatttccttcgaaactgttattcttctgcgaagtggaacccaggagtgggggtgaaacccccattgttcttagccacgtggtgtatcaaaggatgaaggacaagtaccctgagtttgtggagagactagagaagcatggtttgctttacaccagggttttaggggaagatgacaaaccctaacttctccaatttggccgtgggctggatattctacccttccttgaccacctgacaaggacccttcgctcatacataagggccggctataactggggtattgtaagttggtaatggtgttggaagatgtgggtgaaagacaagtcatgtggtccaaattccgggccggttaaatatgatggaggaggaggacaaccaaaag

SEQ ID NO: 27435 - DNA, 263 bp, Glycine max
cttcatttgtaaatggcaatgagctcaattcatacgttgtacgcttcttccttccgtttgtgtttcccaaattcatcaccacaatttaagcctctgaatgccattcctctcggaggaacaaaactctacaacaacaacaacgttaaatttcccagagaaagaacaaggaccagagcaacccttgatgatgttgaaacagaccaactttcctcaaccccacttgttgagaatgacaagccaaaaaggatgtagatgatagtgtg

SEQ ID NO: 27436 - DNA, 417 bp, Glycine max
caactttgaaaacaattgaacaacataggataaagagacaacactgtagtatttgtatatatgtggtaagtttcaaaatagataacagtggaagtaacgaacaaccaaacatgtctccttcatcattgtgctctcttcaaacgttcccgccaatatctcacgcattgcttaaccgccaccacaaaccggcgcacgatagcaccgccggcgtacggagaagaacgccttacgtagtttgcgctgaaaaaggcagcagagcttcgacgcgaagccagatgattaccacgccactctcaaagctctcaactccaaaggcagattccccagaaaatcacttggccagcattatatgttgaatgctgacataaatgaccaacttgctggtgcggctggtgttgaacaaggtgatgtggtgtt

SEQ ID NO: 27437 - DNA, 285 bp, Glycine max
actcgagccgaatcggctcgaggaacactctgcctctctctacttttcttcacggcggcggtagcggcggagaccggcggcgcagaacccaacctcacttccggcgggctgttatggtctactgctgcggaggaatccgatctggccccgccgccggatgacggcggcttttcttcactcgatggcatgttgcagtgggctataagtcattctgatcctggaaagttaaaggaatcagcagaagctcagcaacggcttccaccaagcgagctatataaacgtcaa

SEQ ID NO: 27438 - DNA, 451 bp, Glycine max
caccattttcaaatcaagaaatttagctagctttctttcaactctcttgggagcttgcttagggctttaggaggcttgggtggagcaactcatcacctctttttctcctctcttcgcatagttcaacttgagaaattcggcggtgggaactgatggtggctctgagcttccagggtgggcgggcaagtcctgcccaaccccaacacccatcattgtgtagtggaagagccgctggagtcatcaggattcggtgtgggatagctgagccatctggtgaacctgctcctttaggacaaaagacgcggtaccatgacggcatttttgagaaggccttcatgactctctttgcacgtaagatggagaaattttcagatccaccagcaggaaaagctagagagaataaggcttggtgggattggggttatgactatgagagtttcgtggatgtgtc

SEQ ID NO: 27439 - DNA, 578 bp, Glycine max
cttagagatccaaggcgtctgtatgcacctggccgactctatcacattgtggagcgaaagccatttaggataggaaggcttccacctgtcgttaggatcagcagtacctgttgatgggaggtttccgcatttagttctttcttgcactgcaacttctgaccatgccatcatttggatagagagagaatcccgacgggctctcgatttaatgcgagataaagatgagcagcatatggagatcccagaagagcagaagatggagaggcatgaatctatagcccgagaacacagtgaagagtaccatgcagcccttaagagggcagttgctttggatattccacaagcatattcaccttcattatatggaacatttaatcaaattgatgttggggaggattctggaagatcaagtgtcctaggttcctccttgtctcacaaaaaacgagcacaaaattggaatgaatttgttggacgcctgtttgatgtggatgattctggtcatatggtgttcaaaaagacatctccataagatatttctttctagcaatgcttaataaagcaatatttgcttgttcttc

SEQ ID NO: 27440 - DNA, 293 bp, Glycine max
cctagctgcaagtgcactcaagctaggtggttttctccttagggaaattaaaagccttcgttgtggtcaccagtttatgaaaaccagcccgttatgcaataaaaagcccgttcccgttatagtcataatccgtcgttgtctcaggatgtttcccagcattttattccccactgaacccccaggaggtgtttcatttcttttcatccaagcatttctgtaccaaacgtttcgtttcacccataagttagttgtgtagttccaatcaaataaaattgtttgcaatttcctggctt

SEQ ID NO: 27441 - DNA, 296 bp, Glycine max
aactggaaatgtaggaagctgttccccactagacaatagcacagctgcaccaaatacagagacaatgcacaactttccatctcattcaaatggcactccttcaaatcaaaaatctaatgggagcaacaacatcaatgacagggcctccactaatacatatctgggcaccaaacctgatacttttgacaagaagccggagtctggaagagggattggctcgtataattcttgtgaactcctaactgtgcagaacaatagcatttcttcatctcagaagaaaacttctgcctgggaag

SEQ ID NO: 27442 - DNA, 255 bp, Glycine max
ctttgcctgaagtgggaaatcataaggatgaggtcattcctaaaaatgttcagcaattctggatctcatgtcctgccagtgataagttactttacatccttgctgtgttgaaattggggttggtccaaaagaaagttctgatattcacaaataccatagacatgagtttcaggttgaaacttttcttggaaaagtttggaatcagatctgctgttttaaatcccgagttgcctcagatttctcgtctccatattc

SEQ ID NO: 27443 - DNA, 603 bp, Glycine max
ggctaggttacttgagcagttatatgattctggaactgcaagcatattctatcgccttatcttgttcaagtatccagactatattgatgcatatctgaggctagctgcaattgcaaaagctcggaacaacattctgttaagcattgaactggttaatgatgccttgaaggtgaataacaagtgtcccaatgcattatctatgcttggtgagttggagttgaaaaatgatgattgggtgaaggcaaaagaaactctccgcgcggctagtgatgcaactgaaggcaaggactcatatgccactctttctctgggaaactggaactactttgcagcagttcgcaatgagaagagaaatccgaagctagaagctactcatttggaaaaggccaaagaactttataccagagttctgattcagcattcttctaatttatatgctgccaatggtgctgcggtagtcttagctgaaaagggccattttgatgtgtcaaaggatatctttacccaggttcaagaagctgccagtggtagtgttgttgtccagatgcctgatgtttggataaatctggcgcatgctttattttgctcaggggaattttactt

SEQ ID NO: 27444 - DNA, 398 bp, Glycine max
cttgagaattgacaatctctcttattaatcaccaccaccacttccggcgaacattacctccgaattccggcgacgccacgcttctgacaccgttgtgtttcagcgagggcaaggtgcttgaacatctgatttgtttgcaaaatggtttcctttgagatgaatgatcgaaagaagattggattagggttaactggctttggtatatttttctcattcctcggaattatcttcttcttcgacaagggattgctagccatgggaaatgtcctgtttgtttctgagtgtccataaccattgggctaaaatccactatgcaattcttcatgaaacgaagtaatttcaagggaacaatctcatttggtgttgggttctttattctcatcatgggatggcctatt

SEQ ID NO: 27445 - DNA, 405 bp, Glycine max
gtttcaatacacggcactattcttggtgattcccttcctcgtaggcttgattggaagtttggcttgcttgtgtaaaatagctgctgctgagactggcttcatgcttttcccaaataagtaaaaagacacttcagttcatgtttgctaagtttcaatgctaccgtcccacttgttgcgtgggttaattagtaagataagagaaatcatgaaacattcttcattttattattgtgtttccttatagtttgtcaataaggcttcttttaaaaagggcctagaacaggaaagtattagctttttcatatgaaactttaggtctactgcccacattgctaaaacaatatggtaaattatgatttttcttttttaccatttttttttaacggaaagtagactgtattaacg

SEQ ID NO: 27446 - DNA, 1179 bp, Glycine max
caggtcttggtttttttttccttttcaccgttggtacatttacttcggcgagcgaatcttgggaagcttgctcggtgacccgaactttgccttaccgttttggaattgggatgctgtagaagggatgcaaatgccaccatatttcgcaaaccctaactcgtcgctctatcacaaactccgaaaccccaagcacttgccaccgcaagtggttgacctgaactatgatccatttgactttaatgatgattcaccttctcatcaacaagcttcgtataatctagccttcatgtgcaagcaaatggtgctagcaagtaccaaagaattgttcatgggaagcccttttcgactcggcgataaccctactccgggtattggctctatagaggctgctcctcataacacggttcataaatgggttggtgctgctgataagccacaccaggaggacatgggaacgttcgacacagctgctagagatcccgtgttctatccgcatcacacgaactcggatcgactgtgggaggatatggaaaaaattgggagaaggaagagaggactatagtgatgatccagattgggtagattctgagttggacttctatgatgagaatgccaattttgttcgcgtgaaggtaagagattgctttgatactaaaagattggggtatgtttacgaagatgttgatcttccatggttgcgaacgccacccacatcgcgaattagcaagctactaagagaagccaaaaagggttcacttttgagttcaaagccatggaaatttcctttggttttggattccataacgagtattgttgttaagaggccgaagaaatggaggagcaaggaggagaaagaacaagaggaggaggttttggtgatagaagggattgagtttggaagtgataaatatgtcaagtttgatgttcatatggatgatgatgaagacaatttgagtggtccggatgagacagagtttgtgggaagttttgtgaatgtgcagcatgggcatggccataatgtcaaaactagctttaaggtagggatatcgaaagtgctggagagtgtaaaagctgaagaagacgatgaggtgctggtttctttggtacctaaggtgggaaaaggggatgccataataagaggcatcaaaattgagtttattccaaaatactacgattatt

SEQ ID NO: 27447 - DNA, 275 bp, Glycine max
ctaaaacccattttcttctccaaaaccttcgacttttctctaaccgaaacgcgcttcggaacatgtcttcttcgctctctcacatcttccattgctccaactttcacgcactatcaaattccgacactactgtgtgtgtgctaattgatcaaggaagttgataaggagccagttcagttttctaccttaacgacagaaaaaaggaccgatcaaattctatggctggtgctgtattggttctctccctcagatcaaaatagagttcggagaggtag

SEQ ID NO: 27448 - DNA, 257 bp, Glycine max
ctgtccctttctctctcccaaactaaaaactaaaacccattttcttctccaaaaccttcgactcttctctaaccgaaacgcgcttcggaacatttcttcttcgctctctcacatcttccattgctccaactttcacgcactatcaaattccgacactactggtattggttctctccctcagatcaaaatagagttcggagaggtagcattgttactggcaatgaaaaatcttctgtaacttctattccacacttgaa

SEQ ID NO: 27449 - DNA, 342 bp, Glycine max
cacagccccttccctttcacgctctctatctcctctctcgtgcgccgatctccctctccgtctggtgcgccgccgtcgtcgctgccgcttgccgatcgcttcttgtcgccgcctccgtcagtcctcgaagttcctgttaacatcgaggacaatcctggagaaagaaccatacaactaaagggaaaattcggagatgagagtagagacacagtcttgcagaggcaaacgaaacacagtcgtttaggaaggcggttcccctgttcctgtgtttgggtcagtggtcaaagcatttgatagtgcaaccaaacctaactaacaattaacacaccaacatcacacaca

SEQ ID NO: 27450 - DNA, 211 bp, Glycine max
gttttctttcttcattttaagccttctttttgctccctatttcacattgttaagaaccctccactagtttttttctagggttaaggaaattaacctaatagctcttagcacattgccttgttcttgcactaggaagaacatgaaggagagtggtagaaaacaaggtaccatgtcgcaatgtgcggcgtgcaagcttctccgaaggagatgc

SEQ ID NO: 27451 - DNA, 375 bp, Glycine max
cacgggccaagtttcccatctctaaatccaaaacctgcctcttaagaaaaagcagagaaactcacacacacaatagataaacaaaccaacttatcctccttcttctcactctctggattcgattcaaaagaaaaagcttatcctctgtcactcatcttcttctgccaaaaccaatgccaccacccattctctagtttctaacacactctatttcaacaaccatgtcactatacgacgccgctttcgtcgacacagagctctccaaacgcacttccatcttcggcctccgcctctgggtcgtcatcggcatcctcgtcggatccctcatcgtcatcaccctcttcctcctctccctctgcctcacctcccgccgcc

SEQ ID NO: 27452 - DNA, 350 bp, Glycine max
tcttgtcttcctcccaattacgattctctcactcacatgttccctccttagtactttctctctcactctctggattccattcaaataactttgtcctctgtcactcaaagcccattctctagtttctaacacacaaacactctcttttggtttctttgttttgatttcaaccacaaccatgttcccagtatacgacgccgctttcgtcgacacagagctctccaaacgcacttcaatcttcggcctccgcctctgggtcctcatcggcatcctcgtcggatccctcatcgtcatcaccctcttcctcctctccctctgcctcacctcccgccgccgccaccaccaccacc

SEQ ID NO: 27453 - DNA, 282 bp, Glycine max
ggagatgtgaaagtacttggattttggtcaagccctttcgttcatagagtgatatgggctctaaagttgaagaacattagttatgagtacatagaggttgataggttcaacaaaagtgagctacttcttcaatccaatccagtttacaagaaagtccctgtgcttattcatggaggcaaagccattgcagagtctcttgtcattcttgaatacatcgaagaaacgtggccagagaaccacccattgctggcaaaagacaaccatcaaagggccttggctcgc

SEQ ID NO: 27454 - DNA, 447 bp, Glycine max
ccgaaaccggattcacttactcatgtggaagccagtgccattccttttgctgcattgacagcttggcgtgctctaaaaagtacagctagaataagcgagggacaacggatattggtagtcggaggtggaggagcagtagggttgtctgcagttcagcttgcagtagctgctggttgctctgttgcaactacttgtggaagtcaaagcgtagacagattgttagcagctggtgcagatcaggctgtcgattatgttgctgaggatgttgaattggctataaagggaaagtttgatgctgttttggacactattggtgtgccagagacagaacggatgggcattaattttctaaaacgaggtggacactacatgacacttcagggtgaggcagcatcaattgtctgatagatatggactgactattgggcttctggaggcaaagctgtt

SEQ ID NO: 27455 - DNA, 1558 bp, Glycine max
cacgagggtttccagaacttcgacttcggatcctgcattgttcggttggccggtcagcgacgcttcttctgcgtccaaacaggtcatctggaatggactcgatggtgccggaagaagaaaggcaagcgccggtgccggagagtcttggtttgaagatctggcgcttctacggttgcctctgtttaaacgattgattctggcgatgagaactgcggagctgagtcctgagattattgagacgtgtgtgatgtattatgctaagaagtacattcctggagtcacgagatcgaatcggaaaccgttaccgacgtcatcttcttcttcatccgttgcgacggaggcggagcagaacgagattctggagacgctggtttcgaatcttccgctggagaagagttcgaaggcagcgacggcgacgaggtttcttttcggattgttgcgaacgacgaacatactgaacgcttccgaagcctgcagagacgcgctggagaagaagatagggctgcagctcgaagaagccacgcttgacgaccttctcgtgccgagctactcgtacctgaacgaaacgctttacgacgtcgattgcgtggagaggattttgagtcactttttggaaggtatggaagcaagaaacgccacgaagacggaggatgcggcggcgacgaggtcgccggcgctgatgctcgtcggaaagctcatcgacggatacctctccgagatagcttcagacgcgaatctgaagccggagaagttctacaatttcgccatctcacttcccgacgaggccagactcttcgacgacggtctctaccgcgccgtcgatgtgtatctcaaggcacatccgtgggttttggaagaggagagagagaagatttgcggattgttggactgtcagaagctgacgctggaggcgtgcacgcacgcggcgcaaaacgagaggcttccgctgcgcgcggtggttcaggtgctgttcttcgagcagcttcagctacgacacgccatcgccggaacgctgatggcggcggaggcagccgcggagcctgggcggcagtcggcggcgctggaacgggaagcggagggcggcggacgagaaggattagggttagacttagagcacgtgcaggaacggaacggcacgtggcgcgtggcggtgagggagaatcaggtgctgcgcttggacatggatagcatgaggacgcgcgtgcatcaactggaacgcgagtgttcctctatgaagagagtcatttccaagtttgacaagtttgccgcctccggcggcggttggagggcgtcgctgggccggaaattcggttgcaagtttaagactcaggtttgtgattcgcacgagtcaacggccgttgatacccgcaaaggacgccatcaccagcagcatcatccccatcatgattagttaccatgctcaacttcctccccctcacgtgagaatcattgttggagtaaatttcatatgggccccacttgtaattgttcatttttttctttaattttccataaatttagttttaattgattaatactataataactttactttctc

SEQ ID NO: 27456 - DNA, 537 bp, Glycine max
cgcacgcagaccataagcttctcaactgctacactaagtttgttaataaaatgaagatttctggagcaaatgtgactgggtgtggggtttgccagtttgtgtatggattttaagaataatccaggatgaggcatctccgttatcatgtgccagtataagagccagcactctggctaggtcttgtagccagaatctgattctggcttgaatggtagcttgctgaggctttcagaagcagtcaagaatcaccatagatttctgagaatcagatcaggtctactcatcagtcatggatagcagcaagaagggagccctcatgagtaatgaaagcgcaaaagatttatcagtcatggttctgaaacagcatcagtacaagaagaaccaaccaaagttaagttctaccccgcaagagagacgtgatcaatcccactgccttatctgtaggggaaacaacagttgtcaaacagttcatgcaagaacaaaactgatgaatactttgattggaaaagggaagccacatgaagctcaggccgtctt

SEQ ID NO: 27457 - DNA, 247 bp, Glycine max
accttccacacatttaaacgattctgatacacattggttgccgcaaatgatgtgttgctagattcttcactcatgaagtatagccccacggattgccagagaccagaacttttaaataagaatttaataaagggaaatattcttctctgtggatattccttcaactttgttgttggcactgcatcgatcaagaaagtctcagaaacagcaaaggcccttggtgcagttggatttgttctttgtgttg

SEQ ID NO: 27458 - DNA, 412 bp, Glycine max
cgtgatctcaggcgctacttgttatcagttattgtttgtggttgaaggttgttgttcactttcccgtgcagagatcataaggaccctattaccttcctaccttcaaaatctttcatctctgttctcacgggattttcctctcaccctcttatttgtttccaacatttcttgcttcataattcaagtgaggtcataacacaacacaaagtgttgccaacttcgtggttcatattggttggttcagttaagagtgtggagaacaaagaagatacttagattatggctgctcgtaacatcgagaagatggcctcaattgatgctcaactgaggttgctggcgccacgcaaggtgtctgatgatgacaaactcgttgagtatgatgccttgttgttggatcgtttccttgacattc

SEQ ID NO: 27459 - DNA, 256 bp, Glycine max
aggtttctactcgggaaacttgcctccgtgagcatgaaggatcttactcatcaagagaaacttgcattttggataaacacttataattcctgcatgcttaatgcatatttagagcacggcatacccgagagtcctgaaatgattgtagcactaatgcagaaggcaacaatagaagtgggggggcagctgctcaatgcaattacaatagagcacttcatcttgagacttccttatcacctgattttattacaattca

SEQ ID NO: 27460 - DNA, 454 bp, Glycine max
ggaaaaccaggcagaccctgcaatgcgattagtctctgagatgatgatactttgcggtgaagctgttgccacatttggatctcggaatgacattcctttaccatacaggggacagccccaatcagatatgaatgtttctgaattttcccatctcccagaaggacctgttaggagctttgcactggtcagagtaatgcgtgctgctgaaatcgatttcaggaagccagcacgccatggtgttttggggattcctggttacgttcagtttacatcccccatccgtagatatttggatcttcttgctcattatcaggtaaaggcattccttagaggcaagcctccaccctttacagctggtaagcttgaagggatagcagctgttgtaaatgagaatgttagaacagtgaggaaactctgcagcagcagtcttcggtactggatattagaatattta

SEQ ID NO: 27461 - DNA, 263 bp, Glycine max
tgttgatgaagaaaatccaagatgatcaattcttagaccttctaacggttaaaacggaagttcgtgctgtatgtaaagagccttacagtatctagaaagctgttctcaaatcaaaaagttcaatcagtgagattaaccaaattgcacagcttcgcattattatgaaaccgaagcaatgcattggggttgggcctttatgcaacccacagcagatttgctatcatgttctggggttgatccatggaatctggacccctattcct

SEQ ID NO: 27462 - DNA, 454 bp, Glycine max
cgagatctccgcttctgaaaatggtgctttgcctaatgataagattgaagaaaatatttcagataaaggtggcagagattgtgctatggatgtggataccccttcatcaacaacagaggatgtgaagcattgtgaaatacatcaaaatggtgtcaatgaggttcccagagtcatttcttgcactaaagatgctgatagccacttgagccccccgtcaacagttacacctgccgagccacttgcagttgatacgggtgaaaattcaggtaccatcaaggaggatgtctatttgggatcaaatacctgaaattaaatcgtgaatcagtacacaggacaattagagaccaatgccattaaagatagagtttaattttgataaactctttgtaaagatttttcattgttaattcatttgaaaatcattaattattacaaaagtcaataattttcaatt

SEQ ID NO: 27463 - DNA, 179 bp, Glycine max
catgcatttaactattcagttaaatgtaagtcactttgtgctatgtatgtttctggaaggttgtagaaagttctgattgtgatgaaaatgggaagcaaatagttaaggatttatagtaggattttgattcttgacacggttgattacgtgaatgatgctagtgatattcgttgcttaaa

SEQ ID NO: 27464 - DNA, 569 bp, Glycine max
gtttgaggcggagaatagctccaacagttcccaaattggaaccctagcattcgccattgccgccacctttccccacgcagcttttgttgtagcaaaagattgatattttcttcttcgtctataaaacccacacgtcaagtcacttctttttaactcaattttcggtcccgtagctctatattttctcattcgcagacaagaaaaatccaagcctgtggattagaaaggggttcattttgctgattctctagctatggctgctaagattctcgcaaacttgattgtaatgggtggaggaatcttggcaagagcagttgttcaggcatatcgtcaagcgcttactaatgcctcaaaaaaatggtgttgcacatgagacaattcaaaatactatccgcagagctagcaaggtgatgacggagcaagaggctcggcggattcttggtgttaccgaggaaactccctgggaggagattatcaagaaatatgacaatttatttgagaataatgctaagaatgggagtttctacctccagtccaaagttcatcgggccaaggaatgtctagaggca

SEQ ID NO: 27465 - DNA, 580 bp, Glycine max
ggaggttttgcagtgtttggcatcagtgggtattgaaaagctctcaatgcaggcaaaggagttaatgccgctggaagatatcacagggaagacaatgcaacaaatagcatgggaagctatgccttccttagagggtgcagagaggcaatgccatttgcggcatgatccaataacagtgccagacagtgctggtgtgcaaagggacttgaaaggaatgccatctaaacaaaagtctggcaagtttagttcaaggacagtggccaaccaaacaggctcggagtttgtttcagtagaagaccttgctccattggctatggataaaattgaagcactttcaatggagggtttgagaatccaatctgggatgtcggaagaggaagcaccatcaaacattattgctcagtccattggagatatttcagctctccagggcaagggggttgatattagtgggtcccttggcctggatggagctgctggtttgcagctgaatgatgtaaaagaacggtgtgatggtgttgatgggaatatgagcttatcattaactcttgatgaatggatgaagctggattcaggtgag

SEQ ID NO: 27466 - DNA, 557 bp, Glycine max
tggcatttggcaaaactgcgaagaagagcagaagaaataccggagaaaagagagttgttgagcagaagagtgttgtgttgtgcattcgcggaagaagaaggagcagatgggtaatccacggaaaccgagtaccgccgacgagcttcacacggcggcaaggtccggtgatctcatcgccgttaactcaattttggcttcaaatcctttggccgttaattccagagataagcattccagaacacctctgcattgtatcctgctcatttcctcacttcttttcttcctctattaattaattcaattttattttttatgtaaactcaacgcaatagaaaccctaacaattaaattctttcaattagtcgttgttgttgttctagataacaaaacacagtagctggaattgaaaattacgttttgctggttattataatgatatgattcattgcagcatctgtgtctttcgctctttttgatctgtgcattgcatattctacctatcttgtttgaaccattcattttatgaaatcactacatcataatcacccctattagag

SEQ ID NO: 27467 - DNA, 461 bp, Glycine max
gcagaagaaataccggagaaaagtgagttgttgagcagaagagtgttgtgttgtgcattcgcgggcgaagaaggagcagatgggtaatccacggaaaccgagtaccgccgacgagcttcacacggcggcaaggtccggtgatctcatcgccgttaactcaattttggcttcaaatcctttggccgttaattccagagataagcattccagaacacctctgcatttagctgcgttttctgggcaagcagaggtagtcacttatctctccaagcacaaggctgatgttggtgcttctgcaatggatgacatggctgcaatacactttgcttcacagaagggacatttagaagttgtccgcgctctactttcagctggggcctctctcaaagccaccacccgcaaaggcatgacttcattacactatgctgttcaaggctcccatatggaactcgtcaagtact

SEQ ID NO: 27468 - DNA, 370 bp, Glycine max
ctttcttctttggagcctccgacatagctgccctacgtcgcttggttccccactaccatagaaaatgcaccagtttcgatctcatcacggcatgcttctggcgctgtcgcacaaaagcattggagatagatgagacgaggatgttcgcatgatggtcatagtcaacgcacgtgctaggtttaatcctccattacctgctggttactacggcaatgcctttgcataccccgcggcagttaccaccgcagggaagctttgtgaaaatccatttgggtatgcagtggagttaataaataaactgaaaggtgaggtgacagaagaatacatgcattctgtggcagatctaatggtgactaatggaagatgcttg

SEQ ID NO: 27469 - DNA, 249 bp, Glycine max
atccagagtgataagtgtctattttctcctacgatcagcgctctaccttaactttatcatagatactaattggcccacattcccaagagccattcaaggatattcatctccttcattcaaagatgaacgtgaatgtaagaaaggccaaactacaatgtctagtgtctacacatctatgagggccagattgtctctggaaccaaagattgcgagagatatgaaaacagtttggaaacggaacgaatttac

SEQ ID NO: 27470 - DNA, 417 bp, Glycine max
caaaaatgctgtggcaatgaaaatgctgctgtcataagagaaagacttgaatccttgaaaagagaattcggggatcaaatttctacaagccagccctgtgaatctcttgtcatggaatcacattcttttgcttagctgtgacacgttgttccaactgctgtgggagttctgcctgtgagatttttttaaagattgaagttgaaactcaacttaatttatgggatcatacgctactcctgtatatagattatttttcatattatgcctgcaatttgtaattcatctcatctttccttcctgtgtatatactagtacgttcggactgtactgtaaaatgtaaagtccaagtggggttacactaaagaatgtgtataaaccttaaagaacatgctatcaatatagttgctgttgatggct

SEQ ID NO: 27471 - DNA, 250 bp, Glycine max
cttgaatcctacacccactctgtcagtgcctgcaattccatcagtttcactattgtcttcttcacatgataagccagtgactgcatcggttccattgtccaggcccgttcctggtatgccagtaactccctcagtttcaatgcttactcatcatacacctgcacctgatatgcacaggcccgtcagcaaaaattttcaccatgtgtcgagtggaatgccccctgctttaaataaccagtctcagcaagag

SEQ ID NO: 27472 - DNA, 398 bp, Glycine max
gtgtgtgtgagagatggttatggcttcgtggaagaagctggtgttgttgttgttgatctttctctgcacttgtaaagcacaggaggaacagagctccaccccggtgtacctgtaccataactgttccggcggcaacaccaccgccaacagtgcctaccaactcaacctgaggaccctcctcacttccctgtcttccaacgccaccaccaccgaattctccaacaacaccgtgggactgggaacatccccgtccgacagggtgtacggcctgttcatgtgcaggggtgacgtgccctctgctctgtgccaacagtgcgtggtgaacgcaacggggcgtctacgctcccagtgctccctggccaaacaggccgtcatttggtacgacgagtgcaccgtgc

SEQ ID NO: 27473 - DNA, 272 bp, Glycine max
tcgttcccaaacccagtggaaagtagcgaaatgtatcgaacggcggcgaacggttggtgagcggtgcaagatactactatactggcaaggttgggctcagattccggccttctcagatattgataccctcttctcgcttttccacatccgagactcaaccacttcccattcccgtcgccaccgaaaccgaaacccctaactcttcagattcgtccccttcttcttcatcttcctcaacagccacaaaacccagagccaagtacgaggaccaa

SEQ ID NO: 27474 - DNA, 271 bp, Glycine max
ttaagagaccagataaatattggttatagaactttccagaaattattttcgtatgagaaagaaaaaaaagaaagacttcaggttgtagagaaattgaatgaccccatggtaactatcttaatcccttacacggaacccttgtatttccagggttgtagtaccagagccaacaatttccagggcttggatgaattccaatattcaaagcaaagttactgtgcatttggaattgaatggacattacggcaagaccaattctatggatttttac

SEQ ID NO: 27475 - DNA, 734 bp, Glycine max
  unsure (1)..(734): unsure at all n locations
taagaagagagagaaagaaagaatgaatgaataaataatcatgcactctctttctattcttcttctttctatcataacataactatgatatcaacaccatataataattaatagcaataatttagtaatactctcttcattgtcaattccatcttcacttcacttcacttctctgttctgttgaatattcaatcattcgcaaaacgcatacttttctcttcattctcagcttttttctttcatttttaattctccgttttccaaatccatgattgcatctcgccgctgcgaaaccgttccgccaccgtcgattcccgatctccggtgacccgaaaatgctccctttcgcgcatccgaatcccaccatgggaagccgcaacaacaacaacaacaacgccaccgccgagacggttttcgccgccgccaacgccatcgtcgccgccgaatccagagtccaacccaccgacgcgccgaaaaaacgttggggaggctgctggagccaatattggtgttttggatcttgtaagagcagtaaaagcagcaagcgaattggccatgctgtccttgttccagaacctgctgctccaacaggtccagcagctgctgctgctgcaccaaatccttcaaccgccattgtaatgccgttcattgcccctccatcttctcctgcatcttttcttcaatctgatccaccatctggtattcaatcaccgnctggattactttcactctct

SEQ ID NO: 27476 - DNA, 580 bp, Glycine max
atcccacttggctacttccttaaccacacggaatataaacagaaggagatatatataatagatttttgtggagacgcttacatagctagctatagccagaagggaatggagaaaatcatgaggacagtattaatggctttgttgatggctttcacgatgcttatatctaagggtgaaggccaattagtagagaatttctatagttcatcttgcccaaacgtggaatccatggtgaaacaagcagtgactaacaagtttacagagaccatcacaactggacaagcaactctgcgtctctttttccatgattgctttgttgagggctgtgatgcctccgtgataatctcctcgccaaatggggacacagagaaggatgccgaggaaaatatttcactgccaggagatgggtttgacactgtgatcaaggcaaagcaagcagtggaagcttcgtgccctggagtggtttcctgtgcagacattttggcacttgctaccagagacgttataggcttgcttggaggtccttcattcaacgtagagcttggacgcaaagacgggcttatttccaaggcatcaagtg

SEQ ID NO: 27477 - DNA, 256 bp, Glycine max
gtaaaaaatggcgatggattagtgcaactgtgaatgaaaattgagaagggtaaccaaaaaccaaaggaaggctcaaccagatctaatctaaattcagataatttgcgttaagattcgtgtatggccacagagaccaaaagcagcactgtgaagctcaaatcaagggccccagatggctcttccaagggaaagattgattcttcagctgtcaggaagaaagtggaaagctcaagcaagctccccgctgattcaaaga

SEQ ID NO: 27478 - DNA, 526 bp, Glycine max
cgagtcgagcgattcggctcactttatcagcaaattgggaacttctttatggacagcgtaaactcttctcacagctacgcaactggagggacatcggtcagcgagttctggagtgatccaaagagaatggcagataccttaaaaacgacagagaatgaagaatcatgcacaacttataatatgttgaaggtttcgcgccacctgtttaaatggaccaaagaagtctcttatgcagactattacgagcgtgccttgaccaatggtgtgctcagcattcaaagaggaaccgatcctggagtgatgatttatatgcttccactaggtcttgcggtttcaaaggctagaactggacatagttggggaacacagtttgactctttctggtgctgctatggaacaggaattgaatcattctcaaagctgggggattctatctattttgaagaggaagggcaaagatcctacactttacatcattcagtacatttcaagctcatttaattggaaatcaggcaaaattttgctc

SEQ ID NO: 27479 - DNA, 416 bp, Glycine max
cccatgggggaggatgaacgtgaactgcttcttcttcgcaaccatgaattcttggcagagcaagaacaactcaaggctaaatacaatataatgcaaaaaaatattgacgaatttggaagagaccctaaaaatcgttccattgtgtttgatagaccagctcgcattgagattataaatgagcaatccgaaataccactggttgtttatgtgtctcgtgaaagaaggccaaatgttcctcatacatacaaaggtggagcctcaacacattgagtctcagggctattcagtaacgggccctatgtacttgtagttgattgtgatatgtattgcaatgatccatcatcagctaaacaagccatgtgcttttttcttgatcctgaaacctccaaagatattgcttttgtccaattccctca

SEQ ID NO: 27480 - DNA, 495 bp, Glycine max
acaatggccaaggccgttgcctccggtcagcagagcgacggcactggtattttgatacgcttgttgcgctccgatttgccgtcctcgatgccgccaaacgttggagatgccgttgccggttccggccaccactggactagtcttgctgcgctcagcctctgcggctgtggcttgtcggtattaccagtagagcttacacaattgccacaccttgagaaactctatctagataacaacaggctaactgttttgccacctgagcttggtgagctaagaagcttaaaagtgctcaggattgacaacaatatgcttgtctcggtgcctgcggaactgagacagtgtatgcagttggtggagttgtcattggaacataacaagcttgttaggccacttcttgacttcagggctatggctgaattacgggttcttaggctatttggaaatcctcttgagtttcttcctgaaattttgcccctccacaaacttcgacacctt

SEQ ID NO: 27481 - DNA, 380 bp, Glycine max
tttaacttttaagcgcgtaatattaataatcgtaacaaacaagagagagaacagaactactactgtttctttttttgcctttgtttctctgcccctttgtgcagcgtctcacacaccaatggaagaaccaagtggttgcaacaagagcgctccaaaaggaaaaaaggatgacctttaccatgtacttcacaaggtcccttatggagatagcccttatgtcagagctaagcatgcccagctggtagaaaaggacccggaagctgcaattgtattattttggaaagcaataaattctggggataaagtggacagtgctctaaaggatatggcagaagtgattgaagcaattggaccgatctgatgaagccattgaagccatt

SEQ ID NO: 27482 - DNA, 343 bp, Glycine max
ctttctctctctctgacacacacacacacacgcagaagatggagatggtagaaaaggtggctcttcctctgctcctcccagacccacccccaccctcaccctcaccctcttcctcttctaaacccaattctgtgggaatgaccagtattcctccaatccccccaatgaacactcttatccatgacctgaattcgaattccagttcccgacaccgcgtcagtctgggcaagtccttggaccccaaccgcggcaagccctggtctcctcaccgcctttctcccacaggtcagcaaattctccacaccttatctcattccaactctcttcacttagacttagagct

SEQ ID NO: 27483 - DNA, 441 bp, Glycine max
cgctggctcagcgtatgaggcaattagcaatgcactatctccggtctctactatggtagtgatcctccatgatagccgtcactctttacttccaaaaattgaggagggcccaaagacatttgtcaatgccctatctagtaccctgagcaagctccagtccagtaaatctttccggagatttagagaagctgctaagggtgttacgaaacgaattggtaggtatgcatgaattggcagctaaagtggatgaatatgctcgtggtatgatgggtcctctaggtgctactctttttgaagagcttgggttgtactacataggcccagtggatggacacaatattgaagatctcatatgtgttctgcaagaagtagcttccctggattcaatgggacctgtcttggtacatgtgataactgacgaaaatcagggagatgaaaaca

SEQ ID NO: 27484 - DNA, 480 bp, Glycine max
tgaagctgcaccagaaatcgcgtagtggctgcatctccgttcaccactgatcgcttacgagctcgaaaaggttaatgaaggagcacgtcattgcgcttctactactcttccactttcacagataaccctattgcataatcgcgctccttcctctctagggtttcttcaacttcatggcttcccctactcatttcgacgatgacttcgatttcggaggcggatttggcggaaggcattcaggtaataagaggtcgtctcccgattacgacgacgaggattatgacaacgatccttttgcaccgaagaaggctataacaaaagctgaagaagcttctggtgtaacaacaggaatgatcttgtcacttcgtgagagtctccagaactgtaaggatacacttgcaacatgccaaaatgaacttgaggctgcaaaatcagagattcagagttggcattctacacttaaaaatcagccatccatac

SEQ ID NO: 27485 - DNA, 349 bp, Glycine max
gcttctaagaggatgaagctgcaccaaaaatcacgtactcgctgcatctccgttctgcactgaatcactgatcagagatcgcttacgaactcgaaaaggttaatgaacgagcacgtcattgcgcttctactactcttccactttaccttccttcgcagataaaccgtgttgcatattcgcgctgcttcctctctagggtttcttcaacctcatggcttcccctactcatttcgacgatgacttcgatttcggtgacggatttggcggaaggcattcaggtaataagaggtcatctcctgattatgacgatgaggattatgacaacgatgcttttgcaccgaagaagtct

SEQ ID NO: 27486 - DNA, 344 bp, Glycine max
attcacttgtcttgtatctctctttctttagtttcttattcaacccaccaacacaaaaccaaaacccatcttttttggttggtcaagtaagtggcaaccacgccaaagagaagagcttcctcacatgggtctctgcttctcttcctcttcccccaaccctcctcagcagtactcagggtctgcgagcactgacagcaagaacgtgggattctccgccaccacgagcagcgccgggaagagccaattctcggagatcgcgagcgggagcatcgacagcagccaaggctctcttcctcttccttctcctcatggccagattctggaaaggccgcctcaaggtgttc

SEQ ID NO: 27487 - DNA, 534 bp, Glycine max
ttagttatttttgtcaatggaaaccaaggggaagtgaagattggggatcttggtttggcagcaattctccggaaatctcatgctgctcattgtgtagggacgcccgagttcatggccccagaagtatatgaagaggcatataatgagttagttgacatatattcctttgggatgtgcatattagagatggtcacatttgaatatccttatagtgaatgtactcatccggctcaaatctacaagaaagttatttctgggaaaaagccagatgctttgtatagagtgaaggatccagaagtgcgacaatttgttgaaaaatgcttggtcacagtgtctctaaggctttctgcaagagagcttctaaatgatccatttcttcaaattgatgattatgaatatgatttgaaaactgttgaaaatggagaactggatgaatttggttcctcatgaggcagccattctttgatcttcatcgaagctatagcaacttcagtaatgaatactcaaatggctttgggtatgaaggagactggg

SEQ ID NO: 27488 - DNA, 441 bp, Glycine max
ctgattgcttccatttctcacgaccaaccggttttgtgctccgcttggaaggacgatggaacgacagttttttctgggggctgtgacaagcaggtcaagatgtggcctcttatgtctggtgggcagccaatgactgttgcgatgcacgatgctccagtgaaagacattgcatggataccagaaatgaatcttttagccacgggaagttgggacaagaccctgaagtattgggatactcggcagtcaaatccagtgcatactcaacaacttcctgatcgttgttatgcaataacagtgaaacatcctctgatggtagtgggaactgctgatagaaatctgattgtcttcaacctgcaaaatcctcagactggatacaagagaatcgtatctcccctgaaatatcagaccagatctgttgctgcttttccagatcaacaaggt

SEQ ID NO: 27489 - DNA, 1285 bp, Glycine max
gagatggtgccaaggaacatgttcaaacagccacatactaatggagttgttagtggagagttgcctaatggaaaagtcacgaatacaagcttgattagacaggtgactggttcatcacctgaaagtacatcacatcaatcaagcagagctgctcctgctgttgtccatgggcaggagcagggtcttagcgacccagttcagttgatgagaatgtttgcagaaagggctcaaaagcaacacacttcttccaatcattcccttgttgatactccgccagtgacactatcaggtccatctggacagagaaatgactcgggcaatgcttcagcagcagctgcccatgcatggatgtctgttggggcaggagggtttaaacaaggacccaacaattctagttcacccaaaaatcagatatctgcagattctttgtacaactcaacaagagagttgcatcagcatatttcaagaattcggggggagtttccctctggtggaatgcctttccaaccatttcaagcagttgctcctcaacctattcacacaggcgctgtttcacagtttcccaaccggcctatggttttccctcagttagcatctgctgaccaatctagatttcaaatgcagcccccttggcgaggtcttagtcctcatagccagtcaaggcagaaacaggaaacccttccacctgacttgaatattgattttgaatcaccagggtcacctgttaaacaatctcctggtgtccttgttgactcacagcaaccagacctagctttgcaactatgatgaggtattgttgtcatggtatggatatttccacttgaattggactggtcatgaaatttggagctcctgtaatcgaatgttgaattttgatccttgaaggtgtgcataataaatgtgaaaatgccaaagtctacccggattggaatttagcacaaggtagtcctgagtcgaaatgacagtgctggagacttcggtggatttaacagaaataacttcaggacttaccatagtttcctgatgaggattaccgaatccatggaccatgtctctgttaacctagggttggagttgtagaaaaagtcggcaagttgattgattatattggttgctggtaaactgcaaaatattttgttgatgccttgtatgtatattgtttacaaatttgattaaatttggttgcctagatatttcgttccattgacgactacttatgtatctgaattggtggtagggcatcacttattaatcatgctattctatttgaaacgctagccaaaaa

SEQ ID NO: 27490 - DNA, 557 bp, Glycine max
cctaattctccttcacttgacaaaagcttcgtgtgtatccacctctgtctttcctttcctctaaagtattcttttacaatatataactgtaactacttatttcctaagaattataacttacgtaaaacatgttgggctatgcgaacccgtcggggaatctggctgtggatggagacatgacagtgttggaaagacagagggcgaggatgaagtggcaagaagagcaagagtacttttctggaaacagcttcaacggtgttttttcttcttcttcttctctgcacgttcatgattccattatggtggctgctgactccggttgtgcactcgctgaggtcgtggctcaggcccaggctcgctcaaccaattcttcttcaatttcaaggacttttagttgtccacctgctctggtggagcccgagtccgagtccaagcccaagcccaagcccaccgactcctctgttgggaaagacggtttcaagaagaggaaacctgacaagcctcaccatccgaaggttgttgcagaaaatgataacaaagacaagaggatcaaattc

SEQ ID NO: 27491 - DNA, 419 bp, Glycine max
tggagttggggtgtgggttttacactaaagttaacaactttcgtcgttttggggggctttgagagagtgccatggtcatggagggaagaatctgcgaggaattaacgcccaggtattatgctctttgtgccattggaggaatgctcagtgctggcaccacccatcttgccatcactccctttgatgtcttgaaagtcaacatgcaggtgcacccaattaagtattacagtatttcctcttgctttactagcttactgagggaacaagggccatctgttctttggaaaggttggaccggcaagttctttggatatggtgctcaaggaggatgcagatttggtctctatgagtattttaaagaggtttattccaatgtattggtagaccagaacaggagttttgttttctttcttagtagt

SEQ ID NO: 27492 - DNA, 427 bp, Glycine max
gccccggccagttcctggactcgaagatagtttaagcgataaaacagtgaatgtaggcagcagtgagtgtgcagtggaagcacctgcacatgggccatttgaagagcactactctaccatgccaatgagcccaaaatctggtgaattgagtcattcacacgggatttcaggaaatagattgaatcataggattaagcagaaaagcattgctgaaattatgggagaggacaaagatgtcaataccaaaaatcaggaaggagatgcaactgaaaaagtgactgtaagacagaagaggaaaggcagtgaggatacaatggcatctaaatctgtgcagatgagaaaagcgttgttctcaaatactgatagaaatgtggcaggtgctgaaaatgatggtggttgttggggcaaagaggacggtgcacatgga

SEQ ID NO: 27493 - DNA, 259 bp, Glycine max
tgcaacaacaccagcaaatgaatatcatccaacaatgaaatcgctagccgatcaaagggacagaaatatgaaggttatacaggagaaaatgaaccttgacaaaaaagaaatgaaacgctttaatcctgttgatgcatttccaggtgatattgtaatatttggaagggttcttaatcttctaagagggctttcttccaccatgaatgtacgaatagtatatatggacattatgaggccatttgctgaatcagttttgagt

SEQ ID NO: 27494 - DNA, 384 bp, Glycine max
agcaagtcagggacactgaagaaaagtgaaatattggaatcactaaagaatgcaggactccctgcaaatgaagacaatgctgttgctatgatgcgatttctgaaagcagatacagaagaatctatttcatatggacatttccgcaatttcatgcttctacttccctccgatcgtcttcaagaagatcctaggagtatttggtttgaagctgcgacagtagttgctgtgccaccagctgtggaaattcctgctggaagcgttctgagatctgcattggcaggcggcctttcttgtgccctgtcatgtgcgttactgcatccagttgataccattaagactcgagtaccagcatcaacaatgcccttccctgaaataatttctaag

SEQ ID NO: 27495 - DNA, 273 bp, Glycine max
ggctcgaggttgagtgctccaataataccatggaagctcaagcgtcgttcttgtttattagcttgtttttctctctggtgttgcatttgcttgcaaagtattattacaagccaaaaaccaccctttctcacaaactacccccgggaccaaagaagctacctctgatagggaacctgcatcaactagcaatggctggttcacttccacatcgtactctccgagaccttgcccttaaatacggacctctcatgcatctccaacttggtgaaattt

SEQ ID NO: 27496 - DNA, 401 bp, Glycine max
cggctcgagcgcgacaaaaaacaccacctcgtttggttgttgttttgccaacgttacgaaacgaaacgcagcattgtctccactgcacgcatgccgtttactatatatgtataatctttcaaaacgttgattgtgttggttcaattattgtgtgtctggtaatttaatggttgatgcgtgtttgatgggatgggagctcagaagagcatccatgctggcaaagcaaagattgacgtcaatgttgattttactcacaagctatgcgcttctttgatgcttcctaccctcaggtgtactggcagtccattgtcactggtaattgcgagtctttgcatcaaacacgcaaatttgttcggtcgaagtgatacgcttcatgtttcgtgggacaagggtctggatga

SEQ ID NO: 27497 - DNA, 361 bp, Glycine max
tgttttagcgcgacaaaaaacaccacctcggttggttgttgttttgccaacgttacgaaacgaaacgcagcattgtctccactgcacgcatgccgtttactatataataataatctttcaaaacgttgattgtgttgggtcaattattgcgtgtctggtaattttaatggttgatgcgtgtttgatgggatgggagctcagaagagcatccatgctggcaaaggtttagacataatatgcaaaaaaaattattttgtgttttgtttttgcatgaccgtgttttttgatgtaagtgcttttttctctctgtttgggtggttttacagcaaagattgacgttaatgttgatgtgactcacaag

SEQ ID NO: 27498 - DNA, 235 bp, Glycine max
ccaaaatgttcctgcttccgctgggggtgagaccagggttgaagagaaggaaccaacacgtgaggatgtcacagatgagaggaaatcagaatcgacttctgctataattaatgcatcagaacttccacctcatgtccttcttgaaatgccagctttgtcaccgacaatgaaccaaggaaacattgctaaatggaggaaacaagaaggagacaagattgaagtgggcgatatatta

SEQ ID NO: 27499 - DNA, 684 bp, Glycine max
cttgtcgcaaagatgattcaagttaacattccaagatataaggaagtcctgccaggtttagaaagttggcaagcccagaaaattgcttcttggcacaatatggaagggcactccatccaatggttatctgtagtatgtatagaccgaaaaggcatgatggctgaggtcactacagcattggccactgcaggcatagccatatgttcttgtgtggctgagattgatggaggaaggggaatggctgttatggtatttcacgtagaaggaaatttggaaaatttggtcactgcttgctctaaagtagatctgatattgggtgttttgggatggtctaccggttgcagctggccaagcttgatggaagaccgtggcgttctcgaatgctagttgattcgatcgcagtggctcttggcgtctactacagtttgcccaacaccagggaattaagttttgtccgcagcagcgtaggcatttatgtggctaaattttgtttatggtatagttctcatatatttgttcgaacttctaaccaaataatccggcagcaacctattgagtcaaaagactcgaaactcaaggcactgtatatagaaaagagtgataggataaaggagtatacaatgtaaagtagttgtgcagaaactaagcatttatccaaggagattgctaggggtctcttattac

SEQ ID NO: 27500 - DNA, 867 bp, Glycine max
tttcactcgtccgggcggctgatgttgcaaaatcccagtttcttgctactgtttcccatgagatcagaacaccaatgaatggtgttttggggatgttgcatatgcttatggacacagatctagatgtaacccaacaggaatatgtcaggacagcacaggaaagtggaaaagctctggtgtcacttataaacgaggttttggatcaggctaagattgagtttggtaagctagagcttgaggctgtgctcttcgacatacgggcaattttggatgatgtattgtctctattttctgagaagtctcaaggaaaaggagtagagttggcagtttatgtgtcagatcatgttcctggactacttataggtgatcctggaagatttcgacaaataattaccaatctcatgggtaactcaattaagttcacggacaaaggacatatttttgtcacaatccatcttgttgaggaggttgtccgttcaatagaggttgacaaagaatccaactcagaaaataccttgagtggttcgcccgttgctgatagtcgccggagctgggaaggattcaaggctttcagtcaagagggacctcttggttccttctcatccccctccaatgatcttgtcaatttgattgtatctgttgaagatacaggtgaaggtattcctcttgaatctcagccactcatcttcaccccattcatgcaggtaggttcatccatctcccgaaagcatggaggaacaggcattggcctaagcattagcaaatgtttggttggcctcatgaatggggaaattggatctgtgagcatacccaagattgggtccacattcacttttactgctgtattcaccaatggacaccgtagtt

SEQ ID NO: 27501 - DNA, 613 bp, Glycine max
acgaggctgagcttccacttgttgccacaagcagagcacatcaaggaaaaggttattttcaagtgttgttctcttgcatagagaggttgctgtcttctctaaacgtggaaaagttggtgcttcctgcagccggggatgctgaatcaatttggactaagaaattgggcttccgaaagatgagtgaagatcagttatccaaacatctcagagaggggcagctaacactcttcaataaaacttcaatgctggagaagacagtgcagctggctatagaatgaattttatctggtgttgtaactaatttttggctatttattcatttttttagcattttcctcactgtaacgttgctgcgatgttcatgctgccgtagtgttcttttcttaattttttgtttcccacgtagtatgggtggttgtggcttggtcttggttccagccaaccatgtctctttttgtacaatgtaggataaaaaggtgtaaaaaatagggaacatggcctagaaggaagtaagggagttccaaagagccagcatgctgaccaattttatttttttaaattagcatgcatgttggatatataaaatccaactgtattaatttttttttcctcc

SEQ ID NO: 27502 - DNA, 284 bp, Glycine max
ggccttataatgcggcactatcctctcctcctagaatttttattatttaaaaaggaaaaaaaacattaggaaattgggaaagatactaaaactttccctggaactgagttggagtataatttattcttgttttgcgcacttctcagatgaatccctagtttccttacaaggtcctctgtaccatttacaatggaacatgcagataaaggaaaagaatcatcaaatagtataaatgaagtagaagtcactaattctccaattatttgtggccttccagatgatat

SEQ ID NO: 27503 - DNA, 1062 bp, Glycine max
tgtggattcggctcgagcaatgccttgcaaactcatcattccttctagttttggatctacaactgaacaagcttcatggcactttgccaagtatcttttcaaaggactgtcggctcagaactctggatctcaatggcaaccaactattagaaggtgttttgccagaatctatatccaattgcattcatctggaggttttagatcttggaaacaatcaaataaaggatgtgtttccccattggcttcaaactctaccagaattgaaagtattggttttgcgagccaacaagttgtacggtcccactgccggttcaaagaccaagcatggattccccagtttagtcatctttgatgtctcttccaacaacttcagcggcccaataccaaaagcctacatacaaaaatttgaagcgatgaagaacgttgttatagataccgatctgcagtacatggaaatttctatttcttatggtagaaacaagtacagtgattctgtgattataacaacaaaagcaattactatgacaatggacaaaattccaaaaggctttgtaagcattgatttatcaaaaaacggatttcaaggagagattccaaatgccattggagagcttcatgccctcaaagggatgaacctttcccataacagacttattggtcctattccccaatccatgggaaatttgacaaacttagaatcattggatctctcctcaaatatgctcactggtggtatacctacagaattaaccaatttgaactttcttgaagtcctaaatctttccaataaccatcttgcgggagaaatacctggaggacaacagttcaatacttttcccaatgattcctacaagggaaactctgggttatgcggactcccactgacaatcaaatgcagcaaggaccctgaacaacattctccaccttcaactaccttgaggaaagaaggaggatttggatttggttggaaaccagtggctataggatatggatgtggaatggtctttggaatagaaaaaggatgttgtgtattgttaataggaaagcctcaatggcttgtga

SEQ ID NO: 27504 - DNA, 264 bp, Glycine max
tgcctcagaacgtttatctggcattgaacaaacccctagggtatatatgttcatctggggagaacgagtctaaatctgtgataagctgatttgatgatcactcgcactgtcggggtaataagcgtccgggagtacccacaccacggttatttactgtagggcgccttgacgtcgctaccactgggttaattattgtgactaatgatggagattttgctcaaaagctttcgcatccttcatcaaattcatcagtagactacattg

SEQ ID NO: 27505 - DNA, 343 bp, Glycine max
tagacgacagaagggagaccagcacaaattatccactggttaatttcttgatggctgctgactcagatttttacgttggggcattgggttcttcctggtcctttcttatagatggaatgagaaatactgggggaaaggtaatggctgggcacttgagtgtcaataaagacagattttggtagagttacgtttgtaaattagatcatcagtggttaggctaccaagcaatatgattctctgtatgtataattattgtacatatgcaaaaaataaaacaacgcgatctctaattgatagagtgatgatgaaacaatcaaaatgcttgccccttgtttttggagtc

SEQ ID NO: 27506 - DNA, 731 bp, Glycine max
  unsure (1)..(731): unsure at all n locations
ccccacagttattcatcattaacctccaaaacgaccaaccaaacgcaaaacgcagaaccatgaagaagcagaagctctccgagcctcaaaacgacaccaccaaccccttcgaggttctctccgaggagctaatgttcgtcatcctcgacttcctccaaacgacgtcgttggacaaaaaatctttctcgctcacgtgtaagttgttttactccgtcgaggccaagcaccgtcgtttgcttcgcccgctacgtgcggaacacctgcccgcgctcgctgcccgctacccgaacgtaacggaattggatctttccttgtgtccgcgcgtgggcgacggcgcgctggggctcgtcgctggcgcgtacgcggcgacgctgcggcgaatggacctgtcgcggtcgcggcggttcacggcgaccgcgctgctaagcctcggcgcacggtgcgagcacctgntggagctggacttgtcgaacgcgacggagctgagggacgccggcgtcgccgcggtggcgcgtgcgcggaacttgcggaagctgtggctggcgaggtgcaagatggtgacggatatggggattgggtgtattgcggtggggtgcaggaagctgaagctgctttgcttgaagtggtgtctgggaattggggatttgggtgtggatttggttgcgattaagtgtaaggagctcacaacattggatctctcttatttgcctatcacggagaatgtctaccgt

SEQ ID NO: 27507 - DNA, 601 bp, Glycine max
attattattgcgactgataacgatcttgcggctgacgtcagctatgctaggtctgcaggactgaaggctttaaagttggatttggagtttcccaattcaaccaaaccaacaaaactgcaacctggtacagccactatacagaaaaccagtacattgcgtctccgttctggtatttttgcaggtgttgttgttctaacgagcattagcgtattggtgtacttaaagcgctctagacagtaatatgtttgccagcttgaaaacaaaacatgctataatcttactctatgaatcccagagtttcgtcataaatcaaatgctcgttgacaaaggaaatgatggacacggaataggtggatgatgtggagtctctctaatcagccgtttttaattatctttttctttttgagtcactgatgtaattagaaccaaagatatagtcgtggcatgcaatactgaagtgtcaccatgttcttctcaattaaggtacttgtaattccatatatttatcaactttcatcacttacgacttttgcgtccagatattatcagttagatcaccatcaaggtcaagccatttgatgaaatcaattacaatattatt

SEQ ID NO: 27508 - DNA, 336 bp, Glycine max
gataagggctgcatcagttgtgtaccaacgacctccagccttcatggagcagaatcctaaattcaagcttcctcgggatttaactatgtaataatgcattgaatttgacatttaatgtatttttgcccttaacatgggctcattctactattcatccccaattgtagatttcaagagtaggtaggtatttatatgtactaagaaaggaaaagtgtccaggcccttggaattcaaattcctacttacagaatgtcatcagtaagtttcattggtttactccaaaaaatgtactatcaagaatcttagaatttagaataaaccattgatttcattttt

SEQ ID NO: 27509 - DNA, 250 bp, Glycine max
cttgctgtcttcttcaagttctgccacaaacattgtcaatgcggctacaacttctgggaaaagtacccctgctgcttcctcagaagccaaccctgttagctccagtggtggcacaagttcttctgtgtttgggctttcaagtgggcagcccagcaagtctccattgggttcttcctttagttcatcatcttcaccttcctctgggttttcgtgtgagttctgcttttagttcattgtcttcatctactcc

SEQ ID NO: 27510 - DNA, 660 bp, Glycine max
cccctccctcacaaattccgttgatttatttttcccggtaaagttcaaaaaccctaaccccgattcactctctccgactcttacattcggattcgtaaccgaaaatcggatggagagaagtgttgattacagttcagaggaggaatgcacggaggattatcggcgtggaggataccacgcggttcgagtcggcgacgctttcaacaatggccgttacatcgtgcagtccaaactcggttggggccatttttccaccgtctggctcgcttgggacactctcaattcgcattatgtagcccttaaaattcagaagagtgcacagcactatactgaagccgcgatggatgaaataaagattctcaaacaaatagctgagggggacccggatgataagaaatgtgttgtgaagcttttggatcattttaagcattcggggcctaatggccagcatgtgtgtatggtttttgaattcctgggtgataatcttctcacccttatcaaatatagtggctatcgtgggcttcctctccccatggttaaagaaatctgttttcatattttggtgggcttggattacttgcatcgcgagctttctgtcattcacactgatttgaagccagagaatgtgttgcttctgtcactgataaatccatctaaaga

SEQ ID NO: 27511 - DNA, 538 bp, Glycine max
agatggctcaaaaaggaagctgcattcaagaaagcgtgacttatcaccgtctccagtcagatctaaaagaagacaacttttgcggtctcctcatagcaagcgttctcagcgcaggcattctccctatacttctcttgattcttccaggggaaggaggtcaagatccagatcacctgttcggcggcagagatgaatggatggggacagagatggttgactttgcatctacggtgttcattcaagagaacataaatttggaggcgtagggcgaagcttgtgatgtttggtcttcaagggaatgttgattaaaaattaaatagatagtggtgacttttcccatttttgtgggttcaatataatgatactgttattttcctggtttgctactgttctttagggagtagtataaaactgggcagggttgaacatgtgctgtaatatgttttgatgtaaaaaaggaaactgaaaaatcgatagcttctttcattcgaaatccagtatgtacttatatcccatcaatatcataattcgtaatgac

SEQ ID NO: 27512 - DNA, 336 bp, Glycine max
gcgcaggcattctccctatacttctcttgattcttccaggtttgttgccagagtttttcaagattaagatttatgtttttcagacaaacttccatcttcatctaagattaagctgcacaggtgaatttgtcaggcttcatatttatgttacaatggtgccttgtttatttactgtaacccttttatgcaggggaaggaggtcaagatccagatcacctgttcggcggcagaaatgaatggatggggacagagatggttgactttgcatttaaggggttcgttcaagaggacataaattcggaggcgtagggcgaacttgtgatggtctgcataggg

SEQ ID NO: 27513 - DNA, 259 bp, Glycine max
gatttctactcaaaaggctgaaatagacactactgttcaaaattgcctagatgtttcctcaaggacgcagcccatagatgttgcatgtgatcaatctgttgataacaaagaatttctagataaagaaaactctgaatccgagcagcaattttctgtttgttcctctgtcctgggtaaaatggaactaactaacgcctgtacagcaaatttagtaacaattttttctcctgcttttgaacctattgaagtccattcacaa

SEQ ID NO: 27514 - DNA, 711 bp, Glycine max
tttgagaacgctgttttgtagccgttgtctgccttcaaaataaacaaaactactcactccccacaaataaccttcacgccactccaatagaacacaatgagtgctgcttctttgctattctcctgctctatgcatgtgggtgtatctcatcccaaggtggctgcaaaaccctctccatgctgtttgctcaatcagccatggaatcatttaaagtcaaaaacaccatttgggcattcaggagtctttgaaaaatctaaactttcgcataaaggtgatgagattctgtggagggcgggggcccttcaagttgaaagtgcaccctccttctctatgggccaaaaatttcaccttcatgatgtgattgaggctcagcaatttgacagagagactctcaatgccatatttgaagttgcaaggagcatggagagcattgaaagcaagtcatcaaggagccaaatgctaaagggtttcctcatggctactttgttttatgagccatccactagaactaggctttcatttgagtctgccatgaaaagattaggtggggatgttctcacaactgagaatgcaagggagttttcgtctgctgctaaaggagagacgcttgaagatactataagaacggttgaagggtacactgatataattgtgatgaggcactttgaaagtggtgctgccaaagagcagcacaactgctagcattcctgt

SEQ ID NO: 27515 - DNA, 430 bp, Glycine max
agactacccaatgccagtggtttctcatgattctgcgagtaaagagtgcagaaggaaaatgggcgaggcatatgcattgaataaagaattaaatggtttggttagtgaagatgatctgaaaaatttgaggaggaaattagatgagagtgaagggcaagaggctggagctaaaagatataagcaacagctgattggctgacccaaaattttactcgttttttcaactgccgtgctttgagttgcagtttatacgtgttagggatattttattttatgcatttatcaagacatttgtatgacacatgtatgtatgtaacatatttcgtagacatagacgccaaattggaagcagcatggcacattatattttgcatatatactaaattatttagttcatgtaacccaacatggctttagtgaaacttacatc

SEQ ID NO: 27516 - DNA, 314 bp, Glycine max
ctcacacttccagagcacagttgcagcgctttttttgtcttttctttggttctgttttgccgcattaacaaaatggcaatggcaatggcagcaattgcttcttctctcggcgtgggtctccgtcctctttctctgtcttctccctcctcagcactgttccagtcccgccactccttcactataacaaccacaacacccaagtgctgcctcgcaccaaaacaagactcacccctggaactggaactagtgaaatcaacacagaacacccaaatcatcttacactctttctctccattcccattgctctgcgccgc

SEQ ID NO: 27517 - DNA, 861 bp, Glycine max
tttatcattaaccttttggatgtgtctgttttcaacaatacaagctgccctatttgcccttctttcagagtcggatcttcaagcatggattctacaatcacctttacagatatcatgttctttatatgcaggaatcggaatagcggttagcttcttcattcaatcatggtgcatctcagaaagaggtcccctgtactgtgcaatgttcaaccctttggcaacagtcataactgctttgataagtgcaactttcctacaggaagaggtgtacgttggaagtttggtaggggctgttggagttattgccggtttatatgttgtgctttggggtaaagccaaagagtttgctgagattaaaccagaggcggcaccacaatcatcaaacttacaagatgatcatgatataagtagtaggatagatttggaacaaccccttctgtcagagaaattgtccgaacatgtaacagaagcagatagcaaggtgtagccatgcatgatgattgaaccaatatatatatatagaagttttggtgaagttttgatcattgcagaattgaagaaactgaaacatggaacaagttgcagcttaaacaaacttggcttagttcctttcaccaaaatttctaactatagagtgtgaaaataaattcaagctcatggcctggacttggagtaatggtaattatgtaaaagtgataatatgtcttaggagaaaaaatatatgaattaaattttgtttccttccatctcgttttcttacctagctccgttcttcctattatgctaggaaaattaggaattctgcgctgcacccgtagttttcatgtttttttttttcttcattagtaaattacttccatc

SEQ ID NO: 27518 - DNA, 397 bp, Glycine max
atggcctatacccttactacggatttataccaaactgagattcttggaatcaattatggaaatcgtcaactcaaatttgatggccacagcaaagtaggaaaagtgttttttgatagtggcagttcttatacatatttcccaaaagaggcatacttggatcttgttgcttctcttaatgaagtttctgggttaggacttgttcaagatgattcagatactactttacccatttgctggcaagcaaatttccaaatcagatctatcaaagatgtcaaggattacttcaagaccttaactcttcggttcggaagcaagtggtggattttgtccacattgtttcagatacctcccgagggttacttgatcattagtaacaaaggccatgtgtgcttgggaa

SEQ ID NO: 27519 - DNA, 281 bp, Glycine max
tttgagcagggtattacaaggcaattgaagccataggtaaagcatccacattttatacttgggtgttggtgtctggggtgttctaccatctttataaccaatcatcttaccaagcactggatgagattagcccattgactttctctgtggggaacacaatgaaaagagtggtggtgattgtgtcttcagttttggtgttcaggaatccggttcggcctcttaacggccttggatccgccattgcaattcttgggactttcctgtattctcaggcaacatcc

SEQ ID NO: 27520 - DNA, 360 bp, Glycine max
tgtgattgttagtgaagtggagaagaatgtttggcctgcaattgccgaaggaaaggttaagcctgtggtctacaaatctttcccgctttctgaggcagcggaggctcaccagcttatggaaagcagccagcatattgggaagatattgcttttgccatgaaaattgtcgtaaatactgaagttcgtgacatacttctggatcctttgtgtttggacttgtttctttgttaagatctcaggattctaatatggttgcggactaaaagaactgctaaaggaattgatatggcaagttcatttaaacaatcacaccgtatttatcaattgatatgattgttgaaacaaacactttttcgcgtc

SEQ ID NO: 27521 - DNA, 287 bp, Glycine max
tcgcaatattcaaaataagcctgtggttaatcgagatttcatctccaatgagatgcagcaattgcgccagcagttgaagtacttgcaggctgaactttgttctcggggaggagctcctgctgatgaagtgcgggttctcaaggaaaggattgcttggcttgagtctactaatgaggacctctacagagaacttcacgaatatcgcagtagatgtgcttttgtagggagatgtgaaattgatgaacctaatggacacattattctcatgaacaccgatgggcttgaga

SEQ ID NO: 27522 - DNA, 280 bp, Glycine max
ccaaaaccaaaaccagaaccaaaacatgggtcatatgagttacaatagagtttgcagtgggagagcatcatcatcatcttgccatggaaaatgcagagggtttaggttaaacctcagtcggctctactttctgcgcctaaggaagaggttcactttcatactaagtatctttgatagctggaaactgtcttattctcaggctcttcagcttctgaagaacgtgttcagaagaaaaagtggcttcaaaagaaactacagcaacagcagcagaagtggttta

SEQ ID NO: 27523 - DNA, 306 bp, Glycine max
gtgattcctgaaatcgttgaggttcccagtttcagtgatggtgctaaatctttcttagaaggcctgattgataactttagtgttgaggatgcctcggaggttaaaaacattgagagggtcacgaatcatgacgtgaaagcggtggagtacttcttgaaacagaagtgtcaatccaatgctgaagtggctaaggtgcttgagtttttccactttgcttgcacatctgaggatataaataatcttgcccatgccttgatgctgaaggaaacaatgaattctgtcatgtttcctgtcatggataaaata

SEQ ID NO: 27524 - DNA, 335 bp, Glycine max
gctgcctacaccactttctccttcttttcaaccccgcagaaccaaaaaaccttttttcttcaaccctttaaacgccacgtttcgtttcttaaaccattcaaatgcgtccgacctggttcagcttcaacccgattcagaccgaaccctgttatttccagctccgcgctccgtacctcggcactggtcgttccctctaaactcgagcacctagcggaggagttcggctccctgcgggagccggtggagcgtgtgaagcggctgctgcactacgcggcggcgatggcgccgatgccggagtccaaccgggtcgacgcgaaccgggtgatggggtgcac

SEQ ID NO: 27525 - DNA, 781 bp, Glycine max
ttgttcgggatggatattgtgccccagactatgcaatgacgggtcaattgacgttcaagtctgatatttatagctttggagttgttcttttggagatcatcacaggcaggaaggcgatcgacaatacaaagcctgctaaagaacaaaatctagtttcatgggcaaagtctttattcaaaaaccgtaaaagattctgtgagatggttgacccattgcttgaaggtcagtatccaatgagaggtttgtaccaagctcttgctattgctgccatgtgtgttcaagaacagcctagtatgcggcctgaaacaaccgatgtggttacagctctagattaccttgcatcccagaaatacgatccccaagttcattcaatacaaagctgtagaaaaggtttatcttctccaagagaaagaagcaatggtcatagacgcactgtcagtaacgattctgatccaagagcaagaagccatggtcatagacgaactgtttgtaatggttctgagacaagagcaagaagcaattgtcataaacgaactgttagtattagtaatggtcatagtagtagttctgagacagaaagctctagaaaaggtctatcttctccaagggtgagaagtgatggtcacagacattttgttagcaatggttctgagacagacagttctggagattagaaatgtgatgtgtttttggatattcatattgtaaaatgcttagctatccaattttgcttcatataaaggaggattcttctttttggctcttcaaaaaaaaaacaaaa

SEQ ID NO: 27526 - DNA, 246 bp, Glycine max
gacatcagggcggatcagtacgacaattgaagaaaggcatgaaatacaatgtgcatttgaacgactgaaaatcttaacgggataacaattgtcaagaaggatgttctgaattgagaaactggttcatgatatttgcaggcatcgttggcatagaagggagttttttttgtcaaattgacagacagaggacatggactgagctctggggtgtaatttgatctctctccatatgtgtgtgcccttttt

SEQ ID NO: 27527 - DNA, 425 bp, Glycine max
gggggtgagcaaggttgctgcggttatgtacgacggggtttcggccacggtgaagcagattttgaaggaggaagggtgggtagggcttacccgtggaatggggccccgggtcctgcatagtgcttgtttttcggcgttgggctattttgctttcgagacggccaggctttccattttgcgggagtatcttaggagtaaggagttgcgtgaagtctctgtctcctctggttgagtttgtgcttttgttctttattgcttcttttttatttgggttttgaattacagttacttacttccatgttgaatgtttcagtagataaggagtattttgttatggaaaatgtactactaccgtggcataaacaaaatcaaaatgtaggtgctgaaatgtttcttatcttggttacaataaagtgattttgctg

SEQ ID NO: 27528 - DNA, 274 bp, Glycine max
cttaacgccatcaccacctttggcttcctttaaaaatgtattttttcactgagaaaatgcagagtttgaagatgggattccctgactacatccaaacattagaagaagaacgccgtaagattcaggtgttctccaaagagcttcctctttccttggaactggttactcaagccattgaaacttgcaagcagcaattgtctggaactacgagtgagtataatttgaatggccactcggagtgttcggagcagacaacgtcaacggaagggcctgt

SEQ ID NO: 27529 - DNA, 246 bp, Glycine max
gaccacacaattctacatgtggcccatttgcaacaagacattaaggccttggaagacttgtccaacaatggattgctccagcctatagctcctgatttaagttctcaaatggctgaaaatcctctgctttttcagcgcatccagtgactggcccattttgaaaacagattgaccgtgtttgggttaaaacttattttttgaggctaatgttgtgatccttgatcaatcaatttgcaagaatcaaaa

SEQ ID NO: 27530 - DNA, 239 bp, Glycine max
gactatctggagtatgagatgagaatatctcatcctccagatatgctctcagagtccaaatatttaggaactggaagggctttttcgtcacaatagcctctcctttttcatcaaactctcctgcctgcctttttgcctttccttcacagtttgcagccatatgacccatctgaccacagaggaagcacttgtcttgtccaggagtaaatacaatctctctaagaattgaaaaatgaatt

SEQ ID NO: 27531 - DNA, 341 bp, Glycine max
aaagattggcttggctttggcttaatttgtttcctaagaagaagaagaagaatggaagagaagcagagagtgataatagtgggagcagggccttcggggatatcggcggcagcatgcttcacgaaacagtcgattccgtacataatcctggagagggaagactgttccgcttccctgtggaagaaatattcatacgagcgcctccacctccacctcagggaacaggactgccagcttccccacaaaccctggccagcagcttttcctccctacgttcccaagaagcagttcttgcagtacctggacgactacgtctcccacttcggaatcacgccgctgca

SEQ ID NO: 27532 - DNA, 246 bp, Glycine max
atttcgtgaaattagggttttctcaccccctttcttccttcactgattctccacatacgagagaatccagtttccttaatgatttcgtcttgtcggttgcactcgccactggaccgtacaatgcttctcgggatttgactttgagtatataatcccaacgcttgttctgctgccttttgtttttcgtattgtggttccttgtgtttgatgcccaaatatcaaagtgagcgcctccaatcataacat

SEQ ID NO: 27533 - DNA, 256 bp, Glycine max
gtggcactgcagaaatacttcaactttgagatattgcatgctcggtgggctatgcttgcatccgtcggtgctctgattcctgaaatattagacctatcgggagcctttcactttgtagaaccagtgtggtggcgtgttggatattgcaaagctcaagggagatactctagattaccttggtatccaaggtcttcactttgctggaagtcagggagtggtcgtgattgctatttgccaagcactccttatggttgga

SEQ ID NO: 27534 - DNA, 284 bp, Glycine max
gtctagttgacctcatgggaggagaaattggatttgtaagtgagcctgcaattggaagcactttttcctttaccggaaccttcagaaaaggagaaagcacgtctctggatgcaatgcggcagaataatcattttggttcagagttccaaggattgagaacattagtggtagatagcagaaaaatccgagctgaggtcacaagatatcatctgcagagattgggaatgtccgtggatgtaacttacagtctgaattctgcatgctcttgtttatctaatgtgtgt

SEQ ID NO: 27535 - DNA, 262 bp, Glycine max
caaattttggccaccaaaagagcttcttcaaccattgtgactctttagctttagaaatcacaattgggagagtatggctgtctctctgacacgtttgtcatggtggttgtggggtcgtagcaacaaggagaaagagcctgttgtttctggtggctctacactgaattcatcttctgaatggagttttaaggaaagagagactgtgaagtttccttcagtgaagggaacaaagatagctccttctcacaggaaggttaaaagg

SEQ ID NO: 27536 - DNA, 261 bp, Glycine max
gatcgatcttaatttgcgcttcccattttcttcttcctttcccccaaaagttaattaaacattaattcccgtccgttactgtaatagttacgatattaatctaattttggtggggtgagagatgttgatcaatgtgaagcaatccaccatggttcggccggcggaggagacgccgcggagggcgttgtggaactccaacgtggatttggtggtgccgaacttccacacgccgagcgtgaagttctacaggccaaacggggt

SEQ ID NO: 27537 - DNA, 324 bp, Glycine max
ttttcttactattggtttccacttcccagtgaccacaaaacaacactctgcacgttgttcccaccaccaccataccttcttcactcactctcgggagcgtcgaaaagaaaaatgttcacattagccacctcttcccaagtactgttaagacttcagccaccgcactcgatggagccaatggcccactcactcaccctaactccgtttcccgccaccgcttcctccttccgccaccgtcacctctacgccgttaaagccctaactcttcgctccgtcactcgccgtttaatacccgcactcgttagagcctgtgatcggtcacac

SEQ ID NO: 27538 - DNA, 335 bp, Glycine max
atagtgtcacatttaagggcataacgccttccgtctaaccagcgaaggaaatcggtggacacaggtctaagttttctgaatttgtttaaagcggcggtgccgccgtgccggctctcactgtgaactgcacgtatctcttctctctcaggcctgcaccttcgtctccgccaacagttgttcaccaccacgcaaccaaagatggcagattcgatttgcagaacactgagggatggagcgttggagggagagcttgcgcctactctcacaatcaaggactccctcgcttcacctttcgcctttcatgtattctctcacattctacttcaactctcgtc

SEQ ID NO: 27539 - DNA, 595 bp, Glycine max
aggaagcaggggtgcggcgcgtggtgctcacgtcctccatctccgcggttacgccgagccccaattggcccggcgatgttgccaagacggaggagtgctggaccgacgttgaatattgcaagcaaaaggggttgtggtatccattgtcgaagactttagctgagaaagctgcttgggattttgctaaagagaatgatttggatgttgtggtggtgaatcctggcactgtgatgggtcctgttattccaccaaggcttaatgcgagcatggtcatgctcgtgcgccttcttcaaggctgcgccgaaacatatgaggacttttttatgggatcggtccactttaaggatgtagcattggcacatgttttggtgtatgagaacaaatcagcggctggtaggcatctgtgtgttgcagctatctctcactacggtgactttgtggcaaaagttgctgaactctatccagagtataatgtgcctaagatgcaacgagatacccagccgggattattgagaacaaaggatggagcaaagaaactgatggatttgggtttgcaattcattccaatggagaagattattaaggatgctgtaga

SEQ ID NO: 27540 - DNA, 255 bp, Glycine max
agcaataccaggagaggtgggagggcctcactcgtgcgaatatgtcgtaagaaaggagacgatgctcacgaggctgtgaaacccccgcgcgctctttccgttgcttctcacttctctctttacattattattgtatcccaatttcactctcaaacagagaagagaaaactttaactcttcactccctcttttctctttctctctcgaaactcttcaccccattcttcgtagctatggaacctggcttccccaaga

SEQ ID NO: 27541 - DNA, 353 bp, Glycine max
cccgttgaatcaatagaagtccagcggcaacttgttgctcgtaccccagtcttttatcggctggaacaattggacaatggtgttacttctgttgggtatatacgcctcaaagagctcaatgcattggccagaaaagacttggtcattgcaatgaaacgacttcaagacatgggtgcctcatatttcatattggatctcagagacaatcttggtgggctagtacaggccggaattgaaattgcaaagcttttcctaaatgaaggagacacggtgatctacactgttggaagagatcctcagttacagaaagctattgttacagatacttcaccattgattcaagctcctattgt

SEQ ID NO: 27542 - DNA, 303 bp, Glycine max
acggagattaagattgggtatgggagtgggagaaagataaatgtggcatattcatgtcttcccctcaccattctttctttggagtcaaggactggggggttaggtttgtacttaattacgcttcttaatttcttctttatcgatcacccatgatctacctggctagctagctagggttgcttctgctgcattctcgaccgccaatcaaggattcttctgcgcttccatcttaacaagaaaatggtgagaaggaagataccgatcaagaagatcgacaacgtaactgcgaggcaggtgacattc

SEQ ID NO: 27543 - DNA, 529 bp, Glycine max
gaattcggcacgaggactgattttaatctttacccatgcacgtttttttaatccacggaacttattaacacaagtaatttaacatttgcatcccttaatcaatgtttgacgtttgattaattatattctctactactttacttcaaaatgtattgatccaatgagagatattcgtgggtatcaaataagaaactccaaatattttcttattacacaaaaaataaattttttatttagttttagtttattttagtttcaacgactaaagtgaaataaaatatttatatataacaatcaaattgagtagtttttgaatgtaaaaattaaaatataaaaattgtactgatataaagagagtaattaaacctataaataaaagaatatatatctaatgacagcctgagaagtaaaaggttaatcttatgttaatcatatacaattatatattatggttaaaagtattttaattaaatctatttttaaccatttatctatacaattgaaatttacttctcttacatctcttgtg

SEQ ID NO: 27544 - DNA, 394 bp, Glycine max
ttcggctcgagctcaccaagatattcctcaacgtaatccaatattcctatctaatagctaccaagctattattctgtcataagaaaaagaaacacacaaaagagaaacaagttgttagccacagcaaaagtcgatgcttactagtcttagttaggcctcagcgtcagttcatgaaaacttttgcttttataggaattttgctcagggaggattcttgttgtattgttgctgatagcctagaggtggaagttttagtctttggttggaactagttgttggctttgtttagtcacaacaatggcactggcttatgttccaaaagtggtggatggattaattgcatttgcaatcttttgggtgctagcagttttcccagctattccatttctaccta

SEQ ID NO: 27545 - DNA, 426 bp, Glycine max
ctcaaagactgaaggaaaaaaaaacagagaaagctctggctctgaatgatggatagaaggcactgttacaaggatttgctgcctttggtggtgcttgttgccaacgaatgcaacaacacaggcttgttcactctcttcaaagcagccacactgcaagggatgagcaactatgtctttgtcacctatgcctattctgttgcccttcttgtactccttcctgtcacttttttctacagaagatcgagagcggttcctccactcagttgttccatcttatccaaaattgctcttcttggagtgatagggagttcatctcagatcttgggctatgctggcattccgttatagttctcccacactttcctctgccatcagcaacctcactcctgcattcaccttcatgcttgctgtcatttgcaggatgga

SEQ ID NO: 27546 - DNA, 744 bp, Glycine max
tgaacaaatggccgaaaagttagtgctggtatcagacatggcttccactatgaagcaggttccctctaatttcatcaggccactcggtgaccgtccaaatcttcaaggcgtcgtccaatcctcagatgtttgcattcctctcatcgatctccaagaccttcatggccccaatcgctcccacatcatccaacagattgaccaagcttgccaaaattatggattttttcaggtgacaaatcatggagttccagagggtgtgattgaaaagataatgaaggtgacaagggagtttttcggtttaccagagagtgagaaattgaagagttactccactgatccattcaaggcaagcaggctgtccactagtttcaacgtgaatagtgagaaggtttccagctggagggacttcttgagacttcactgtcaccctatagaggattacataaaggaatggccctccaaccctccatctttaaggtaagagaaggtaataggcatatataaaattaaagggtaggccatatataattaattttggtatgtatatatatggtgagcagagaagatgttgcagaatactgcaggaagatgagaggagtatcattgaaattggtggaggcaatttctgaaagcttaggtttggagagggattacattaacagggtagttggagggaagaaggggcaggaacaacagcacttggcaatgaactactatccagcgtgtccagagccagagctgaca

SEQ ID NO: 27547 - DNA, 197 bp, Glycine max
tgcacaagaagggtttgcttctttgctcacaagcctgaggagcttcgccccttgtatgcttctactggttccgctattccttctccaaggtcctattctgctagtgcttctgcattggagatgggttcagttagcccaattgcacttggttctccatctgtcttgatgccacctacctcaacaccacctttgactcc

SEQ ID NO: 27548 - DNA, 267 bp, Glycine max
gggagaggacatttctgatacgggagatactgatattacttaacagactagtatctaatccttcctattctgccactgtcttgcgcggtttaatgaccactagggatatggctggtttgaccattgatgttgctagcagattatctcggaaagaaaagaaaaccgagcagcaggacagcatggtgaagcatataagagaaaccgaaattgttgaccttgctcgcctattcaagaaaagggtgttcacatatttaggcgatgacttgt

SEQ ID NO: 27549 - DNA, 514 bp, Glycine max
gttatatgctatctgaagatagagacgatgatgtagctgttgaattgcattctaagcttctaaaggagttcccaagagatctgctttctctaaagagagcacaagtcttatgcttctacatgggtctgcctggtctttctttatctcttattcagcagattctgcctcacaatgaaggagaaaattatatatatcgcatgcttgcttttcctttgttggagcttggacggatggaggaagctgaggaagctgccaaaaggggatttgaaatcaataagcaagactgctggtcacagcatgctttatgccatgtccttcagtataagtgctgttttagagaagctgttaagttcatggaagaatgttcatcatcatggggttcttcttcatcttttatgttgacacacaattggtggcatgtagcactttgttacttagaaggtaatgctccgagacaaagagtgctagagatatatgacaattatatatggaaggagctagaaagaaatgattc

SEQ ID NO: 27550 - DNA, 361 bp, Glycine max
aaggtatcttctatcattgcccgtggaagagcgtcttaagaaaatgcttgaggatcgtccacttcatcgtttcagtgctattaagcactttgctccagaatattccgagaatgaacttctaggattcctgcagcagcatgcaatattggtgtggggactatggactgcaaaaagttcattgctatatcctgatggtggtgtggaaactttggccagagattattccctactattgtttagcaagagtttgaaagttcagttttctgatgtgagtactcgaggaggtgaacttgttaatcgtgtgagaaactgcctgaagatatttggcgtggagagaaatgatcttgataaatctactgga

SEQ ID NO: 27551 - DNA, 425 bp, Glycine max
gattactatattatacaaaaaacatatttgaatattagtgacttatactctaggagtccttatggagcatataggtattcaagagggttcaatgtggcggctattctggcactagttgttggagttttacctgtggttcctggtttcttgcagaaagttggaattgcaacttcagttcctaacacttttgttgtgatctacaacaatgcatggtttgtaagcttcttttctgcagggttcttgtatttggttctatcaaatttgagagggaaacctggtaactttgctgctagagacccccttttgcctactgcaaagtaaatatagaggagcttgtggaatggaccctctccccctatgtatgaatgttgtcccttgagatatagccccccaagaaaccttatttagacattattctttggttg

SEQ ID NO: 27552 - DNA, 271 bp, Glycine max
acagatagcaatagcataccttcgttcatcttcacttcacgctctcttggaggtagctagtcactcttccattttcgtttcaaaggaagaagaatcccaattctctctcgttgggaatgaaccttctctctctaaccttgccacttccccttttttgttcatctctttctgtaacgagacttccctcatttccctcttcatacaagtgcacatccggcgcagttttaaggagatgtgtcagagagcccaaggaagcggagcagcttctaga

SEQ ID NO: 27553 - DNA, 385 bp, Glycine max
ggcgaaaggcattggacgagaatcttattgggcgctaactaaattggttcgttcaaagtaaagagaagagaagagagtaatggcttgcaacagtttctcttggctcatgctttcatccaccaacgccaaacgcgttcccttgttcttcgtcccaacctcaacctgcttcaaattcgatgttcctgttgcttcccaaatccaatggcatacccgcagcagaaacatcccccaaatcaaacgccattgggtcgaagcttctgatcaatcgctcgcgtctcaagaaagattcagcgtggcgtcgtacaacatactgggggacagaaatgcttatcaacactcggatttatacgtaaacgttccttctcgatacatcaactggggccgt

SEQ ID NO: 27554 - DNA, 806 bp, Glycine max
gtgatgggtgaacttttaggtcttaaatggattaagaggaagaccaggctatgagcatctcaatgagcaactccatattttgattgaggctgatttacctgctaatattgttgacataaggctccggcaggctcaggaattatagaagaactactcaaacctgtggaagagtctgaggactatattaagaggcagcagttgcgtgaattggcgatgctgaattcaaatttcagagaagagagtcccggaccaagtggaagtgtatctccattcaactccagtggaatgaaacgagctaaaactggccgatgaaaggtttccttgttacttgtagatgagtgttattgttttggagctatctcaatcaaagcatctatgaaagaataggctaacaattattgctggctagtattctggtggttttaaatcctctccctttattttacatttttcttctaaaacaactggagtcaaagctagaaagatttttagagagaaaaaaaatgataatataattgggtattgagaataggtgtgttcaaatgagtctttttcttgcacacttcatacatttattattgaatttattcttgcatctgtaacttgtgagaagcatgagatatatgttatgggtgaagttttaggtcttgagtggatcaaattttgtgggcatgtgacattccgggtctcatcagtattcaaagattagttatagtataggttgaattttttttagttgtttgtctcaaacatttgtattttattcactgtgttacagttattgaacgatacatgtcatgtcccag

SEQ ID NO: 27555 - DNA, 271 bp, Glycine max
cttggttgcaaactgtagagcgaagagcgttcgagtagtgagcgaaagacgttttctttcttctttcccgttgtcgtcgcggcggaaccctagctactccggtggtgcgacaaagggtgtgtgagagagaaagggtgtgtgagagagaaagcgagagagagacagacagtcacgatgagtgggaagggcggtggcaaggcgccgtcggcgacgattccagcgtcgtcgcggaagatggttcagagcttgaaggagattgtctcaaatttcc

SEQ ID NO: 27556 - DNA, 1027 bp, Glycine max
  unsure (1)..(1027): unsure at all n locations
ctgcacacacattcagtcataacgtaaaatatgaaattagacactatcttcgcctttatcgtagtttatattctgctggtaacctcatcagagttccctagtgttgctgcagatgatgttagcagcatcatcagtgcttcccaatttgagcaattgctgaaacacagaaacgatcaaatttgtgaggggaagaacggattctacagctacaatgcttttgtcactgctgccagaacctttgatgggtttggcactacgggtgatgttaacactcgtaagagggaggttgcagctttcctagcccaaacctctcacgagaccacaggaggaggaggatggcctaatgccccagatgggccatatgcttggggttattgctttgtcacagaaagagataaatccaataattattgtgaaattagcaaggcaccatgtgccgcaggcaaatcatactatggtcgaggaccccttcagctgacacacaactacaactatgatctagctggaaaagccatacattcagacttgataaacaatccagacttggtagcccaagacccagtggtatcattccagacagctatatggttttggatgacatcacaagccaataagccctcatgccacgacgtgatcaccaataggtggaccccatcttctgtcgacatggcagctaatagagccccaggttatggtgtgatcaccaacatcatcaacggtaggattgaatgtgggaatggtccttctccagcctcaaatgacaggatcgggttttataaaaagtattgtgagatttttgggctctcagatgctaccaacttggattgcagtagccaaaagtcctttgatcaagattaagttggactccttccttgcttataattgccttagttataaatcccggaataagaataagaatgttggtccttgtgttgattttaaataaatttgtctattctgtgttgaatgattaaaacatttttgttccatcnnnnnnnnnnnnnnnnnnnnnnnnnnnnnnnnnnnn

SEQ ID NO: 27557 - DNA, 266 bp, Glycine max
aacattattacattggggaatgtacatggtacctggtactgcaacaggatcatcaccaatccaatcaccgatagtgagcttcacgcgccaccttggcgcctagaggttgccagctgctattcctccaaccaaaaggagtcaaagccaaagcccattcgttcgtcaccgttctgttcactctcgcgagcacccacccaaccttcttcgccttgccggtgatggaattaaaagcacccgccctagtctgcatccaattcttgagcttc

SEQ ID NO: 27558 - DNA, 335 bp, Glycine max
ccagtgtgagttattttgtgatcatcatcgtctatcgtatcccaactttaccccagaaccacatacacaaacaccacgccactgttactttctcttctctcctccactcactttcacttcatggcgacggtgctagcgccaccgtccctctccgtgcgcgcttcctctagccgccggcataggaagaagcagcagcagaagcgagcatggggagacttcagccacttggctcaggtggttcgcaaggacatggaattcctcaagagacgaatcgctaacggcgttgcgtgggccaacgagaccttccgcattctcgaggctgccaagaaaatcga

SEQ ID NO: 27559 - DNA, 447 bp, Glycine max
ccaacctttttgggccaatggaacaaatgactttggcaaatcatccaataagtggtctgtatttcaccatgactggtggacctgagaatgtagacatatcaattatgagctatgtgaaagtaataagaatcaccttgagaacactaaagggattcgttgatgaacagaaattcaagttttgcatagagaaagcctatgatgtcatgttcaaagctgctatggagatctctgagacacccaacaaaaattaattggggcatatatgcagatcttgatcatatgcattgcatgggcaaataacagaatatcaatcattccagaaagagtcacacgtacattatttcaaattaaaaccatatagctgattaattattgtatcttagttttacaaaaatatgaatattgttctttaaggcaatgaagatatagaaatccggtggaactatt

SEQ ID NO: 27560 - DNA, 524 bp, Glycine max
gacaggtgggagctggagatcgtcccttgctttttctatttgaacgtggaaggaagaagttaatggaggagaatgttatttttaaagatgcatcggacatttcttcctattcagggaagatcattgaatgctactgggattccgcggagcatcattgggtttgtatgcggatcagaatagaccaagccgctccaaatgatatcaatacctatagaaaggtaatgcgaagcatagaaggataacatcacagacgaggtcttattgaatgagatcaatcagatcactcgcctacccttctgtgcagacagaatacagagggatatcaaggctcaccagcatatgatctcttccagttcccggcgcaagtgagttatactaaaagctaagcatgtcgaacgacgtcgtatttttttattattattattgaagagctagcaaagactcctgaatgaagtgccagcagaaaagctgtacaattttttctaggagattgtatttgtgctacggcattgttaggctcatgc

SEQ ID NO: 27561 - DNA, 264 bp, Glycine max
aaggatattactctaagtggcgatcatgtgagagagggtctaacatgtgttgtctcagtcaaggtcccaaatcctgagtttgaaggacaaacaaagacaaggttaggaaatccagaggtgcgaatcgtggttgatcaatctattcaagaatatcttactgagtatgtagaattgcatccagatgttcttgattcagtacttgctaaagctcttaatgctttcaaggcagctctggcagcaaatagagcaagggaattggtgaga

SEQ ID NO: 27562 - DNA, 227 bp, Glycine max
cgatgagtcaatcgcgcgtttgacttcatcaggctcgctcaaacacatcgatttgatgttcttggaccactacaagcccgcttacacaaccgacctcaagctttgcgaagagctagggctcatcaccaaaggctcagtattggccgccgacaatgtcatcaagccaggcaatccgccatacctggagtatgtgcggtccagtgtagatgagaaagtgaagaaggcaa

SEQ ID NO: 27563 - DNA, 589 bp, Glycine max
gaaatctcttggagtttgacaaataggagatacactgagaaatgtgtttcctatgctgaaagccatgaccaggccgttgttggagacaagactgttgcatttctcctaatggacgaagaaatgtattctggcacgtcttgcttggttgaggcttctcctattgttgagcgagggattgctcttcagaagatgatacacttcataacaatggcattaggtggagagggctaccttaatttcatgggcaatgagtttggccatccagagtggattgatttcccaagagaaggcaatggatggagttatgagaagtgcaggcgtcagtggaatctggtggatacagatcacttgagatataagttcatgaatgcatttgacagagcaatccacttgcttgatgataaattctcattccttgcatcaacaaaacagattgtgagcagtgcagatgacgatgacaaggttatatagtctttgagcgaggagatctgatatttgtgttcaattttcatccagagaatacatatgaagggtataaagttggatgtgacttgcctggaaagtatagagttgtattggatagtgatgc

SEQ ID NO: 27564 - DNA, 292 bp, Glycine max
ttcccaagttgtttgattcacaccaatgagttcctggttcttttaggagaaggatattatgatgagagaacttcgaagcaaaccgttgagattttacagcgaagagggatgtccttggattcgcgggttgattctcgtgaggtcaatatcaaggaccttgaagcagaggcttcaggtctcaatgccacggcttcatttttggttgctacgttcttttgggagaagggtattatgctgaatttttaatgctgaaatgctgaatttgttctatgtaaattcgtccatgaaaaat

SEQ ID NO: 27565 - DNA, 491 bp, Glycine max
  unsure (1)..(491): unsure at all n locations
agaagcttcagctttattttatcagcctgcaacgtgaggataagccaacaaaagttgaaatgcttagaaaggagatcgctctgatggaagaggaacttaacataaagaatgagctgataaaaaaacaagaaaatttaattcaggagtggaaaaaagagttgaaagatcagttggacaaacacaagattgagttggatagggcttagctaggggtgtgcaaaaatccaacacccgacccaagcccgaagaaaccgaagaaaaaacggttcgggagggtgcgtcatggtggcgtttgagttcggtgagtgaattggagtttgaaactgatctcttgctaatccgaaacccctcctatccaaaaaaagcaatgattggatttttncaagtcattttgagcctgaatctgcccgcccgatgaacacccctaggtttagtgtatgcttgtgctcctatgctcttcacatatttaaagactcggtgccacatttttg

SEQ ID NO: 27566 - DNA, 1037 bp, Glycine max
attttccagtcatttcaaggggtcattgcaaacgtcgctgacattggaccaggggcgaaggagagctactgaggtttacatgccagaaaacatgtcagagaatatttattcggatgaaggaaggtatttaatccccagacaagatcctattgatccccaggcaagatccattgatgcccacgcaagatccattgatccccaggcacgatcctttgatccccaggcaagatccattggtccccaggcaagatcctttggctgcagtaaatatgactgattgggctgctaataatgctcgcatagcagggccttcccaatctcacttaaatactggagattttattggtcatcattggtttcctgctgatcatcaagttcgtggtggtggctggaatggatctgatggtggtggtctttcaaatcaaagtcttggccctggagcaagctctgatcagagtttatttagtattctgtcagagtgtgaccaattgcattcaggtacaccaagggtgaacacggttgcaccaccggcttctcgtccattagattacttcaccggacgtgaagcacctagtggcctggtgcctgatgatatggcatggatgagcttgccacgtcagaattcttcaatacatgaccaaatgggaaagccatacttaaggtcatggaaccggtaatgaacgttttacccaatattagcgaggtaatcttgtctgcaagacagtgagaagaaatgcacatttgtccatgtgatagacttttgacttaagcaagatctacagaagctggggcattcataccctgaaatgtgagagatatgtttctgtacatacctataccaaggccaactcaacaccatgtacatatctagatattagatggcaggaaagaaacccaagtggttaagataagcttcaagaatttcaggctattaggcaagttacatattttattattttttcctttgcttctagagagacattctttaataattttggaagataagaaatgctgggggctggtgccactttttgagt

SEQ ID NO: 27567 - DNA, 464 bp, Glycine max
ctcgagccgctcgagccgattcggctcgagtcaggggcgaaggagagctactgaggtttacatgccagaaagcctgtcagagaatatttattcggatggaggaaggtatttgatccccaggcaagatcctttgactgcggtaaatatgactgattgggctgctaataatgctcgcatagcagggccttcccaatctcacttgaacactggagattttattgatcatcattggttccctgctgatcatcaagttcgtggtggtggctggaatggatctgatggtggtggtctttcaagtcaaagtcttggcactggagcaagagctgatcagagtttatttagtattctgtcagagtgtgaccaattgcattcaggtagcccttatgattcagttagaaatactaaccagtttcttgcaccgagaacttatggattagcagatgcaggtacaccaagggtaaaca

SEQ ID NO: 27568 - DNA, 291 bp, Glycine max
acaatacaaactttcttgaaagttaacatacctggatggaggtttgtacctactactacacatagaaggatgaaggaaatcaacaaagatatagaagcttcgcttatggatatgattaacaagagagagacagctctaaaggcgggtgaagccactaaaaataacttgttagatatacttctggagtcaaatcacaaggaaattcaagaacacaaaaataataagaatgttggattgaatcttgaggaagttattcaggaatgcaagctattgtactttgcagggcaggag

SEQ ID NO: 27569 - DNA, 732 bp, Glycine max
ctaataatggcttcacttatgaccatattgatgggactaaagtagggggcaccatctttgaccagaatggcttcaggcacactgctgctgatcttctgcaatatgccaaacccactggaattaccctgcttttggatgccactgtgcataggatcttgtttagagtcaaagatagatcaaaaccaatggcccatggagtggtgtttagagattcattcgctcgtaggcacaaggcgtacctgaagcccgatccaaggaacgagataatcgtttcggccggtgcacttggaagcccacaacttctaatgttgagtggaattgggccggaagagcaccttaaagcccacaacatcagaataacattggatcagccattagtaggacaaggaatgtcagataaccccatgaacgccatctttgtcccatctcctgtccccgtagagatctctctgattgaggtggtgggcatcaccacttttggcacctacattgaagctgccagtggtgaaaactttgccggtggttccccaaaagactacggaatgttctcccccaagattgggcaactctcaacggtgcctccgaagcaaagaactccggaggccctagccaaggcaatagaagtgatggaaactctggaccaagcagcattcagaggtggattcatcctggataaaatcatgggtccaatatcaagcgggcatttggatccgaagccgtgatccgaacgac

SEQ ID NO: 27570 - DNA, 319 bp, Glycine max
tggacacgggtgtgactgtggtgcgatatcagtcaattcgcagctagctatcacggacatgagcttgcctatcttctgagacctgaatgcgagtatgagggacattgtgtttcttccattcaccgattcctcacttgtcactcccttccatgccaggacccattgcacttcctcctctttctcgtttgaggaataatggagatgtcaatagcttacatgaacagatgtcagagggtcacaaaaatgtggacatgtcccagtccatgtgtgatgatgaccagaatgtgaaacaagataatatttggcaattgttcaaaga

SEQ ID NO: 27571 - DNA, 639 bp, Glycine max
ggtttcaggtggcacaacctctgtggctcaaagccaaacaataaaaaaggatgtggaagatgcttctccttccaaacctgatgtgaacactgatggtgagaagggaaatttacagaaggatgatacattttccattaccatttcttccaacgacggggctgatcccatgcaagggcttatgactgatgatgcattaaaggaccctgactttcttccactaattgtttctcttgatgatttcatgtattctcttacatatgcgcctccatttgaaaatttaccagtagaatctgggaaagtggtacctacctcagacaaggatgattccggggttggaacaaaatcaaaacctgctgatttaacaccaaatgagcaagcggatatcactggtgataataagtctgagaagtttcaaagcacacatgtaaattcagattctttaaaggagaaaaaggttaatgctgaatctggggccatttcttctgatgtgggatacagtgggagtcaagctgacatgaagtcaactgatggtcgtaccaaggaaaggtcaactgatgatgtgaagtctgcttccagcgatgctgagttgagaggcaatctctttcgtgcggaagagagatatgataatgacaataggta

SEQ ID NO: 27572 - DNA, 194 bp, Glycine max
tgtcacagccgatgctattatttcagttcaaaaagtagcatctcggttgggttgtgataacttagatgaaattacaagagaagacatggctttggaggctcttggggaaattgagaagttgaccagagtaaagaagatgttggaagaggctgcaagaccattttaaccagcttggacatgctcccttctcaaat

SEQ ID NO: 27573 - DNA, 292 bp, Glycine max
cacatttgtaggatcaagagccttgcttcaattccaagatcctcctcctccctcaaccgcacctttttcttctcatgttcctttagcgccggcgctgttcgtcatcggagattcctccgttgattgcggaaccaacaattttctgggcaccttcgcgcgcgccccgatcaccttccttacggaaaagatttcgacacccaccaacccgccggaagattctccaacggaaggatccccgtcgattatcttgctcagcgtcttgggcttccttttgtgccaagttatcttgtgc

SEQ ID NO: 27574 - DNA, 238 bp, Glycine max
gttttgtgtacacattaattgtggtttggtctttggcttttagagtgcctatcatctcaatgctgtgcctttctcttctgtactgtttatctgtgttggttgctgcagcatcagggtttgatgtcatgtgtggcacgtttagaatgagtggcatcttgtttgcatctttaggggttcttggctttgttatgctgcttcttgttgtgctcttgctggtgctttttgcttcctggagatg

SEQ ID NO: 27575 - DNA, 543 bp, Glycine max
  unsure (1)..(543): unsure at all n locations
gaaaaaaatcctctctggagtcgaattctaaagctaatcttgaagactttgaagaaggtaactcaaaatctggaattaggtcagcgttctgccgaagaagttgatgactgcgacgtgaaaggggatcaagaaaacctctgaactctcacgtcactgttaactcacaacaccattccaacagttgatgtttgatatagaagtgcacctaaacacatggggacaagcagttttctatggaactgtactaaaaaattcatcacagccgggatcgtcactgtgactgtgactgatcattttgtgacagttattccagttcgaggcggatctatgtctcccacatttaatcctaaagctggttctcatatgggagatgtttttgatgactatgttttggttgagaaattttgccttaggaattacaagttttcacatggcgatgtggtggtctttcggtaatatttctgtccatcctttaccaagtattgtactctntactttaagaattaaatttgcatttatatgccatattttcctttttatatg

SEQ ID NO: 27576 - DNA, 304 bp, Glycine max
gctaactgaaggtctggaattaggtcagcattctgcggaagaagttgacgacggcaacgttcaaggagatcaagaaaacctctgaacactcacaataccatcccgttaataaaaacaagtctctctctttctctcttcttcgttgcccgacggttgatgtttgatatagaagtgcacctaaacacatggggacaagcagttttctatggaactgtactaaaaagtttatctcagccgggattgtcactgtgactgtgactgatctttttgtgacagttattccagttcgaggtggatctatgtc

SEQ ID NO: 27577 - DNA, 376 bp, Glycine max
aatagacaaggtgactatgttaatgcaatacgagctgcaagggacttttcggcaataatttcttcgtctttaaagatggatatttttccgtactcagtgttttatatcttctttgaacaatacctggatatatggaagttagccctgatcaacatttccgtagcactaggtgctatttttgttgtctgtctgatcatcacatccagcgtgtggagttcagtaatcatattacttgttctgatcatgataattttggatctcatgggcgtaatggcaattttgggtattcaactgaatgcggtgtctgttgtaaaccttattatgtcaataggaattgctgtggagttctgtgtgcatatagtacatgcttttacgg

SEQ ID NO: 27578 - DNA, 458 bp, Glycine max
cttcaattctcttcttcttcttccattccttccttcattcctctctcaaattccccattctaaaaccgtcgcctcgtgaacgagtttccactcacaacccccaacaaagagaacaacaacaaccctatactctctcgacctcgtattctcctccgtgtctccctcctcattttttttcttttccgttcacgaaatcgatggattttctggtgggtcccactttcaccatcgacgtcgcctcctccccgcctccgtacgacgccgacctccccggtgtcgccaccgccgccgaccgaccgtacggactcttctccggccactcctccgacagcgagtcctcgatcggaacccctgacgacagcgatgacgacgaaaacgatgtcgtttcgtccaaaagaaaccaaagcgacgaagatgaagacaaagaagaagaagaagaagaagaagttcactccaag

SEQ ID NO: 27579 - DNA, 286 bp, Glycine max
taaatttaaggtaaaatttgaattagaatagaatgtcagcaattattaggcacaccttaaagttttttaattttccatccatttctctttttcttcccctcatccaaacatacccttagaatttgtatgccatagagttcaaaatatctggtagattcgaggcggacattagtcactattacattgctaggtagtttgaaatatggatttttgttatgtacgaggtagaatttgattttatataactcatttatggtacataaataaatataaattttttcgtgtg

SEQ ID NO: 27580 - DNA, 447 bp, Glycine max
caaaaggcctttgaggctgactttgtcactgcaatgattaagatgggaaacatcaaacccttaactgggtcaaatgggcagataaggaagcaatgtaggaggcccaattagaagagacacaacaaataaattatatgaattgtgtgtttgtgtgttacatatacaccctaaaagtggggtagttcttttgtgagttgatctgttaaggtgttttcttgttccttcaaaatttgtattgttaagttcaatttcaattttactagagttattgtaaggaattaattgtaaagcatgtttttcttacatgtaatgtcattttaaggatgtgttgttacggttacaacaattgtaactgttgcaaaaaacgtgatataatgaaagtggaatattgttttctttttataagaatgactttcagtatgtattagcttactgaaataattattt

SEQ ID NO: 27581 - DNA, 232 bp, Glycine max
attctgtcattgcaaatgcacaaaaactgggtgaagaacgaggtgcaagggcccgtgcacctgctctagcgcagatcaagtgcattctctcagcctccttcatgccggtctcttatccatcatgagcaggggtggactacattgcacctgactcgagatccagatacttctgcaagatatttttctgcaagatctgtcactgggtttctttcagatgtttattctccagctg

SEQ ID NO: 27582 - DNA, 251 bp, Glycine max
tgagtaatttagataatttggcaaaagcaactgacacttgccaatgcttactgctatgatgagatcaacttcagctgtggatgcccgagtcctagagtagctggacgtggatgctttggcgtacgtcttatgcttgatcctaagtttgttgcagaggctatttcattaattgctgccaatacaaatgtacctgtcactgtcaaatgtcgaattggtgtggatgatcatgattcttacaatgaattgtgtga

SEQ ID NO: 27583 - DNA, 414 bp, Glycine max
tgggagatcgcacgggaattccgggcttctccctctggtgtgtgtgatgttcttcttttttcttttttttttcctttttactttattacctatatatgcttctgccactctccttaccacggatacatcgcaggactcgcgtttgtcttcgatctaacaaggtattatctattactttcacaatcaggcgtaagggttttctttttaccgtgctaataatagctaacaacgcatgtgcaattgataacattaatggaagcaagtaattcgtatatgagaaacgattcaaagaagtttatgtgttcgatgctttcgatttggggaattcgtaattgaagtggtattaattccaatttttgggcatgttctttatttacagagattgtctaatgcttagtggatttctttaatttg

SEQ ID NO: 27584 - DNA, 333 bp, Glycine max
aagaaatctgcgactcttttctctctctgtttcggtggtgcctgactgcttcatccctctttcttctcttcaatcgtatctctctctttgtttcggtgaattgaagcagcggaggagatggcgagtcgcatgaaggaagatgagaagaacgagcgcgtgattcggggtcttctcaagcttcaacataatcgcagatgcattaactgcaacagtctgggaccacaatatgtgtgcacaaacttctggacgtttgtttgcacaaactgcagtggaatacatcgggaattcactcatcgagtaaaatcagtttcaatggctaagtttacttcacaa

SEQ ID NO: 27585 - DNA, 391 bp, Glycine max
caaaccattccaattctcaacactcaaactaactgcaacttgcattccctagagaacacacctctgttgccttccttcacttcagttagctgagtgtgttggtaagcactttccttctcctttgggtagttatgtcatcagcacctatgaccgacaacaacaaggttcaaaacaaaggccttttatcttcttcttcttcttcttctgtgaggatagaggaagagatcatgaagcagggcatcataaccattttgaactcaaacacaaacacaccttcttcttcttcttcttcttcttcttctctgcgaagaactctctccgcagacatgtcctccaaggactacttgcatgcaaaaaccattgctgactcagaaaaagaagaagaagatga

SEQ ID NO: 27586 - DNA, 449 bp, Glycine max
tgctaaagaactggcaccacacaagcctctagcgaaattcttgtgcatcaaaggaattgttttcttctgcttttggcagggaatgttgctggaccttttagcggcaattggtgtcattcaatctcgtcatttgcggttagatgtggagcacattgaggaagcaatgcagaatattttggtatgtctagagatggttatcttttctgttcttcaacagtatgcttatcatcctgcaccatatagtggagaagttgagaaaatgcttaaacaaaacaagaaaaatgaatgatatgataaggtcaaaagaaaaattcagggtacaggcgtacagagatgtattcaagagctgtttattgtggcgctagtagatacttgaaagcattgatgcaaagtggatgtgttcttttaataatgttattgtgctgtacaagattccccatccaccacct

SEQ ID NO: 27587 - DNA, 291 bp, Glycine max
gctctggagactcaggtggttctaacgtaatatccgtccagccctgctagctagtttcaatttcttttgttctatttctgtctatagaaaagatatcacccacttgctactttatattttactgcaaattaaatactctcgtgaataactaactactatttaattccttgcgccattaccaatgtttttatcctgcaaaacatacatagtagtagtatttgatatttgctaggatttcaggtgtgcgctgaaacctccgtgtcccacgaaaaccttacaaaattgaattgt

SEQ ID NO: 27588 - DNA, 589 bp, Glycine max
  unsure (1)..(589): unsure at all n locations
ctggagcgcttgttcgaacgcactatgatcttgataatgcttctaatgtggtgttgagtggtgatgatcggctgcagcgtgttacaactacaaagaataatgagcttgttgatcctgcacagctggactcacctgagtttttgctcaagataactaggtctgattatgttttgaaatctcttggtaaagcaggaatagttttgtggactatgaacgtggcagaatttaaggctagattaatttgccaacataatgaaaatccttctggaagggattcgtttgatgcagaggatgggtatgttgtagaccgtggcttagattttgctatgccgtatgcatgttgggacatgaaactgaatgaagtctaccgccaacgcaagaattttctgttacatcctgctgaccctggaagattgtctggtatttatcaagagaatattatgctcccattccatacttcagagctgaagnctccatcacaacctgacctagatggatttatccttggtcagggcggtaatatgatgctacctttgcccatatcaaattctttgccctctttgcaacaaaaactcgatttctgtgagag

SEQ ID NO: 27589 - DNA, 508 bp, Glycine max
gctacaattacggatagaggcccagggtaaatacctgaaaaagataatcgaagaacagcagcggctcagtggcgttctttcggagactcctggctctggggttgcagccgttgctccaggggatgcatgccaagaacctgataataagactgacccgtcaacccctgaccctgaaaaggccgccaaagaccgtgctccggcaaaaagtctttcaatagaatctttttcatctcaccttgaaccgatgacaccagattctggctgccatgttggttcccctgctgaaagccctaaaggggagagatcggccaagaagcaacgagtaaccatggatggtgtgtattctaaaccagaaatggtgcttccacatcagatactggagtcaagcatgtcatcataccagcaacctaacactgtttttcttggccaagaccaatttgatccttctttgggtatatctaccagaagtgatgaggaattggttaagattggtggcggtaatctgtga

SEQ ID NO: 27590 - DNA, 390 bp, Glycine max
tctcaagcaaccatggcaatggctagccaagcgtctcgatgaagcctaatcattgatgtactacacatcatggattggacgtagcatctactggagattactatgagtatttcggttctgcaactgatgttgatgctgtggtttacctgatgctgactaatgatgtcattcatgggctcttccctgaggctgttacaattggtgaagatgtgagtggaatgcctacattctgccttcctacgcaagatggtggggttggctttgattatcgcctgcacatggccattgcagacaagtggattgagattctcaagaagaacgatgaagactggaaaatgggtgatattgtccacacattaacaaacagaaggtggctggaaaaatgtgtag

SEQ ID NO: 27591 - DNA, 541 bp, Glycine max
gctggaggctattctatggggtattggaacagctataggggagcttcctccttactttatctccagggcagcacgcttgtccgggagcagagtagatgccatggaagaactggatagcgaagataaacgagtcttgagtcgaatcaagtgctggtttctatcacactcgcaacatctgaatttctttactattctagtgcttgcttcggttccaaatcctctatttgaccttgctggcattatgtgtggacaatttggcattccattttggaaattttttcttgcaaccttgattggaaaggcaatcattaaaactcacatacagacgatattcatcatctcagtttgcaacaatcaacttcttcattggattgagaatgaatttatttgggttctcagccacatacctggttttgcatctgtcttgcctagagtgacttctagtctccgtgcaatgaaagataagtatctgaaaaaagattcccatccagtttccccaataagcagggggaaaagtgggatttttctttcactttagtct

SEQ ID NO: 27592 - DNA, 218 bp, Glycine max
ctacatctcagttgtccagttcaacctcacctccgaagtcaattctaaaccaccgatattcccacgtcataacctgcaacacattgacatcatcactctgctgcggacgtaacaacggcgaatgcgtctgcgcaaaggcaagcgagcttgctcgtacgcggaaagcagacctgccgctgccaatcgcacgttgcgaacaagcgctgttcaccgcagaa

SEQ ID NO: 27593 - DNA, 202 bp, Glycine max
caaaaagcaatctagctttgcatactctacctctacttcacctcgttaccaaaactagcaatcatgtctgtcgagcccaagggagatgtcggactcattggtctggccgttatgggtcaaaacctgatcctcaacatgaacgacaagggtttcaccgtcgtcgcctacaaccgaaccacctccaaggtcgaccacttcctgg

SEQ ID NO: 27594 - DNA, 279 bp, Glycine max
ctctcgagccgaatcggctcgagctcacgagtcacagaaaaagaacctactccagccacgaacacagtgcactatagtctatagcttcaccttttctggtgttgttgttgttgtgtcgttcgccatgtctactatgtctgaagggtattataattccaagaagagtggtgatatatatggccagggaactcgcgcagattgagcatgtcaaggcttcgttgcattctgcgagggttgaatttcaagagctatacgtttttgtatcttgttgttccaatg

SEQ ID NO: 27595 - DNA, 309 bp, Glycine max
gagatagcaacatccttgctcacacccatatcaggaaaagaagaaaatatcacattattctctctctctctctctctcacacacacacacacactacgtatgaaatccccgtagccagaatcgtctcccttccaaccagacaacaaacgccaccctcacactctcaattattctcacattttgatttgtttatatattattcccttttcaagactctcaatatcatatcttctacttgaagcaaagtttccttcttggaagatatggtgaatccaggattgttttctgcgaataagtctgtgaattcgg

SEQ ID NO: 27596 - DNA, 260 bp, Glycine max
aaattacaatcttgtcctcgccatgctgtggcgccacccggaaaacgttaaattagaccaagtcaaggttgttcactattgcgcacgggcgtcgaaaccgtggagatatacggggaaggaagagaacatgcagagggaggacataaagatgctggtgaaaaaatggtgggatatctacaatgatgcttcgcttgactacaagccattgatgagtgcaagtgaccctccagcaccggatggtgtcgacaatattgaaccat

SEQ ID NO: 27597 - DNA, 735 bp, Glycine max
tgtcagtgttgcatcgcgtctggtggtagactaagggaaaagacaaggaccacaacatctgctcaagtgttactgcgtgcggcacttccatgcctctcttcatcatcgcatcttatcttcgctgccactgcaacagggaagatgcatgagttctccattgttgatggttttgtggagataagtgaatgcatggcagagatgaccaagtacgtggctaatgaaccatccgttgggcttttctttatccaacagcatgctcaaaatgcagtacccaatatcatcaaagttaagaaaaatgttgttgagaagtctcatgaaacaactttgcacacagaagatttggaggactctgtcacaatggttcaatcaatgaaagagtgtggatttcccatagctgataagatgatcagagagattaaaaaatctctgataactatggaaacaaaacaaccgaaaagagggttaatccatccagcatcaagttctcattcagaaagagctagtttcttgggtaacgctgcattttatgctcaggagggcaatgaaaaaaggagtaactatttctcaaatgtttttgaaagtcagcaaaagagaaagcttgggcagcttccaagtgggcggcaagcttgatacctcgggcgatcaaatagattcccacggaatgagaaagccacccaatggtacccttaattttgcccgtttgttgggtcaacattctgcaagccattaccttca

SEQ ID NO: 27598 - DNA, 548 bp, Glycine max
tggtttgggggagcacagcaaggcttgtggacattcgcagtttggacgaatctatgaacaagggcattaccctgaatgggacgaggatcaccctattcattttgttgggcactcagcaggagcacaagttattcgtgtcttgcaacaaatgcttgcggataaggcattcaaggggtatgaaaacacctcagagaactgggtattaagcgtcacatccttatcgggagcatttaatgggactacaagaacctacgcagatggcatgctgccagaagatgggagaacattgaaacctatttgcctgctacagctatgccgcattggggtgataatatatgattggttcgacatttcctggctgaagaactactacaattttgggtttgatcactacaacatgtcttggagaaaaatgggcatatggggtcttgttgactgcctattggggaatgcaggtccatttgcttcgggagattggatcctccctgatctcacaattcaaggctctataagactcaactaccatatacgtacatttccaaacacat

SEQ ID NO: 27599 - DNA, 274 bp, Glycine max
gagcgattgcccttgctgcggcgactacctcaccaacaccaacctcttccctaacttgttgctcgacaagctactgaagaagacttctgcgcgtcaaatatcaaaaaccgcttcacctgtcgaacattttcggcaggtattgcaaaagggttctgatgtgtcaattaaggagctagacacccttattgtcacttcttgccgagaagaaaagaaaaatggaacaagaagaagctgagagaaatatgcaaatattgttagacttcttgcattgctt

SEQ ID NO: 27600 - DNA, 460 bp, Glycine max
agagataaatgagtcaaaagagcttgaaatgaaattggccacgacattgtctgatattgatatgttgaagaatgagttgaactttgttaagaaaagggttgaaagaggtgagagcatggagcatgtggaaggagaatcaagagatgttggtgttttagagactgcaacagaagaaatagaggcagcaaagaaggacttagcttccattagagaacaaggttttaagtttatggcctctatggatgttacaagaaatgagctgaagcatgtgaatacagccacggttcatttaaagaacactgaatcgaaaatgggtgcaaaagttcgaaacctcagttacaagctcttgagagcgaaatctaaattagaagcggtgtctgctgcagaggaaaaggccaaatcaatagtcagtaacttgtcccaaactcttgataagctcaagtccgaaacagaagcagcg

SEQ ID NO: 27601 - DNA, 384 bp, Glycine max
cctgatttccggagtggatttatcggaggaggaagccgaagcgtgtctcaacttgctgctgcacgaaccaaacgaggccttaatcagcgctcttctcgtgcttctcagagccaaaggagagacctatgaagaagttgtggggttggcgagggcaatggttaaacacgcgacgaaggtggagggtttggacgatgtggtggacatcgtgggaaccggaggggacggtgccaacacggtcaacatttcgaccggtgcttcgattctcaccgcggcttgcggtgacagagttgcaaagcaaaggagccgttccagtacatctgcgtgtgggactgccgatgtgttggaagctttgggagtcgtcatcgacttaggtccacagggggt

SEQ ID NO: 27602 - DNA, 320 bp, Glycine max
gccaagggaatcaaagaattggagaaggctttggatcttggaagaggtgccaatcccaagggctatatggtagaagaaatatggcaagagcttgcaaaggcaaaataccttgagtgggagcgatcatcgtccaaacgatcatgggaattgcagtgcttgaaagaagcttgtgagtcggctctgaaggaaaaacattttctggatttctcccaaatggaaggatttgtagatgatgctactacttcccagtcagaacaattagaggctttagaaagagtcttcaatacagctgcagaagctgacacacctactgaggtgcc

SEQ ID NO: 27603 - DNA, 570 bp, Glycine max
attaacttaaaaataaagcaagataaaagagagcgctggaagatgatgatacgaagggggagcaaatggaattgagcctctgttagtgatttccatggacgcacctcgtaaacagcaggtttcgttgagaggagcaagtgcgaaggagataacaagagacgcgcttcttcagaaggtctctcaggaaagagaacttcgcaattacgcaaaaagagctgctgctgctgcgctcttcattcagagagtatggaggcgcttcaaggtcacaaagatgatttccctgcagcttcagcaggagtgggagatagcggtgaatcattatgctggtgtgatgacagcaaattggatttcaaacgatttgttgagaccatttctgttctttatcacccgtatctcaactcagcatcggaaggtccacagcaagagaatagattctatgaagctgtgctttacaatcctactggaaagcctgaaatcttctgattcaaagcagaacttttgttttctggcaattggtacaactgaagaaagaacaatatggagataccaggcacgacaactgacttctct

SEQ ID NO: 27604 - DNA, 620 bp, Glycine max
taagattgatgtcttgccagtgtggaatgcatggggtcatgcattaattcggatggagcgctacggacatgctcgtgtgaaatttaagcaagctcttcaattgcacaagggtgatcctggacctgtgattcttgagattattaatacaatagaaggtggcccaccagttgatgtttcagctgttcgttctatgtatgaacacctggctaaaagtgcacccacaatcttggatgattctctttctgctgattcatatctcaacatcttatacatgccatcaacatttccccgttcagagaggtcaagacgatcacaagtgtctgcaaataataattctgtgtatagtcgagattttgaagatggtcctcggagtaacctggacaatgttagatatactgaatgtgttacttacttgaaagagtatgcacgccagcagttgcttgcttttatgtttaggcatggtcattaccatgatgcttgctccttgttctttcctcctgatgaggtcccaccgccaccacaaccatcaatcacgagtggagtgtcttcttcatcaccccaaagactagattctttggcaactgattatggaacaattgatgatctgtgtgaattatgca

SEQ ID NO: 27605 - DNA, 274 bp, Glycine max
caagtcttatagaagcatgctagataagtggagctggttggtaggtatcacagtgtgtgaaagcctttttgcgaacgagaggttgcaacatatcccaggtatccaaatttgcaacctaagatctgtacctttatggtaaaggaattgcattgatgtttggtgcttttaataccatagttggttggttagtacttagttctaagttctaactttccatcaagtactaagcaaatagaagaaagtaaaaatgggactttcttctacaacactgctt

SEQ ID NO: 27606 - DNA, 538 bp, Glycine max
cattatttgagaacaacagcagagaataaaagagaagaggagatcttggagctggttcagaatactgattttttagtacttgcgaggtctatgcggatactatccggcttctttttaaggagctatgggaacggatataattaacattcaccatggtctgttgccatcattcaagggtggtaatccatctaaacaggcctttgaggcaggtgttaaattaattggtgcaacaagtcactttgtgactgaagaacttgatgctggacctataattgaacaaatggttgagagagtttctcacagagataacttgcagagctttgtgcagaaatcagaaaacctagagaaacaatgcctttccaaggctatcagatcttactgtgaacttcgggtgttaccttatgaagaaaagaggactgttgtattttgacggaaacagaaaataaccaaaatacagtgcaccaaaatggtgtgcatctacattcatattcaaataatatcccacttcagttgtaaaaaaaaaaaaaaagggcggccg

SEQ ID NO: 27607 - DNA, 301 bp, Glycine max
gcgaaaacaacgtcaacctcctcgaccgcgtctctgcctggtgggcccgcgtcggctccaacatgctcgaccgctccgacgccgtctccaaggtcgcattcgaatccgtggggcgcctcttccaggaattcagctccacacgcatgagcaagcttgccggcgataagctcgtcgattccgaaaactccctcgcgatccgctccaactgggtctcctccatggtggacttcgtgtggcggaagcgaccggccctcatggcgcgctccttgatcctccccgtcgagaatttccgcgccaccgt

SEQ ID NO: 27608 - DNA, 294 bp, Glycine max
tctcttcttctgtctgtcgtcttcttccctctcaccctttcaactttcaagtaacaccacactcttcttttcttactcttactcttatgcttttcaccttcttcacttcactaccctctacccttttctgagacacaaacactctcttcctgttccacgcttccaatggcttcatgtagtatagggaccccaaatattaaagcattgaacttgcactttggtggaaaaaaagttggcctttcacaacaatttggtacaagaagctggatcagtaagcagtcactgcagtacact

SEQ ID NO: 27609 - DNA, 704 bp, Glycine max
cttgatcaagtattctgccaccaacatcccaatccctcctccataaccatattgaagaataagataaatacaacaaaacctagagatggaagaagcacaggtgcaggtatgggaagggtatgtagattggaggaacaggccaaccataaaaggacgtcatggtggcatgcttgctgcctcctttgttttggccgctgaggtattggagaacctagcatttcttgccaatgcaagcaaccttgttttatatctgtccaagtttatgcacttttcaccatccacctctgccaacattgtcactaacttcatgggaactgccttcctccttgctattcttggtggatttctagctgatgcgtttatcaccacttactccctctatctcataagtgccggaatagaattcatgggtttattaatgctcacaatacaagctcacaagccgtcactcaaaccaccaaactgcgtaattggaaacaccgacagtccatgctataaaattcatggtgcggacgccgatatgctatttgcacgcctctatcttgtggctctgggcgtaggaggtataaaaggctcacttcctcctcatggagctgagcagtttgatgagaatacaccggagggaaggaagcagagatctgcatttttcaactactttgttttgagcctgtcatgtggagcattaattgcagtaacttttgtgg

SEQ ID NO: 27610 - DNA, 332 bp, Glycine max
agcgacttaatctgtgagggaccgagattccgccataaatgctttcttctcattctcgctcctcactccatcttctcgttccgttcagcatcgctcatttctctccgacgaggttgttcatatgtgatcaactgttgaaagatgtttgactgtggtcccaagtcagaatacatgggtggccagcgggaaaattttttgaggttggaggccttggattctacactatcttcatcctctgatgccggagttataaaatctggatttaatattgataaattaagccatggtcatgggagcagcacaacttctaggtctttcaaaaggggaatgag

SEQ ID NO: 27611 - DNA, 267 bp, Glycine max
aattgatgcagaaactaatgtgacaggaagcaatagggtaagatataaatcagcaccaacacgtcgtgagcaagaaaaatgggatagagctaccaaggccgcaactggaggcagtgatgtgatgttccgggaaataaggcagtctcgtgaagatccaaaagttttggctgctcaagctgaggagcagtataataagttaaagaggaagttgcaaatctttaccttgggtataggtggtgttggtctggtttcagcttatgtttctta

SEQ ID NO: 27612 - DNA, 174 bp, Glycine max
gtttctgttaaaattgttcaataaagacaaagtaacccttttattttcctttcctttgatcactgacccaattcatggatgattcaattgcactcaatctcctagtctttattgtttatgctcagatccgttcctcacctaatcatgctcctatttccccactaatcacctagg

SEQ ID NO: 27613 - DNA, 238 bp, Glycine max
gttggagagatatcaacatggccaagtgccagtaatgtcattccaggccaggttacatataccgtggatatacgagcaattgatgaccttggacgcgaggctgttatctatgatttatctaaacaaatttaccaaatatgtgacaagcgttcggtttcctgtattattgaacacaagcatgatgcaggtgctgtgatttgtgattctgatctgagttcacagctcaagtctgcagctt

SEQ ID NO: 27614 - DNA, 409 bp, Glycine max
ctttttctctccgatatttttaatgtgaaaacattatcttttgcaattgtaattcctccgtagaaactggaaattggacacgtagtcctacacatagagaattgaagatagtaactcagtgctgctaacaccatgttttcttcgtctccaccgtttccttcgtcttcttcgccttcagttacgatgcttcatgaacaagctgctcctgcagttgcctcatggtcttctagttctgcagctcagcattttcctacttcggttcttttacaagagcagcgtgatgagtataagccctttctgcacgtgcataataaggagacaacactaaatacaaggcagatggatatgacctcagttcatgaaaaaggtaacacaagcaacgctgatcagttagtgcatgactttgtcc

SEQ ID NO: 27615 - DNA, 299 bp, Glycine max
gggggaacagcgtcatcaactccatcacacatgagccagcaagtgttgcggcctctaagacagtggccatggttccaccaccaccaccaccgcacttgcgtcaccctttcccttcaccaccttctcacccctccaccaacaacctctcaccgtttttcttttgccacggtcgctgcttcgtctcgtcccaaggttcgaactccgaagtctcccgtaccaccaccacccactgccgattccgatctggaggagaagaagagccgaaaccaattgaagcgagaagccaggcgcactgtcaa

SEQ ID NO: 27616 - DNA, 325 bp, Glycine max
aaaaaaggctttgagggaaacccgtaccatccggatggttgcaaagacattgacgaatgtaagacaggcagtcatacatgcataagtgaaaaaaattgtctcaacaccaacggatcccacatatgtttgtgtccgaaatcaggaaatggaacacacggctcagaagggtgcccccaacaagaagttgttaccaaggttgtcataggtaagcgcatgcaattgtcttattttcctcttcaactctagtaatttattttgatgtatctgtgttcattcagttaatatgctactaagataagagtcatgtccaaataaacttttcaat

SEQ ID NO: 27617 - DNA, 248 bp, Glycine max
ctcaccatcatactgaggaagatcacttgcaccatcatgctcacaaagatgttactgaacctcttcttggtgaatcaaaaggtggaactaagaagaagaagcaatggaacataaatgtgcagggggcttatctccatgttcttggggactctatccaaagtattggggtaatgattgggggagcagtcatatggtataaccctcgttggcaaatagttgatttaatctgcactctaatcttttcaata

SEQ ID NO: 27618 - DNA, 374 bp, Glycine max
agatcaagtgttcgccgatacatgggtaccataactggtattagtgatttagagccagtccgctggccaaattcacactggcgttctgtgaaggttggctgggatgagtccactgcaggggagaggcagccaagagtttccttgtgggagattgaacctttgacaacattcccaatgtatccatctccattccccttaaggttgaggcgcccttggccatcgggcttaccttctttatatggtctcaaggatggagacatgggcattggttctccattcatgtggctccaaggtgggcttggggatcaaggaatgcaatctgttaacttccaggggcttggtgttacaccatggatgcaacctagacttgatgc

SEQ ID NO: 27619 - DNA, 648 bp, Glycine max
atttattcttctaatcatacaccaatacattcgttgccaacggaatctagttctcagaggtcacgtccatcttttcttgattctcttaatgtcactagaccttctttggggtctccatttcatcaatctgagcaagattcctcaatgtccaatcatttagaatcaagcagcaatggcatatcaggatctgcttatttccataagccgtctgaagagactaaaagtatgccacttttctccaattttacaactgcaaatgttcatagttcacttgagccgttgacaaccccttcagttgttgataatgacaatcaaggtgctctgatgacaagcactagggaaagtggcatggagaagcagcacgattattactcatcttcacaaaatgaagacttttctgctttagaacagcatatcgaagatctaacacaagaaaagtgttctttgcgacgcgctcttgacgcttctcgaactttagcagagtcactagctactgaaaattcaactctgactgataattacaatcaacaggtttgaggagtgtcgtcgaccaattgagcatcagacatggagaatttacaagaagatatcagagcccgactggttgagtttgaggctatcaagagtgaatatacaaatgcacaacta

SEQ ID NO: 27620 - DNA, 915 bp, Glycine max
aggcgcccgagattcttgcgaagagaggctacgatggcgccaaggtggatctttggtcgtgcggcgtcgttttgttcgcgctcattgctggctatttacccttcaatgattacaatccctccgttctgtataggaagatttaccgcggtcaattccggttcccgaggtggatatcacatgatctgagattcctcttatcacgacttttggacacgaatcccaagacaaggataaccgtcgatgagatctataaggacacgtggttcaatgcggatggcgagtatcggttcaaccgggttttggtcaaggagagtgagtgtgaaaagcaattgggtcgaaccggattcaagtctttgaatgctttcgacttaatttctttctcgaccgggttggatatgtcgggtcttttcgaggacccgaccggatcgaattcggttgaacgggttgtttcgacagtggtgccagagaaaattatggagagagtggaggcaatgacggaggagggaagggtggtggtgagaagggagaagaatggtggtggagcaaagctagaagggcaggatggtaatttgattggtattgttgtggtttaccaattaaccgatgagctggtggtggttgaaatgaaaagaagtgaaaagggaggggggtttggggggcagttttggaaagataaactgcggccactgcttcttgaattggcaagtgaattggaagagccggtctctcggtgatttctatagaatataatttggtatctatgttttttgttttgggtaacaaccgtaaaccattgtttttatggattggtgaaggtttaggtaatgttttaaggaacttatataagtatatagtaaagaaatgaacatgtttaatactactagaatttaaagatacttttggactctttttcat

SEQ ID NO: 27621 - DNA, 223 bp, Glycine max
tgagatgtggagcttgctattatggatttgtttaatctcgttcttaagatcatattctttggaagggtatattattgatgttcatatagatacttttttgttcagtgtaagtgaactccttcctgagtggtttggttgagcatgattggaagaattatcatataatgtgtaacacgataatgtcacatttcctctttaaagaggcaaggattttggagttaaa

SEQ ID NO: 27622 - DNA, 499 bp, Glycine max
ggctcgagaatacttaacagtcaatatttatttttcttactttcatataaaagcaagtttctcgtttgaaatgtctcctgcagggtgattaactttaaactcttcaccctttcttgtgatcaaacactgtatcattataaaagtgcatggctattctggtagatgagcttatttgatattactttgtttattcctttatgatgtattcagcttgttactgccactggttgctacaatatgaccaagtgtccaagggaaatgcgggagattgaggcagtgatggcaggggcaccatggccagctcagaagatctaagtttgacctcacctcacctgtccttgatctgaactggtctgctaagtttgtattttttttattaaataaatattagaaagtaactccactctcccagatcctccatgtaatcacgtgattagtggcaaaaatttaaccaataagcatttcaatgcaaagctcggcattagtaatgttttctttg

SEQ ID NO: 27623 - DNA, 470 bp, Glycine max
gtttctgtcactaaaactactacattatctgcagctaaaacaacaattacatctggagcctctacacctttgtcaagatctactgcaagatcttctacaccgacaaccaagcctaccttacctgcatccagacctacatcaagggcatcaaccccagctcgccgaccgtcaacaccacctaatgtacccactgtatctgctccttcagttaagacttcttcagtctccaagtcagctcctgtgatatcaaggcagccagtaccatcccgtggcacttcaccaactgtgaaatcaagaccatggaagccatcggagatgcctggattttcacttgatgctccacccaatttgaggacaacgcttccagaaaggtcactgtcaacaactagggggaggcctggagcacctaatctacggtcctcatctgttgagcctgcttctaatggtagaccaaggcggcaatcatgctc

SEQ ID NO: 27624 - DNA, 534 bp, Glycine max
  unsure (1)..(534): unsure at all n locations
acgagaaaaagttaaaaccttcttcagtactgcagttcagaactgggatgctgacttttatgtaaaagttgatgatggcattgatattgatctcgagggtttaattgaacttcttgaccgtcgtcgtggtcaggatggggcatatgttggatgcatgaagtcaggagaagtgatatcagaagagggaaagccatggtatgaacctgattggtggaaatttggggatgaaaaatcgtatttccgacatgcggctggttcacttgttataatttcaaagaatttggcacaatacattaatataaacagtgtatctttgaagacatatgcctatgatgatacatcattgggatcatggatgatgggcgtccaagcaacttacatagatgacagtcggctttgctgcagtagtatcagacaagacaaggtatgctccttggcttgattggaggatcacaagcacattcttccctactcttatgggaactcacacaatttgtctgaanatcagtatcagttgaacattatgttcactct

SEQ ID NO: 27625 - DNA, 279 bp, Glycine max
ttcggctcgatgtccatatcgcggttgatagcatagcatcggtcactaatggaagccttatctgttgtacctgtgcgcgcccctattataaatggagctttctgcattttctagctatctaagcagtttgctgatcgcttccttgtatcccattttcttcgaatcaactttggtgccgatgctctcttcctcttcgtcgccgcgattatggtctctgttggagtcccaagtcaaaaccgtgttttcggatcagaatgtgctcggagaaagcttcgtcgt

SEQ ID NO: 27626 - DNA, 462 bp, Glycine max
caaatcccaaccactatctctttctctagtcttactttcccgtgtcttccactcccaccaaggggagtagaggtcttggtgaagcaagccaatggagtgaagggtctcgctgatttgaacctcgcaagtgttcctcaccaatacattcaacccctccaagccagattagaccacaccaaaattgtcactcagaaatcaatacccatcattgatttcacaaaatgggaagacccagatgtccaagattccatctttgatgctgcaaccaagtggggtttcttccaaattgtgaaccatgggataccctctgaggttcttgacgatctcaaggatgctgtgcacaggttctttgaattgccagctgaggaaaagcagtgtcttaaagacaactcaccccctgaagttgtcaggttggcctctagttttagcccctatgctgagtcggtgttggagtggaaagat

SEQ ID NO: 27627 - DNA, 230 bp, Glycine max
gtgaccgctgtggtcgttatggctgataagccaagagctgacagaccctgaaacagtgcttgtttccaaaagtgttgatcgatgaaggctttgagtttgagtgccataaactcctcaaatccatgtcttccccaaacccatttcctcaaagtccctatctttcaccccttcttcagattcaagccattctcatactcacacagcgcccttcatggccatggtgcaaagag

SEQ ID NO: 27628 - DNA, 291 bp, Glycine max
caactttgaactggcatggcaactataggaattggagtaggagtgacaaagcttcggcaaccccacagaccaaagtctaagtccttgtttcttggacacaggcttagaattagtcccttttggggggagcctcaatgcagtgaaagacgactattcggtgtctcacacccaccaagagtggttcgagtttttgcactagggggtggtgaatgagcttgacacagttcataatctctttgtgggtgttgaggtggacttcactgcagtgtgatgcagtgtggtgctctgatc

SEQ ID NO: 27629 - DNA, 402 bp, Glycine max
ttgttttaaaaatctgaacatcgtttgtgatccacgaaaaccacatcagactcaagtgaaaccagaattgttgtggtcgccaaccattcacaaacacttataatttatctaaattaatactcctaaatttcaaagctcgtccaaatcctctctacggcgatttcattttcagcatagttttctaccttatcacagcttcctacgtgtacgtgtgcctttatccacctttattttctgaggcagcgaagtacagaacactctaaagatcgattgttttcttttgctttctttcatcattactcaaattccatctgggtgtgtctataaccggcacaaacagacacaaatgagctttcccaagttgggtttcattgtttcatgagcacttttattatgttggag

SEQ ID NO: 27630 - DNA, 498 bp, Glycine max
gggggttcagtgtggggcaacttgcaagaccaaacttgtgtatgtcccgcgctgtttggtttgtgcccgcaacacacacacgccgtggtgtaaacgaggttttaacgctatcatatcatctgtcctctttcttctctctggatttttctccatcatttcagggctttctttcttctcttttgcctcccatattccattctcctcaaaatatctctacattttcctctctaccccaacaaaattccaaaaatttcccctcctatctccttttcacgtcacttaccacaactgggatgctccactttcttaaggattatttgttaactgagtcctaagtgtaattgagatggacggtgatatatttggagaattaggcaattcaactcaagtagatagcaggcttctacaggtatttcaaaagagcttattgcaagctcaagatattttgaatcagaatcggttgctgatcaatgagataaaccaaaaccatgagtccag

SEQ ID NO: 27631 - DNA, 292 bp, Glycine max
cgtcgtttcatttaacaacaatcaatcttttccctctttctcttaattcccaatattcttcacattcacttctcttctgccatgtgaacaaacatcaaacatagcaagcacaaaacaaaatcgcagttccatccatagcactgcctcaattcttcccccaaaaaaatgagccagtgtgttcccagttgggatgtcgaagacaacccaccaccctcaagagtctcacttcgctccaactctaattcaactgcccctgatgttcccatgttggactacgaggttgctgagctgc

SEQ ID NO: 27632 - DNA, 616 bp, Glycine max
tcggctcgaggttcaaccaaggggagagattaagaatcttcctcagggtgctactgtcattgactatgcttatatgatacacactgaaataggcaacaagatggtagctgcaaaggtcaatggcaatcttgtttctcctgctcatgtacttgcaaatgcagaagttgtagagataatcacatataatgcactttccagcaaatcagcctttcagaggcataagcagtggttgcaacatgctaaaacacgtagtgcaagacacaaaataatgaagtttctgagggagcgagctgcacgctctgctgctgatatcactacggaagcagtcaatgactttgtcactgattctgacggggatagtgaatctgaagaactgtcaaaaggttccagtggctctaaatatacgtggggtaaaatgtttgtgaatggagccgaaatatcaacttctggaagaagtgagaccgtcctccaaagtaacaatggaagtgcttggatccccaaggtcaatggaaaacataataagcatgtgcagcatgaaagtttcaacggcaaaggggagatgctactgcatggaaaccttgtcgcaaagatgattcaagttaacattccaagatat

SEQ ID NO: 27633 - DNA, 614 bp, Glycine max
agtgaatcccgatcaaccactgcagaaatttttgacttttgtgagcacatacgccgggcggaatctgatatggtgcttccaaggaccccagttgtctgcaaaccctttgatgatgcatttggaaatgctttcaagttagcagatattgaccctcaaagagcattgttttttgatgacagcatccgcaatttattgacagccaaacgcttgggcctccacacagttgcgattggtacatctgttcgtaccactggagtggatcatgcattagagagtattcataatatcaaggaggcatttcctgagctctgggatgctgcagtgcagcatgcaatttgtgcaatacaatgttggaattgaaacatcggtaaaagcttagttttagaagtttaccccagggaattggtgctgccttgtactgttatttaaatttattctatttactgtttgttataaatagccctagttggacatgcgtttatcatatgtttctggtaactgtctcaagcttggtggataagttcaatttcatcatgttggatctgttcctgttatttttatccacaaaatgtgactcatgcgacatgatatataaagtatatgaatctttattc

SEQ ID NO: 27634 - DNA, 267 bp, Glycine max
tttcttgagttttgatgggaatagcccaccaatttggtttgctcataaatgtaacaaagataaagagtttgtatacataaattccacgacaacattgatatttcttggttaccacttctcagatgaatgaaatggagacatggttttcataatttgattaactgaattaattacaatattattaacaaaaaaaaaaaaaaagggcgcccgccgattactggcctcgccgcccggggattaattccgggccgggaacttgcaggggta

SEQ ID NO: 27635 - DNA, 319 bp, Glycine max
agcacacaagttgaacatcctcaaatttgctggcactgccacacacaagagatattgatagttggtatgggaaaacatgttttaaggattgataccacaaaagttggaaatggtgaagcctttgtggtagatgatcctctgagatgtcctgtggataagctcattgatggggttcagctggtaggcacacatgacggggaggtgactgatttgtcgatgtgccaatggatgaccaatcaattggtatctgcgtcacaggatggcacgataaagatctgggaagatcgcaaggcacatccacttgcaattttgagaccac

SEQ ID NO: 27636 - DNA, 263 bp, Glycine max
tgaagataccgttgatagtatggcaaagtgtgagaagtggattcgggatgatgaagatcatttggagggatctaaggtcacctggtggttgagtagactgatagggcacacgaagaaagtaaccattgactggccattcccgttttctgaggggaagctgtttgtgccttctattagtgctgggttggaggggtatcatgtttctgtggatgggcaggcatgtgcacctcttttcctatcgcgctggttttaccctgaggatg

SEQ ID NO: 27637 - DNA, 264 bp, Glycine max
attttagttcaagtgagatagtagaaacagagaaaaatggaaatttgaagcgacatgaatcatccaccatagacttgagaagagaatatggaaaagccaacaaagaaagggaagcctttgcaaaaagtgaaaaccataggaaacgaagagatgcatctagttgttccatcttattactctctctcatcaggagattttgggagtgagctggaagttcaggatgagattggtttggaagagtcgtcacggaatatgagaaggatg

SEQ ID NO: 27638 - DNA, 263 bp, Glycine max
gtagcaagcaatttgtgaaggcgttgaccagaaaagtgtgaactacaaagtgtaggaatggggcatatacctgcagatacgtgcggtgattctggattcttgaagccattccttgtattttctggtgatagcttagtcttcttgtgctatatataacaacacaactcaccctctcttcattccctacacaacactctctctcctccttccacctagcagtggtgacaaccaaaccaagtgtcccctcctttccttgttaacag

SEQ ID NO: 27639 - DNA, 498 bp, Glycine max
ccttcgcgtccgctctctctctctctctctctctctctctctctgttctttattctgctcatcatatgatttcgttttgtcaaatctgagcatcgaattcaaacaaacacggttactcctcaattcccattcaatcattcattcatgttttctttttgctctgctaagtgccatcactcgtttttgatttcatttccaacaacgccaatttcatattgccttgtcttgtgatcattctctagtatttagcatacctgcagaaagttcttatgtctccccctttggtttgagctctcagattactcactactcactactcagtaatcaaaatctttgttgttagctttaggttttttctgatttggctctgtgacctatgaatcggtgtttgtttgtttgtttaaattgaaatgcaatgaggaagcgccccgaccaaatggaaaaaggggcagcagcaaagaaccagaattcccgcatttgctttttggcatccctttc

SEQ ID NO: 27640 - DNA, 248 bp, Glycine max
ggcccttgagacgatgactgctacccaccaattcgacaattcgcagttactgtcagtgagcatttgttcgggcgttcactattttatacatctgtatcagtttcctccatgaaaccaattgatcctcggtggtggtgatgaagcattcattgatcttgtgggggtttcattatccaatgcattacttggcatggatgctaatgaccctccaaaaaccttggctaccatgcaattaattggtcccatat

SEQ ID NO: 27641 - DNA, 259 bp, Glycine max
gttggacctcagtctgggttcgaatcggcactgagtgggtcactgctgggctgtatatctggagtctattggctcctttgctattccctgatcgtgaatttgtttgactctctcatcgctagattactatactctatgacattctcgttgttggtgttttggtattgtaagttatgaccttcaatgtctacatcttggaatcttgtgtgttgcttgcaatacatgatatatgtatagattcaccacttcatgtgaaaaa

SEQ ID NO: 27642 - DNA, 327 bp, Glycine max
tgttttcagctcctttaaagcgcacaagtagtttgtgttttgatgaaaagctctttgtacagtcactttacaagcttttggtttctatcacagaaactggttccatcattttatacatcagggatgttgagaagctcgttctccaatcaccaaggttatataatttactacaaaaaatgataaagaaactatcaggctcagtgttgatccttggttcccagatattagattcagaagatgattgcaaagaagttgatgaaaggctctctgcgctattcccctacaacattgagatcaaagctcccaaagatgaaactcatcttggct

SEQ ID NO: 27643 - DNA, 335 bp, Glycine max
ctcttgtatatacaagtggaactactggaaatccgaaaggtgttatgctaacccatcagaatctgttgcatcggctaaaacacttaggggatattgtacctgctgaagtgggggatagatttctaagcatgctgccttcctggcatgcatatgaaagagcttgtgagtatttcattttctcgtgcggtgttgaacaagtatacacaactgtgagaaacttgaaggaggatttgggccatttatcaaccacactacttgatttctgttcctttagtttatgaaactttatatagatatctacaagctcccttgttagaaagcttgttgcactcaca

SEQ ID NO: 27644 - DNA, 725 bp, Glycine max
catcaacaagaggattagtccaaccatcacaaaggcctcattgagtgtggtttggtacttggtttcatcctcttccaattcaagtgataagatgaggttgaaatttgttgaattgggtttggtttcttctttgcttgacattctcattgactcagacaagagcatgtgtgagaaggctgtgaccattttggactctctatgcagctctgaagaaggaaggaacaaggcttgtgggaatgatctaacaattcctcttttggtgaagaaaattctgagagtttcacctttgacaacagactattctgtttctgcgatttggaaactgtgcaagtttggagaaaaagatgaagggagaacccttgttgaggcccttcaagttggtgcctttcagaagctcttgttggtgttgcaagttggatgtggtgatgagactaaggagaaagcaactgaacttctcaaattgctcaatccttacagggctgaattggaatgcatagactcagattacaagaatgttaagagatcattttaactttttggctgcttaattattagtatgtttctattagcagtcatgttgtgctgtaaattttttttggcccaacgaatggatctctgcaatctttgtcatgggattcaacgaatggagcatatagaattgtattcttttttgtatattacagtaagagtacgaatgacatattgatatcttcgtttatcacatt

SEQ ID NO: 27645 - DNA, 894 bp, Glycine max
gggaaaagtgggtgctcttattgcttccattccacagggcttggctgcttctgtactgtgtttcatttgggctcttatagcagctttgggcctttcaaacttacagtatggtcaatgtaccagcttcaggaacatgacaatagttggtgtttcgttgttccttggtctatcaatccctgcctattttcaacaatacaagcctcaaaccagtctgatactgcctgcttacctggtaccttatggggctgcatctagtggaccattccattctggcaataaacaacttgattttgcaatcaatgctcttatgtccttaaacatggtgattacacttttggtggcattcatactggacaacactgtcccgggaagtaaacaagaacaggggtgtatatatggtcacgagctgaagatattgcaactgatccttctctgcaatccgcatattctttgccaaagaaaattgctaggtgtttccgttgggcgaaatgtttgggagtctgaatattaggctatgtctgatttcttctattcatggactcatgataacattcacttctgatccctagagcttagaagatattgaagctcatgaagaattaaaaccaatatacttggatttagtccctgcaaggccgaataggaaatagtttagccctgattatgcttgtgaattctatagctgtttcacataggtcaatgtgatctgaaaaccaaacaatggagaaattattggacttggacatttatatattttataatcaatcaatggttcaatttttgtagttccagtttgaaatttggggtttaaatgaatccccggcaatttaaaataatgcagcaaatttatatttgtagcctttagggtcaaccttcccctgatatgctaatagt

SEQ ID NO: 27646 - DNA, 166 bp, Glycine max
ctttccatgcggtaccgtgttttctttgcatcaacggctactatcgttgaacttgtcataattagtctctatttctaattggtatcgaatacacacacacaccttaaacgtaagtggtcactatttgttccacactattatgcctacactctcagaagcctaccga

SEQ ID NO: 27647 - DNA, 255 bp, Glycine max
ccattgagaagtttaaggtgacgcatttgtgggttgtgcctccgattattcttgctctcgcgaaacacggtttggttgataagtatgatctttcgtctctcaagcatattggttctggcgctgctcctcttgggacagagttgttggaggagtgtgctaaacgtcttcctcatgccattgtttctcagggatatggtatgactgaaacttgtggaattgtttctgtggagaatgcaaggatgggaattcggaata

SEQ ID NO: 27648 - DNA, 263 bp, Glycine max
gtgatggggttgggctttgcgatcgccgcggaggaagggtgctctgaattacaatgggagtggtggtcgggagagggaggatgctgcggaggatggttttgtgtttgaggaggaaggggaggtgacagggtcaagtttgaagaagaagaggaaggtggcgaaggggatggagaagaaggcgtggcggattcttgctaaccagctggggcagttgagagagatgcccacgcggttggagcagcgtgaggtggagagggagcgcg

SEQ ID NO: 27649 - DNA, 354 bp, Glycine max
cacaatctaaagaaatggagcatttgcaatgacaagatattcaatgactgggccgattcaaagccatctgttatcccaatttacaagaagcttatttcagcaggacttagaatttgggtttatagtggagatacagatggtagagtaccagtgctttccacaaggtacagcttaagctctcttgcgttgcctatcactaaatcatggaggccatggtatcatgacaatgaggttagtgggtggtttgaagaatataaagggcttacatttgcaacgtttcgaggagctgggcatgcagttccctgttttaaaccaagcaactcacttgcgttcttctcctccttctcaatggag

SEQ ID NO: 27650 - DNA, 566 bp, Glycine max
gtaactcaatgaggttggatcggtcacaaccatctgtttcacctgttttctgataagatgcattatgggttttctgtctgcatttgattcagatgcatctcttaatgttttggatcatcctattttggacttgatttattacatgctggttgaggtcctaccttcagctttagtcctctacatcctgcgcaaattgcccccaaagagaatatcagcccaatatcatcccatccgttaactgctgttcatattggatcctaatttattaatttatctgcccattgtttattatttcaatggttcttggttagatggatacttttaagctcatcaggaaaaacagataaagaaaaaggatgcagataaagactcatggcagcagttcttatgtgagtgatactcagcagttgctacctaggaaggaaattttggattcaggttttgtacggtatacatgcaatgacaagcctcaagaacttgagttattctctgcagtttggatgatgtagtgtttcgggcacaagcttgtcaatgacgcatctacttcaacattttattttatacaa

SEQ ID NO: 27651 - DNA, 537 bp, Glycine max
cattgggttcattcaggtgtttgcgctgttcttgaggcccaacaaggaccacagatacagagtgtactggaatgtgtaccaccacttggtcggatacgccaccataatcatcagtgtcgtcaacgttttcaaagggttcgacaccatagaaaaatacgtaggggatcgctacaatagctggaagcatgcgtacattggtattattggagcattggctggcattgctgtctttttggaagctttcacatggatcatagtcttcaagaggaggaagtcagagaacaagattccacacggagcaaatggtgctaatgggtatggttctaggccacaacaggtgtaggatacgaatatatgacgtgtagccagatagatatattggtttcttttgtaattttatgcatttttactcctatacgtgtgcattttattgttgctctcctttgtataatgttgagggtatttaatttaaggatactccagctgctcagagtctcagttttgaggcaattctttcttagggaagtgactcagagt

SEQ ID NO: 27652 - DNA, 471 bp, Glycine max
tgcatctctatcttagttgcaacttgctagtcccactaagtttactactattacctgccattcaaatcaaattcattagccaccttgcagatcagcacttcatggctactacagaccctgagaacaaatcaccaactctgccgctgcctccagccgaagtggattactctaaagttgatgtgatcctaagatttctgttgctggcagcatcggtggtggcgcttgcagtgattgtctccagtgatcaaacagagcaagtgctcttccaagatgtgcttctaccgcagccagccaagttcaaatactcaccagcttttgtatattttgtggctagcttcagtgtttctggcctttatgctcttgtttctgctcttgcatctatctctgtcatccagaagccaggattcaaactgaagttcctcctccactttatcttctgggatgcactgatattggggataacagcctcag

SEQ ID NO: 27653 - DNA, 340 bp, Glycine max
tagagggggggttcaacatatcttacgtaaagccaaaaagttgatataaacaaattaaagatgatgaactacttttgcggctgccacggccttgtgatatcttggtgctaattgcatctccggcagaaggagaggacaaccaccctttgttggagttattatcaagtagagatgaagtggtgcaaattgctggctatggagaggagaagctttccacagtcctcattacaggctcagttacttgtgaggcaccacaccgacctcaacctcatgcatggccaatacaaggagcttctgttggtgtgaactgcaagagccatggcaggaataataagtggaa

SEQ ID NO: 27654 - DNA, 773 bp, Glycine max
gattgatccgcgtcaccgctacgggcacaacttgcattattactatgaagaatggtgcaaaacggattctggccagccattcttgtattggttggatttgggaaacggaaaaaatattgatcttgaacaatgccccagatcgaagctccgaaagcaatgcataaagtatctaggacctcaagagagagagcactatgaatacattgtctgtgaggggaatattatccacaagcaatctggagattttcttcacacaagagaagattctaaggatgccaagtggatatttgttatgagcacctctaagaaactttatgctggccggaaaaagaagggattattccatcattcatcttttttggctggtggagctaccgtggctgctggaaggctggaggctgagcatggcattcttaagtccatctctgcatatagtggacactaccggccaacgaatgacgcgctcaactccttcatatcatatctcaaggaaaatggtgtcgacattgatgaagttgagatacgcaatccaaaagatgataccgatatttacgaggacgggaagcttagtgaaatagccacagcacctgaagattctagcaatggtaatatacctgagcttggagtttctgaggaagctgacaacacgacatcctcaaatacggaagagcctcaacttggatctgttggaagttacaaaaggactctctctggtggtcttcagagtccaagagctgatgtgcccaagaaagcaatattgcaaagaatcaatt

SEQ ID NO: 27655 - DNA, 415 bp, Glycine max
cgaagagagagcaaaatcattcgcttccttcttgtatgataatgcaaaatctctggctgctgccaatggctattcacttttccaaggacttgctgggacagcatgcctctggtttgatctgcttgcacccgacaactctaggttcccaggttatgaattatagatggttaaagtagagatggtacttattctacaagcagaaggaacgtggcatggatggaaaatgttaggtagaacaccaatcataagtgatatgatctgatgaaaagaagaaaaaaaaagaataggtgtttaaggattatatgttatatagatcctatatatcatcactagacttggctatagcaaacaagccacgaggttctgccgctgttaatagtttatataataatgtgtttgaccctttgtatacctt

SEQ ID NO: 27656 - DNA, 250 bp, Glycine max
aacctatccagttttacagtggagaagagacgtgcatgaatttgattgtatttgttattaaattattgaactaaatttatgaagagagagaggtaggtcggagattgcgaattgcgatttgcgatgcgaaaaggaaaggataaaaacggtttcctttcttgaattgctgcttgcttcttcttcttcttgttcacgactgacagataaggtgagttgaattactgtgaaggagtgattgagtgagtggtca

SEQ ID NO: 27657 - DNA, 460 bp, Glycine max
ctcacgcgtccgcccacgcgtccggaaattctttattttggaatagaattcaagaaacaaagactggcagcaagccagagactggccctggaacgggaatcttcaggactggatgctttggcaaatgcagcaatactgggagatgatgcaagtgactctggcagaacaccagttgttaccaccacaaaacatcctcggcatagacctgggtgctcttgcattgtctgtatccagccaccaagtgggaagggcaaacacaaacctacatgcacctgcaatgtgtgcatgacagttaaacgtcggtttaaaaccctgatgatgcgaaagaagaagcggcaatccgaacgtgaagcagagattgctcagagaaatcagttatcatggcggacgaaagatgaatcagaagtagatagcacctctcgccatttaactccagttgacggtttggagaatgaagtaa

SEQ ID NO: 27658 - DNA, 484 bp, Glycine max
tgatagatgttgggtaacaagagtactggaagcttttgagttctttccagcacctgggataaacatccttttagataaagctctcataacaatttcagatagcaatctgatattaatgcatgacttgatacaagaaatgggtcgagaaattgttcatcaagaatctaaagaccctggaagacgaacccgattatggagacatgaggaagtgcacgatgtattgaaatataacaagggaactgatgttgttgaaggcataagtttagatttgtctagattaaatgaggatctaaatttgagctccaattcccttgcaaagatgactaacttgagatttcttcgaattgatggagaaagctggctgagtgacagaatttttaacgggtaccttcctaatggtcttgaatcattgtacctttctaatgatgttgagccattgtactttcctggtcttgagtcactagtactgtactttcctaatggt

SEQ ID NO: 27659 - DNA, 436 bp, Glycine max
atttctttctttctttctatcaaacacagtgcggtgtgtttctagctcctaattggataaaatgggggacaagcaccagcagcaccaccaagacgacagcaccgatttcacctccgaggacgaaggcaccgaagattaccgccgcggcggctaccacgccgtccgaatcggcgacgccttcagcgccggtcgctacgtcgttcagagtaaactcggctggggccatttctccactgtctggctcgcttgggacaccaaacattctagatacgtggctttgaaagttcagaagagtgctcagcactacactgaggcagctatggatgagataacaattttgcagcagattgcggagggagatcctgatgataagaagtgtgtggcgacgcttttggaccatttcaagcattctggtaccaatgcacagtatgattgc

SEQ ID NO: 27660 - DNA, 270 bp, Glycine max
aggaatcaacagcttcttcaattggtacttctttacctacacatttactcaaatggtgtctttgtcactaattgtctacatacagtcatacgttagctgggcaatagggttgggaattcctgcggctttgatgctagtctcttgcagcactctactacacgggaagcaattattacgtgaaagttaaagcaactggtccagctccactaacaagtttagctcaagctgtagtcgcggctatagagaaaagaagcactgaatctcatcaga

SEQ ID NO: 27661 - DNA, 674 bp, Glycine max
ttttacataaagaaacgccctccgcttgcaacaactgaaaaggttcagcaatatgtaaaggcaaatggtaaggaagctattgctgctggattttatcatgaaggttacgaagagccattgttaatgctcatgaaaagaaggggagtgcattcaggtttggtagtgaagggagaggaagggggcctctcattgactacaagattgcgatcagctaacacaaccaggggacttcctgtgaactactgttcaggtttccgtgcacttgacatttcatccacatctgaagtgggtggagtggcacgtcatggttttagtcttgaagtcaatgccaaggattacggtttccaacccacagacacaccaagaactgatagatctgtctcgaagaacattgaattgggtttagctgctctctatggagaaaaaggaccagcatatgaccgaattgtcttgaatgccggagttgtggatcacttgcttggagttggtggtgcagaagatatatctgcagccctggatagagccagagaggccattgacagtggtaatgctctgaaacgactcctaaactacattaaggtctcccacaaaataggttgaattatttgagcattgcaaaatacctttcttatacaatgtgttggacataaagggaagaaaaaacctaagatggg

SEQ ID NO: 27662 - DNA, 525 bp, Glycine max
ctccaacacatgtatcattcgaattcttaccgtcattgccatctgcatacctcgagccatgtccttccacttggattttccagcagtttttaactttggtgattcaaattctgatactggtgctcttattgccgctgcttttgagagcctttacccaccaaatggacaaacttacttccaaaaaccatcagggagatactctgatggccgtctcaccatcgatttccttatggatgctatggacttgccattcctaaatgcctatcttgattcgttaggtttgccaaattttaggaagggatgcaactttgccgcagcagctgcaactatacttccagccactgcatcatccctctgccccttctcctttggggttcaggtgtctcagttcctccgattcaaagctcgggcccttgaattgatcgctaaaggcaggaaatttgataagtacgtccctgatgaaaatgttcttgagaagggattgtacatgtttgatattggccagaatgatcttgctggagcatt

SEQ ID NO: 27663 - DNA, 393 bp, Glycine max
tgcaatgactgttttcatgctcctatgtgtaggatggccaccgatcaaaagaagagcgggtttgagagttaaacgagcagggataggttcatacagaggaagctaggcgtgtgtttgaagttgctattgggtttttcttttgtgtttcttctttgttttgcgtagtcctggagagtagaacagatagatggatgccgcttctataatgcatttgttgaagggcttttgtgatcgcacacaattgaaatatgctggttttaggaagcttgaccaacatgttcctatgacgttgacctgggaaaatggttaccagaaaagagatgaggttaaggaaagtatgtggggtgacctcagtttcaaatccccagatgagttatattcttcaagcggtga

SEQ ID NO: 27664 - DNA, 262 bp, Glycine max
cttctcatcaagaacctgctgctgtctctgcccctcctaaacatcaagagtcctttcgccgtgaacgctgccctgacttgaaccttgagctaaccattagtcctccccatcatcctcaacctgatcgtccgcacttgaagacccttgtgacagactcgaacctttgctttccctgcagtctgggttggcgtaatagcaaagattgtagctgtgccctccacactagtactgccagcgctactgctactggctatgatttctt

SEQ ID NO: 27665 - DNA, 717 bp, Glycine max
  unsure (1)..(717): unsure at all n locations
aactggtggacaggatttttaactgtgaagacgtgctcttaaattatttgtatgcaaatgcaagttcatcatcaaggactgttgattatgtgaaaccagcttgggcaattgacacttcaaagttttctggtgcagcgattagccgaaacacgaaagtacattatcagttgagaagccagtgcctgatgaaattttcagagatgtatggaagtttagctggtcgtaaatggggatttgacagtagaaacgatggttgggatgtatagtaggggagtttttgttatagggtaggtcgttgccaacttttgtatttttcatctttgcgggtataaagtttagtcttctttgtccatacttgtaccccactgtgaatcttatttttagggggtttccaatagaatgaatgtctgcaagcaacatgtaaattggttccataatggccttttcatgttatatttttttaatttatggctccagcctccgggggtgtggtgtgattgaaggaaagaatgattcaagaagggtgagtgagactaatggaatatagtactacagatgttccctaaagacatttctttcttagaaacaaaatttctgatcctgaggttggttataatgggtngnannnnngnncccnnncgcccccccctctccctttttgtaagttttatgcagttgggtttgnngtgtttgngggggnggnggggggggcngagg

SEQ ID NO: 27666 - DNA, 322 bp, Glycine max
tcgcgagagaagagaggaacgaagactgaaaaatggcgtcatggaattcatttccgcttcaagttacctacgaggctctgggttggttcgccttcgtttcctggtccatcagtttctatcctcaagtcatcttgaattttcgcaggaagagtgtggttggactcaacttcgatttcgtggtgctaaatctgaccaagcacagttcctatctcatatacaacgcttctctctacttcagctctgctattcagaagcagtactttgagaaatacggttatggagagatgatacctgttgctgcaaatgatgttgctttctcgat

SEQ ID NO: 27667 - DNA, 426 bp, Glycine max
cgtattttcatgtccttcgcctgcagatagcgcagacccaagttacttctagaacctccgtgttccgcgaattacacccccacctcaaacaaaccacttgcacatattctgagagaaagagtattgaatcctcatcctcttccttccattcctcaagaaccctaatcccaatcagccatgcagcaaggagactacacctccgctccatctccatattatcaattccctcatctccaaaaccccaatcccaatcccaatcccaatcccgatccacacccaaacaacccttacgcttctgcacctcccttcacccccaattacgctccctccgattacaccccttacccttcctaccctcaaaatcccgatccttctccacccactgctccttcctttcctccctcttcttccaaccctaatttaccc

SEQ ID NO: 27668 - DNA, 459 bp, Glycine max
ggtgtattgcacagtttcttaacaaaaagagatacagaacttgctgcaccgttgattgcggttcttgaacaatgcggtcaggaagtgcctcagacccttcaggatctgaatcatacatcgaacatgttggaagattgaatgttgaaggtgcttagtcatcaatttttttatgttcattccgtctctgcggctcatgatatcaaaagatcaattccttttactttggaatttgggctgggagctgagtggtagggattgtaggtttcctatgcttggaatttggaaaccttcacgttaagaatcccattaagaaattttttgcaatattatctctgcttctgtttcaagactgtattttactgtaatcgaatgagcttctttgtcgcaacatcattttgttgctattgtagcagcatagaaacaaacatttaattctttagatactatcttttattaaaa

SEQ ID NO: 27669 - DNA, 269 bp, Glycine max
cagccagttactcctactgggcctccattacctattttactacctgcttcaactggtcagggtttacaaattagtgcacaactgactagacaagatggtcaaatattttatagtttgttgtttgagaacaactctcaggtttcacttgatggcttcatgattcaatttaacaagaacacatttggtcttgcagctgctggaccccttcaggttccacagttgcaacccggaatgtcagctaggacactcctccctatggttatgttcca

SEQ ID NO: 27670 - DNA, 296 bp, Glycine max
ctttaaagttttcttctgttgctgatcaaagctgatcgaaataacacttcctagctgaactatggaaccggagaagacaccaacaagtttggtttttggtgttaatggtgagaggtttgagctctcccacgttgacccatcaaccacttcgctccaattcttacgcactcgcactcgtttcaagagtgtcaagctcggttgtggtgaagggggttgtggcgcgtgtgtagttttaatctccaaatacgatcctgtgcttgaccaagttgaggattttacagcaagctcttgtctca

SEQ ID NO: 27671 - DNA, 297 bp, Glycine max
attaaagctccaggaaaatggtcaccatattaggaccctctttctctttctctctcttttttctcatacacagttcgtgacactcctttttcatgtttggggactctcttctgggctttcttcggtttaagccttagaagacggagattattaaaacatgggttgctttcgttgcacaggcaaatcaagcaaagaaaccaacaacaataacattaatcacgccgagaagcacaccaatcacaacgagaaacatactgctgctgataaggtcaaagttgatttgaatgtgaatggtaa

SEQ ID NO: 27672 - DNA, 357 bp, Glycine max
tcttagcggtgctgggcccatcagggagcggaaaatcgacgctccttcacgcgctcgcagggaggctccatggacccggcctcaccggaacaatcctcgcaaactccagcaaactcaccaaaccggttctccggcgaaccggtttcgtcacacaggacgatattctctaccctcacttgacggttcgcgagacgctcgtgttctgcgcgatgctgaggctcccgcgcgcgctcctgcgctcggagaaggtagcggcggcggaggcggcgatcgcggagctagggctggggaagtgcgagaaccgcataatcggaaacagcttcatccgcggcgtctccggcggggagaggaagcgcg

SEQ ID NO: 27673 - DNA, 260 bp, Glycine max
atagcaaacctaagcaccaaacctctttctttcaagatccttgaattcagtcccatggctccaagcataagcaaaactgtggaactaaattcatttggtcttgtcaacggtaatttgcctttgtccataaccctagaaggatcaaatttcctcgccaacggccacccttttctcacggaagttcccgaaaacataatagtcaccccttcacccatcgacgccaagagtagtaagaacaacgaggacgacgacgtcgtagg

SEQ ID NO: 27674 - DNA, 261 bp, Glycine max
atgaaggcgccatcatgagatcatacaatggattcagaaaataatctactggtgttgtgcagtttgacacaacccaaaatcgctttttggctgcaggtgaagatggtcaagttaacttttgggacatggacaatattaatcttctaataagctgtgatgccgatggaggattacagagccttccacgcttgagattcaattaggaaggtaatattcttgctgttactaccgtggacaatggtttcaagatacttgctaatg

SEQ ID NO: 27675 - DNA, 295 bp, Glycine max
ctacccttctgcagtagatcacaatgaatgaaacggccgtggaatattatgcagccaaaattgttgagtactatgacattgctgaaagccccaacacaatttattgatttgtgcacccctgtgattactaaagctttatattgagaaatgacaactatatgtgccacataacatgatccggtaactatatataccaaatttggtctctgttgcaagaagtcaagaactagagaaagcaacattgatatctatctgcttgggaccatattatgcaaaattttcgaacttgctcaaa

SEQ ID NO: 27676 - DNA, 363 bp, Glycine max
ggcggttccactagttggtgatgcagagaagttccttatgcgccaccaagatgccctgcgttctactctcaaacagcttttgttgcagagaaatgtcaagacagttaaacagttgattgctctgcatcaagttcctgatgtttctgtacctcgatatgttcgtgtgaatacacttaaactggacgtcgattctgccttgcttgaacttcagaaaaactactcggttcaaaaggatcatttactgcctgacttgctgatactcccaccaggaacagatttacatgatcatcctcttgtcaagaatggcagtatctttctgcaaggtaaggcaagttccatggcagcaccagcccttagccctga

SEQ ID NO: 27677 - DNA, 530 bp, Glycine max
acgagctcgtgccgaattcggcacgagttcaactgtcgttgttcctcaattcaatttattattattgttcctgatcgtgtcttattctgctttctctccaccttcgatttgaagctccgtctcaattggatacctgctactgtcttttcctttttccaaaagttatcccaggagattgcttctaaatatcagttgcaatgcgtgcaccagcattacttgcgcagtgcttacctggcctagtgcctcatgatcgtggaagtctcagcatatcgtccgttcctgagaaagattttcatctcccatcaccagcagtagagattctcccttccaagacagttcacactgaaaaagataatggggagaatatagatcattttaagggtttagttagtgttgccgatattgttggattcagtggttcagagacaatatccttaaaacctgatggttatctgaaatcctggactagttccattgatcttgttagtgttcttaagcatgagattcgtgatggacaactgaccttcaga

SEQ ID NO: 27678 - DNA, 284 bp, Glycine max
ctctttttcatttcccacttcctcaccaaatccaactactccctctttcttcttccacactgtcattcacctctctctctctctctctctctctcgctgttattcaatttattattatttctctttctgatcgtgtcttattctgccttctctccactttcgatttgaagctccgtgtcaattggatacctgccactgtcttttcctttttgcaaaaagttattccaggagattgcttctaaatatcagttgcaatgcgtgcaccggcattacttgcgcagtgc

SEQ ID NO: 27679 - DNA, 963 bp, Glycine max
aagggaacagaataattgcattcactaaataaaaaaaatggatacaaaagatctaggagaataacacaaggaatattaaacatccttaagagcactttgttgtcaacattccaagtgccctacctcttgatgctgcagctcctctcctttgtgcagggatcacagtgtatggtcctttgagatattttgggcttgacaaacctggcatgcatctgggtgtggttggacttggtggactaggccatctggctgtcaaatttgcaaaagcccttggcttgaaggtcactgtcatcagtacctctcctaaaaagaaaaatgaagccatacaacatcttggagctgatttttttgtggtcagtagagaccaagatcaaatgcaggctgcaatgtgcaccttggatggtataattgatactgtttctgcagtccaccctctcatgcccttgattgatctattgaagtctcatgggaaactagtagctgttggggcaccggagaaacctctggaattgcttctcccacctttaattttggggagaaaaagtatagcgggtagttacattggaggaatcaaggagacacaagaaatgattaatttcgctgctgaacacaatgttagaccggaaattgaagtaattcctatggattatgtgaacacagcaatggagcgtctccagaaagccgacgttaaatatcgatttgtgattgacattggaaacacattgaagccacactattagttttgggccgagtcaaaaaacagagaatgaccattgaccaagggaagggaacactacaataatacaaagcactcttaaggatgtttaatattccttgtgttattctcctagatcttttgtatccatttttattttgaataaagggaacagaataattgcattcactaattttggtgtgccatatccatgttatatatattatgggaaacatgcatttgagaaa

SEQ ID NO: 27680 - DNA, 516 bp, Glycine max
tggagaagtgacagaggtgggaagcaaagtagacaagttcaaggttggagacaaagtagctgcgggatgcttggttgggtcctgccactcatgccaaaactgtgtcaacaatcttgagaattattgccaacaagtgattcccacatatggtgcaaagtatgtggatggcaccatcacatatgggggattctcagacttcatggtagcagatgagcactttgttgtcaacattccaagtgccctacctcttgatgctgcagctcctctcctttgtgcagggatcacagtgtatggtcctttgagatattttgggcttgacaaacctggcatgcatctgggtgtggttggtcttggtggactaggccatctggctgtcaaatttgcaaaagcccttggcttgaaggtcactgtcatcagtacctctcctaaaaagaaaaatgaagccatacaacatcttggagctgatttttttgtggtcagtagagaccaagatcaaatgcaggctgcaatgtgcac

SEQ ID NO: 27681 - DNA, 379 bp, Glycine max
cgaaccaccaagaaatgttggaacttcatagccgagtcaatagacacgagccatgagtcaaaaacatgagccctgtgccgagatcatggaattgcactttgaaaacttggctgcactgaaaaagttacagtcatgcatgccatgaacatgaagaatggatattggagtgaaccgtgcaccattgcagctgccatcagctcagtcatgaaaatcgaatttgtaacatagaaagcatagttaagttatcatcctgtctatagtgatgaacatgtgaatttattaccattcttttgccccgggggagtggtcccaattttgtaattgttaatcttgattttttggggtatattatgagtgtcaaatgtgttgtttatctccc

SEQ ID NO: 27682 - DNA, 440 bp, Glycine max
ctgggcagttgtttctcaaggttattcatagcagtgtgtgggctggtcagaagcgacttgggcagttggcgaagtggaaaacagcagaagaagttgctgctcttgtaaggtctttgcctgttgaagaacaaccaaagcaaattatcgtcactcgtaaaggaatgttggatccattggaggttcacctgctggacttccccaacattgttattaaaggaagtgaactgcaacttcctttccaggcatgtttgaaaattgagaaatttggggatcttatattgaaggccacagaaccccaaatggttttgttcaatatctatgatgactggctgaagagtatttcttcatacactgcattctccaggctgattctgattctgcgtgcactccatgtgaataatgaaaaggcaaaaatgttgctgaagcctgataaaactatc

SEQ ID NO: 27683 - DNA, 872 bp, Glycine max
gaaagatcttcatatagaaaagatggagaaggagattagggagctaactaagcaacgtgaccttgctcaatcaagggttgaggatttgcttcgcatggtcggaaaggatcagatatctggaaaagaaggggaagatatctgggaagatgattgctcaatatcagagtcatccagcatttgtggtcctcatcgtcctaatacacatattagagagttcaacaatcctcattataatgatggagacagtgatcctgatgcttttgcttgtacagaagaccctgatgattattgcaaagaagttcgatgtgttgagaatggggagttagctctaccaatatctggagacgaaagtggaacaagccaagaaatatcttcacatttgaatgaagataccggagacagtcagatccaagaaaattcaacattgctggagcagagattgcatgttgtacagtcaaccattgattctcttgtatgtccttcccctgatgaacactctccacaggtcatgtcagaaaataataagaatcttagattaactagaagctggagttgtacggaacatcacatggctggttctcccaagtcaggcggaggagtacagaggactccagccaatggatatgaaaaaggattccctggaaggccagatggtttgcagaagtttcctccattaaattatgatggttccacaaaattgttaaggaatggttctcagtcttccatgggaagtctttctgtggatgatcttagagccagcagcatcagaacatctgctgatgaggatattactagcatccatacttttgttgctgggatgaaagaaatggtcaaacaagaatatgagaagcatcttgttgatggtcaagatc

SEQ ID NO: 27684 - DNA, 400 bp, Glycine max
atgtccagatagaaaagatggagaaggatattagggagctaactaagcaacgtgaccttgctcaatcaagggttgaggatttgcttcgcatggttggaaaggagcagatatctggaaaagaaggggaagatatctgggaagatgactgttcagtatcagagtcatcaagcatttgtggtcctcatcgtcctaatacacacattagagagttcaacaatcctcattataatgatgaagacagtgatcctgatgacgaccctgatgattattgcaaagaagttcgatgcgttgagaatggggagttagctttaccaatatctggagaggaaagtggaacaatgccaagaaatatcttcacatttgatgaagataccggagacagtcagatccaagaaaattc

SEQ ID NO: 27685 - DNA, 371 bp, Glycine max
gttagaagaactggctaaaagcagagagaatgaagaaagtatgataatagcaatattatacacatgctattcatataagcggagaaaagaattaacaaagatgctctcacatgcttcatggtagaagctttctttaattaagcaaactctcacacctaccctataaatggatgattgcatgaacagctctcttcattaacaacaattttttctcattctcttcaatggagggtcttcagaaattccttcatttcttctttgtagcttctcttctcatcagcactacagcaatttcagatcacactcccaagccttatgttgtttatatgggaattcatcaccaaacaaaattggagtagaaagccaaatag

SEQ ID NO: 27686 - DNA, 654 bp, Glycine max
tttgtttctactgctgatcctgagaaagaacctcctcttgtcactgcaaacaccatcttgtctattttagctgctgattacccagttgagaagctttcttgttatgtttctgatgatggaggtgcacttctaactcttgaggcaatggccgaagctgccagcttctgctaacatgtgggttcccttctgtcgtaaacatgatatagagcccaggaatcctgaatcatacttcaacttaaaaagagacccttacaaaaacaaagtgaagcctgattttgtcaaggatcgtagacgggtaaagcgtgagtatgatgaattcaaggttaggatcaatagtctgcctgaatctatccgccgccggtcagatgcctatcatgcaagagaggaaatcaaggccatgaaagttcagagacaaaacagggaagatgatcctttagaaactgtgaagattccaaaagcaacatggatggctgatggaactcattggccaggaacttggttgagtcctacatctgagcattccaagggtgaccatgctggtataattcaggtgatgttgaaacctcccagcgatgaacctcttttaggaagtgctgatgatacaaggctcattgcctgactgatgttgatatccgtcttccccttcttgtttat

SEQ ID NO: 27687 - DNA, 345 bp, Glycine max
catggttttctagaaagcccaagtcctgctggttttaagatatctgtcttcaattcaaatcctgatatagtcatggttggttttcgagttcatgtgggaaatacatcagcgagtcacataccgtctagcatttctattttccaaagggttgttaaattcgatgaaggaatgaggtcctggtatgatattccatttactgttgcagaatctcttcttgcagatgaagaatttacaatctcagttgggccaacctttaatggctcaacactccccagaatagactcgcttgaagtttatggccgagcaaagatgaatttggttggaaagagaaaatggatgcagttt

SEQ ID NO: 27688 - DNA, 914 bp, Glycine max
aaaaaactcaaaatccctcccattttttgttcccccaaaaaaacgcagtcacaccaacacctccaccacccatttgcaacgactcaccaaaatcgaattttgcaatcaacccatttcaattcacccttccaaatcgttcaacgcacccttcaatttcgcttccgagtgattcctccccccaaattcagaatttaggttcggtctctggtggcgcaaccatgccggagatcggccaggcggcggtggctgcggcggcggaggacaccgccctgttcggaaaatacgagctgggccgcgtcctcggctgcggtgccttcgccaaagtccactacgcgcgcaacgtgcaaacggggcagagcgtggccgatggcggtgcggtggaagaaggagtgtggggtggagttggaagggatgaatgggaggtttgggattggggtggaggtttaccggctcacggcggagctcgcggtggtggaggtaaggaagaggggcggcgacgccgtggccgcggcagtgaggggtgtgtgggaggagaggttgaagcctttgttgcttgggggtgcaaccacgtcgtatagtagtgaggaggaacaacaacaacaacatcaagaagaagaagaacaacaagaacttgagtcgcaggttgccggtgactgaagtcaaaggaaatttgaatggcttgggttaaatccaaaagaaagtcaaaatgtacaaaagttaaaagaaaaaatggaaattggtgggggcccggtgtttatgttgcataatagatggatggaagttggaaggtagtgattatgtactaccttcgggttttttgggttttgcacattattgaataaaaaaggggtgtattattttgtttttttttgagggattgtgagagaggaagttgctccgggaaattccctttt

SEQ ID NO: 27689 - DNA, 279 bp, Glycine max
aaaggataacctttctgctacattttgggagtcaagatgaaaaacattatgtatgagtactttgtaaaaggacaagttccttgtagttaccatctccaatgcagtaaatcattcaaccaaggtggacgtacaacattctttttcccttctcacataaatatgtgcatgggaaaatgcatttacagtgtttatttttccagaggtttattctgtcaggtttattcacaagaggtttttaggagaaaaacaaagagagagaaaaaaaggttacatatttat

SEQ ID NO: 27690 - DNA, 284 bp, Glycine max
ctctttattactaacatttcttccattcttagcttttgtttgtcccatcaaatttttgaagatggccaagagaagtgttgctgctaattcttcttttgagagtactagcttggcttctctggatcaaaagttggccatggccaagcgctgctctcatgagggtgcgatggcaggagccaaggcagctgttgctgctactattgccactgccattccaactctggctagtgtaaggatgctaccttgggcaagagcaaatctcaatcacactgctcaagctctca

SEQ ID NO: 27691 - DNA, 493 bp, Glycine max
tatcgagcgattcttttctcgtagattcctctcctatattgacctcccatctctcttaacgaacacacagcagagagcaaaatagtaaaaatgtcaaaggacaaagtttccggtgatccaagacgtgcagtgtgcacaggtatcaccatcttcctcctcttagccggcgtcactctcctcgtcctctggctggtctaccgtccccacaagccgcgcttcacggtcatcggcgccgccatctacggcctcaacaccagcacgccgccgctcatgtcaaccaccatgcagttctccgtcctcataaagaacccgaacaggcgtgtctccatttactacgacaggttctccgcctttgtctcgtacaggaaccaggccataacgccgcaggttctgctgccgcctctgcaccaggagaagcgaagctcggtgtcggtgtcgccggtgatgggaggcacggcgcttccggtgtcggtggaggtgtctgacgggcttg

SEQ ID NO: 27692 - DNA, 541 bp, Glycine max
cctcaacagtaaatttgccggtgtttgtatacttgtaaatattttacatcaactatactaggagctttgctttcctactttcttcaacctgtatatctttcttcaattactgttggtctgccccttgacattcttgagaattttcgtttggaggacagcttgaaaagagctttgtatgaacgtatgctgcccctatcgaatgaactgacatctccatttctagtgaaccagcctatatttcacgctgcaccagtacccccaaaggactttcagcaatctgagagtgctgctaacactttaacatgcggatattcaatatgttggaatgaatgtggcttgcatgacgtcatcatgggaactaccggaagaaagcaaggcacctctgcaaaaggggcactctacccatcaacacagtcatctttatgcaaaaagaggctgttggaggttttcttgtcactgggaccagaaaatttgattggttctctacccaatgggattacttatcgagaacttaaggatggagctgaagaatatcatttgg

SEQ ID NO: 27693 - DNA, 646 bp, Glycine max
aggtaagctaggacatcacttttttcataaaggcctgcttctccaggcatttgtacatccttcttacaataagcttggaggaggctgttatcagcgattggagtttcttggagatgctgtcgtggattatgggattacttcatatctattctgagcttatcccaaactaaagcctggtcaattgacagatttgagatcattgtctgttaacaacaaggcatttgcttgtctagcggtagatcgcagttttgataaatttcttttatgtgattcaagtggcctgtctgaggcaataaaaaagtatgttgactacattagaagacctgtatcagataacagcattaaagaagggccaaaatgtcccaaggcactgggtgacttagtggaatcttgtgttggtgccatccttcttgattcagggttcaatttgaacaaagtttggaagattatgacttcgtttttggactcaatcatgaaattctcatcaagcttgcagctcagtcctgttagggatttgcgagaactttgccaatctcataatatggagttggagtttctgccagtgccctcaaaattgactaaaaggttttcagttgaagctaaagtgagtgggaatggtgtatgtgaaaagcttcagcaactggtc

SEQ ID NO: 27694 - DNA, 259 bp, Glycine max
ggtgtggactcagttcgtgaccctctcgataacgcatggaaaacgcttcgtttccccatcatcaaacccagagagcttctccttttgttcctcaaagcgggtatcgccgtttcaatgctcttaatcataaccctctttatcactctctacaatcaacctttttatcctaacaacaaccacacaaccatgaaatacatgctccaacagaaaacccctgaggacgaagcctccaccaacatctcccacctcctgtttggca

SEQ ID NO: 27695 - DNA, 589 bp, Glycine max
agcagcagcagttgcaatccttgaggaatcttgcttcagtgaagttggaaccacaacaaatgcagacgatgagaactctgggacctgttaaaatggagcctcagcattctgatcaaccattatttttgcagcagcagcaacaacagcagcaacagcaacagtttctccacatgtcaagtcaatcgtctcaggctgctgctgcccagatcaatcttttgcgccatcaccggcttttacagttacaacaacaacaccagcagcaacagctcttgaaggcaatgcctcaacaggggtcccatctaccacaacaatttcaacagcagtatatgcctatgagatctcctgcgaagccagcatatgaaccagggatgtgtgctaggcggctgacacattacatgtatcagcaacaacatagacctgaagataataatattgagttctggagaaagtttgttgctgagtattttgctcctaatgccaagaagaaatggtgtgtttcaatgtatggaagtgcgagacaaacaactggagttttccctcaggatgtatggcactgtgaaatatgtaatcgcaagcctggccgtggatt

SEQ ID NO: 27696 - DNA, 626 bp, Glycine max
tggcctgaaaagaaagggagctccaaaccaggatgcaaaagataagccaagcgacttgaagagtagaggactgtgcttggttcctgtgtcttgtacccaacatgttggaaatgaaaatggagctgattactgggcaccagcatatggaagtggattttaacagcatggaagaaaacttatggatgatataacatcgtgagcagtcaatctgtgataatgaaaaggctgattgctcacgatgctatatgacattcatgaattgaagaaaaaaaaaacttatccattatgatgtactgtctctaatctaattaggttaacccaataagttattaataagtgttgtcaaaacattaattaagatgcaattttcgtttttctaaacatgcattttcagaggtagcaattattaattccctgcttttgctatgaaggatgattattgataattaacattctgtcaatgttaatttgtttaagattgcaatatctagtactttaattcataccctcccatcttcttattcttctttgcacttttttttttcccttccaagtctagtgtttgaaagagtacgaaatcatgagatataaatatggacgcagcctaatacctgtgtatttgtaat

SEQ ID NO: 27697 - DNA, 581 bp, Glycine max
  unsure (1)..(581): unsure at all n locations
ctcgcttctggctcccgctgtgtgctctgcttcacactactgtatctcatccactccctatcgctgcaatttgggataccaaagatacccgtagatcatcagagaaaaattcaattgaagaagaggttgaaacttaaactgctgaaacgcaaagattttctagcaaaaaatggggaagaagagaaagcacagtgagacaactcatgatgaggcacagccccaaaaggaagatgtcgctccagggagaccagctaggacccttttggggtggaaggataagaatgaagtcactgatgaagttgaggataattcacctatatttaggaacagagagaaggtattggtcacttgctctaggcgcattaattacaggtaccgacatttgatgttgaatgtggtgtcacttttgcctcattgcaagaaggaaaacaaggttgaattacaggaaagtaaagggngaaaatgaangagcttgttgagctaaaaaattgttgctcttgtttattttttgagtgcaggaagcaaaaagatgtttatctntggatagcaaaatgccctaatggctcatctgtaaaattttt

SEQ ID NO: 27698 - DNA, 519 bp, Glycine max
atttcaaacacttggatcaaaaccacactcccttctcctcctacaaccttaaagaaaaggtttccttgcaattccaactccaacgccatcacatgttctcttcaaacactccacttccccaaaaagtaccaaccaacctccacaaccacaaccacaacaacaacaaccactccagcaagagaaaccaaaccagtaatcgcttctccctccgaaacaaaacacccattacctcaaagttggaactttctccagaaagcagcggcttcagccttagacatggtcgaaactgccttagtctcccacgaacgcaaacacccactccccaaaaccgccgacccacgtgtccaaatcgctggcaacttcgcccccgtgccggagcacccggcgcagcactcccttccggtggccggaaaaatccccaaatgcattgagggcgtctacgtccgcaacggcgcgaacccgctctacgagcccgtcgctgggcaccacttcttcgacggagacggcatggtccacgcc

SEQ ID NO: 27699 - DNA, 420 bp, Glycine max
tccaaactcatatttggctgggggaagaccttttgtggggacggataacttgccaaggagagaggccgttcaagatagacattacccaatatattctgctcctgatgctttgtctgatcaccatcgaatgcggccatatcatggagacaagtttgaagcttcacgtgggccagtttcatctcgttactcttttgctggcccttcatttcaccgccaataacttattatgtgctttttttgaattccttgacttgtgttccttagtatctttcaaattctggtgactgaaaaaaaaactgtgagaaatcctacatacttgagcccttctggatttggaaaatcatttctgcctggtgagatttcaatatggtcaatatgatgattggtagctctggaactttagatgagaaggctagtttg

SEQ ID NO: 27700 - DNA, 372 bp, Glycine max
cagataatcaagcagaagcagatggatgccactagaattttggcacaaggagtatttgtgttccttgttattacgtgtgtgggagccgagagcgagcccagaaccattttggttggagactctcaaggttggcaagccggcactaactacacccaatgggccatccaaaatagccccttccacatcaatgacacacttctgttcaagtatccagggaattccacgacgctggctcagagtgtgtacttactaccaaaccagtggagctacataacgtgcgaattcagaggggcaaagctgttggggaacgcaactgagggtgatggtgagggctttaaggttgaactgaatcagttgacaccttattacttt

SEQ ID NO: 27701 - DNA, 286 bp, Glycine max
cttggtaacagtttgcagtacgttgagcataccagagtctgagatggaaaacggggatcagttccaggaaatttcaaaggggaaatatgattgtcttttatttgatcttgatgacaccctttatcctttgagttctggattggctgagcaagtgaaaaaaaatattcaggagtacatgcttcaaaagctttggatatcagaggctaaagttcctgagttgtgcttttcattatacaagacttacgggacaaccatggccggtctcaaggctattggctatgacttt

SEQ ID NO: 27702 - DNA, 468 bp, Glycine max
aagaaaatcccccttacattatcattgcgcctcttcgtaagcccaccgcggcttatgttgttgttggccatggacgaatcaccggcgaacagagagagcaaaagcgaggaagaagaagaagatgatggctacatgggtgacctttctcagtttcttccttccgatgctctcgaacctgctaagttgtcttcgtccaaaaagatttccagcaagaaagatccttcagtcaactcttccaagaactggttgaaaactcttaactggcaagaacggcgaaaacttgaaagagaaaggaagcaacaagaagaggatgagcaaacattagcgaaagtggaagctccaataccacaatccaacattggatttaagcttctcaaacagatgggttattctccaggttctgccctaggcaagcaaggctcgggcagggctgaaccagtggggattgaaattcgacggtcacgagct

SEQ ID NO: 27703 - DNA, 277 bp, Glycine max
gttcgccatggatgaatcaccggcgaacagggagggcaaaaacagagcacagggaaacgaggaacaagaagatgatgactacatgggtgacctttctcagtttcttccttccgatgctctcttccctcccaagttgttttcatccaaaaagatttccagcaagaaagatccttcagtcaattcttccaagaaccggttgaaaactcatagctggcaagaacggagaaaacttgacagagaaaggaagcaacaagaagaggatgagcaaacattagcg

SEQ ID NO: 27704 - DNA, 287 bp, Glycine max
cagaaatgtattgaatgtgtacctgaagatgcaatcaactttattgtctcaactttttttgatcaagttgtgacactatcaacccatccatatggttgccgggtgatacagagagtactggagcattgcaaagaccctaacacccagcaaaaagttatggatgagattttaggagcagttagcatgttagcccaggatcagtatggcaattatgttgtccagcatgtacttgagcatgggaaacctcatgagcgatccgccattatcaaggaattagcaggaaagat

SEQ ID NO: 27705 - DNA, 327 bp, Glycine max
agcactgttcttcagactgagggttcttttccagcgttagtaaataggttattggtaatcaaatccgagtcccttgagttctctcctgtagaaaatgcaatcggaatgattgaaacacgaaccgctgccttaagaaatgagcttgaagagcctcgaagttcagagggggatcaacttccaagactccagagtctgcaaagaatcctacaaggcagtgttgcagtacaagtgaatagtggagtcttgagtgtctgcactgccttcttgtccggggagcctgcgaccaggttacgatcacaggaactgcagcaacttatagctgccctt

SEQ ID NO: 27706 - DNA, 464 bp, Glycine max
cagcaatggtggcgtagttttgcctcacaaggagatcaagtcaaacattctgaagccagagatagtcatgtgaggctactgtcttaaattcatagcatgtgattaggaagttgtaagtttttgtgtctgaaatgtttgtttgtttctttttttttttttttcccgcatcccaatccgtttttctttgttacatattttacaagttgtgtaatattcagtgttatttatctatctttttaagccaagatttctctgtaattatttgagataaattccgctaagaaccagataatggtggacctctgtcatgaaacgaaaaaacttggaaactttttcctagtcctaggtatatttccatattacggaccccaatgggtgtgcattttatgtgttctgtactttgtattatgtgtctggaccatggagacccaatttggatcttattttcaagcctttcttgagtc

SEQ ID NO: 27707 - DNA, 970 bp, Glycine max
accacaagaattttgtaaatcttattggatattgtgaagagaataagccattcacaaggatgatggtttttgagtatgctccaaatggaaccctatttgagcatctacacattagagaagcagaacaactagactggggaatgagaatgaggatagctatgggaatagcctactgtctggagcacttgcatcagctgacaccacccattgcctacagaaacatactatcttcctctatatacctgactgaagattacgcagctaaattatcagaccttagtttctggactgatatagtctccacaaagaagggttctgaagccccacagctgttggaaactccttcagcatatataaaggccaatgtttacagctttggagtactattgttcgaattaattactggaagaattccctttgccgtggagaatggcttatttgaagattgggcggaggaatatatgaaggggcaaccattgagagacttggtggacacaagcctgaactctttgcaagcaaatgaaattgaaaaatgggaagaagtggtcaaaagctgtgtgcatccagatccagaaaaaaggccaactatgagagaggttactgctaagttgaaggaaatcaccgccatggggccggacggagcaactccgaaagcatctcctctttggtgggcagaaatagaaattatgtccagtgacttaagtttagacgttaaaccatgactccaaatgaaaaatatatcttttgggataataatctgagcagctactctgaatttggagtttgatgccatttttttaattttgttttcttagttatgttttagattcttcttgttttgaagctaactgaagtgggtggatggaagaaacagcttttgtcttagtagagcaatttaattttgtaaatagttgaggaatgaatttgtttttgtgcttttataaatgaatattactttttttgagtgtgg

SEQ ID NO: 27708 - DNA, 292 bp, Glycine max
cttcgatctccaaattcccgtgctttgagtttttggtttttgctcatatgtgctcaatgattgttcaactgttatggtgctttctttagttggtggttcttgtctttgaaagatttttaattaactgggttgttcagaacttgtttagggaatcaataggcacagcttgtcattgttgatgttcctgaccagatagcatggaggagcctcaatgtgcaatcaagaaggatgccactgaattggtagggaataccccaatggtatttctaaacaacattgttgtcgggtgtgt

SEQ ID NO: 27709 - DNA, 468 bp, Glycine max
cttaaccgtagccaaagtagtaattcatcttgcttttcctttttacctgaaaaaccctgttccaagccatggctcactccccttttcttttgttgccaaatcttcaaggcttttggccttctttgcttgctatgatcacttgctttatcattatgatcaaagccctaagaaacaacttcattgagaactattccaacaagcaaaaaccaaaactacccccaggcccgaaaccatggcctatagttggaaaccttcccgaaatgcttgcaaacaaacctgcccataagtggatacacaatctcatgaaagaaatgaacaccgaaattgcgtgtatccgcttaggaaacgcctatgttatccctgtgacatgccccaccattgcgagggagttcttgagaaaacaagatgcaacttttgcatcaaggtcacaaagtgtgtccactgatctcattagtaatggatattcaa

SEQ ID NO: 27710 - DNA, 314 bp, Glycine max
cttggtagttgcatatttggcatcaacaatcaacaatcaacaatcaacaatcacaaatagaaactcactctttcgaaaaaaccaggttagttacgtgtctcattttatatctgtttttcttctcttcattctgttacgctatttttgaattttccccaaaatttcctttttagtttttagaatattcggaccatttatttgacctatcccctacaaataattagtttgtttgtttggtactttccagatcaggggaaaagtttgttatatctgttaagttttcgtgtgtgcgattttcagaatttgaatatgac

SEQ ID NO: 27711 - DNA, 695 bp, Glycine max
ctaatggttcagcaatgtttatagtggatgtcaatgagccttcatctgatccctttccctgggacatcaataaagactccttgtcagtggatatcaaacatgtttttacaggagagggtatttcaaatggatatgggttcagataccctggatcaaagcccggttccctctttgtatttcaaaatggtgtccttgcctttgtttggaaggacactagggctgtcttgactttgcagagacttgacttgcaagatcttttgaagaaaggagaaagaataccttctctgcctcccatcaacaatttttcatatttgaccaagtcctactcaaatgtgtttacaggctttcctggtgcttccacttggtcgccttcaccaaggtaaagacaacactggtatattttttgttttggcactacatggattttgtgccctatttcctatcataacagtttaacaagaggatcataaacttcttggcggctgttgtttattgctggagttgcattgctgttggttgtcacacaatacactttttgttgttggtttcttgttactgccctttttttaagatcaaagataaagtaatattagctatttttgtagtaaagtattagcttctctgctacagttgtatacgcagttgcttgttacacaaatattaaaaactaatatacatcaaaagatcatcctaat

SEQ ID NO: 27712 - DNA, 352 bp, Glycine max
ttcacacttcttcctccgatccaataaatggcggaaccgtcgtccaccgccgccaccgctgccaccgccgccatcgcttccaccgccgccaccgccgccaccgcttccaccgcttccaccgcttccaccgctgatcctccggcgccagtgactaaaagctgggccgacgaagcagacgaagaaaccaacaacacctccaccgccgagtcagaaagctcctccattaacctggaagcgttaaccatcgacgataaagaaaataactcttccaaattcttggatgatcccgatgattccaatatccaagcggttacttctggcgacacgccgtacacctcggcggcgaggttcg

SEQ ID NO: 27713 - DNA, 872 bp, Glycine max
ctcagtttcttaaatcttaatctttcacttcttcgctaatctctagattactcccattcattccattttgtttcattaattaaccaaataaaaaacgatgagcacttctcatcaacaacgttatctcctcttcgctttcactacgttaatagttttcttcagcttcaacactacaccagtttcggctcgtttgttccccaacgtttcctccatcccaaggtggaacacatcccacgcgccacctgatagcgcgtggaacgcgtatcgcaatttcactgggtgccgcccgggaaaaacatataacggtctttcgaatctgaaaaactactttcattattttggctacatctccaacgtgtcctcgaagtcgctcgaagtcgtcgaattttagcgacgatttcgatgatgcgttggaggcagccgttagagcctaccagaagaacttcaacctcaacatcacaggggagctcgacgaccccacgatgaaccaaatcgtcaagccacgctgcggcgtggctgacatcatcaacggaaccacaacaatgaactccggcaagacaaacaccacggattcaccgacgttccacacggtagcgcattattctttctttgacggccagccgcggtggccggtggggacacaagaactaacctacgccttcgatcccgataacgctctcgacgacgtgattaagaccgtgtttggcaacgcgtttagcagatggtcagaggtgaccacgatttctttccgcgaaacggcgtcgtatgtggctgcggacataagaacggttttacggtggggaccacggcgacggcgaaccttttgatggcgtgttggggacgttggcgcacgcgttctcgccgacgaacgg

SEQ ID NO: 27714 - DNA, 1067 bp, Glycine max
ggaggaaactcataataccttgaagtttgccagcagggcaaaacgagttgaaataggggcgtcacgtaataagattattgatgagaaatctctaattaagaaataccagagagaaatttcagtcctcaaagtagaacttgatcaactaaagaaggggatgctagttggtgtcaatcatgaggagattttgaccttaaagcaaaagttagaagaaggtcaagtgaaaatgcaatcaagattggaagaagaggaggaagccaaggctgctcttatgagtaggatccagaggctaaccaaactcattctggtttcctcaaagaatgcaattcctggatatctaactgatgttcccaaccatcagcgaagtcactctgttggcgaggatgatattgaaaatgagagtcagaaagattcttctgcagtgtcatcagatcagtttcatgatggtagacataaaagatcatctagtagatggaatgaagagttctccccagctagcagtactgttactgaatcaacacaagctggtgaactgataagtagaacaaaattgacagtgggtgggatgacaatgtctgatcagaaggatctactggttgaacaagtcaaaatgctagccggagatattgctttcagtaccagcactctgaagcgcttgatggagcaatctgtaaatgaccctgaaggctccaaaattcagattgagaacttggaacgtgagatccaagaaaaaaggaagcaaatgagggtgttagaacaaaggttaattgagactgaagaatctcctgtggctaattcatcgctagttgaaatgcagcagacagttacaaagttaatgactcaatgtaatgaaaaggcctttgagttggagctaaaatctgcagacaaccgtgtccttcaggaacagctaattgataagtgttctgaaaacagagagttgcaagaaaaggtgaagcagctagagcagcaactggcggcaattaatagtggtacattgtcagtgtcttctgaacagtgtgcatcaggagaaaacattgatgacttgaaaaagaaaatacaatcccagg

SEQ ID NO: 27715 - DNA, 535 bp, Glycine max
cgtccctgatggctgattgttcagcagattgctagttaaacaacgcctttcttcttcgtctcttcatgttctcggacattgcttgaagctcaagtcgaacttggagaccttgatcgaactccaaggccgtgtttggattttcggggagatgattaactgtttgggcctttatcctcttatttctgccccttcaaccattgcctgcaccactcacattgtgagaagtaagcagtatcttgcgacacaaaagccagtaaatctggctctcggctatcggaatccacatggatatgggttcagttttggatcgagaagatcaatacacgagagggtgagctctcatttcaagggcatagctgttatgacagatgacaaatcaacaatgtcatccaccgaggaagacttagaaaacatcggcctctttcatattgatccatccctaaagccatataaagatcacttcaaatatagactgaagagatatgtagatcagaaaaagcttattgaagaatatgaaggaggtcttgaagaattt

SEQ ID NO: 27716 - DNA, 277 bp, Glycine max
gtcaatgaggacccatcaactcagaagaagcctcgagttgtttggtctgtggagctgcaccgcaagtttgtttctgctgtcaatctattaggcattgacaaggctgtacctaaaaagattcttgacttgatgaatgatgaaaagcttacaagggagaatgtggccagccacctccagaaatatagactttatctgagaagaattagctgtggggcaaaccgacaggctaatatggtggcagccttaggtactgcagattcacttatttgagatgggt

SEQ ID NO: 27717 - DNA, 264 bp, Glycine max
cgctagtgaaacttcacaacacaacaatcataccataacattatctcagcaaaaatgtcagcaacatctaaacaagtagagaacctaagcacaaacgataaggctaaccatcggccctcatctccttcatcacacactaaaaaatgccctttcaatgcaaatttcataaagatggtactagaagagctaagagttcaacgagggatagcccttcctcttgtggccatgaacttggcttggattgccaagacagccataacaaca

SEQ ID NO: 27718 - DNA, 261 bp, Glycine max
cctccttccacatgaaccactattgattgtgatttattttttttgttgaactttaataagattttttctattggattattaactacaaagatgtaaatcagtaaagaattttgttcctccagagatatctgacagcagaatctgcgtgtatattgttcacatgttgtaacttgtaagtcatggcatgacattcattcttgtgttttcctttttccccattgaggtcaagactcatagtataaaacacaggataggagaatt

SEQ ID NO: 27719 - DNA, 336 bp, Glycine max
tggtggggcccagccccgaacgcgagaaagtttctcttaaatatttggtcctcctgtctctcctccgagaaccggtccgggtcaaaccggtccggttcagtgaacccttgaaacgacgactcgaacgccgacggaaacacgatagctccttttggtatcgtgtacgattccgtcaacggaaacctttccgccgcgacgtgcggcaccagcgtcgccggcggccggaacctcaccacctcacgtgccaccgcctgagtgtacttcatctccctaagcatatcggcagtaatcagttcatccgactccggcgaccagattccggcgacttcggccctc

SEQ ID NO: 27720 - DNA, 381 bp, Glycine max
tttgggttttggtgttttttcttaacactgagaagaaaaaacagagaaacacaaacacgagcgaaggaaggaagaaaacagtttgttccagaactgaacccaaagatcttctctttacgtgctcatgtgaggacccaattcttcttcttcttcttccgctgcttggatctgcacttttcggtcttttctttcattcccgcacgcgaactccttcacgggtcaattccaattttgctttgcgcgctgtttttttcccgcaccacaaaagctttcgcggaagtatttgttcggtgggtcgaaggtcgagaaaggttctagattgggggcgtggctttggttcgtttcaattcggaagggttttacttgcttcgaaacccacaa

SEQ ID NO: 27721 - DNA, 373 bp, Glycine max
gtttcaaccatattataatcccctctggaaagcgctccaaaatggccaaagaaaagactccttcttgggttgtggatcttcttctgatagctgcttttgtcctagctttagcttttagcgcctcggtggcagctattttgagatggagaaggctgaggaaagggattccacaaatatcacacagagaaatccaaccccttgatctaagttcagctgaagctaggaatgcacttgaagaccatgaagtgcatttcgggggaaggcctaactttaaagatatatttggcaagcttcatgatgaaagcgatggatctaatatcggagttttggtttgtggacctgagagcatgaaggaatcggtggcgttcgcatg

SEQ ID NO: 27722 - DNA, 654 bp, Glycine max
cgtggctctgtacaccgttaactcaacccattgtaatttaatattcgtcagttattcccattggctgattgttgttagatgctggtgaccaagtttcttcgtaattttttctcggtcagaattgaacaccacagcgacagcgcttcaacgtaaaaaaaaacggtggggttataataaccttaaccttggtcgctgtctttctctctctgtggatggaacaaactagaagtggcaagagaagcttcaaatcacattcatctaccctaccttaaccataaccaaatcccaaatattaaccccccctttttttaatgttgatgtaaggaactaatttgaagggtggtggtgattaggttattagcccttagggtttataaatgttgagtacctcttcttattctgtcttcacccgttcctttctccccaatccaattaagggtatcccccgaccagctacacttcgaccttttcctgggatcttggaatctcatgccaagtctccaaagaacagattgagtattttgtgctttaggcacgaccatcattctccagaaacaccccaacctgaagttatcgagcactatcttcatgaggaattggtgcaatctgaattcaatgactccagtgtcaccaaaagagactggaaatcaacca

SEQ ID NO: 27723 - DNA, 355 bp, Glycine max
  unsure (1)..(355): unsure at all n locations
cactcgagccgaatcggctcgagctcggttataaatacgacacagaaccanattggaggcattacaaactggccatgatgctaacaatgtgaatgacttcgcttttccctcagagtctgaattccgcaaagcacttggatcagttgcatatggagagacaggcgaatttatgtcaaaatgtatccctgttgaggaaacatacagtaactcaactcttgtaatcaacaaaaaagagcatgatcatattaaaggtttggagtttcccaaagatgttgacctggaagatcttttagatgctgttgttggcaatttatgtggtgccactgatgatacttcaagtatatccaacagtgtc

SEQ ID NO: 27724 - DNA, 374 bp, Glycine max
gggataaggaatgcacctatggtgctaccacgaaggaagaaggaatgtgaaagggaagtagtcaactagtgcacgcaacgcaacacaagtctaacaaatggccatcatcatctttctgttcgcccaatctcaaacacccaaacatcgtcaaacgcaaactctgcaacaaagctttcctctccacgctaaacaaatccacaaggcctgtaattatgggaaaggcggagtcaatgcatgaatctcaagattatttttaccaacatcccccttattattataattgctatcatcagccgtctccttatgctgagaattcagagaatactacatatcatgaaccatcttcatatgcttggaattcatcaaatactacc

SEQ ID NO: 27725 - DNA, 500 bp, Glycine max
ctcctaactaactatttaatgaaccattgttctctgtttggcatctgatttcttctagatttcgcaaagttgcaaattgagccttttcatgttcacccgaaacaggatgaaggtaggctttaatggattaaggggtaaagaaatttcgcttatttccattgttctcatgtctgtaactatcattttatggtcatgggagataatgcctggtcttagtgcctttcttcctcctcaaacaccaccactgcaactgccttcagatcatttagctagtcgtcgttcagaccaggtgctagaaccagatccacatttgggtgaagatggcttgccgttggcaaaggcaaagactgccaatgaagcagaagaactacgtctcaagggagcatcatggacggtccctgcacaaagatcttctggaaagaacatgggtgaagagggctcatcattagcaacggagaagatcttcaatgaaacagaagaactaaatctcgagggagcat

SEQ ID NO: 27726 - DNA, 660 bp, Glycine max
ttacacgaaaaactcgtggcaaacaacttctcttctctccgattatggctactcatctcttcagacttcctctcttctcgcaacccaagctctccttcaatcacacgcctaatcatgcactccacttcatttctcctctgccggcaaaacgacatcgcacccgcaaccgccaccgtcgtcaaattctccggccaccgttctctgtttcgaactccttcggcaccgagattggctcgccggaattttctctccttcaaagcaggagagaggccaaagactcgccggttctgctcgacgtcaccggaatgatgtgcggcgcgtgcgtctcccgagtcaaaaacatcctctccgctgacgaccgagttgactcggtcgtggtcaacatgttgaccgagaccgccgccgtcaagctgcggcggatcgaggaggaaccggcgagcgtcgcggagagcctcgctctgagactgagcgattgcggatttccgacgaagaggagggcgtcgagctcgggagtgacggaaaacgtgaggaagtggaaggagttggtgaagaagaaggaggaattggtcgttaagagtcgaagccgcgtcgcgttcgcttggacattggtctcattgtgctgcggatcgcacgcgtcgcatattttccactcctcgggga

SEQ ID NO: 27727 - DNA, 535 bp, Glycine max
  unsure (1)..(535): unsure at all n locations
cattattcctctctcttctcttctcttctcttctcccatggcttattccattcctctcatcatcacctacttcttcttcctcttcggcactctctcccacgctcaagcccctgcatctttcctaatcccagtcaccaaagacgcttcaactctccaatacataacaacactttcatatggcacccctttggttcccaccccactggtgcttgatttaggaggtccttttctctggcttcactgtgcatcacgcaacacaccttcatcttcttccctcaccacccctcaccgttcccttcaatgcttcactgccaaaacccacaaatccaccaactcctttctctccagccccgtcgacgaagtcgaccagtaccaaccatgccaagtgttccccgaaaacagcatcaccggaaccatcgccgccgaaggagaactcgtggaagacctcatggcccttcaatcagccaaagaaaaaggacaacttgtggaacaccagagccgntcacgtgttccccgaccaccctcttacacggcc

SEQ ID NO: 27728 - DNA, 417 bp, Glycine max
aaaaacccgcacgttaactcgagaaaaatattgtctccaatggtagatatcaatgatctatataaaaaattctaacgttgttttctttccttgtacacatgtgcacaatcttctcccacaatctcgctcttttggtccaaaaataaatcaccatgcccagatctcgtcctgccactgatttcgctgatcttgaatgtttgaaatgaaaatttccatgaccaaagtcttctttaccttctaatttggtttggaattttcgtgggcatgaaaacaaggcctttcatttcccaaggttgatttggattggaggatgggtactaagagtctcttaatgcttaagtcccacattgattccatcaacttacgagttgtgaacgattttgtttgtgtgaacatgttgtgggcctttgcttctct

SEQ ID NO: 27729 - DNA, 271 bp, Glycine max
tcggcaatttgcaaagtgaactctcttctgttagtgacagtgaagaaactctctgttgaagaattcacgcgctcagatttcgatttttctgaatgtggcaccttctcttactcgttgccgtggccggatccaccggtttcgccaccaaacgtttccttactcaccacagaaacaccggtgagggtgaaaacgtcaacctccacgatccaaatgagttagacttttccggttccgaaagcatttctcagacacatcacagtgacggggtctt

SEQ ID NO: 27730 - DNA, 371 bp, Glycine max
caaagacttagcatcacactccgtttggttctattcatgagtctccattctcaagccagtgttgagtcttctaattggaaatatgcaccaaacattggaagtgttagagctgcgtattggcctgcgggtgatgacctttcaccctcttccattgacacaaaatacctcactcatatctactatgcctttatccaacaagaccctcaactttttcaccttagtgtcaccgaatttgatgaaaaatggataccaaaattcatcaatggactccgctaccgttacccgccggtgaaaactctcttgtcgattggaggagggtggtagcaactcaaccgcattctccctcatggctagcaacaaacacacacgac

SEQ ID NO: 27731 - DNA, 346 bp, Glycine max
atttgatccaactgacctagacataaatgttacaccagaggctgttgaagaggctctccgggaaaatcaaccaagtaaagccttgatccttagccttcgcctgaatgaggattctttcgttaaaaaatgtatatttgcggttagtccagcagatattccagccgttgccacatcaatcccctacaaatatatccagcgattagttgaggcacttgcagatcttttagaaaactgcccacatttggaatttatacttagatggtctcaggagctctgcaaagcccatgggaattctattcagcagaactctagaaatctgttaccatcattaaaatctttgcagaaa

SEQ ID NO: 27732 - DNA, 269 bp, Glycine max
aaaataggaagcaacaacagcaacagcagcagctatagaccctagggaaatgatacaggaagatcaaggacagtgttcttctcaagcgatcaataactaccaccaagcctatcaagagcagcttctccttcagcaacagatgcaacaacaacaacaaaacaatgatatctttggtggaggaggaggattgaacatgtaccctggtgctgaagtttctccaatcatgaatcatcatcatcaaccatggtctatgactatgccacatcatc

SEQ ID NO: 27733 - DNA, 273 bp, Glycine max
agagaataacacaacctttttttcttgttcttgttgttgtaattgcaatcaagtcttttttactgttttcaacttaatgtttctgttgctgaggacaaatccccagtttgaagcaatggtggacggcctaaattcttccatataaacatgccagggaggcactatggtgccgtcatagcgggcctcccttctcaaattgccttttgttaagctttttgatgattcaaaagattttcccttgagtttggttagaatatttcaagttctgaactg

SEQ ID NO: 27734 - DNA, 541 bp, Glycine max
gcagattaaacaacaaatactacgacactgcacagtcaataagggcaacctctgccttttgccacccattgcagacctgactttctcaacaaaaccagacggtgttgcaccctccaaatccaatccatcttctattctctattctcttattaataacctctttcttttggtcttctctgtgactttctcttcattcatccacttcttagaccgatctctcctctcattttcctccaaaaagttctagttttttagcctgttgatcatctgggtggtggaaattttcctgtttgtcccctccttatcggggagggttgttagaattgcttgcttgagtgatcggaatgtttttctcataattcacagttcttggagagttttggagtttctctgacgtcaactttttgtgaaattttcgcttttgaagatttgcacaagagttacatgttgagtgatagaaggggaaggtgacgtgtggctgaattattacatggattgtttctgttgcttcaacaatcaggcggtacgcacttcatgtagc

SEQ ID NO: 27735 - DNA, 434 bp, Glycine max
ctgactttctcaacaaaatccatcttctcttcttattaataacctctttctttatcacaagggacgcttttgctataacctttttagtcttctcttcattcacccacttcataccgatctcttctctctttttcttccaaaaagtttttatttttggattgcttgtcaattttttgagcctgttgatcatctgggtggtggaaatttcctttttttgccccccaccttttcggggagggttgttagaattgcttgcttccgtgatcggaatgttttgcagataaattcacagttcttaaagagagttttggggtttctctgacgtcaagttttttgtggaaatttccggttttgaaaagatttgcccaagagttacatgctgagtgatagagggggaaagtgactgacgtgtggctgaattgtttacatggatt

SEQ ID NO: 27736 - DNA, 452 bp, Glycine max
cgaatccccaataaggccattattagttctagggagatttcatcaaacagtactgcatctgatgatagacgatttgtgagacacatcattactttttcaaagatctggagcagcgaacaagaatacaacggtcgatgctcgttatgcagcagaaaacagatctcgcaagatggcagaatatgtagcatttggaggcctgtgtgtcctgttggatatatatatattggggatattgctcgtgttggtatccatcctccaaatgttgctgctgtctaccgcaagattgatggattttttgctctcccgatgggatatgacctggtgtggcgaaattgtccggaagattatgttactccattatcaatttggcacccacgggcaccagatggatttgtggctcccggatgtgttgccattgctggttatttggaaccagagcctgatcttgttta

SEQ ID NO: 27737 - DNA, 272 bp, Glycine max
cacaaagcaacgatgtcttctaattttctcttccctcaaactcaatccacagtcctcccaaacccttcaacctacttctcctcaaaccttctttcttctccactccccactaactctttctttcaaaactttgttattccaaacgggtctcaagctgagtacattcacccttacctcgtcaaaacctcaaactcttcactctcagcctcataccctcttctcctcttcaccacagcacttttgaagcaatcttttgtgccagatatcacaat

SEQ ID NO: 27738 - DNA, 402 bp, Glycine max
atttggaagtgcatgaggctcgagacatctacgttaatttgccaagagtaaagattccaaagtggtttgagtgccagagtcggggagagtcaattgtttatctggttccgtaacaaattcccagccataattgtttgcattgatgcagatttttgctttgatttgcttgctctcaacgtgttcattaatgatgaagatgaagctaatcatgtaggttgggatgttaccgagtgctgcatgggtccttctacagctgtttttcgtcttcaaatggaagattatttagatgaagaactattaaagaatgaatggaaccgtgcagagattggatgtgaatattggcgggacgaatgcgcaatccatgtattgaaagagcaaagtagcatggaggatattcgattc

SEQ ID NO: 27739 - DNA, 254 bp, Glycine max
cttggacttgcattggtggcaacagcgatgccagcttgatggagaggggtggatttcacagctatgcattttcgtgctttaaaacacgcatgtatctttatatatgtggttgtcctggtttgggctttgtatgtgttagcctaggaagtgtatctctggactatgtaaaaggtttgcatgattgtgctgttttctgtcttcatagaatatatagagctacgtactaattctggcaaaaacgaaaagaaaagggg

SEQ ID NO: 27740 - DNA, 581 bp, Glycine max
gaacttgtcaagcaacttccttcatctttctaagctgaccctcctggctgcttcaattttccaaattcaaaaattgtataaaagaccctccaaatcccctcaaacaacaacatttctcatcttcataggctaaataacaataacaacttaacaaattttatttcacccccttaatatttgcacatatctgcagccatggttattcttagagaaattgacttccttatttctgaggggaaggcatcacagaatgatggcaactcaacttctcccttgttaggtttggtggacctttccttgtactatacatgtttctacaaactccagagttttttcgtaagtttctgggtttttcttctgtgccaacttttttctaatgactcaagggtgaggggagaggagcaggtatcaaagcctgaggagtttagccaccaagagaatgagtcaaagagaagcttagatagtgagaattatcttgagacggatgaggtcacaatggtgatggcaaaacttggatttttttgcagctcagaaagtgaggaacttcaggagaagtatggttccaaggagctttctaaact

SEQ ID NO: 27741 - DNA, 431 bp, Glycine max
ctcccggtacaagtgctttaatggctagaagagatgattctggagaaaccccaaaaggtggcaatattgaaggcaggtctaaagggtttttcttctgctgttactgatgacacaatgctctctcacaattctttcaatggggccgtcccaaatcacagtgtggcaatctgaataaaccccagcaaatgttacatctagaatcttaacaagaaaaacaagtcagttttgttcaccttgattccatgttctcagcaagagtagcaagccatactcttttaactttggattgacttacttctaacttattagggttgaggttgctgagatgtattgttgtataatatggttcatccaaaggccttcacctcctgcttaatgtatggaaatgacttggataatgaataaaaacggggaaaatttttatctttgcc

SEQ ID NO: 27742 - DNA, 452 bp, Glycine max
tttttaggcacaccagaagcaggccagagaaagaaagaaagaaaagacaaaaaaatctgttttatccaattttgcttcatcaactaccaaaaatgccttctcctgtacccaccttgctctccaaatgcaccgtcttcccagaccaaaagtccactctcggaaacctcaaactctccgtttcggaccttcccatgttgtcctgccactacatccaaaagggatgcctcttcacccaccccaatctcccactccactctttgatccctctccttaaatcctcactctctcgcactctttctctctttccacctctcgccggccgtttaatcaccgattccgacagttacgtctatatcgcttgcaacgacgccggcgtcgatttcattcacgccaatgccactgcccttcgcatctgtgacttactctcccaactcgatgttcctgaatctttt

SEQ ID NO: 27743 - DNA, 497 bp, Glycine max
gtttcttcaaaggaatgctcagaacaaagagttgcaaggtgcgagaagaaagaggagactaactgctaccccaagtgtggagaatttgcagcaagatcatttcgctttgtcaattgaagaaggatcggctactattgagtcacagatggcgtctttgttctcagctgcgtgtcatgatccgttagaatcaaacagtgaactcaaagacccaatatggcgttcagttccagttgcaagtgggagtcatttgggggaggtgagtgattctgtttgggaggacttgctgaaccaagacttggttgctggggcccctgaagaggcagttgtgattggtgatttttcacaagttgctgttcctgtggcggatttgattgcggatgctgatgagtggagtgaggatttgcagaaccttgtggatcacatgggttatcttgggtccaaaccgtagtgggaaggaaggattttcattatctagggggttcagataaaactttccc

SEQ ID NO: 27744 - DNA, 375 bp, Glycine max
aatcaattgaagaaaagagagagagaaaatgtacgtggatcacgcgttttcgatttcagatgaggacataatgatggatgcagcgtacacggtgagcaaaaggcacccatgaaggagatcgccctcgccgtttcccttctcggctttggaaccctagctatcattatcggctccctcatggcctacaatcacgtcggcggcgacaccactcacggtaaccacattatgaacatcccttttcagaattcctgctactatttataattatgattttaatgatggataggtctgttctttgcgatactgggaacactcttgttcattccgggtttctactatacgcgctttgcctagtgtgcttacaagggatacaaa

SEQ ID NO: 27745 - DNA, 351 bp, Glycine max
cctctcttctggattggtgttggtgttgggctttctgcactgttttcagtggtagcttcaagattacagaaatatgcaatgcaacaagctttcacgaccatgatgggccagatgaattcagaaaataaccaatttgccaatgctgccttttctccgggatctccttggccctttccaatgcctacagcagcagggcccactgcacctgctagttctgcaactactcaatctcgagcaccttcagcatctagtgcatctcaatccactatcacagtagatttacctgcagcaaaagtagaagctgctccaactactaatgttaaagatgaagtcgaactaaagaatgaaccc

SEQ ID NO: 27746 - DNA, 286 bp, Glycine max
ttgattcagaatggcaggatagaacaaccagcgatccaattcgcgaatgcttcctcttcttcttcctcctcgctttctctctcctccttttcctcttctctctctctcctctccgcaccccttcttctccttcccccacccatttccacgttcccattgcccaaacctcgttcgtggcctccctcgaccacttcctcgcccacgctcaaacgtccctcaaagaccacacagcgcgcgacgtcacgaagctcgacgacgccgtttttcgctccgagacggacaggct

SEQ ID NO: 27747 - DNA, 276 bp, Glycine max
attcggctcgagaatctgttgccaaagttgaataatagcatctagctacaaaaatttccccaatggcttcgagtggagaaatccttcctcaccaaacccaagtggtggctgttctcataccgttcgctgcactaggccatctcaatcagcttctgcacctctcacgcctaatcttatcacacaacatagcaggccattatgtatgcactgccacaaacattcgccaagaccacacttcgagacaaaaactccatttccaacattcatttccatggc

SEQ ID NO: 27748 - DNA, 463 bp, Glycine max
cacatcataagttataagacaattaattaagttatttgacacaaaagtcagaagctagggtggtgaagacgcaataaaatggactcttgggttagaatgctgtttctcattgcttgcattgttccagctttagtcgagtgcaaagtgaggcactacaaattcaatgtggtactgaagaatactactaggttatgttcaagcaaaccaattgtcaccgttaatgggaaatttccaggacccactctttacgctagggaagatgatacagtgctagtcaaagtcaataaccttgtcaaccacaatgtcaccatccactggcatggtgtgagacaacttataactggttgggctgatgggcctgcatacatcacacagtgcccaattctgtcaagacaatcatatttgtacaacttcacccttacaggacaaagaggaacacttctttggcatgctcatgttaact

SEQ ID NO: 27749 - DNA, 193 bp, Glycine max
tgaaaacacagaatcgcgtttgtaactgaggaatgagtttcttgccggggataattgattccttcaactccatcgtcacacatgataccaacaacaattatcacagcaccaattctgcttcttcttcttcctcaacgaatcgaatggaagcttctcctcctccttcggtttcgaacgagcgcgttgcatacaa

SEQ ID NO: 27750 - DNA, 264 bp, Glycine max
cttgatttgagcaaaacttcatgttcttgcaacttttggcagttggtgggaatcccctgcaggcatgctatagctgcaatcaattacaaaggagagcatgcagaagaccatgttgacaaatattaccatagggatacttacaagctatgttacagtcatagtattacaacaatcgatggtaggcaaaaatgttctaagacttctgaccctgacttattgcctcctaattacaaacgtgcagctggtagaccaaagaagttgagg

SEQ ID NO: 27751 - DNA, 557 bp, Glycine max
gttggggctgatcatgctgtgtttgagcaaggtgcttccgctggaaatgtcggaaaggaaaagatggtggagcagaagaaggcaaatcctgttgctctgcttctctcctccgccatgatgctcaggcatctacagtttccttcattcgcggaccgccttgagactgctgtcaagcgtgtcatttcggagggcaactgcagaactaaagatcttggtggagacagcactacacagcaagttgttgacgctgtcattgccaatctcgactagactacaccttcccatggctatgcacaatctttttcaaatatccttcccccagtttgttgtaatcaaagttcattttctattgctatttttcaacagggttgaagactctctataataattcggcttaattttcatgtaattatgtttgctcaaccaaagtcacacttgtaacctgtccattgtttgaggcaatttgctcaaacaaaggatgcttctctatccacaataatggtgtatggtaacgttgattgaaacgaaaaaacaaaaaaaaaaaaagggcgcccgcc

SEQ ID NO: 27752 - DNA, 638 bp, Glycine max
ctcctccgctgtcaacatgctccacaacaagtcctttgtcaagaaaaccaaaggtggcaaagtcataaagtgcgggagcactacctgcgcgacgatatatactgcggcgcaccgttttgcaccgtttgcgcattcttccagtgctcgcctcagtgcttcgccttccaccattctcttcgtcgacaccaatgtcgttctcaaccagattgatttgctggagaatccggcgattgacgatgttgtggtgttgtccattgtgttggaagaggttaagaacaagaacatgtctgtttacaaccgtataagagctatctgtagccattccatgaggaagttctttgttttttccaatgaataccacagggatacatatattaaggaaatgagtggggaaactaaaaatgataggaatgatagagctattcgagtggctactcagtggtatcagaatcatcttggtggtgcagtaaaggtgttgcttttaactaatgacaaagagaacaaaaggaaggctagtgaagagggtattttggccgaaacagttgagtcatatgtgaagtctttggaccaacctgatttacttgatctgcttgtgcggcctgcatctgaagatgtggacatggaagaggttgaagatc

SEQ ID NO: 27753 - DNA, 509 bp, Glycine max
cagggacatcaaaggatcaaatcttttggtgaacaatgaagggatattgaaggtagcggattttggattggcaaatttctccaattctgggaacaagcagcccctcactagtcgtgttgtcaccttatggtaccgtcctccggaacttttgctcggttcaacagcttatggtccatccgtggatctctggagtgttggctgtgtatttgcagaattactaattgggaagcctatacttcaggggagaactgaggttgagcaattgcacaaaattttcaagctttgtggctccccacctgaagaatactggaaaaagaccagacttcctcatgcaacattgttcaagccacaacaaccatatgatagttccctccgagagacatttaaggattttcatgcatccactgtaaatcttctacaaactcttctttctgtcgaaccaagcaaacgtggaactgcctcttctgctctctcattggagtatttcaaaataaaaccttatgcatgtg

SEQ ID NO: 27754 - DNA, 424 bp, Glycine max
ttggcttctggtagtagtgttttatgttacgcacacaccaaaacggctctctcgcagcccaaaagcttcgccgtttcggttcgcgctttagggtttcgcgaaatgtcgtacgaatccgctacttcttcttcttcgctgttcgctctctccaattccaattcccctccgcgctcttcactaaccatgcattgatattcgtcttcctcttctcctcttcggtggtggcagttctggtatggaagtgtatgatgtttctgaaactagaaaccatgatgcagacatgattgaaggtgctgatttaaattcacacttcacgagcccaaatattgaacgaactgaggtcatgattaacgaaggagcccctgagttttttgttgaccagaacttgtattaccctgctgccaccaattatgggtattactgc

SEQ ID NO: 27755 - DNA, 368 bp, Glycine max
acttgctactggaattgatgtaaatataaaatttaggagaatagctgattttgaattcactcgagagtgtgccatatttgatctgctggacattcctttgtatcatggctggattgttgatcctcaggattatgacactgtgaatgcaattcgatcaaagtcctataatgcccttatgggagagcttgtctctcttgaaacactaatcatgaatgtccatcatgaaaataatccggaagattgtgttgattttgtgcctgcaacaactgctactcttggagttccttctcccagtctttcaaaagccaggtcgtttcgatgatcttctcattctatttctgatcatatgcaaagaaaaggtgatctag

SEQ ID NO: 27756 - DNA, 534 bp, Glycine max
gaacaaactttgccttacttcaatttttctactgtagaggacccatgtaaggtttatatggacaaggtacccaccaactctagatgtagaagtgcatcttcatttacactagatagtaatgtgtctaatcgtaatgataagaataatgaacatggagatattgactgtggtagagagaatgggttggttgatgttcccaaagtatgttttgatgcttcaccggacttgatggaccataaacatttaacagttgtatctggtgggagcagctgggaaagattactaggtagttttggacaaactgtcaatgttgatgatactcacaaacaaagtttgttgtcagcatttgagataccactcgatattataattgacaagtgcttgctgcaggaaatcatgcttcaatacaattatgtcagcaagctagccatcaatgtgcttgaggaagcatttaagttgcaagagcatcttttggcactacggcggtatcattttatggagttagcagattgggcagatttgtttatcctgtct

SEQ ID NO: 27757 - DNA, 895 bp, Glycine max
gtaatcatgatcccaccgcaccctcaccaatctctaacattagggtacgcacagcgcggcggccaagccatctcaagccggagctgctcttcacccttcctcctactcggtacaacacaacaacatttgttgtggagtgaatgggtgcgacggaggccaacactccacttcaagctcgtcccgaaacgacgtcggagaatatcgaagcattgcttgatgctgcaagatacgatgacatggatgatgttaagagcttagaagccagtggtgttcctcttgattccaaggatgaacaagggaggacagctcttcatatggctgcagctaatggacatattgatattgtggagtatttaatcagtagaggggtggatcttaattcaccaaatgaggaaaagaatacacctcttcattgggcatgtctcaatgggcatgtggaggctgtgaagaaattaatcatggctggagctaatgttagtgtcttaaacagtcacgagaggactccaatggatgaagcagtgagtgggggaaagccagaagtgatggatgcgattaatgaagcagtggcactagttgaacttcgtggtgctatggtttttgcacaggaaacttgaagtttatgctacactaactagcttgtaatatgagaaatctgtgatggttatacatgttttcctataatgggtattttgttagttcgaacaagatcatgagtgttttggtatcctcctccctcccaagtttccattatggaattcctcttcggaaaatggaattgaaggagttggaatgaagtggatagttttacttttgaagttaattagttattttttttcctggaaaatcaatgaaatgccatacactcgaatatgagaaattaacattttatttatcc

SEQ ID NO: 27758 - DNA, 291 bp, Glycine max
ggaaagaagtggcaagtgctgttgagccagagcaaccggcttggtctagtgctagtgctgcttccaagttggctcatgcgagtgctcttgagaaggtatctgctggtagatggcagtcaaaggctgtacattatcagacagatgctgaggtggttagatctcctgaattggagaatagaccacgtgttaatggcgttggtgcctatagtaggatggatgcagtgggtgaaaaggagtattatgatgcaatgctagctagacacactgaaaggggcttaggcattgataatc

SEQ ID NO: 27759 - DNA, 334 bp, Glycine max
gctcgcgcaggcgcaggagtgcgtcttcgagaacaccattgccaaagggagcactcccggtgtctgtgccaagatctctaggcaggttgggatatattatgaggaagctttagctgcgctcaatgttgcacccttgagccagcattttgataagtcctggatagttcacgtgcagttcaaaggcggcactgttttatgcggaacttgttataggtatggtttggagctgcatgataaagaggagatagcagaggagattgcacgactgcggagtgctgttaatgtgctgactgaggcgaagaagagctctaagggtgctgcggcgcaaattcta

SEQ ID NO: 27760 - DNA, 266 bp, Glycine max
gcaatcaataatgtctcttccaactcatccaattcctcttcttccttgcatcatcccttttcacaatttcaatccgctaaatatcgaaaaccaaaacgccatcatcatattcctagagtgacatgcagtgacaaccataacccatacacatctggtgaacttctactcccacataggaggttcattctacttggtctaggagggcttttaggtgctgctgctactcttaataacatcccttttgacaatgctgccccaatacttgg

SEQ ID NO: 27761 - DNA, 516 bp, Glycine max
tataccgcctcctctgcctatttgggaccagcaccaccatcgtgacaactggtcacagaatgacataggtaatcagcatctagtaattgatttggagattattaacgacttgagaattgacatggctcgattacagcaaaggatgaataacatgcagagaatgctggaggcttgtatggatatgcagcttgagttgcaacgatctataaggcaagaagtttctgcagctctaaatcgctctgctggttcatcaggaatacatgattgcgagtcaccagaagataaatctaaatgggaatgtgtaagaaagggactttgctgcatatgctgtgaaagcaatatcgattctttgttgtacagatgtggtcatttgtgtacatgttcaaaatgtgcgaatgagttgcttcaaagcagaaggaagtgcccaatgtgtcaagctcctgtggtggaggtgatacgtgcttattctatacaataatttgacattaatataaaggtcacacttttaacaaaata

SEQ ID NO: 27762 - DNA, 293 bp, Glycine max
ctgaaacgggcgtttgcctttgcgtttgcgtttgcgtttgcattgatgttgctgttgctgttgctgctgttcctctcggttgctctgaaatctgaattcaagaaataaaaaataaaataaaatagcataacatggcccaggattctgagaagagattccattccatcatggacaagctcttccatcctcccaaacccccttccgcctccagttcatctggagtgcagttaccagggagtagcaagaaacgtccttatcagtcgggggtaatggagttgaatcggagaggtgat

SEQ ID NO: 27763 - DNA, 478 bp, Glycine max
gttaggacacacatcttgtttgcttgctttcagacaacgcttatggattcaaccaagggctttgctctctctccctctccctaatcctagtttctctcatgacccaacattccagcgactgatttctcactctccagcaactaggtttgattcactttattgcatggagtcatcagcagaaaagtatgctgcatttaaacagaaagttagtaggacagtgtacttggacaacatgtcaccacaagtcactgaatctgtgataagaactgctcttgaccagtttgcaactgtgaaaaatgtcaagtttattcccaactacatcggtccaagcaatcagccacagtgtgcattagtagaattagattctgccaaaaaggccaaggaaattttatcaatgatagcgggttatcctttcatgatgtctgggcagccacggcctgtgaaggctcggcctgctgtgatggaaatgtttgatgat

SEQ ID NO: 27764 - DNA, 695 bp, Glycine max
ggaattctctgggtggatcaattccatctgagattacaaatttgagcaatcttaatttcctgaacatgcaaagcaacaatctgagtggttccataccaacatccattgaaaacttgaaacttctaatagaactccaactcggggaaaaccagctaagtggtgtgataccaatcatgccgcggagtctgcaggcatcactgaatcttagtagcaaccaccttagtggtaatattcccagcagttttgatattttggatggcctggaagtcttggatctctcaaataacaaattatctggtccaattcccaaggaactaactggaatgtcaagtttgacacaattgttacttgccaacaatgcactgctgtctggtgaaattccaaaattcagtcaacatgttgaagttgtatattctgggactggtctgataaataatacttcacctgacaacccaatagccaacaggcccaacactgtctctaagaagggaatatctgtcgctgtggcagttctcattgcaatcgtagcggctattgttcttgttggccttgtcaccctgctcgttgtgtcagtgtcacgacattattacaggggtaatgacgagcatttaccgtcaagagaagatcatcagcatcctcaggtcatcgaaagcaaattattaactcctaatggaatacacagatcaagcattgac

SEQ ID NO: 27765 - DNA, 488 bp, Glycine max
tatcattatcgtcatctcttttatcttcaagaagcaatcaagaatggtgtgaatgtaaaagggtatttcgcatggtctttgctggacaatttcgaatggcacttaggttatactgtgcgatttggaatgaattttatagattacaaaaatgacttaaaaagatactcaaaactttctgcattatggttcaaggattttctcaaaattgaaatcaaacttgaggaagattccatgtaatagtactactgtatgagattccttaaacaatcatatttgtaaatatatatagtttaggtttatttaattctttggctatttcttatgaatttgtagttcttataattattcttgtgaatttattgttcttgtaatttgaaatctatacgtggaagcttgttttaaagatgtgctgaaatatattaaggtcaagcaatcctaagaatgtaatatctcttaattttgtgaaaataaaaaatatttattatggg

SEQ ID NO: 27766 - DNA, 352 bp, Glycine max
tctcgagccgattcggctcgagttgaatcgtacagtgtaacctaagtgccatttggaatgaattttgtagattacaaaaatggcttggaaagatacccaaaactttcagcattatggttcaaggattttctcaaaattgaaatcaaacttcatgaagattccatgcaataatactagttactatttgagattccttaaattgtaaatatatatatatatatatatatatatatatatatatatatagttgctaggtttatttaattcttaggctattccttatgaatttgtagttcttaaaaatattcttgtgaatttatagttcttggaatttaaaatatatacataacac

SEQ ID NO: 27767 - DNA, 283 bp, Glycine max
tgaaagaatcaattattgcttttcttttacaccttatgaggaaatattccaagttatttagaagtgagttctctgatgataatgattctcagggttctcaaccttgttctcccactgttcagagatctcttgaggatggcattcccggtggtcattgtcatgcctttgacagacagctttcaaaacttagttcctttaattttaagccaaataataggaaatcagggcagatgctccttccgccagaagagttaaggtgcccaatatctctgcaacttatgag

SEQ ID NO: 27768 - DNA, 518 bp, Glycine max
ataagtggccctttccctcatggtttctctgagctgaaaaacttgaccagcctctttctccaatccaacaacatttctggacaattaccattggatttttcggtttggaataaccttagtgttgtcaatttgtcaaacaattccttcaatgagaacatccccttttcaatttcaaaactgactcatctcacctcattagtccttgccaacaactccctttcgggtcagattcctgatctcgatattccaagcctgcgggagctgaatttggccaacaataaccttagtggggctgtgcctaaatcccttcttagatttcctagttcggcctttgccggtaacaatcttacatcagcagatgctctccctccagcttttcctatggagccaccggctgcctatccagcaaagaaatcgaaaagactcggtgaacctgcactgttgggtatcatcattggggcttgtgtgttgggatttgtggtgattgcaggtttcatgattttgtgctgctatcagaa

SEQ ID NO: 27769 - DNA, 675 bp, Glycine max
ccctcgcgtccgtgttatgtagctagcacttgtgttgtgtcttttctcattcctcatcctcaaccttacgcagcagccattcttgtagaattcattttctcgaaattggttaattaagttaattaacactaaacactaaacatgggtctttgctttgcttccctcgctacccaccaaacaccctccaataattcccctcactattcaggttcagcgcgtgagatgggaattactgaaagcactagtgttaatggaggaagcagtagcattaatagcaataacatggtgtttccgagtgtggaaacgcggaacttgaagcagttcaatttcgcggatctgaaagcagcaaccaagagtttcaagtcggatgcattgcttggtgaaggaggttttggcacagtttacaaaggatggttgcatgagaagacactgacacccaccaaagctggatctggaatggtggttgctgttaagaagttgaactcagaaagtttgcagggctttcgtgagtggcagtcagaaatcaatttcttaggaaggatttctcacccaaacctggtcaagctattgggttactgttgtgacgatatcgaatttctccttgtgtacgagttcatgccaaagggaagcttggagaatcatctctttagaagaaatactaacagtgaaccactc

SEQ ID NO: 27770 - DNA, 682 bp, Glycine max
tttggtcgaggtctttcttattcggcattcctccattcactcctttccgtcttgcctttttttcctttaaaatattatggccatatttccatagttggtggcatatatattctttctgcgattatcatctccttattttcatttttattgttattctctcatataccaaaagagtgacgttttctcacgaggttgatctttccccaattcgtaccacctttttctttcggttcatcgtttcattggctctttttttttttttttcgttggctttttgagaaaggagaaccaaaacacttgcaagtgaagttcttagttaaaagaaattatttgtttcaggaaaaaaaaagctaaaaatggggtcgaagtggatgtggttgatattacactttgcatcggttttggtgtttgtttggggagatagaacaattttgaaggtggaagggcctatgttgttggataattcacagagatatgaaggcagtttcattagcaaagcagtgaacttcttatggcaaccaggggaatcaggttatcaacacgtttggccagacatggaatttgggtggcaaattatcttgggtaccattgttggattctttggagcagcatttggaagtgtaggtggtgttggtggtggtggcatattcgttcctatgctcagccttattattggctttga

SEQ ID NO: 27771 - DNA, 508 bp, Glycine max
agaagaggtgctaccaacgagtgggaatacctagtcagtcagttgttagacacaatagtcaggttcattacaaaaagcgccggcctcacccttccttaccctccgtttctcaatctcgccgccggcgcaactgcttcatctctccggcgaacgcaaccgaattcttttcccatggcagagaatctgatagcgccgaagcttcccgtcgaaggaaagcgcaacattctcatcaccagtgccttgccttacgtcaacaacgttcctcacctcggcaacatcattggatgcgtgttgagtgctgatgtattcgctcgctactgtcggcttcgcgggtataacgctatttacatctgcggtactgatgagtatggaactgccactgagactaaagccatggaagaaaactgctctcccaaagagatttgtgacaaatatcatgctattcataaggaggtgtacaattggttcaatataagttttgatgaatttggacggacgtcatcccctg

SEQ ID NO: 27772 - DNA, 464 bp, Glycine max
tccaaactcagaccatgaatgttgggagagaccagaggacatggatacagccaggactacgtatgctgttgatgcaccaaacgcggcttccgatgtcgccggtgaaacagccgccgctctagccgccgcatccatggcattccggtcatcggacccgggttactcggagacattgcgtcgtaatgctattacagccttccaatttgcagataactacaggggtgcttacagtgacaatgataatgttaagtataatgcctgcccatattactgcgattttgatggctatcaggatgagttgttatggggagccgcatggctaaggagggcgacgcaggacgataatttcctcaactacattcaaaccaatggcaaaactcttggtgccgacgacaacatcaatgagtttggttgggacaacaaacatgctggcctcaacgtacttgtctctaggaagtcataga

SEQ ID NO: 27773 - DNA, 259 bp, Glycine max
caccgacaggaaggagttcaatgtacctcaccggtcatcaccaagacttgctggaagtaaacctgtccagttggccaacaatgtgatgaatgaacagactctccaggttcctaaaagaaacttgaggaaaagtagaaacactctagatattgatatttctgaagaccaaacagtttctaaggaacaaccgcatcagcaagaagcagataaaatagaagacaaaaagccagaaattcaaattagctcaaacaaatcaagt

SEQ ID NO: 27774 - DNA, 376 bp, Glycine max
tttctctctcctcctttctctcactactcactcaccccttcatctctttctctcattctctttgctgcttgtacagaacagtaaagtgcttaggatagcaaaaaagcttctgcaatccaaaccgatctgttctttcttaatttcctttctgcttgccttttaaccgcttcatcttttggttgttacttcctgagaactttccatttggggggctagggtctctctttggcactttccatacttgttgatcttccttgtgtgtcactgtttcaccctttgttttctaatctaacttcttcactcttggagttagtaatcttctgctatcaaatcactgtgtggttgttgaactattattattcagagtctgctattt

SEQ ID NO: 27775 - DNA, 265 bp, Glycine max
atctattcataccctataattacctacctaggtgtgttctattgcaattgcaatttcaagatgctaattcggatggcaattgaggcatgcagcagcgaggttagcgagggtgcagacgaggatggtgacaacatacaagtcgtgatcaaccaatgacaaattgcaagtctttggatatatgacttgtttgatcatttgggcaactgaagatcctttggcagtgacacccttttggaacgggatgacatagatattgatccttgct

SEQ ID NO: 27776 - DNA, 545 bp, Glycine max
atgaacttaagaccaccaagggcgcgcgcacaccggatttgctgcggtcaaccctatcgaaggccttgtttgatgtcatgcgcttcagttcccgcgacacctgtctcagccgatcggaaaacgacgacggcctcatctcgaggcggctggcgaggaacgccgtctcggagtcgccgccgcggatgttctggaccgaaacggcgtcgtcgcggacgtccagcgtgatctccaccatctcctcgtcgtccttgaacctcgcacttttgttcttgctgctgtttcttttgttagaagaaaccaaaggcccactcaaaggcccgctcagtggtccgctcagaggcccactgaagcccactctcctgctccggcttcccgtgctctccgtttccgaccatgactcgtgttggttttcgtgaatctccatgttgcgacaacctatgttatttttgtaattaatttatgatcgagaaattctatggtttgaggctatgctgagaaattggagtgaagggcaaagtgtgtatgtgtatatataatgcaagaag

SEQ ID NO: 27777 - DNA, 404 bp, Glycine max
acgctgactcttcctcctcctgttcctacttgtgcgtttccactgtcatcagacactgctcacagcaatcacagttactggaaatctttatagtcaagcctctcagattcgttgcttccaccatggaggaacaaatcccatttaagaatctccatagcagagagtattcgggtcacaagaagaaggtgcactctgtggcttggaattgcattggcacaaaacttgcttctggttccgtggaccaaactgcgcgaatatggcatattgagccacatgggcatggcaaggtcaaagatattgaattgaaaggtcacactgatagtgtggatcagctatgctgggaccccaaacatgctgatttgattgcaactgcatcgggtgacaagactgttcgtttgtgggat

SEQ ID NO: 27778 - DNA, 220 bp, Glycine max
cccttcctcgttcctaaatctaagccatgtttcttgaggtgtgagataacaacacacagaaaataataagaagaaaaagaaaagttggggtttttatgatggggtgttgataaaggagctagctggtgctgcaaaggtgtgtttgaagctggtataatgggtaattgctggtgtaggtgggagtcatcagagtatagagtttcatccaatgtaaagtcag

SEQ ID NO: 27779 - DNA, 342 bp, Glycine max
agcagatgcatctgctaccccgcattgccactctttgttttgatattatctgagcttcgatcttgttcctcttgcgagaaaacatgggttcttttcatttgttccttctgctcccaactttcttttccctctttcttcacacctctccctcccctatcatccaagcagctatcgatcaaggtaccaaagcctactataactgcacaagaaacagcacttttgcttcctatagcgcttatcgttctaatgtcaaaatactcctagattttctctcctccaatggcaccaacaatgccaaattctacaacactacagtttatagtgaagacactgcagaccctg

SEQ ID NO: 27780 - DNA, 380 bp, Glycine max
gtttttacaaaaaaggatgataaaaatttgttgggaaagatagcatcaaagcgtgagaaaggaaaggcagcagcacccagaaaacagtctccccccatgtcgtcatcgcgcatgcgtgcatcagccagatctgctgacaggtcagccaagaatgatgcgttaaatgaattgcgtgcaaagcgattgaaacagcaagatccggaagctcaccggagactgagagaggcatcaagaaatgcagggccccggcatttttctccgccaaagcgcaaaacgttcacatcaacaagtctcagttgttcaagtcatagtgagagtgaaagtaggtcccatagtgaccatgaagggtcaactggggatggaggaattgctgacagtga

SEQ ID NO: 27781 - DNA, 472 bp, Glycine max
ggaaatagcgtaatttacgtgtgctcctttattcagttcctcttctcacactggtcaagatagtctatcttgatcatgggtttcaattctgtctatagaaacttgcaggagatatttccgcaggttgatcccaggctactgagggctgtagctattgaacacccaaaggatgctgatctagcagctggaatagttcttgcggaagtcatcccgttcatgtccaaaaaactacctgctgcaattcctccacagcacaatgaccatggagccccactagatgttgaagttgaaagtgaggaagaaggcaataggttgaggcactgtcagcgtgttgatgacgtaaatgtggggccttcctctactttgtcaaatggctgtaattcaaaagatgatactgaaaaatttcttggaatggatgatattaaggagctagatatttttcagaatgctgaagataacttcattggggaaa

SEQ ID NO: 27782 - DNA, 455 bp, Glycine max
tagctccttctccccctctctacgcctgggtcccccccgattttcgcttcccaatttcttccctctcatatcatcttagctagaaattaagatagtctatcttgatcatgggtttcaattctgtctatagaaacttgcaggagatatttccgcaggttgatcccaggctactgagggctgtagctattgaacacccaaaggatgctgatctagcagctggaatagttcttgcggaagtcatcccgttcatgtccaaaaaactacctgctgcaattcctccacagcacaatgaccatggagccccactagatgttgaagttgaaagtgaggaagaaggcaataggttgaggcactgtcagcgtgttgatgacgtaaatgtggggccttcctctactctgtcaaatggctgtaattcaaaagatgatactgaaaaatttcttggaatggatgatatt

SEQ ID NO: 27783 - DNA, 296 bp, Glycine max
cttctctaccaccctctctatttctctttctctctcgatcttcgcttcccaatttctttgcttctcatatcatatttagccatatactagaaattaagctatccgattctgagggtttcgtttttcttttcctttcttacgtgctttgcagacagccaatcttgatcatgggtttcaattctgtctatagaagcttgcaggagatatttccgcaggttgatcccaggctactgagagctgtggctattgaacacccaaaggatgctgatctagcggctggcatagttattgcagaa

SEQ ID NO: 27784 - DNA, 263 bp, Glycine max
gcacaagatggagtttttcacgaaaacgagcgtggtgaagctgaggagccacctggacaagtacctcgtggcggatgccgacggcgcgcgggtccgccagacccggaggagctccggcagggggacgtggtggacggtggaggaagtggcggcggaaggagggattaataataaggttcgcctgaggagctgccacgggaggctcttaacggcgacacagacgccgtttctgctaggcatgacggggaagacggtgctgcaaa

SEQ ID NO: 27785 - DNA, 263 bp, Glycine max
ctcttctataataagaacaacgactcactcatcacagtatccgtttatgcttctgagaacttctgctctttgaaatgcagatccacgaagattgaatacatacgaagaggcaagccggatgctgggtttcctcttttccaatctgaatctttgaaatggcctggatttgttgtggttgatgatgtcaacggaaaggtcctaacttactctgcacaagattgtatttacaaggtccttgatcttagagactacaccctgctata

SEQ ID NO: 27786 - DNA, 362 bp, Glycine max
atctattgtaagtggaaatctgaacatgggaaggaaagattttgagcatcaatacggtaatgatccttctgtgggattgtcaatgtctcattccatagcagacacttcatcatgtctcaattttggtggcatcagaaaagttaaagttaatcaagtcagagattctgacaactgcatgcctgctgcatccatggggccctcctatagtagggaagataatagtacaatttcagtaggtgctggctacaataagaatgatggcggcaatatttcattgggtcctacttataacaatgggtatgacaacaccattgctatggggagcagaattagtaagactgatgacaatcttctttcaatgg

SEQ ID NO: 27787 - DNA, 713 bp, Glycine max
gtggtcatacggcatcgttttgtacgagatgttgtacggaacaactccgtttaagggcgccaataggaaggaaacgttttaccgcatcttaacgaaggagccagagctaacaggggagaagacggcgttacgggatttgattgggaaactgctggagaaagatcctgaccgtcggatcagggttgatgagatcaagggccatgatttcttcaagggggttaagtgggacatggtgttgcgcattgtgaggccaccttatattcccgaaaatgaggtcaagaacaaagtggggttcggcaaaagcgacgtggaagtgttcgtggacaaggtgttttttccaacaggtgatgatggaggaagagagaaaacaaaaatggtgttggaaaagaaggatagtaataataatggtgagaatattaacaatatggtgaaagttgatgaattgagtcatgttcccaccgagaagattgacgattttttgattttttgagttgacatattcttttaatattagcctaaatgtggatccttatctcaccttaaaaaaaaaaaactaattgtagatcgtgcatatcttttgaaatttaattaatatataattaatttcgaccattgttgagatacacgagctagttaattttgtttgttgttaattatactattttttctgtaaattatggttcaatttaatgccattaattgactaatgtttt

SEQ ID NO: 27788 - DNA, 348 bp, Glycine max
cactcttccctctttctcgctctcaccttacacctctctgtttccctcttcatttcgattcttctgcatctggcaagcagtttgtgatgaagattgagtaagagatttattttttctatgaggtcaatcaaatcatggaggtggtccacgagaaaaaggagtttcttgcctaatgggaaaatcaagtttgaagatgacacaactgccttttatggcggttgtttgtatagtaatgttgtttgttgtgtataggactctaaagtatcaaagttaccaagaacagatagacaaacagtggaatatcagggaagaggaaaaggcatataccgaaacttctggaaacctgaa

SEQ ID NO: 27789 - DNA, 483 bp, Glycine max
ggggaagatgtgaatcccgaatccgcatcatcgcttccctcaatcttctttcttgttcaatcttcatcttccaatcctaatccatccatcgcgttaggcttttcacagttccagttcccttctcccgcaccgccattgccgctcccttttatcctcgatcggcaactctctgcgtccaagcgatgcaacgcaccgtcgcaattccttcgtagtttcgcgaaacggcgtttttcttcggtggaggaaacttcggaactgagccgcgtcggagtccaatcttccgcgctcggaatttcaccgtcgttttttttctctctcagtgttcgcgtgtgtgtctgctcggtgctgcgttttgctcgaacgatgtttccgtttcattctcaaggaactccgaaacacacttgcactcttctcgctgtgacctgcagaacaagttccgctgagcacaaactctcacatgctcagcgcacatatcctttccct

SEQ ID NO: 27790 - DNA, 517 bp, Glycine max
gtctcatgcaggtctgcttttacctccaaatgcccagaggaatgctatatatgctgtgcatttagaatatggttctaatccagaatcaacacgcatggcttatatagccgagtgtactgtgaccatgcccattctgagttttactgggaccagtgatatattgcctcatggtgaacatattgttcaggtttattgtgttcagacacaggctattcagcagtatgctttggatctggctcactccttgcctccgccatatgaaaatgtgggactagagaagtcagattccagtgtttcacgcgatcctagtactgttgaaggattccactctttagattcttctgcaggtagaacaactgaaatgtctttagccagttctgctcccaaaacaatgttacaaacaagtagtaatgagggtggacttgtggcacgataccctttaagctctggccatgttgaggcacctatttctagaggaatcagcagttcaaatactgaagctaaacctgctacatta

SEQ ID NO: 27791 - DNA, 436 bp, Glycine max
aaaactcaacactgctcgcttagtggggtaagcggcgacgacgacgatgaaggtggtggcactcgttagcggtagtaatgacagttgctatgccatgatgaaggctatccactatggccatgagattgttgcattggccaattgatgccgcttgatgattccgtggacgagctcgatagctacatgtactcaactgttgggcatcaaattattgtcagatatgctgaatgcatgggattgccattgttcaggaggcgaatacaaggatcctcaaggcatcaggagcttggttacaaagaaactcaaggtgatgaagttgaagacctgtgcattttgttacgtgaagttaaaaggcagataccctcagttagtgcagtttcttctggagccattgcatctgactatcagagattgcgggtggaaagtgtttgttcaa

SEQ ID NO: 27792 - DNA, 301 bp, Glycine max
gcagtttgaaggaaaaggtttcttcgcctccaagagttagaagcccacccatacaaggccttctctatgcatggaatgaccgtcttgataagcttcctgatgagcttgctaggacagctataggaaactttgttgctgtgatagagactatttaccatcagcaacaagaagggatagctgtgaagaggaaatgtgaggatacacgacaggagctatcccgtaaaaccagacaatttgaagatgtggtataacaagtatattcagaagaaagtaccagatgagtacaatccagatagggcag

SEQ ID NO: 27793 - DNA, 463 bp, Glycine max
ctgaaattcaaacagagagacagagaatacttctgttagacacatcggtatcgccagttgagacgatacgtgctgggtgggcgttatgattttattgtagaacatgatgtgagagagcttggacctcacacgctgtgtctgcactgcattgtataatgatggtgacgtgtgagcgtgaatatcttcctcaatgtttcaagttcatcgttgctaatccactttccgttaggacagaggtccgtgttatcaaggagactaccttcttgaagcttgtattgaaaaccatacaaaatcaaaccttttcatggaccaagttgattttgaacctgctcagtattatagtgcaacaatacttaaaggtgatgggcaccattctgagaaagatagtcctacaagggagatatttaagccaccaatactaattagatctggtggaggaatttacaactatctctatcaattg

SEQ ID NO: 27794 - DNA, 679 bp, Glycine max
atggaactttcctcagctcttgagaagatgttcagctgcttcaccattggtcaatgcaattctcctggactgtcctgggaaagatggactaagtgagagctctgtgagggatcttctccatggatctgaatatgtgcttacatatgaagataaagatggagactggatgcttgtgggtgatgttccttgggagatgttcactgattcatgtcggagactaaggatcatgaagggctctgaggcaattgggctagctccaagggccatggaaaaatctaggagccaaaactaatgcagaaaaaaccccattagaccaaagcggggggtattcattgaagcatataaagatttccaagggtgtttgagtttatgattctgttcaaaatcaaaaacatatgctattcagtgtctcagtttttgtgcattaatatatatagtatgacaagttttatcagtagaattcaactggagacatccagacaatatatacacatattttgtttgtttctctattttgtgtatccttggattctagttgctgtataaaagaattgcttgttgtgcttttccctgtttccctctataactattctgaattttcttcatgtattttattttcattatacatactgaacatttgtattccgttcctaaatggtaataaccatatctcttggtc

SEQ ID NO: 27795 - DNA, 472 bp, Glycine max
gccaggaagaatgtctcttctgcaagagggacaattgctgtggataagatcactcacagggagcgatcatcgtatgtgggaaggcgcactgaaaccttcacttttctggacagtactgatcctgacattttcacaccacgctctgcccctgactcgtatggaactgcaacatactatcgtcatgttagagatccttcctctgatggttttgctgagcggatactgatgcttcaagggagtctactaatgggtggacaactaaattcacatgatcatttcagagactgcagactggatgttgataacatgtcctatgagcaattgctagagcttggtgagagaattggtcatgtgaacactgggctcaaggaagatgagatgggacggaacataaggaagactaggcttcaattttgggatgatacatcaaagcttcaagtagataaagagtgcagcatttgtcaggaggagt

SEQ ID NO: 27796 - DNA, 308 bp, Glycine max
cccacgcgtccgcactcacccttttcagtttataccaaataaatgatgttacaagcttcttttttgcgcttgatctctttcttctttctcatcgcactccctcttggaagaagctctaccaccttgaatgtaccaaaggacataatcaaccaaacatgccaaaaatgtgccaaccaatccatcatcttgagctacaacctatgctccacttctcttccggcggttccggtgagtcactccgcaaatctcgaagggttggcgttggttgcaatggagctagcactagagaatgtcactagcactttggc

SEQ ID NO: 27797 - DNA, 369 bp, Glycine max
cccctctccctcttgtggcaatcttccaaaagatcaattccaatggaagtttcatgcaagattctcagaagatcaactcacacttttctccaaaactatcatcacttcacctcaacagcagcttttctagcttttcctttctcggcttcattactcctctctcaagcattagtcccttcaccttcatccctcttgccccaaatctatagccgcctaaggactctctttgatgctgcaggcttcccttcttcacacttgtttaccattctcaacctcaaggtctctcaaacaatcacttcttcaatcctcgcccttcctttcaccctcacttttcttctcattgcaaaagcatccataatccaggctctc

SEQ ID NO: 27798 - DNA, 271 bp, Glycine max
ataaattctgacaaataagttcaaacatatagttgatcatgtctgcgctttagcttttatgctctatggtaagggaatggcatattctatttctagataggtagagattttattcaagtatagaccaggtgggtttttgtattgacctaggtgctggccctattatttgtttagaatgtgttcatagtcttacatgcttttatcgtgattgttgtgttttcaatatatatcttacaatagctcgtgaaatgctaaatcagttgctgaaaaa

SEQ ID NO: 27799 - DNA, 309 bp, Glycine max
tatcgagccgaatcggctcgagcttgatcaccttttttgagaaaagatatatatcaatggcaactccgagtgtgttagaagtccgccctcctgctttaacttccatctctgaaccacttccattttttgatggaaccacaaggttatacatttgctatctgtgcccttttgcacaacgcgcatggataactaggaactgtaagggactgcaagacaagatcgaattggttcctattgatcttaaaaacaggcctgcttggtataaggaaaaagtttatcccacgaataaggtaccttcgttggagcaca

SEQ ID NO: 27800 - DNA, 475 bp, Glycine max
aaaagcaacaggaaaggttttggctactgagcttcctaagattggaagtaaatgcaccgttctctatcctgcttctgcaaaggctagcaatgagattgaggaaggactttcaaaccgtggatttgaggttactaggatgaatacatatacaacggtgccagttcaacatgttgaccatacggttctaaagatagcacttgctgcccctgttgttacagtagcttcaccatcttctattcgagagttgatcatgtttggattcaatatgtcaattcgatgtaaaggggattcatgtgttaaacttgatgcgtccaatgactgtttcatactcactatcctgggatgctgtttttgtccctttgttaatcaagcgtcataatggctcctgtgcctggaagaatcttctttcagattctgagtggaacaattctgttgcatgcattggtgagacaactgctacaatggcaagaagttt

SEQ ID NO: 27801 - DNA, 227 bp, Glycine max
caggacacacttgccatctagggctagcttgaaagagcctgaggactgcctttaactgaatttgaattcagcattgtccttgcttctgagtatttgctgcatagttgagagcagttcacatcgatttcctggtaggcgtctgcattccctgtgtgtgtcctgcttctccatcagtagctgcactacgggcgtagatcgacagactgttgtcacttcattctcctcgt

SEQ ID NO: 27802 - DNA, 493 bp, Glycine max
gctagccagcaagggagaattgaagctattggtaatagagagctcaaaaggggtagccatatggcagcgtttgggattcgaatcatgctattgctggcagcttgcttgcttccactatctgtggaagctatggttcgccactacaagttcaatgtggtgctgaagaatgccacaagattgggttcaaccaagcccattgtcaccgtaaatggaaagttcccaggtcccaccatctatgctagggaagatgacactgttctggttaaggtagtcaaccaggtcaagtacaatgtcagcatccattggcatggggtgagacaattgagaacaggttgggctgatgggccagcatacataacccagtgtccaattctaccgagccaggcctatgtctacaactttactcttacaggccagagaggcacactttggtggcatgcacatatcctctggcttagggccactgtccatggtgccttggtcatcttgccca

SEQ ID NO: 27803 - DNA, 337 bp, Glycine max
aaagtttcagactgaaccttgttacaaggatacctcatacacaatgaagtttcctgctggctatgagctacatgaagcacttggaccaagttttctgaaagggagtaagtgttttaattgggcagcggaagcaaatcaagatgttaaaaatgctgagatgtcagatgagattagctgtagccaattgacttctgaatttcgcccagagcatctcttggaagctatggtggctaacattagccatagtagtaataatgttaatagtgagttatcattttcgacatcaatgcaggctgcaattgcctcaggaagaaatcctgaaggttctgttcacact

SEQ ID NO: 27804 - DNA, 656 bp, Glycine max
ctctccctctctcaacttgttcagtttgcaaaacagtttgacttgacttgctattatccattccatctccaacttcatctacttcttcatagccatatatagttttaattttaacgcgttttttaattagccaaacgaatcttcttataaaccctcaaacctcttgggttgttcgcattccgacaaacaaatacgtagatttgaaggaacgaaggaccggccgttttgtttattaagaataagaatttgttggtttgcaacgaaacaggacaaggttggtcttaagcttagatctttgtttggaaatggcgagagggagcagatcagtgactagcagcagcaaatggaggtactgcaacccctcctattacctgaagcgcccaaagcgtcttgctctgctcttcatcgttttcgttggcgtctctttcattgtctgggaccgtcaaactctcgtcagagagcaccaggttgaaatttctgagctgcggaaagaagtgactggtttgcaaaatttgttggacgatttaaataacaaacaaggtggtacctctgggaagactgacttgagaaaagctaccaagaccagtaaagaggtcctagatgatccgattgatatcgagaggagggaaaaagtaaaagaagcaatgcttcatgct

SEQ ID NO: 27805 - DNA, 310 bp, Glycine max
gcaaagaggacccatgccgttgagaaggattgaagcctccgcttgctctctccatgaaatttcttcactttgcaaaaccaaaacagattgaattgctattatccaattcatctacttcttctccctcttcatagccatgtacaggttttaattttaacgcctttttttattactagccctacgaatcttcttataaaccctcaaacctcttgtgctgttcgcattccgataaacaaacacgcagatttgaaggaacgaaagaacgaccggccgttttgtttttgtttattaagaatttattggtttgcaa

SEQ ID NO: 27806 - DNA, 368 bp, Glycine max
tgtccacattccacgcctctcagatctcgcaatcaaacactttaaactccctccttcctcactacacgccgtttctctttttttgccgttttttttatgtcgtcatgttctgagtttcgtgttgtcctgttttgtgttgttgtgttgtgttcagttctttccttcgttacatgcaaaaacgactatgaagacgccaaaacgccaatcgtcgccggcaaacgctgctcgaccagtggagtctgattccggcgagatcgtcacgaggttcaagaacggtggccggagaaggatcaaaatcaagcgaatgaagtacacttgccagacgaagatccgcgtcaggaatgacgccggcgctggcggcgtgtctc

SEQ ID NO: 27807 - DNA, 280 bp, Glycine max
gccccttttctttgggcttgacacctgtcttgaataagagtgattagagctgcataatgtccctctcttggctattgaccatgtggttcacgtacaaaactctgtataagttgaaggaaaatgttcatgttcatatgtacttgtttgctatgactacattttgaggttttgtaaaactgttattttttttttttttcccaatgtgaacctgaaggccaataaatttttagagattttcccttcaaaaaaaaaaaaaagagagatagaaaggaaaaggggg

SEQ ID NO: 27808 - DNA, 423 bp, Glycine max
ttgcattcgtggttgcagatactcaaaaacttgcagatatggccgcaaactcagctgttgttgattatgataatgaaaatcttgaaccacctattttatctgttgaagatgctgttgaaagatctagcttttttgaagttcctccttttctttatccaaaacatgttggtgatatatcaaaaggaatggctgaagcagatcacaagattctttctgctgagttgaaacttgggtctcaatactatttctatatggagacacaaactgcacttgctgttccagatgaagacaattgcattacagtttactcctcaaaccaatgccctgagtttgcgcattctactatagcaagatgcctaggaattcctgaaaataatgttcgtgtaataacaagaagggttgggggtggttttggtggaaagg

SEQ ID NO: 27809 - DNA, 464 bp, Glycine max
cgtacgcgtgggttttgttgcaactgtttttttttgctggttgaagatttttacattttgttgctggaatctgattgttttattagtttttgaaaccttgggtcttgaatgcaggctgagatgagaaggctcaggataaagcaggtatgtactgtgtaacatatctgctgtctttttgacatgttaatttgcatgttcatgtgtatttgatctggtatacttgaaactatcctgtaatggcatgtctctcgtcaaagaagccaacttccatttatagttttcttttaataacgtggatttaatgataggctgaagcccaagctttagattaaataagtagtaaattccagcttaatgatgttatcaaacatctagttctgatagacaggtgttgttaaaactatagtattcacactgataaatcatgaacattgggtaattgaagtatcttaagaagtgttcgt

SEQ ID NO: 27810 - DNA, 334 bp, Glycine max
ccctcgcgtccgcccacgcgtgcggagaaactcattgctgagaagcaattttatgccgcggttcaattgcatgtgcaatcaatactgatgcttgagcgaggcctccaaactgttggggcgcttcaagatgtccgttctgagttaacgaagttacgtggagtcctcttttataagattttggaggatctgcatgcccatttatacaataagggtgaatatagtgctgctggctcaagtttgttagagaatgatgacgaagtaccaaccaccactgctgttgcacttgctgcacataattcacaacctctgtctcgaagaacatgatcactcaaag

SEQ ID NO: 27811 - DNA, 319 bp, Glycine max
ttctgctcattcgaggatggctaagtgctcctacattcgaattcagtgaatgctcgggaaactagaattccatatccatgggtagtttttcaatgagaagataaaagtgaactctgtatttcttcgtgactcaacagctgtgcctgattcagtggtgcttcttttgggtggaagcatctcaataggagatacggatggtcacttgagaatgtcaggaggatatttggagttttttatgaaacctgctgttgctaacatgtaccagagtataaggaaagaacttgacaaccttattcggagtaaactacagtttccgctg

SEQ ID NO: 27812 - DNA, 420 bp, Glycine max
ctcgagccgcttttcaaatattgcatattgcttgtggctaatcaaacacttttccatgacctttgctgcttttgattttgatcacaacaacacaacgccaacgccgttctctgcttttgaaaatcagatattatgaagtcaccttctcgagctttttctggtgctgatacaaagagtagaaaatcatgtctttatgccatcttcccagcagcttctttaatttgtgctgttttatttttcatgacctcgtccttcacacacgagccgaaactaccaggcttgaaaatggatacacagtggacgcagatcagaatgtaatagtggacacagtaattgataaatgcaagaaccagtgcaggcctaatggaagtgaagcattacctgcaggcatagtctccaccacttccagtttggaattgc

SEQ ID NO: 27813 - DNA, 372 bp, Glycine max
gctgtctaccttctcttccattcgggtgacacagtactgagatgcttactgggtaacactttattaagctcttaaaagaagggtggtaagaaaattaatttcacgaagatttgtatagttctagaaatctctgagggtaggattacaaagaaagggaagaaaaaaaaatcctcaacattaaagaatcttcatgcaggtcatggcctctagaattctttcaactctacattatgtgtgttcttcttctgcctcagccacaaaacgatgtttaggcctatatagtcattggcagagaagtataagtggaattgctgcgtctgttgttgctgatgtggagcctagcatagcaccagtgcaaattgatcaaagtca

SEQ ID NO: 27814 - DNA, 356 bp, Glycine max
tgataggcttgatgaaagtgaattactgaagacattaaggagaggcatgtccaattcagtgactgtggaaaaaactgtaggtggtctttctgctttaagaaatttgggaaaatcaacaaaagacaatactattggaactgctagtaatccaattcatatggtggctagagaaggtgggaatataaaagatcagctatggcgtacatttaggttcattgtggtgtcctttttcatgatttctggtgtaggagcactcattgaagataaaggaattagtaaaggacttggtataaatgaagaagtgcaacctagcatggaatcaagtacaaaatttagtgatgtacaaggtgtcgatg

SEQ ID NO: 27815 - DNA, 388 bp, Glycine max
aaaaaaagttagtgagaggagaaagaagaaaagataagaacgaattatatgaggaagcataaaccctagttcgaaaatatcgcgataaatcgaaaaagttattcaaatctgcgatctccgtttatctctccgtcgggattgaccaatctctcactccccgttttcatatacttatattatccggtggctacgttactgcatcctaaatggttcgagaaaaagatgtctgttgggaatatgctgagaaattagatggaaacaaggtaaggtgtaaattttgccaaagagttctgaatggtggcataagtaggttgaagcatcatttatctcgattcccaagtaaaggggtaaatccttgtagcaaggtcagagatgatgttacagatag

SEQ ID NO: 27816 - DNA, 420 bp, Glycine max
gacaatttcagagaacactgttttgctctcttgcaactatcagctcttccacgtatttcgccttcagcaatagactacatgcaaagccaaagcacacttctggaagactttcttggacaatctttaatgctggaatatggaaatggatctgctgaaaattctgggattggggatgttagtagtcaggaggaactgaaattgtattatcaggctcaaaagcttataagtttatgcggttggaaactacgtcctctaccttatgtagttgattggaaggatatgtcagatcagtctcttaataatacaactaatctagttgtccattctgctggaaccaatgaacatttgaaaacagatgaaagttccaaggattctatcggggaacaaatggatcccaattctgcagtattagattgctcc

SEQ ID NO: 27817 - DNA, 290 bp, Glycine max
aaagaacaagcagaactggctcgtgcaaacttttcaactttgaggaaagaagctcagagcattttgaatctggtcgtaaaagatgcaacccatggtagtgaacctggaaagacaatatcactttatgttcttgatgcattgattaatatagatcatgagcgctttttcttgagccaacttcaaagcaggggttttttaaggtcttgctttacagccataagcaatgtttgcaatcaggatggtagtctttcactggactcattgcagagggcatgcacttttgaggctga

SEQ ID NO: 27818 - DNA, 424 bp, Glycine max
tcttgacaaaagatcaagatatacgtctaggtgactttggtcttgctaaaatgttgtcatctgatgatcttgcttcctcggttgttggcactccaagttatatgtgcccagagcttcttgctgatataccctatggctctaagtcagatatctggtctttgggatgttgtatctatgaaatggctgcttacaagccagcttttaaagcttttgacatacaatcattgcttataaaaataaacaagtgtatagtatctcccatgccaactatgtattctgctgcttttcgagggcttgtcaaaagtatgttgcggaaaaatcctgagttgaggccaactgctgcagaattacttaatcatccacatcttcagccttacattcataaaattcaactaaaattaaatagccccagaagaagtacttt

SEQ ID NO: 27819 - DNA, 943 bp, Glycine max
cctacgtttccggtttcatctgttgttgttttctttcaacaaaaaaaagatcctcaccaaaaagcacaaacaaacaatttctttcattctcatcttccctttctttttttccaattggtagtgcaagtcaagtccatttcaccacccttcaacactaccacaacaattctgggtattatcccccccacattctgcatccgtccaatctttcagtcgcaaaattttcagtgtttcccactctcccttaaatcattcccacccttctcacactcatggatctgtctgtccagtaacccacacagaaaaaaccctgaagaaaaacaaaaccatatcatacatttcatttacagagaaaaaaaaatgtcatcggcagaaaaacccagctccaaaggacaagcatggttctgcacaacgggattgcccagcgacattgtggtggaagttgatgacatgacattccatctccacaagtttcctctcatgtcaaaaagccgaaagctccaccttctaattacgcagcaagaggcggcgactcattcctctgcagcacagcagcagcaagaaaacgaagatgaagacgaaatcgtggaagagcagtgtcacgtgaccttcacgggcttccccggtggctccgaggcgttcgagatggccgcaaaattctgttacggcgtcaagatcgacctgacgccgtccaatgtggcggcgctccggtgcgctggggagtttctcgaaatgaccgaggattactccgaggacaacctcgtttccaagacggagggctttctatcgcagcacgtgctcaagagcctcaaggactctgtcaagacgctaaaatcgtgtgactccttgatgcctatggcggaaaatctcggaatcacgcagaggtgcgttgattccgtggtttccagaacttcgtcttcggatcctgcattgttcggttggc

SEQ ID NO: 27820 - DNA, 429 bp, Glycine max
cgttcgcgtgggtttacagagaaaaaaatgtcatcagcagaaaaacccagctccaaaggacaagcatggttctgcacaacaggattgcccagtgacattgtggtggaagttgatgacatgacattccatctccacaagtttcctctgatgtcaaaaagccgaaagctccaccttctaattacgcagcaagaggcagcgtctaactccactgtcccacagcagcagcagcagcagcagcagcaagaaacagaagatgaagacgaaatcgtcgaagagcagtgtcacgtgaccttcacgggcttcccctggtggctccgaggcgttcgagatggccgcaaaattctgttacggcgtcaagatcgacctgacgccgtccaatgtggcggcgctccggtgcgctggggagtttctcgacatgaccgaggatta

SEQ ID NO: 27821 - DNA, 349 bp, Glycine max
cggactcgtgggttcagttcttaattgtttcaacctcttcttacttacatgacaagaaaaataatgggtactctcacctcaaacataaaccttagcccacaatacaatgttcccaaagactatccaccccatggttctgtagttgaggaaatacaagggcttattagagtacacaaacatggatacgtggaacgaccacaagttgttccatgtgtcactgctagtagtaaaatgagtccagaactaaatgtgacatcaagagacatggccattgacagtgccacaaacacatgggcacgtttttatgtttcaatttcccaacacaaaaaaatgccttttctcgtttatt

SEQ ID NO: 27822 - DNA, 420 bp, Glycine max
tgtccctccgcaagaggctgagaaatcttgggcacaatctcaaggacaaagcctcggtgatcgcagcatcactctctctcaagcgccacgtgtcctccgtccgcatccatgtcctccacgccaccacccaccgcctctctgctccgccatccacgtcgcaaatcgccgccgttctctccgccggaaaaggctcctatctcctgtcacgcacctgcatagacaccatcatggaccgcctccacagaacccgaagcgccacggtggcactcaaatgcctcttcactcttcacaacatcgtatccgagagaaagggacccttaacgttgaaggacaacctctcccactacccttcgaacggaggacgcaacgcccttaacgtttccaccttccgcgacgacacggacgttgaaaccatggagc

SEQ ID NO: 27823 - DNA, 464 bp, Glycine max
tagagaagcagcggtgaagaaagaggaataccaagtgttggaagaactcgggcgaggccgtttcggcaccgtgttccgctgcttccaccgcacttcaaacaaattctacgcggctaaactcatcgagaagcgcagactcctaaacgaggacaggcgctgcatcgaaatggaggccaaggccatgagcttcctctctccacacccaaacatcctccaaatcatggacgccttccgaggacgccgactcctgctccatagtcctggagctctgccagccacacaccctcttggaccgcatcgccgcccaaggccccttgacggagccccacgccgccagcctcctcaaacagcttctggaggccgtggcgcactgccacgcccagggactcgcgcacagggacatcaagccggaaaacatcctgttcgatgaagggaacaagcttaagctctcagacttcgggtcc

SEQ ID NO: 27824 - DNA, 435 bp, Glycine max
ttgttgcttgggcgggtgtgtcccctttctcccattcttcacatcggtagaatgccggcttggtggaatagaaagtggagcaagagcaaggaggaggatgaggaggatgagccacgtgccggttttcacttgaattttatgaaatctccggtttctgttacatcgtctaagagcaagagtaagaccacgacgccgacgccgatgaagaagaagaagaagcccaagagcttcgacgagaaggtggagggtgttcccttgcctcgtccggcgcatagtcacgccgatcctcttggatctgtttcggtgtcggggggttccagcgtcagctcctccacctccttcgacgatcatccaatttcgtgtcccaacaccaaccccaaccccaacagaggacatgatgaggttagggtcaatgtaaggtcaaaaagtccgggt

SEQ ID NO: 27825 - DNA, 618 bp, Glycine max
tctatgcttacgtgcaaaccatttttccttccatttaattttttggctgggagattgaaagtgaaatgaagtatgatgaggaacaacattaaacaaggtttatcttttgtcataattttcctttccatcattctttcactcgcttgtcccctctatattcaaggttcttgttcgagaaaatcattttttctttatcctttctgaatgaaagattgaacagttattgaaatgaatcgatatcccgactttgttcatctttttactccgcattgaaaataagcactcagttctttgggtgtaagttagcttgttttcctagtttctacatgtttttgttttttttttattagtggagatgttatgtttaactttgttggcaactaatctagacatgtcataccatattatatttgcttgaggggttggcgtgccagacacaaaggtctttgctaccaaactagcttgaatatgtatgttcataacttctgtcatctgcatccactaatggagcttgggtctttccattcacttctaaggcaaagaaatggccacacttggtgggagggttggctctcactatatacaagtgtaccctggtttggagtgaatgtcagagag

SEQ ID NO: 27826 - DNA, 407 bp, Glycine max
gtacactgttcctatggctaccaccgaaggttgcttggtcgctagcaccaacagaggctgcaaggcaattcacgtctccgggggagcttcctccatgctcctccgtgacgccatgaccagagcccccgtggttaggttcaactccgccaaacgtgcttctcagcttaagttctacctggaagaccctctcaatttcgattcccttgccgtcgttttcaacaagtcaagcaggtttgcgagattgcaagatattaaggcagcaatagcagggaagaatttgtacattagattcagctgcactacaggggatgccatggggatgaacatggtttccaaaggagtccaaaacgtgcttacttttctccaaagtgattttccagatatggatgttattgggatatctggga

SEQ ID NO: 27827 - DNA, 263 bp, Glycine max
atcgtcatcatctcacaagggatacaatacaataccaagaagctacctagctacaagagactccactcatcaccacctcaagcaactaattaactagcatagggtgttttggattatagattgtacttggaagaagatggaaaacactactgtgacatatcgaactgatctcaacctcaaggcaacagagcttagactggggcttccaggaacagaagatagtgaggagaaaacactgtcagcaggtgctagaattaacaaca

SEQ ID NO: 27828 - DNA, 290 bp, Glycine max
cgacgtcgtggtggagatgttcttctggaggggaagcagtaaccagcttcaatctactccttcttgtgggaagacttgtcttcttttccaatttgtattcaatgtagcactacactccaataacaacgtcatcttcatttgctaccgccttaggttggattccaaacccccttttctttctcaggtacgtgaatgatgatcaagacattcgcaagtactttgctgccttccacctgtgtgatgcattgcctgcagctgttcttattgatgatttcggagatttctttgac

SEQ ID NO: 27829 - DNA, 255 bp, Glycine max
aattaatgtactttaatttttcattttcttttaggatatttagaccacccttgttccacgcaaaccagggtgggtcagtgtttgtgtgtgtgttaaaatgataactaacatgtgaataaaatactccatttgaaactcttcggttatttgatatggctttgaataatgtttaaatgtcattgtgtaatgctattcaattagctttattactttctcaaatagttgaatatgttctatcacttaaaaacttaaaaa

SEQ ID NO: 27830 - DNA, 513 bp, Glycine max
tcggctcgacctgttagtagcagcaatggcgaagggtgaagacgctttgattcgaaagaagaataaaaagcttcgaaagaagaacagcagcggctcttcctctgtctccgccaaggttgccgccgttatcgccgccaagaagcgccgcaaggccggtaaacgccgcatgtgccaggggatgtgctttagtctacctactctggatgatcccttcaatgatcgaggtgggaaagaggaaaccaaaacaaagggtcctaaaaagaaatcccattcaaaaccaaaagacaagatggatcatcttaatgggaagagtgcagatggaaagaaaggcgcagttggtgggaggaaaattgcaagggaattgaatgatttacaaagggaaaatgagtctgtcacagccagcaataatcttactcataaatgtatcattaactcagaaaggaaaaatattgatatgactgagatggctcatctttgcggtaccaaacagcgtgattgtgacatttcagagtt

SEQ ID NO: 27831 - DNA, 821 bp, Glycine max
aagaaatctgaattgtcggtcttagttgatcgggccactggaggaggcagtatcaaagatggtcaggtggaacttatgcttcataggcgcatgctctttgatgatggcagaggagtagacgaacgtcttgatgaactagtgtgccaaaatgatagatgtcaaggactaacagtaagaggaaattattatgtgggcatccacaaacttggagctggttcacactggcgccgtacaactggtcaggaagtttattcaccactattattggcttttgcacatgaggacttaggaaactggaaggcctttcatgtgaccagaggaactgtcattgatcctaattacaacttacctcccaatgttgctctgataactcttgaggtgttggataatggaatggtgcttctccgtttggcacatctatatgaggctggtgaagatgctcagctttcaactttgaccaaagttgaattgaagaaaatgtttgccacaaaaatgataaggggattgattgaggttagtttatcagcaaatcaagagaaggaaaaaatgaagaagaaaacatggaacgttgcaggggacaagggacaagggtctaaatcagttaggggtggccctgtcagccatattaatctcgtagttgagcttggtcccatggaaatacgttctttcctgttgaaattctaaaaaatacaatagcccatttgaagatttcgtaataagaaatcaagtaatctagcatgtgtctcttttaattgcaatattccatatcttactgtagaatcatgttagacagttaattatgcaaagtgtcccttaatatc

SEQ ID NO: 27832 - DNA, 423 bp, Glycine max
caaaacttcatcaacgtgttctgtgttcttttgtttgttagttggtcactatgactgttttgtcgtatttctattctaattgtttcatgataagcttgattaattctgcaatgatcttttccccccaaatttgaactatagttaggttggcacttgacatagttttttattttattttatgtcacatgacagagttcagtccaacagcacaaattctttgaaatgggaacttgactttctttggcacattccatgcgtatatgatcataagggtatcgacaaattaagcgatcggggcgtttgttctaggaagagagatcagcatgttgttgaagatgatttacacagaggagtctcggggaggtattgtagaagtggcagcacaaaatggttgagggccagaagtttgcgtgctaagcccaa

SEQ ID NO: 27833 - DNA, 512 bp, Glycine max
catcttcttcactttcttttccccctttcggtttcgcacctcaaacccgacatcaatcttcatcccgttcctgttccccttcctctctgtttctccattcccactcgtggagttactctccttacttttcttttctctcccgtcgcttccacagcaaccacgaccctgaattttaggctttgggattgagattctttcttcttctttttttgattttttttaacttctgtgagggagaaaggggagaatgtcgaagaagaaagttagcggcaacaccatgacgctgaaggacttccatggcggttctattccctctgatctccctctaccttctgctcccggcgtgactgtgaggacttcagatcgtgctggttttgatcggccgtcggcgtgggggacgccgatgggccggtcggatcattggtctcggccgcacacgtcgcccgcgtctaggcattatgatgacaaaaccccgtttctgtctaacactgccccaattggcaggaattttg

SEQ ID NO: 27834 - DNA, 456 bp, Glycine max
tgaatgatcaatcatccgaggatattttaagaactgaacttaaagcagaatgtttggtgacaagtttattaagagagaagctgtactctaaagagctccaagttgagcagatggaagctgaacttgctacagcagtaagaggaaacgacatacttagatctgaggtgcaaaatgcgttagataacctttcaagtgtaacccacaagttggaggaccttgtacgtcagatgttgaagaaagatgagagtagaaactgccttcaaaatgatctgcaagagtctaacagggaattgactatcatgaggggaaaactgcccaaagtgacagaggagagagactatatgtgggagcaagtgaagcaatacagcgagcagaatatgctgttgaatgcagaggtcaatgtattgaagaagaagatagagacacttgaagaaaacaacctcgagaaggaaggtc

SEQ ID NO: 27835 - DNA, 471 bp, Glycine max
ctttaatatacaaaatttggagtctcagggtcttccagacaggactggaagtttatttgtgatgaagaaaatttccaagagcagctgcaagtcagcatcacacaggctctttaaggacaaggcaaggaaccatgttgatgtcctgcaggtgatgttcttggatctgcagtttgcccgaaaggagagccgtactatcgatgctgcacttctcgaggagcaagtccatcagatgcttcgcgagtggaaggccgagcttaacgagacatctcctgcttcctctttgcagcaaggtggtagtcttggttcattctcaaccgatgtctataggctattgcagctctgcgaggaggaagatgatgccactagtccattagttgcacctaagtctgaacctaatgatcagattatgcaggctggggctaaggtgatagtccaagaggtgtgtgccctttttatttgggggattattca

SEQ ID NO: 27836 - DNA, 299 bp, Glycine max
ctcaaagttttcttctttcaaaacatttctcaaaccatccaacttcaattcaacaaccaccccttgcaaatttggctcaaagggggttcttttctctttctctgtcaccgctttccttcgtcgtaagtcaccgcgtgcgcttcgcatcacccgcttctctctgcaaatgtacatgtactgctttggcacccttttgtttggtttttcaggaacaggctttagtgtgcaattcagcttgagcatgcggagtcataactgttgcacatgacattcagacattgatatacacgttttgacat

SEQ ID NO: 27837 - DNA, 325 bp, Glycine max
cgtggacatggcaaggggggagagccgtttggcccaacctatacatccggagacgtagttggtgccggaattaactatgctgcccaggaattttttttcactaagaatggccatgttgtcggctctgtttacaaagacatgaaaggccccctttttccaaccgttgctgttcacagccaaaacgaagaggtgcatgtcaactttgggcagaaaccatttacttttgacctaaaggaatttgaagcacaagaaagaatgaagcagcaactgaaaatagaagaaatttctgtgccaccaaatgtcagttatggaattgtccgctcct

SEQ ID NO: 27838 - DNA, 293 bp, Glycine max
taagaagagggtttctgctacaatgtatgttgcaagggacccagggaaaaattctactatcaaagacaaatctactttggttcctaagcaaggtgatcagcatcttccagataaagcttcaaacatggcttcttcagatgcaaatctaacccttgatgagaatggagtttctggaaatcatgatgctgggaagaaaaaagtactgcttcttaaagggaaggaaagagaaataattactgtatctgatttagatagcaggtcgcagcatcacaatgtaacatcttcagctaaaa

SEQ ID NO: 27839 - DNA, 318 bp, Glycine max
ttaagacttccctttcataatctctcagatatctttctgccttctgtgccttattctttggttcattttgtttagtttttccctccatctaaacaacccacacagttcgttctgtgacacgtcacatagctatttcaacaagccatggaaatcaaggcaaagaacaacaacaagaaggtagggagtgaattgggttgtggtctcatggggagaattctccacctcaaaagccataagatgagaaaagcatctgttcattccctaccctttaagaatgcacagagtgatgatgatgtcaaagtgaagatcaaaggtttc

SEQ ID NO: 27840 - DNA, 421 bp, Glycine max
gcagtaatgatcggtgttatacttcatgccgggaatcaccttgcttggggggttcctagacttgtaaatgcgtctgaaaaagattatgagacgtatttggatggcgtatttggtgatcataaacccagttacggagacctcattaaaggggttgagggtgtgacaggaattctgatggtgattttgatggcaatagcatttactcttgcaacaaaatggttcaggagaaatctcgttaagcttcctaaaccgtttaataggctcactggtttcaatgcgttctggtattctcaccatctatttgtgattgtgtatgtcctgctcactattcatggtgtatatctttacctcgagcgcagatggcaccttcaaacggtatgcagtatcatattccaattatttaggattaggagcattatca

SEQ ID NO: 27841 - DNA, 658 bp, Glycine max
atttctttatatgacctgtgtccgagagtccatttgatatttcattactgataacgaaggtagcaacaaaatattacagttcatagcaaagcatagtgtacgtgttgttattgttgctgaagggcgatggagagttatttaaatgagaattttgaagtgaagtccaaaaattcccccgaagaggttcttcaacgatggaggagactatgcgggatcgtcaagaaccccagaagacgctttcgtttcactgcaaatctctccaagaggggcgaagctgctgctatgcgtcgtaccattcaggagaagttgaggattgcaattttggtttccaaagcagcacttcaatttatccaaagcgtgcaactaagcgattacaaactgccagaggaagttaaagatgcaggttttcaaatctgcggcgatgaattagggtctattgttgaagtccatgatgtaaagaagttcagacatcatggtggggttgatggcattgcagagaagctttctacatcaaccactgagggtcttaacagtgatactgagttactgaataggagacagcagatatatggaatcaacaaatttactgaaagtgcagctacaagtttctgggtttttgtttgggaagctttcaagacatgactctgatgatacttgg

SEQ ID NO: 27842 - DNA, 551 bp, Glycine max
gtcgtcgctgactcgctcactgccactcactcactcactcacgcgccacgccgaacgagtcactgactcagattgatccctcacaccctccctgactcactcgccgccgtggccaaccacaaaccacttcaaatggactcctcctccgacgaggaagacgaccaccgcaacctcgtcgacaacaaccaccgcaagccgccgtcctcccccgctgccgtcgctttccacgttgaggatccctccccgcgcttccgccgcgcgaatttcacgctccagaagaagtacattttcgcaatcctcgctatcctcttcctcctcctcttcttctcaatcaccgatctccacaaactcttctcaacaacctcttccttcagattcgattccctcaccgatcgaatgaaggaatccgaattgcgcgccatcaacctcttaaatcaacagcagcaagcgctcttaactgcgtggaaccacacgctccgaaccaacgcttcggatccgaacctattagaggatctgaaatcttctatcttcaagcagatttccctcaaccg

SEQ ID NO: 27843 - DNA, 402 bp, Glycine max
ggttagaccatctattacaatttctgatcatacgggaattctttttaccacaagaaagcatcccaaaacaaaggatctaacgccagaagatttctggatcagtgtaccaaagaaaggaattgtggtttttgccctaccaggagagcctggtctagcagagttggtaggagacttcaaaattcagtttcaagatcgacagggagatttctactggtgggtgaagaccacctatttcgtttggccaccctttttttctgcttttcactcacttaccagaatcattatgattgtattgtggcttatatagtgattttattggaatcttttttatatgaaggcctaaatgtctatcatgacgaatagttgcattccctattccactattattagagatttgttatc

SEQ ID NO: 27844 - DNA, 360 bp, Glycine max
attcatcttcctttcatttttcaataacgagagagagagagagaaacgtagttcagttcaattcaattcaccactgtcattcccaaatccgatcgcaacttcaattcttcttcatgtttctctcttctctctctctgacaacaattattttgtggtgacaaactcactcaccggagtagcttcttcgcgtttcgttccgtctcccgaatccgttcgatttccttttgagggtttgaccgcgccgagccggatgtcgtttaaccccggaatcggaagctcttcatccatcatcgttttcagatcctgcttcaccaaccgcgccaggcttcgctgtcccgctaagatagctttcgccactgg

SEQ ID NO: 27845 - DNA, 489 bp, Glycine max
accgccttcaccagttttttcattcaaatcctcataacacaacatgttcatgtctctcttcagtcacttcgacatcgcgcatggacagaagtggagattttcctttccctccaccgagtcgaaaaccaccagaaaagattcgaatggatcatcacccgtaggacccaagcaaaacccgcccaggtttgcgccggagttggatggcttgcactgctttgaatccatcgtaccctgttagatggattcctttcgtctttgatcctaatcacatcataggcaattcgattcaatttatttgttctgtacgcgatagagctagttgtgtttccctgtaactcgaaatttgaaatagtaatactcttcttgtaattgcatttcttttatactagcaaatagcaagcagtctcgatctatcaccgtgtttaaaagatcgtttagcttaaggtcaaataaatatttacaattaactatatcaaaatttaaaacaaa

SEQ ID NO: 27846 - DNA, 370 bp, Glycine max
gcagacagataaaggaatcctgcatcaatggatttctcgcttcgacatttacccctatcttgagaggtttactcaggatgcaacagccaagattcttgagttcatggaagggaaaccagatctagttattggaaattacactgatggaaatttggtagcatcactaatggctagaaaacttgggataactcagggaactatagcacatgctttagagaagaccaagtatgaagactcagatgtcaagtggaaagagttggaccccaagtaccacttctcgtgtcaattcatggcggatacagtggcaatgaatgcatctgatttcatcataaccagcacataccacgaatgtcgtggaagcaaagataga

SEQ ID NO: 27847 - DNA, 264 bp, Glycine max
ctcgagcgcgcatttctagagggagaaaaaaagaaagaaccgattttagagagagaaacagcggagggcgcatgcgcgatggttcacatcgcgaggaggaagaagggacggccgtcgaaggcggatctggcgcgccgctccggcgagtctcaatccgatccacggcggagcgtccggcgccggagcgtgaggtacaacatcattgactacgacggagattatcttgacgacgacgaggaggacgagaggaggcgcaagaagaag

SEQ ID NO: 27848 - DNA, 491 bp, Glycine max
cgcgaaattctgttacggcgtcaacttcgagataacggtccacaacgtcgccgttttgcgatgcgccgcggagttcctccagatgacggatcagtactgcgagaacaaccttgcaggccggacagaggagtttctcacgcaggtcgcgttcttcacgcttaccggcgccgtcacggtgctcaagtcctgccgccatctcctcccctatgctgacgatatcaacgtcgtgaaacgctgcgtcgaagccgtcagcgccaaggcctgcagcgaggccaatttccccagccgctcgccgccgaactggtggacggaggagctcgccgtcctcgacatcgatttcttcggcaacgtcatcgtcgccatgaagcagcgaggcgcgaagcctctcaccgtcgccgctgcgatcatcacctacactgagcgcgctctacgtgatctcgtccgcgaccacaccggcaacggaatccggtacacagatcccggcgattccg

SEQ ID NO: 27849 - DNA, 517 bp, Glycine max
cgtcacgcatatatttgattggtaggttgcggaaagcagtaaaatgggctactttgttttcacaattgtgtgcggtcaaagctgattctagaacatccttggaagctgaggcttatgaatcctatatgaaagggagtttgttgtttgagcaagatcagaattgggacgtggctttaaagaacttcaaaagtgctagggctgtatatgaggaattggggaaatatggagatctggataaccaagttttgtgtcgtgagcgagttgaggaactagaacctagtatccggtactgccttcacaaaattggccagtcagatttacaggcctctgaacttttgcaaatcagtgatgtggaaggtcccgcattagacctttttaaagctaaattagaggctgccatggctgaggcaagatctcaacaagctgcttccatgacagaattcctttggcttggccacagatttccaatatcaaatgccaaaacaagggtttccatcctgaaagctcaagagctgga

SEQ ID NO: 27850 - DNA, 722 bp, Glycine max
cgtttcacaaaacaaagagactctcactgaatcactctcactcactctgcatgctgtgtgcgtgactctgtcattgtgttttgtgttttaagcactttgcagtttagtttctgaggagcgtttctcttttttcctttcttatgagtgtgtgtctgttcttagttgctgttattgttgttcaagtttcggttactactactactaccacatgtccatgccccttcaatttctgttcaactttgtgactttttgtttggtttctaaggaaaaagattgcaacttgtttctgggtctagtttgcttttggttgggtttgttagtcaccgctggcaactcggaatagtggggttttttttggagggtgttttttttttcttcttttggaggttcaaattcttgttctgattcgtgtgaaggtggaaaatttatgggtgctgagaggaggaaaaagatgggatttggtggaataaatgtaaaactattcggcgacaacatgtctgcttgcttttttgggacggctttcttgtgaagattttgggtttaaaaggttgaggaagatgcttatgccttatgcttatgcttgcaactttttttttttaaaacccattttagcatcaagtataaaagtttcttcttggtcttgtttccaagtgtttgaggtgatgggggttttgagcatgtgagtgattcatgcctcattttggagcttctgagattggttt

SEQ ID NO: 27851 - DNA, 295 bp, Glycine max
ccaagttacaaggaacatcttaacttctctctcaatcctcatcactcccctccctctcccccctcacaactattttcaccaaaagactgtgaaactccctcacttctttagtcatgccacagaactgcatagcaccaaaaccagaattctgcaatagtcataactctgtggaaggtcccccagagatgactgagccacataactcaactgtcctttcctatcccatgcaagccaatgaacaacaacaacaaccgttcccaaaactcattatgtaccccataactctgaagtttga

SEQ ID NO: 27852 - DNA, 410 bp, Glycine max
cgagcacgcggttcggcggaaaaacaatggggtctctaatggcctctgcaacattgactcttgtattggctatagtgtctctaagcttgccaacacaaatcttagctgataactacttgtactcatcacctccaccacccacgaagtacccaccggtgtctcctccataccactatccttcaccacctccaccaccaaaatattactaccactctccaccaccaccttctccttcgccaccaaagaagccatattattatcactctcctcctccaccttcttccactccacctaagaagccatattactaccactcgccaccaccaccttcaccaaagaagaagccatactactatcactctccaccaccacctttacctccttcaccaaagaaaccatattactaccat

SEQ ID NO: 27853 - DNA, 434 bp, Glycine max
cttcattaccctcgtaactcgtaacggcttcataccggacctttccttttctgtttttctctcaacttcaaagttagaatcttttgttcactcactgagccatggatggcgccgagttcgacgccgcgtttgggttcccatctgagtttccctacgagtttgactcggtcgggactgaaccggttgattccggttcgaccgggactgagagtagcgacgatgaggacttcttcgccggcttgactcgccggctgagtcacacctcgctcaatgaaacaaggaaggaacaacacttcactgttcccatcggcaacagtggccaagctgagagtcagaagatgatggctcgtggtttgcccgggtcacctcagtctatactgagtgggatcggaagctggtcgggtcggagtggcggctccggtgacggaagcccc

SEQ ID NO: 27854 - DNA, 476 bp, Glycine max
atagcattgagatggaacttgtgcgaaccttttcatgtttctatcaatataagattggtagagtttaagagacagaggaagaaaagatgagcctgaaatgaaggtttattttttatttttttatgcagcttttcggatcttcaaaatccacaaggagatcttgatgggaaagcatgcgcagctgttgggcagagtagtctcatggctctctatgatctcatgtttagtcagcttgatgttacttcatcccaacttcttgtgaatgatgggttttttagggatacagctttcagaaaacaactttcagacaccgtgagctcgttactagatttaagggttattcccattttcaatgaaaatgatgctgttagtactaggaaggcaccctatgagggcaagaactgtctgcaggattcttctggtatattctgggacaatgacagtttggctggtctattggctctggaacttaaagc

SEQ ID NO: 27855 - DNA, 539 bp, Glycine max
ttgagatggaacttgtgcgaaccttttcatgtttctatcaatataagattggtagagtttaagagacagaggaagaaaagatgagcctgaaatgaaggtttattttttatttttttatgcagcttttcggatcttcaaaatccacacggagatcttgatgggaaagcatgtgcagctgttgggcagagtagtctcatggctctgtatgaactcatgtttagtcagcttgatgttacttcatcccaacttcttgtgaatgatgggttttttagggatacagctttcagaaaacaactttcagacaccgtgagctcgttactagatttaagggttatccccattttcaatgaaaatgatgctgttcgtactaggaaggcaccctatgaggattcttccggtattttctgggacaatgacagtttggctggtctattggcccttgaacttaaagctgacctccttgttttattgagtgatgttgaggggctctatagtggtcctccaagtgaccaaactcaaggttgatccatacatatata

SEQ ID NO: 27856 - DNA, 638 bp, Glycine max
ttctgagcaggttggttcaaattgaggtcaggaatttgaagttgaagttgacgaatttattgaagctgaacagagaaaagtagagggaagagtcacgagacgttcatcattactgaagtcaatgtgtttggtctcattgcataatgcaatgttatttgctaccgatagaaaaggaaggtgaggtttctgtgtctgatatggtttggggaaaggtgagaagccacccatggtggcctggacagatatttgatccctcagattcatctgagaaggcaatgaagcattataaaaaggactgccatttggtagcatattttggggatagaacatttgcatggaatgaagaatcccagctaaaaccttttaggacacatttctcctccattgaaaagcagagcacttcagaatcatttcagaatgctgtagattgtgctgtggatgaagtcacaagacgagccgaatatgggctggcatgttcttgtctacctaacgatacctatgactcaattaaattccagacggtagaacacactgggattcgatcagaactaagtgccagacatggggtggatgaatctctaaatgccagctctttttcacctggtaatcttgtagaatacttgaaaacactgtctgca

SEQ ID NO: 27857 - DNA, 421 bp, Glycine max
aatcatttaaaatggtaaaaaaaaattcagtgtttgagacatccgccggcgcgtgccgggagggagaagcacttttagcataagcgaaagaaagaaatcgtggtgcgtttctcgccggagaggaatgtggttttgctaaccttcctaacttaaccccacacaggcagaggctccttccaacccaagaaaaccactaaacgacgacgctttaaggctattgctgcagctgctacctacatacacatacactttagctgacaaagaaaagtcagtgtagctctgcgattccaaattcgcaaatcgcaaccgatttatgatccatctctccgattccacatagagagagagagagagagagagatgtgggtgttttacctgatctcgctccctctaaccacgggcatggtgcttttcacgctta

SEQ ID NO: 27858 - DNA, 328 bp, Glycine max
gtcacgtcgctcactttctggcttcttcagccttctccgccactgcgcgactcacatcccgctcgctgctgttgctcggtggcagctctgtcaagctcttcaggtcgacgcacgtggccagcacgtgccatggcgcacgcgtcgctgccgccgtgccacgtgcttcggcgcctgaggtggcggtggttgagaaggggagggagaaagtgagggtgctgaagctgggcctcatatgtggcggtccttcggctgagcgtgggatttccctcaattctgcttgatcagttcttgatcacttgcagggggatgatttacacgtgagttgcta

SEQ ID NO: 27859 - DNA, 299 bp, Glycine max
cgatttgtccatcatgatgaatgaaggcgagatctaggttaagcgataaaagtatgaggaatgacaaattaaggatataaaaatggcgatttcgcgcaaaccttgtaaaagttcatataatcctaagtacaaccatttatttattgattgtgttgtgtgtgtgtgcacggtctcaggtcaggttaattacactcacatctacatccactctctctttctctcttcttcttcttcttcctcctctaagacgaataataatggagcagcttcaaacccccaccatcacccataataacacg

SEQ ID NO: 27860 - DNA, 431 bp, Glycine max
tccttctcatgtaatccattcataatttatttttattttaggtcttcataacttacataacatcattattcattttccaacaacttttggcttcatggaaaaccaattctttctcaatgctggtgtgccccctcagctgcattttgagccttcaccacacggtcaccaaccttgtccaccaccctcttggcaatcatcactgtcttctgccatggatgttcaagtcaccgttttgaattgttcaactgagcagacccaggattgcttctacaacaccaccccaacatgggacaagtcaacggatcatggccttcagtttgattcacctctgagttcaatggtgtcctctcctgcagcctccaattccaacatatcaagtgagaattttgtcatcagggaattgataggaaaattgggaaacattggtggtg

SEQ ID NO: 27861 - DNA, 245 bp, Glycine max
gcccaagattttgggctggtggaagaagcttgcttcccctacacaggcactgattctccatgcattatgaaggaagactgctttcgttactactcctctgagtaccactatgtaggaggtttctatggtggctgcaatgaagccctgatgaagcttgagttggtccatcatgggcccatggcagttgcttttgaagtatatgatgacttcctccactacaaaaaggggatctaccaccacactgg

SEQ ID NO: 27862 - DNA, 1111 bp, Glycine max
gtcgacccatacgtccgtgagaatccttcatgagattgaggggtaatgtggaagaacagttctaagtcaaaaatccaaatcaacagcaatcaccagacaccacatttacataacttccccctccaatagaaagtatattcttatcatttgaagacactcctttctgcttctcgaatttaatttaatcagggtggactattccatccactaacttcttgtggctgagattgccacaataatacaacttagactttttgtgagacttggatcttcctcatgatttcccttgggttcctttaccatgatactcacctcttcctttattttcaacaagattgactatggacatctaggaaccaagtctatgacttgtcctgtatttacctgcttaacgatgatatttcaggtgatcggtacttgagaccctggattattccggtgccagagataactttcacagcaagaaccgatgaggatgagtgcttagttttggctagtgatggactctgggatgtaatgaccaatgaagaggttggagaagtagcacgccacattcttagaaggcgccgcagatcattgtcaatggaggaagcatctcctgcacaagttgttgccgacagcttgactgaaattgcattaggtagaaatagtaaagataacatttcaatcatagttgttgatctgaaatcaaagagaaaacgtcagcaaaggcctcctttaatttcctaagaaactgattctcgttaatccttttcaatcttgagaagggcaaagagacggtaatgaagctgtagagttgatctatgaagcaaacccccccctttctgatgaccccattggtacttggtatcacttcagcttgtgtttctcctaaccttctgtacagagttgtttggcaaaaagaatctgcttcatgatagggattgcatgttattaattgttatgatgaagtttagatcagtactcttttttcccccatttggtcctgattcctgaacggttatgtgtggattaaaggaagagatggggaacagaatgaagtcctatcaattattatcgtttgattttttttattgaaggaaatggaataaaacatgatgaactttattcc

SEQ ID NO: 27863 - DNA, 248 bp, Glycine max
atttcaatgcaaagatatccgactttgggttggccaagttgttgttgtttgacccaagtagaacgaatacgatgatccgaggaactcgaggatatgtggctcctgaatggttcaagaatgttgctgtgacggttaaagtggatgtttacagctttggggtgatgttgttggaaaatatttgctgcagaagaagtgtgatgaccatggaacccgaggaagaagagaaggcaatattgacagattgggct

SEQ ID NO: 27864 - DNA, 602 bp, Glycine max
cttgaagagacacaatttctgttgcgagttccataaaacgtttagctcctgatcttgtttttgttgttcagatacaacatccaaggtctcatttgaataggtttgacatggtaattacacctcatcatgattattatcctttgactccagaaggacagaagcaggttcctaagtttcttagaaggtggataactccacgcgaacctccagatagtcatgtggttctgacattgggagccttacatcgaatagattttgcttcacttcgcagtgctgccattacatggcaagatgtgtttgcaaatgttccaaggccattgctcgtggtcaacattggaggcccaacaagaaactgtcggtatggtgtcgaccttgcaaagcagttagcaacatgtttgctcagtgttcttggtagttgtgggagtgtaagaatatccttttcagataggactccacaaaagttatcgaatattatagtcaaagaacttggaaataatccgaaagtttatatttgggatgggcaagaaccaaacccacaaatggggcatctagcttgggccgatgcatttgttgtcacagcagattcagttagcatgataagt

SEQ ID NO: 27865 - DNA, 299 bp, Glycine max
gcaactctctaaaagctccaagactggttcaggaaaatctgttttggagggaagaaaattggtttcctcccaaactaacatctctccggagagaggttagtttgggaggataccattccaacttcagcaagagtcaaatcttttcaaactgatgaagatccttcctttgtggagcttttgtttcaatatggtcgatatcttctaatctcttgttcgcgtcctggaacccaggtggcaaacctacaaggtatctggaacaaagatgttgagcctgcatgggatggtgctcctcacttgaa

SEQ ID NO: 27866 - DNA, 377 bp, Glycine max
ctatcctggagtgtgtttattgtctggcttgcgctcgttgggtttggaagaagtgtttgtacactgcaggctatgagagtgaaaattggggcctggctactgcacaagaatttgagcctgtgcctcggatctgtcggctaatcttagccgtctacgaagatgatattcgtaaccctcaatgggctccccaaggaggttatggcattaatccagattgggttatcttgcgtaaagactacgacgataaccaaggtcgcgttactccatacatgatataccttgatcatgatcatgctgaaatcatactggctgttagtggactcaatttggggaaggaaagtgattatatggttttgcttgataacaagctgggacag

SEQ ID NO: 27867 - DNA, 258 bp, Glycine max
gtgggcacttatctgaattgagcggggaaatggaaaaagaggaggaggagcagcgcgagtggaggctatacgaaggctacaatgagctccacgcgctggcccaggacttgcacacgcccttcgacgcccccgccgtcttggtcgtcggccaccagaccgacggcaagagcgccctagtcgaggccctgatgggcttccagttcaaccacgtcggcggcggcaccaaaacccgccgccccatcaccctccacacgacat

SEQ ID NO: 27868 - DNA, 419 bp, Glycine max
aatgcacacaaacgcaagttggatgatggtggaacaacatatgacaggcccatctaaacatgcaacaggcagacagtgctgaaagaactgtaactgactttgataataatgaagtcatgggtagtcaacagtattcagctcacccttttaagcgtgcccgtgatactaatgtattggaaacatcccagtttccattaagaaattcttctgatgtacctagccattcactggatattcaaatagagccagatgcaaacaccactaaccagttaaacccaggaagggatcatgctatcggcatcctgtctacaagagattctgcccatgcgtcttctattattgcagtgaatacggtttatcaaggttcagatgatgaatcaatggaaagtgttgaaaattttcctgttgatgttaataat

SEQ ID NO: 27869 - DNA, 261 bp, Glycine max
catgaaatgcgactgaagggtctctgcgttcccaatgattactgctacaactgcttgttggaggctttgtccaagtccggcgaggttgatttgatagaggccaggttggaggagatgaaggggtttggttgggagtttgataagttcacgctcacccctttgttgcaggcttattgcaatgctcgcaggtttgatgaggctctgagggtttataatgtgatgagggaaaagggttgggttgatggacatgtttgctctatg

SEQ ID NO: 27870 - DNA, 768 bp, Glycine max
ttccccttcttggtggtctcttgagtgtctggtactctgactttttccaggcccagactcaccttgttgctcccttcgaccaataccttcaccgattccctgcctacctccagcagctctccatggagtccaacggaaagaccatcacctctgatggatcttctgccaagtacaccactggccccattctcttcggcgagccttgcaccaacgctcagcactccttcttccagctcgtccaccaaggcaccaagctaatccccaccgacttcatcctcgccgccaagtcccacaaccctgtcagcgacaacctccaccagaagatgcttgcctccaactacttcgcccaggctgaggctctcatggtcggcaagacagacgatcaggtccgtgccgagggtactcccgaggagcttgttcctcacaagcgcttccttggaaaccgacccacgacctccatccttgtcggcggcgccattggtcccgccgagctgggtgccctgatcgtgtactacgagcacctcacctttaccgagggtgctatctgggacatcaacagctttgaccagtggggtgttgagctgggcaaggtcttggccaagaagattctcaaggagcttgatgaggcaggcaatggtgagggacacgatgcttctactggtggactgattggagcgttcaagaagtatggtaactaaaaggaggattgagtgttaatgtgtagcgagtggaacgatgttgataatgattaaggatagcctgtataag

SEQ ID NO: 27871 - DNA, 265 bp, Glycine max
aaatgttccgaagattgcagaaccacagccaggaaactctaagctaatctgacgccaactttcatccaattggaatattattaaatctctttttaagatttcacattttgattcttctcaattttatctgcgattctcgcttggtacctttgttttgtttttaatattttagttttcctggatttttattttttttattttttattgtttttagtctttggtcaattttcactgtctcctgatgatcattttaccatgtggggtg

SEQ ID NO: 27872 - DNA, 340 bp, Glycine max
cccaaagcgcagaacacaacacacaacaataaaagaaacttgtaaacaacaagaacaacggaacatagatacacttaagcatgcaaaggatcaaaacctcagaacgcactttgatcttcccttcccaccctccttttctccaagaccaccccttccctctctcccacctcgacactgatcccaacctccaccttaccttccgctacctccgcgcgtacacctcaacaacaacaacaacctccgctcgaccccttccacgtcatctcctcctccctctcccaggggctcgcccacttctacaccctcaccggcagcctccgccgccaacaaagctcccccc

SEQ ID NO: 27873 - DNA, 315 bp, Glycine max
acggagccttccactgtggaccgagactacgcaaaggtagaacaccatagaaacttcgctgactttctaataaaccttgatttcgctacgctcaataagaacccggaatagcggaaatcggttcgtgttccgcttccaaactcagtcgtctttgcccaagtgtgaactgcggacgactctccagtggttccattccttcttactttacttctgggtcaacccaacccgaatgggaagaagagggtcagccaaacagcggtccactttgtacatttgctgaggcagaccaatcgggcattttagaaaagggaaggg

SEQ ID NO: 27874 - DNA, 304 bp, Glycine max
agtcaatccatttactaaattgtgtgtaaaatatcagcaaatctagccatttgaggtggctttcatgagaaaaagagaaacatgaaggagcatgctgccgatcaagctagaaaaggaagacattctgaaagcccggctaataccaatgttttagggattgttgtattatatctaagttgccttacttgtttatatcataatattaaggcatcccttttgcctctagactttgttttcttaccattgttaattttgctcgttttgtaatgttgtagctttcctcattgttattgcttgaactttt

SEQ ID NO: 27875 - DNA, 390 bp, Glycine max
taaaaatctctccaacccaaaaaaacgtcatcgtggggccaacgacaccgacaagtcaatatcggttcccattttttcatctcactccttcgatttcaaatacagcttcgactcctcattcgcgacccgacccatgtcgggtctctcattcgggtcatcgctaacacactccaacccgacccgaagcattctctccgcaactttcacgggaaacgaatccctcagcctcttatccgcccacttcctcacgccgccgttcacctccgccgcaatcttcgccgtctccaccacgctaatcctccgataacctccgtcgtcgttgaattcgaacttcaacgcctcttccccgctcagcagctccaaaacaaccactccgaaggcgtacacgtc

SEQ ID NO: 27876 - DNA, 312 bp, Glycine max
cccacgcgtccggaattcctctccttcgtcgtcgggggcgcaatcggcgtcggcgggggcttcctcctcttcgtggatccatttgcggtcggttctattcgcttgtcacttcttcctcaccagcctcttgttcgtcctctgatcggggtcgtcttaaatcaccatggtcacgcaggaaaagaaaacatgtccttacacctcagcaatggaaaagcgtgtttacccaggatgggagaatacgggatggtggaattaagttcttgaaaagagttcgcagtggaggtgttgatcctagtatcagagctgaagttt

SEQ ID NO: 27877 - DNA, 250 bp, Glycine max
cttcagtgcaagagcttcaagctcctttggatcaatttacaagcccattcacagctctctataccaaaactggtctttccgcacaatggcaaccgttgccgaccccaagcatgctctcgagacctcaggagagactgagccagtctggattcactctgacccacgctcacgacgcccgcaattccccacgcttaaccatctcctcaagatcgatatctgcgtgatcggcagtggtatttctggtatccag

SEQ ID NO: 27878 - DNA, 411 bp, Glycine max
ctctctcggtcttatttccagagacgaggaaaacaaaaaccgatgactgaaccctaaggggaaaattgccgatgcggcaccgtaataccatttcccaattctagcactgttggctggggcaaattcctcacccaaaacgacacatgtttggggggccattttgatttgaggtgcgttgagacagaaaacattaggccaccatagttctcttctctctcgcaatttccatctggtctcaatttttctcgtgattccatctccattccggtgtaggctcctttgatttgaccatcttctcttccgtcatcatccattgaagagcagcaactaggagctgcaaaccacatacaagcctgattttcgcccctctctaatataaggtttctgaacttttcttccaccatggctaac

SEQ ID NO: 27879 - DNA, 498 bp, Glycine max
atgaatatggagcgctacacgctacccgcaccacccattaatattattctcgaggaagaagaagaagaagagaacattgccattgccatgggtgcccctcttatcccttcctttaaatccatgcttcaacaccaacaacaacaacctgactcttacttcaacttcaactttaactcttcaattagttctgctaccataccctttgttcctaacatggaatcttttccttctcttgaccctttctccccttcactttcatcacttcctttcttcaacaacaacagcagcacaaacatggcatttgacccgggttttgacttgggcctggacactactgggcttcactcttctgttcctcctgctccccatcttttttcccagccccagatgggctttgagttctcggaactcgaggccctcactggacctgggaatggaaataatgccccttttggggacggggaaaaggtggctgcggccatgctgctgcggcaactt

SEQ ID NO: 27880 - DNA, 423 bp, Glycine max
ccaaggttttaatcggtgattcgccacccccgcagcctgttgcagccacggtggctgctactactgctgctgctaccaccaccaccactactactattacttctactacgcaggcaaatagtgttatgtcctcttgtttgcagacgcataacctagatttgccagaaaacaatcccccacaagtcattgaggagccacaggctgctactgctactgctataagtgggagctgtggcagcagcagctcctgctcaactagcaatggtggtgctacttgtaatagtaacagtagtagtagtgtgtttgcgagtttgtttgcttcttcaacagcatctgtgaccctacaatctcaaacaccagcattcagtgacttgattagagccatggggcctccggaacaccctgcggatcaaatctcgggtc

SEQ ID NO: 27881 - DNA, 405 bp, Glycine max
tctgtttctgtatcagatgatgccttcttcgattccccagtatgtgactgcacgccttcactgggcccatgccggacccaccgggcctcaagctcaagaaggaagggctcaaggtgaagcaccctgtggtttttgtgcccgggattgtcactggggggcttgaactgtgggagggtcacctgtgtgctgaggggttgttcaggaaacgcttgtggggtggtaccttcggagaagtctataaaagaccttcatgctgggtggatcacatgtcactggacaatgaaacaggattggatccaccaggcataagagttaggcctgtctctggacttgtagctgctgattactttgctgcaggatacttcgtttgggcagtcctaattgctaacttggcacgcattggtt

SEQ ID NO: 27882 - DNA, 607 bp, Glycine max
ctcctctctcccccatggtttggaatcgaatgccgtagaaaacaaaaacaaaccctttcttgtagcatttctaagctatcacagctccagctcctggttccactttcgctcttcacaaaatgaaccgagtgataaagaagaccgtttcaaatatctgtgctctcaaggttccaagaaagtctttttgtagtactgagggtgtgaaagttgctggttgctctattccagaggtttccaatgaccatgagaagaagcaggctattagcaaagttattccacaatatgatattgctattgttggaggaggcatggttggcatggctttatcttgtttcttggcaagtaatccaatgacaaagcagttgagtgttgcaattattgatagcaatccagctcttggaagtagcttgcacatcaagaaggaagatccccctgatccaagagtcagtacagtaactcctgcttctatttcttttctccaagatgctggtgcatggaaatatgttgagcaaaatagacatgcttattttaatacaatgcaggtctgggattatactggtttggggtatgctagatatcatgcaagagatgtaaataaagactttct

SEQ ID NO: 27883 - DNA, 411 bp, Glycine max
ggttgttcaggaggttgttcctgtattttcaggtgcacatgaagggctctgtttgtgttcatctagattactttttcctctgtgggaacttcctgtaatggttgtaaagggaagtttaggcccttcaggcactctatctgaaaatggagtagttgtgtgcagactctctgttggggctatgcaagtccttgaacagaaactccgatctttggagaaattcttaagatctagaaggaaccagaggaggggactttatggctgtgtagcaggtttaggagatctgagtggttccattctgtatggtaatggttcggcattaggagccggggatcgaaacatggtaagaaacttatttggtgcgtattccagaaatatggagtccactggtggcagaacatctaataaacggca

SEQ ID NO: 27884 - DNA, 459 bp, Glycine max
aaacctctgtcttgtacaaaggagaagttacgggtatcggataagtagcctggtttcctcgtcctgaaagaaacaccagcaaaccactctcaacctaagagtgttgcacgtttactgaaagcaatggatttagtggcaccagccgaacaggtttgctcatttcaccacttgcacataaccagagctagggtttctgataactccgtttctcggcctttcgttctatatcctgatagtagcgttagtcatcatttttcaaaattgaaggcaactaggtctagaaagcgtttagaaaatcgcgtttctgctgcttccaagtccgaagcttctggctcgaacgatggatggcatcatgctgacaactccccaaacggggacttgaacgtcatacgcatggcatctttgcccattggggtgaacggttcccggagcttcgaggagtttgcgagtgacattcat

SEQ ID NO: 27885 - DNA, 424 bp, Glycine max
ggaattcagaggttccctgcagccatatatctgctgtggacattggatttatctattgactttataatctaatgtccataccttatatgatttcattaatatataactcttgctgcttcttttttttttaatcatatgattcagtgtttgattatttttatttttgtgacttaggttgtcaatgatccatctggaaaagcgatcaatgcactcgagcagcatattaaaaaccttttgtgtccatccactcccttgttcttcaataccctttatgaccccttcagagaaggtgcagattttgttcgtggataccctttcagtcttcgtgaaggtgtgccaactgctatctcccatggactttggctcaacatcccagactatgatgctccaacacagcttgtgaagcctctcgagagaaacacta

SEQ ID NO: 27886 - DNA, 290 bp, Glycine max
cttctacctttcctccttttgtgttcgtatttcttggtgtccgttcagcgcctgtccctttcccctttttgtgttcgtctagggtttctcaaatttaccaattttcgacacccattgtgtgattcccgctcggtgtccttgtttatctgttcagatgtggtgggtcgtctattttttcattttcattgtgcaatctgtggaagaaagagatcgtggtctgcaatcgcattgtgtgaatagttgtgtcagatctaaagccttttttcaatgattgtttaccggtcatttga

SEQ ID NO: 27887 - DNA, 243 bp, Glycine max
aggaatttgagagtgtgatagaggaagcaaaaacacccatgttaaggttgttatctagtgggtttgggttagcattaatgatgaataagccaattgggttattaggtactgatgctaacgttaagagtccaaaatggtcagagaagttcaacgatgtggtcaattttaaggatgttgatacggtacaacatagtcatccactgccaccgaggccaaggcagcatggtagtattcataaaaagg

SEQ ID NO: 27888 - DNA, 432 bp, Glycine max
gttttaacctacggaccgctgtagtgagacgcttcatcacgcttctgcttctttcatttctctcttagtttccttttcatactcaccgcctcatcaatacatagttttttttttcttttattgagaatccgaaaagtctagagtacaattcaatggtatggatgacaccatggagaagagcaccaccatcttagccattgctgcttcccagaggtactccttgaagatctccttcaattttcttttcgggtttatttcaataaattaaagattaatatctgtgtaaaagatgtgtgatttcaattttgaaattgaaagccatagtataggataggattttcattattactggtgtgcttagttagagtatggtttatttttatttttttggtgggtgtgtgaagaactgaggattatgttatcttgttcata

SEQ ID NO: 27889 - DNA, 255 bp, Glycine max
ctggatttcttaatactagttggtagcacagaatcgattcgaaatcgaaccaaaaaaaatatcacgttcttgtaacaagtcaaagacacaactcaacttgaaccaaaaaataacaaaatgcgttcgatctaaggtctgaactaaaaacatcccatttccactcccaactctgcttcaccatttcttcaattgaatacttctctgaatcactatgatatattcactctctttctgctgcatcccacttttattctg

SEQ ID NO: 27890 - DNA, 830 bp, Glycine max
ctcgagccgtttgtccctgaaggaacgaccatttcgaagcccccagcccatccatcgctagtcttcttccttcctttgttattagggtttccggaatctccaacaccttctccttctccgtcttggatttcaattcatttctgttgatggttcagctgatgaagaattctcggaagcccgaaacggcgtcgtgcggcccccgtgaagttggagatcgttgaggactcactagaagaagagcatgcccccctcaacaagcgctgcaaaccctcagcctcgcctctgcctcagcctcagcaatggaatgcttcggatgatggttctgtcagttctccttcccatctgaacatactcgatgagccgagccccttgggtttgcgcctcaggaagagcccttctctgttggatttgattcagatgaagctttctcaaggaagtgcgcagcagaaagaagatttaagctccgaggccaaaagggagagcaggtgtgccagtgctgctgcggcatcgtctggtgccggtgccgctgacaagctcaaagcttcaaacttcccggcttcgcttctgaggattggttcgtgggagtataaatcaagatacgagggtgacttggtggcaaagtgttactttgctaaacataagcttgtttgggaagttcttgaaggtggtctaaagagtaaaatagaaattcagtggtcagatatcatggcacttaaggcacattgtcctgataatgggcctagcacattgactgttgtgcttgctaggcagcctctttacttcagggagactaatcctcagcctagaaagcatacactatggcaggcaac

SEQ ID NO: 27891 - DNA, 283 bp, Glycine max
attcattgtctttggctgtgcccttttgctcctccttagcttctaatcacttccctattggggtatgcgcaagttgaagctgctgaaagagttgtcagttttttctctctcaaagttgtcattttctttgtgggcattttttttttgctgtgtctcagttcctgtttagtatctgggcgggaagttcattgggtttagatctcatctcacaagtggtttctagggtttttccttttggaccaattaggtactaatcttgaacctcaatttggagcattctctt

SEQ ID NO: 27892 - DNA, 375 bp, Glycine max
gtcggaacaaggtagccgtactggtaggtgcggctggatcacctccttttcagggagagctaatgcttgttgggtagtttagtttgacactgcttcacacccaaaaagaagcgagttatgtctgagtcaaatttggagatggaagtcttctttcgtttctcgatggtgaagtaagactaaactcatgagcttattatcctaggtcggaacaagttgataggagctacttttttcacccccatccatgtcgccacacgggggcgacatggatgggggtgaaaagagggtatagagggatggggttccacttgcttttggcatagcgggccccggcgggatgcacgcacgacgggctattagttcagtggtagagcg

SEQ ID NO: 27893 - DNA, 310 bp, Glycine max
gtcggctgaggctgcgaagaattcttggaaaaatgagcaaagaaatcagtcgtgattagcaaaggggaggtataaattgcatctgtaggttcttcttagatgtggtttaatgctgatgactcaaatggtttccctgaattagggaagaattacagctataaaataattgctccgctcttgctatatgaaaacttactgcaatgcttgtgatcgggtttgctgagcaggcttcctcattgaagacccctagcatggagagatgttctctgctttttacagttttgttatatagatttttcctcttctgatt

SEQ ID NO: 27894 - DNA, 294 bp, Glycine max
gcatattccggtggtggaaggaaagtgacacgtgtggaggtaacacttgatggtggagaaacatggcacgtgtgcacattggaccatactgagttacctaacaaatatggcaagtattggtgctggtgcttctggtctttggaggtggaggtgcttgacctacttggggccaaggagattgcggttcgagcttgggatgaaggtctcaacactcagcctgaacacctcatttggactgttatgggcctgatgaataactgctggttcagagtgaaaaccaatgtgtgcaagccc

SEQ ID NO: 27895 - DNA, 308 bp, Glycine max
ctataacccattccctcccctttctctttctcttctcttcttcttactccctctccctgcataacaacgatgggcaatgccaatgggagagacgatgtgaacggtactccatccggaaccgaaggagaagaagaagaagaagaagaagaagaagaagaagaagaagaagacgacggagaagaaggtggttctgacagtgtcaccgattgcatggcttccaatccttctcaccatccgccctcggagttgatgggtcattctccccctgctagccctagagctacccaatctccattcatgttcacccc

SEQ ID NO: 27896 - DNA, 733 bp, Glycine max
aatggaggggacccggactacgtggcccttctcccttcaggatttgctatactcccagatgggaccactgcacatggaggtggcattggtgacattggacatggtggttctctcttgactgtggcatttcaaatattggttgattcggttccaacggcaaagctttctcttggatcagttgctactgttaacaatctcattgcctgcactgttgagagaattaaggctgctttatctggtgaagttgcttgacctaatggattatagtttagaagaaggataaaggggtgcattgcattttggacaaatgggaggtgttgggaacttcggcttataccaaaaaggatgagaattgagaagtcaagagcgcaccttgcatgatcctttcttagcacccaacacagtgctgaaaggattaaggttcgggaattgacttccctgaaaatcgtaaatgctaagagcttaaatcaagaccttagtaccttctctcttcaccttcaaagactacatatttatagttagtgttagctttttctatgattattaggttggagctgtgacttaacctcttatgttctttcttctaatgtttttttgtattttataagatcaagcgcgctagccttatagctagtaaatgggaagcttgcaccgttagtgtagtggttaagttctcactacactaccatgtttgaccctttttaaggttttcaaatgaatgttccttccaatt

SEQ ID NO: 27897 - DNA, 255 bp, Glycine max
cggctcgagaagagacagaacaacagatgaagcattttgccttggtgtttcttttggccattttggtccctcaggagtgtttccatgtcagtgtggaagcaagggatgattttgtcagaactagaggcatccacttcacgctgaatggatacccttactatgcaaatggcttcaatgcctactggttaatgtacacagcttctgacccatctcagagattcaaggtttcaaatgcctttagagaagcagcaagtc

SEQ ID NO: 27898 - DNA, 533 bp, Glycine max
caaaccctctttgacattttcagcaccgcccccccagttcttattaatcgatttacggacacataggggtttcacttttctctacgcagattaattgagatggaagtctctgggcagaatattgtgaaatgtgatgaagagaaagcattgaagtgcttgcttgatgcctttggctcagttttttctcttgaagagattgcttctgcctattgcaaggcgagccgcaatgcggacttggctggggaaatgttgtatgaaatgaagggaagttcctcaggatcatctacaacccttgattcatctaatgcagatgttatgactgaagggtcttctgagtcatcagatgcatattcccttgagaattctttccaagaaaggaaaacttcaaggcccaaaggtcgcccgatttcaatgggtactgtttctagcgttattgcggaaggattatggtagacctgcccgatcagcaaaatgggccttttgcttcagtaaaaccaactaagttggatgcaaaatcactacccatgactgga

SEQ ID NO: 27899 - DNA, 504 bp, Glycine max
ctctgccacgccctctagtaggccgctagtttttttgaagcaacggcttatgttcttgacagaaactggggcaggttcattggatttaaggggcatgaaaatcagggaatctgaatgtgaaggcttgaaccactctgttgctcgaacttatgtttttgatgccacggagcgttccaaggcttatgggtttacctcagacggggatctgatttatgtcttgttgcttggagatgtgatgaacttcaaatgcagggttagatacaagaaaaagtttgatgtggatgagcctcttgctctgcaggcaattaaggggtatttgctgattgttaacccggagaaggttttcgtgtacaatgtttcatctccgcattatgtgagagttggtgtgcctcgacctgttttctcctcaggtcttgatgagcttagatcatccttcttgaataatccaaccccaagcttggatgcggaaacaagagtgacacccttgatagctagtgaccgcga

SEQ ID NO: 27900 - DNA, 267 bp, Glycine max
accattccctgaaccaccgacggagcgagaaaaactaaccgagacagaaagtgatcgcaatgttgcgacacttgggcgttcacgcgccgcgtttggccttcaacttcaagtcgagtttaattcacggtggcagaggcaaaacattaaccacacgcgcattctcgtcctccgccgccgtatcgccgccgtcgaaggcgatcgtgtacgaggcgcacggggaaccggacacggtgacgaagttggtggaggttccagcggtggaagtga

SEQ ID NO: 27901 - DNA, 352 bp, Glycine max
aaatgtttcatgtttgtcaaacattccgtgtaaaacttcatattctatgcatataaactgtggtggaaatcttgtaactgatggaaagaagacatatgatgatgacacgggtgagactactggaccagcaagctttcataatgaccgtggaaaaaactgggcacttatcaacaatggtcatctctttgataccgaccgcgtaaactactataatgtgactaattcaactaagcttgtaatggagaatgttgaactgtacatgaatgcacgtgtttctcctacctctttgacctattatggattttgtttgggaaatggaaactacacagtaaaactccattttgcagaaata

SEQ ID NO: 27902 - DNA, 375 bp, Glycine max
ggcggtgtggagaatgaagggtttagagggaatggtgtggcgggtgagaaacctaaaaaagttttgattttgatgagtgacactggtggggggcatcgagcttccgctggggctatcaaagctgctttctatcaagaatttggagatgattatcaggttttcgttactgatttgtgggctgatcacacgccttggccattcaaccaacttcccaggagctatagttttctggtgaaacatgggccgttgtggaagatgacctactatggaactgccccacgtgtagtgcatcagtctaattttgctgcaactggaactttcatagctcgcgaggttgccaaaggcctaatgaaatatcagccagatataataatc

SEQ ID NO: 27903 - DNA, 265 bp, Glycine max
ctcacatcccaaagttccctcctttttcactccaaccaccccccacgaaacgaatccatgaggagttcggagtgacccacgtcaccagcttccgaatccaaccccattccgcaaaagggtactttcttcaacgatggttgagaactcgacgctagggcgcttccaccaccaaatgctcgcccttcgctgctgggtccccgcgttcttcacctcgcacaagatcctcttgacctttctatggatcgccgccttcgcctccgttttt

SEQ ID NO: 27904 - DNA, 574 bp, Glycine max
cgcgctcactcctccgcaaattcaaactacaattctctctctttccctctttcttcttctcgcaccaccctctctcactagatccaactccctcaaaccctaacgctccaaaacaaaaaaaaaacccctcgctcttaaatttcatcttccgacactcatcaaacaccatctatacctttgactcaaccacatgaacgaggattgcaattccagaacagcgtcgctgttgttgtcctcatcctcctccccttcgaattccaagatcgtgggagatcagcgtggaagctctcacgcgggtcacggcgctcggaaacgggttaagatgaaagatcttgacgccgttgttctctctgtggaaacgaatagccgttattcgggattcaaaaacgacaaagaaaacactgtgcagtggtcgttgggagctacggatggttctcaacaagcgaaaacgggaaggaaagcgatgtcagaagagtttaattttgcggctaggcctctggatctcaacactgatgtgtgcaaaagtggagggtgtgagaagcaagaaaaaggacatgctaatttagtagtctcg

SEQ ID NO: 27905 - DNA, 248 bp, Glycine max
ccttcacttgcctagtctcgtaggggttagttaccactccgtttcttcacactctctctttcttgatccttccaaatggaaaagaagcagggtttcttctccgctctcaaagacgaggtggtccgcggactctccccctcgcgctctcgctccaccagccccgcccgaaccgtctcccccatcacgggcctcctccgccgcaagaagcgcaccccagcccagctcctccgtcgcgagatccgtcagcc

SEQ ID NO: 27906 - DNA, 251 bp, Glycine max
gaccgattctgcaaaagatataaagaacaaggtaaacaaacatgcattttctggtgggcaagattctatagagaaacataggcaattaggggctaatcttgaggtagatataccagtcaaataccttacttttttcttagaagatgatgatgaacttgaacacataaagaaggaatatggagaaggacgcatgttaactggcgaggtaaagcagcggctagttcaagttttgactgagatagtggagaagc

SEQ ID NO: 27907 - DNA, 271 bp, Glycine max
ttctttcgtccgggtatattggatctcgcactttagaaattagcgaaagagagacgtatgggaatggaagaggagagtagcatcatagaaggtggtgcttcgcttccatcgtcgggttcagacgccaagaagcgaagagtgacctacttctacgagcccaccatcggcgattactactacggtcaggggcacccaatgaagccgcaccgaatccgcgatggcgcacaacctcatcgtccactactccctccaccgccgcatggagatcaac

SEQ ID NO: 27908 - DNA, 368 bp, Glycine max
cggctcgagcggctcgagtaacattttaaagtagataagccttccccgcccactagaaatagagagaaggtaaggagggtttggttttgggtactttacaaattacaataattagcgaaagagagaagacatagcacatagagtcatagagacatcatcatcgtatgggaatggaagaggagagtagcaacaacagcagcatcatagaaggtggtgcttcgctgccatcaacgggttcagacgccaagaagcgaagagtgacgtacttctacgagcccacgatcggcgattactactacggtcaggggcacccaatgaagccgcaccgaatccgcatggcgcactacccatcgtccactactccctcc

SEQ ID NO: 27909 - DNA, 254 bp, Glycine max
ctcgcagttcaaaagttcaaaccccaaatcttcaaaatcctcacagcaaacccaaaataaaacaacaacaacaacatataaaaaccttaacaaaaccaaaaccccaagaggaaaacaccacacttccaatcaaatgttcttcctctctttgcccttctcttcctgcttcagagcttcacaacccaaccacgatcccaccaccctctcaacgaacctcaccacctacatctaccacaccgaatacggcaccgttt

SEQ ID NO: 27910 - DNA, 722 bp, Glycine max
tggttgaagaagccctactctctcgacgcctctttcctctccgacatcgagaacgaccccttcgagaacctgcaagagactcacgatatcttcgtcaaccagatgggtatcaagcccactaggcctgagcttgagcttctccgtcgtcttgccgaactcatcggtactcgcgccgccagacttagtgcgtgtggtgtcgcggctatctgcaagaagaagggctacaagactgcacacgtcggcgccgatggctcggtatttaacaagtacccccacttcaaggcccgtggtgctcaggcactcaaggagattctcgactgggagggtggccgtgacggcaaggcgctcggcaagggccacgacccgatcgagatcctgcccgctgaggacggttccggtgtcggcgcggccctcatcgccgccctcactctcaagcgtgtccaggaaggccaggttgctggtatccgtgaccccgagggtatgctcaagggcaccgctgccgccaagtccagcaccaaccaggtttaaattctcttatgaccctaggacgattggcgatggaacacatgcgatagacggtggcagggtgaaatccttgatgttgaaatgattgcggtccagaaacttgatcaggtagactccgaagttgtcgggtccaaccacctgagtagttagccaaaggctatgaaatgcacaaatgcaaatatgaactccatgactgg

SEQ ID NO: 27911 - DNA, 492 bp, Glycine max
gagaattggctttctcttctctctctctctctctctctctctctccttctgccaaccaacttctgctccctttttctgcaatgggttgtgctggatcttcacaatccaagcctgatggggcagtaaaaaagatccggaaacctaagccttggaagcatcctcagcccataacaaagactcagcttacacaattacgtgatgagttttgggatacagctcctcactatggtggccggaaagagatttgggatgctcttcgagccgctgccgaggctgatctaactttagcacaagcaattgtggatagtgccggggtcattgtccagagttctgatttgacagtatgctatgatgaaagaggagcaaagtatgagctacccaagtacgttttgagcgagccaactaacctgattcgggacacttaataacagagaatataaatagaaagattcatgggcgaaaacattgtaaatcatgtatattggttatctc

SEQ ID NO: 27912 - DNA, 240 bp, Glycine max
ggcagagtggaaggcagagaccaaaaaccactgacggaattgtagacgaaacagaacacagaaagagcgagcaacggccattcgatttcgatgtggcgcagtcgtgagtaacgtgcaataccacgggtaacgcggttttctggctcacctttccgcattttccttcttccctctcgcacccataagtacccctccctaaatcaacgctttcctcacaaaaaacaaaaactcacttctcat

SEQ ID NO: 27913 - DNA, 256 bp, Glycine max
cagacaaccagcgcccttttagctcggcactgcatccgcatctcacctaccgctctcgatccagatccagatcacccctgccttcctcaagctcaatacccatccgtaatatgtcgtccgaggctgcaccggagtccatcgctcgcacgcgtgccgccgcgagcggacagactggcgagtccgtcgagccgaggcagacgctgcccacggaggacatggagcccgacccatccaagagcatcccgttgccgccgaa

SEQ ID NO: 27914 - DNA, 658 bp, Glycine max
gtaacataacaaaaaagtagtggcttgtgttgtgtgactgagggccaaaggcaaaacatggaggtggatcagatgcagagagagtgcttggactacaccaaatccttattcttggagggcttcttggatggtcaatttcttcaacttcagcagctacaggatgagaacaacccggactttgtagttgaagtggtctctctcttctttgaagattctgagagacttctcaatgaccttacctttgctctaaatcagaaaagtattgacttcaaaaaagttgatgctcatgttcaccagctaaagggtagcagctcaagcataggtgctcagagggtaaagaattgttgcatttctttccgcaacttttgtgaggaacagaacatagacgcgtgcctcagttgtctgcaacaagtaaggcaagagtactgccatgttaagaataagtttgagacactgatcaggcttgagcaacagatcgtggcagctggtgggtcaatcccaatgatggaatttagtttctaaggatgtgaatttgtagagaaggaaccaagagtattttgtgatccacttcatctttggtgaaaattctcttttatgtttatgtctctgatgaatgtatggattttcatgaagacctaactcagataagtttccatct

SEQ ID NO: 27915 - DNA, 515 bp, Glycine max
tctcactctctattccaagtctttttttgagccttagcttagctatagctttcccatttccattttcttgagcctttcttagccttgtcactcatccattatcatttataactttttttttcatcaccccacaaacatggcctctaggagggtgtctttgagagttcaagctaaggtggtgaaggatgctcgttccgtcgtagagcacggtggtgtagtgtggtggaagggtatttccgtaaatatgcgtaaaagctgatggtgaatgaaggaaacaacacagcacaaaggctttgcaattgcactctcccgagtttctacctcatcacaatattgtgaagaagaaattgggagagtgttatcattgcatcgcggggaattgagggtagcggtccgaattacctttaaagtttaggtccttaaattttgtattttacttcttcttacgtatttgccaatgattttattttctatgggttatttatttttatgttaatgttatgatggaagaagaa

SEQ ID NO: 27916 - DNA, 440 bp, Glycine max
gtttgtttatggaaaataatccttgcctgctaagggaaattttggagaggatcacattcaagaggattataaagaacagatccacagagaagttctcgggcattccatatgtcatgacactgctcaattgtctcctttcagcttggtatggtttgccttttgtgtctccccacaacatattagtgtcaacagtgaatggcactggatcattcattgaaatcatatacgtgttaatcttcatcgtattggcaccaaggaaggagaaggctaaaattcttggtctcttcaccttcgtgctctcggtgttctctgcagttgttttcgtgtccctttttgctcttcatggcaattccagaaagctcttctgtggcttcgctgcagccatattttccattatcatgtatggctcgccactctcaattatgagactagtgatcaaa

SEQ ID NO: 27917 - DNA, 384 bp, Glycine max
ctcagggatacctgctccgttcgctttttatgccgattccctcgaagacagaaataaaagataacacaagttcaaaggccatggatgttgcacattttttgtttggcatctttgggaatgcttccgctctgttcctattcttggctccagtgatcacattcaagaggattattaagaacagatccacagagaagttctcgggcattccatatgtcatgacactgctcaattgtctcctttcagcttggtatggtttgccttttgtgtctccccacaacatattagtgtcaacagtgaatggcactggatcattgatagaaatcatatacgtgttgatcttcatcgtattggcaccaaggaaggaaaaggctaaaattcttggtc

SEQ ID NO: 27918 - DNA, 374 bp, Glycine max
tttacgcatagtaacaggctttatttgagcactttgggactctcaattctcagggttaccttctctatcagcttctgcagattagctggaagaaataaagaaagaaaaagataacaaaagttgttcaaaggccatggatgttgcacattttttgtttggaatctttgggaatgcttccgctctgttcctcttcttggctccagtgatcacattcaagaggattataaagaacagatccacagagaagttctcgggcattccatatgtcatgacactgctcaattgtctcctttcagcttggtatggaccgccttttgtgtctccccacaacatattattgtcaacagtgaatggcactggaccatccatcgaaa

SEQ ID NO: 27919 - DNA, 246 bp, Glycine max
tggaaaattttcgacgggccattggtctgcgtatcaaggaaaacaaggaagtatacgaaggggaggtcaccgagctctctccagaagaaacgcgagagcgtaacaggtggttatggtaaaagtattagccatgtcatcattggattgaagacagtgaaaggaacaaagcaactcaagttggatcctaccatatatgatgccttgattaaggaaaagatagctgttggcgatgttatatacattgag

SEQ ID NO: 27920 - DNA, 624 bp, Glycine max
gcgccgtcctcaagtgggccattgggttgagcataggcatggtttttgcctacgtgtccactttctccgtcggagcgggtcccatcacgtgggtttatagctccgagatcttccccttaaggcttcgcgcgcagggtgcggctatgggagttgtcgtgaatagggtcactagtggggtcatctcaatgactttcctgtccctctctaataagatcactattggtggggcattcttcctctttgggggaatcgcaatgtgtggatggatcttcttctataccatgctccccgaaacacagggcaagacccttgaggaaatggaaggctcctttggtaaattcgcctcatggtccaagggtaaggacggtgataacggagacatccaattagccaattagccacccataatcgtgcttaatacttttgagccaatataatataataatataatggtgtgtaacagattagattagctttctaagtagtaacaagtctagtatgcgacgcaaaattatagtactacttcttttcatgaatgaggagagagagagagagagacgggtaataagtgtggtaagctattcgaaaactacattgttaatgtaacctttcctttttccgtgg

SEQ ID NO: 27921 - DNA, 291 bp, Glycine max
gtggccgctgattctaactcctggtgtaccatattccaattctcaagattattcagcgactgcataccaagtttctgatccaaatgctgtctgtacatgttgcccgtgttacagtcaatgtctgccggctccatgcacgtcagttcctggttgttctttgggtggatcatctgttagcaagccgtgtagcaatctttctgtggaaatggatcgtaaaatgtcatttccttgtgaagatggtaaaatccacaaaatggcgatgggagctgcagagaaggcactatctcacta

SEQ ID NO: 27922 - DNA, 375 bp, Glycine max
ttcatctccctccttaaaccctagacgtcgctcatggcttccgagaacgtaagccccgagacagtatccaaagccgtcgatgctctcctccaatggcgccgctcccaatcggagattcagaaaccaaaactcttgggcgaagacgaagaattcgtgtacctgatcctcacgctgaagaagatcccttcaaaatcccgagttaaccctcacaagattcctctcccgcactccctcatctcccctttctccgagcagtgcctcatcctcgacgaccggcccaacaaggcccgcgtcaccaaagcccaggcccaagccaaaatccagtccgaatccatccccgttcacaaagtccctaagctttcgaaactcgcctcc

SEQ ID NO: 27923 - DNA, 459 bp, Glycine max
aaaagaaggaatatatcatatcaggagctttgtctagtgtctaccatatttatacaaagatcatcacatatataatatatgatatatttcttcttgatacaattttgataccaaaaaattaaacatgatggctgcagatcagcaaagaattcatcctgttcatgatgttgaggcaccacacagacctttggtgcctgaaaactatgcaaaatctgataagggtattcctcagcgcacttttcctgtgatgcattcaaagccacctaagagaagaagaagctgttgctgtaggttcatgtgttggacactaagcatattgctgtttttgatcattgctattgccatcacaatagggatcctataccttgtgttcagaccaaagctccccaaatactcagtggaccaactgaggataagccagttcaatgtttcagacaacaacaccctctatgccacctt

SEQ ID NO: 27924 - DNA, 614 bp, Glycine max
ataacacaagcctttgcaggccatcttggtgacctcgaactcgctgccatctccattgccaataatgtcgtcgttggcttcgacttcggcctcttgttgggtatggcaagcgctttagaaacgctatgcgggcaagcttttggagcgaagaagtactacatgttaggcgtttacatgcagcgttcatggatcgttcttttcatatgttgcatctttcttttgcctttgtacttgtttgcctcgccggtgttgaagttgttggggcagccggaggagttggcggagctatccggcgcggtgtcgatctggatgataccggtgcactttgcctttgcgtttcagttccctctgcagaggttcttgcagtgccagctgaagaccgcgcccatagcgtgggtgtctctggtggcgctcgtggtgcatgtgtttgtaagttggttgttcgtgttcaagcttcagtttggtgttgttggtgctgctgctactattaacttctcttggtgggtcctcactttggggctttttggctacgttgtttggggtgggtgccctcacacttggagtggtttctctgttgaagcgttttctggtctttgggagtttctgaaactctg

SEQ ID NO: 27925 - DNA, 707 bp, Glycine max
caacattattgttttgaaaattcatatattcgatctcattctgtgcccttttctctgtgtttaccaaacaacaagtctcttcccttagtaaaaaaatatccttctttcttcttctgaatatcaatcttgcattaatccatggcagccaaaacatccaccaacggcacccatcattctctacccgagtacattccaaaccgcattcctgacccacattatgtccgcatcctggacaccacgcttcgcgatggcgagcaagcccctggagctgccatgacgtccgatcagaagctccaaattgctcgccagctcgcaaagcttggtgtggatgtcatcgaagggggcttcccttcagcgtcacaggaagacttcaacgctgtcaagatgatagcgcaagaagttggcaacaactgtgacgctgatggttatgttcctgtcattgcggccctatgtaggtgcaatgagaaggacattaccacagcgtgggaggctctgaaatacgccaagaggccgaggcttatgcctttcatagcagtgagccccattcacatggagtacaagctcaataagactaaagaagaggtgcttcaaatagctaaagatatgatcaaatttgcacgcagtttaggttgcagtgacatccagttctgttccgaagatgcagccagatcggatagagaggttctttatcaaattttggaagaagt

SEQ ID NO: 27926 - DNA, 515 bp, Glycine max
tctcgagccgattcggctcgagatttatggtttgcatcactattcggtttcccgtgatgttacatgcgggaccacggcactgacgtctttgccttggtgataatattttccggatctttcatgcatatatttgttctcagtgtgtgctcttttgtgtgcaaacaacaatctcttcccttagtaaaataaaaataaaaatccttctttcttctgaatcttcaatcttgcattgatccatggcagccaaaacatctaccaacggcactcattattctcgctctcgccccgagtacattccaaaccgcatccccgacccgcattatgtccgcatcctggacaccacgcttcgcgacggcgagcaagcccccggagcctccatggtttccagccagaagcttgctcgccagctcgcgaacgttggcgtcgatgtcatcgaaggaggctttccttcagcgtcgcaggaagacttcaatgctgtcaagatgatagcacaagaagttggcaacaactgtgat

SEQ ID NO: 27927 - DNA, 362 bp, Glycine max
caataatggaacatttatttaaactggaaaaaaaaataatctagaggttttagatttctacccaatagttttccctttttgggaaggaggggagtggggataaaggaaaacggggtgtccttgcctccttggtcacaaacgccgacgaccaccggcgagtattttcccggctagaacatcgacgacatcaacatggcttcgacttcaatcactaccttgtccatctactctcactcccaaccaaagttcctcaatctgcttcaacaccccctcattcacacccgcaacaaaagcacatcaattacgtttaagccagcgatagttcgcgccacccttttctctacactcacttgttctcacac

SEQ ID NO: 27928 - DNA, 465 bp, Glycine max
gttttggaactttagcagaagttgatgggcatctgattgcagttgggtctttagaatgggttcatgaacgcttccagacaagagcgaacccatctgatttgacaaatctggagaatagtttgatgaatcattcattgaatacaacatcttcaaagtattcaaaaactgttgtctatgttggacgtgaaggagaaggcatcattggtgcgattgccatatctgacactgtgcgtgaagatgctgaatctactataacaaggctcaagcagaaggggattaaaacagtcctcttgtcaggagacagggaagaggcagttgcaactgtagcagatacagttggaattgaaaatgattttgtcaaagcatctttgtctccacaacagaaatctggatttatttcctctctgaaagctgctggacatcatgttgcaatggtaggtgatgggataaatgatgcaccctctt

SEQ ID NO: 27929 - DNA, 351 bp, Glycine max
aaccttgccctcgtcaaagaaaaaagaagcaaaaaactctcacacagagaaagagacttaaaaaaaaacgggatttgttttgctgggttgggttgtgtgaattgtgaaatgcgggtgacggagttgcaacgtgccacggcggtgtaagatcttccggcggcaacgagcatttcttcggcgagatgggttcggggcagattggcggcggcggaaacggtggtggttgttctaacggcgggagttgttgtgatatgagtgtgaagtgttcgtgtaggtggagattggagaaccaacaatactacaagcggttattttcttcgggtttcattttcttctttgggtgtttcgttt

SEQ ID NO: 27930 - DNA, 252 bp, Glycine max
tcatagaatatactttgaactcaggcacacttgtgcataatactatcatgtcatgccttcgatgttgtttggtttgattcagcaaacttgaacaaaagggcttgatggaattcacttcttcttttgatttaaccttcttctatgactatgctactccaagcaaagtagtcctatggctggcatctatcttctccggcatcatcctatgtgttcttgcttatacatcaactgctaatttgagtccttggtggt

SEQ ID NO: 27931 - DNA, 292 bp, Glycine max
tcgatcgacaagctgaagattctcaggacggaaacactgtgtcaagcattaatgttaatgaaagtgtatctgcaagtgcttctacatctgagaactcaccgacaaatgcaatgggcttaactaagagatcggtattaccccctccacccgcgggttatttcttgggctaccgtcttcctccagggcatccgtgtaatagcttcacactccctcccccacctgctgataaaaagcgtactgggccacgtccatgcccggtgtgttaccttcctatggaagaagccattggact

SEQ ID NO: 27932 - DNA, 455 bp, Glycine max
cccacgcttccgcccacgcgtccgctctatctcaactccacagattcctatatctttcacgtgacacttgtctctctgcgtcaaagacaccttccagcttgagctccgggcatggcgtctttaccttctagtcgcagcaacggtggttccaacggctttgatttgggttccggcgacatcctttgttcgtacgaggaggacaataccaaccacgattcttctgacggcactcacatcgatcccgccaagggttctcatgcatcaaggatggcaagaacatcagtagttcctgctacagcctatagttcgtctgaagattctttgagccaggatgtgattgcaattgttgagaagagtatgaaaacacatgctgacaaccttatgcggtttcttgagggacttagtacaaggctgtcacagttggaattatattgttacaatcttgacaaatcaat

SEQ ID NO: 27933 - DNA, 439 bp, Glycine max
gaaccctctctcatggctgcttccaagcttttttctgcttctctcctggtctccatggtcaccctcttggtcctttcgtcggacaagtgcctcgcgttgcaatgcggggtttcctatgagacaatcaccgtcgtcaatgagtttcctcacgatccacaagccttcactcagggccttctttatactggaaatgacaccttatttgagtcaactggactttatggggagtcatctgtccgtaaagccgatcttcggactgcgaaggctgacattattcacaagatggatgatccttatttaggggaaggtataactctcctcaatagcaggctcttacatggaactcgagcgcggacacatggctccatatatgacccacaacatttacgcccaattgggacatttaatcatgatatgaatgatgctagccgtctggcaa

SEQ ID NO: 27934 - DNA, 294 bp, Glycine max
taataatgttttgaggacatttctctctccgaaccctcccatgcatggcctcttccgcattcctttccgtttatctcattatctccgtcatcgtccttttgtcgaacaggtgctgcgcgtttcaatgcggggtttcctacgacacgatcaccgtcctcaacgcgttccctcacgacccacaagccttcactgagggtcttctttatcatggaaatgacaccttatttgagtcaactggcctttatggggagtcatccgtccgtaaagttgctcttcgtactgggaaggttgaga

SEQ ID NO: 27935 - DNA, 863 bp, Glycine max
cctcctcacacaacacaaacaccaaatcaaacatggccaccacttttctttctctcctcttcctcatcttctctctcctcaccccagccctcatttcctcttcccctgtccaagaccctgaatttgtggcccaagaagttaacaggaaaatcaatgcttccgtagctagaaggaatttggggtacttgtcctgtgcgacagggaaccccattgacgattgttggaggtgtgacccgaactgggagaagaaccgccagaggctagcggattgtgcgattggtttcgggaaaaacgccatcggaggaaagaacggaaaaatctacgtggtgaccgattccggcgacgacgatccggtgacaccgaagccgggaaccctccggtacgcagttattcaagacgagcctctctggatcatcttcgcaagagacatggtgatcaagctgaaggaagagctgatcatgaactcattcaaaaccattgatggaagaggtgctagcgtgcacattgcgggtggtccatgcataacgatacagtatgtaacaaacgttataatccatgggattaacattcatgattgtaagcaaggtgggaatgctatggtgcgggactcaccacggcactacgggtggaggaccatatcggacggtgatggcgtgtcgatctttggagggagtcacgtatgggttgaccattgctctttgtctaactgcaatgatgggttgatcgatgccattcatgggtctactgggattaccatctccaacaattacatgactcaccatgacaaggtcatgcttttgggccacagtgattcctacactcaggacaagagcatgcaggtcactattgctttcaaccacttt

SEQ ID NO: 27936 - DNA, 466 bp, Glycine max
gttggaaagagaagagagagaagcaacagtgagacagacggtgagagtcgcagaagagaaagaaaatggcatctgatcctgaatcgccaacctctccttccgttggtttcaacaccgaccagcttcctcacacccacaccagccgtgcctccgaagacgacgaggcttccgtcgatcccgatatcgtacgagacgaaatcgaagaacaacccgaggaagaagaagatggagaggatctttacaatgacaactttttggatgattataagagaatggatgaagctgaccagttcgaatcgtttgggctggacgactcgttggaagatgacagggattttgatcagatcatgcaggatcgaagggccgcggagattgaactcgaggcacgcgatggtcgcgcttccaatcgtaacaagcttccgcagcttctccacgaccaggatacagatgatgacaatcacaggtc

SEQ ID NO: 27937 - DNA, 393 bp, Glycine max
  unsure (1)..(393): unsure at all n locations
catgaactcttggggtggtgatggccaagtcattaacacatttaaggaaatgaaaatcgttttcttttgaagttggaatcctcacaatttttggctatctagagccgcgtttgagggaggagctgaagaagaattaccggattgtggactctggttacaattcctttccaacgtgcatcccgggaacacaataccataaggcactattggctagaaggagacttggcaagattataggtgacataatttgtgagaggaaggagaagaagttgcttgaaagggatctattgagctgcttattgaattggaaaggtgaagggggagaagtgttatctgattaccanattgcagataacattattggggtgctttttgctgctcaggacaccacag

SEQ ID NO: 27938 - DNA, 274 bp, Glycine max
tgttgtgttatgttcagttcgttgcatgcaaaaacgattatgaagacgccaaaacgccactcgccgccgccaaattcttccctgcgagtggagtctgattccggcgaaatcgtcacgaggttcaagaacggtcgccggagaagaattaaaatcaagcgaatgaaatacacttgccagacgaagatccgcgtcaggaatgacgccggcgccggcggcgtgtctcaacttctggcggtggattctgaaggagagaagagagagattcacgagaacg

SEQ ID NO: 27939 - DNA, 488 bp, Glycine max
agggagggaaactggagagcgacatggaattcgacgagcaagaggagcatgaggaggaggaggaaatggggatgccggagccggcggtggcggtggcggcgccgcagacttttgactcgcggtcgaaaatcggcggcggcgaggcgcggaagagcgcgttcggcgtggcggcggtgcggtaccgagaatgccagaagaaccacgccgtcagcttcggcggccacgccgttgacggctgctgcgagttcatggccgccggagacgacggcacgctggaggccgtcatctgcgccgcctgcaactgccaccggaatttccaccgcaaggagatcgacggcgagatgtcctccttccaccaccgcgcgcagcctcccccgccgccgttgcaccaccaccaccaattctccccgtactaccaccaccgcgtcccgcagcaccccgccgccgctggctacctccaccaccacctcacacctccgattcgcagc

SEQ ID NO: 27940 - DNA, 270 bp, Glycine max
gctttctctgggctgacatctgtaagcgaaggtgtcttggtgctcaaagactcccaaagttacttccctttcgagtttctctttgcttcttctcaacatgcttgttcctccaccaccaccacccatgaacaaatgaaaacaacatttcttactcttcatccacattgccatttctcttatctcatcagacatttttgtaggagattctgtaattaaagagctcgttgaatgagtacatattggtaattcactgtgctgagttggattttt

SEQ ID NO: 27941 - DNA, 268 bp, Glycine max
gttctagatcgcgagcggccgccctttttttttttttttatttaaaatgataaattttccgggaattaaggtgaaaatttttaaataaaataaaatgcccaaaatttaaaagagagccgattgtcacagcaatcattagaatctgatcgagatacattttggcttgcaagtaccgcctgaaaataaacccccttgattcagtggaagacaagtaaatctaaccccattttttggaaatctataaatctacgctcatctccgaaagtga

SEQ ID NO: 27942 - DNA, 492 bp, Glycine max
gctattgtaaatgcacaggtcaaatggccagcaggacccaagcctccatatccagaagctcttcatcagttcgtgtcatggatgcttcagccaacggcttccatgcggcccaggatagatgatatcattatccatgttgacaagttagttgcgaagttctctcaatgagttactatggaagtgagaagtggggcttgagatttttatgttgcagtcgtttaaaaaaattcgtgtgcatttgccgtccagttatatgttaatggatagaaaagcaatagcaattcctcgcctgacggagttaaccatatatttatatgtatcttcgattttggtggtagtctaggtagtcgggcgttggctttaaagtattgtttgtcatttctacataattttgtttcttgtaatttatgaaatggccaatctccctgtgtcttcagaatttatcagcataaatggaatatcatttatctattgaaaaaaaaaacaaaaggg

SEQ ID NO: 27943 - DNA, 352 bp, Glycine max
acacgcctatcatgcatacagatcaatgaataatcatggttttcatgtaacagaaatccaagatcatcatctctagggtctagcaaaaacaccccaaatcttaccacggccaagactctccaagagtttcttcgacccgggaacatccatctccacaagcttctgcgtccatacacaggctccagcagccaccatttgcttcctgcaactcttggaatgaacaagcaaagcgagcaacgaaacagggtacttcttatccaacccctgcaacgaagggttcaagagatgaactgcactcacaacccctctttcgtccttgcggaaaaccctccgattcgccgggtgcatcagc

SEQ ID NO: 27944 - DNA, 257 bp, Glycine max
atgggtttgagggtgcgaaagagatgtgatatatcgcgggaggcaccgcccggataaattaaccatacaatattaaaaaaaactcccccaaaacaatttttaaaaaatataataatacgataaatataaagcaagtgtggttgcaacccatagttcaatcttcttcgtccctctcccatcacttctgtgtttctctcttcacctacactttcctctttcaattcaattcaattcttctttttggttcagaaactctg

SEQ ID NO: 27945 - DNA, 353 bp, Glycine max
aaacatcacaactcaaatagtaaccactatttcagttaacactttgccatgccctaatggcagaaacgactgccaggggctaaatggaaccattttctctgctagcatgaacaacataagctttcgaatccccaccattgacatactaaaagcctattactaccatatcaacggggtatacgaacctggatttccaacatttccaccgtttatatttaacttcactggggattttttgcctataacactgaatacaccaaagcaagggactagggttaatgtgctgaactatggtgcaacagttgaaattgttttccaagggacaaaccttgttggcgggatagaccatccca

SEQ ID NO: 27946 - DNA, 524 bp, Glycine max
cggaaacggcagcgttttctactctccttaccgtgcacgccggcgtgagatccattccgccaccgatcccacctccaccggcacttcccgcgttcaaatcgattaagctcgtttatttgctgatttctcttccactttcgttctgcagcacagtttccccacactcagcttatgctggtcagacttgtgctgcaagaggttgattgcatctggtgaaggggatactggtggaatgatggatactcacgcagaagattctgctagatctgaggagaattttcctgatgtgactcatcataatgaagatggaagcaacggaaatcttatattggaaaatggtttgtctgatggcaatcaaggtcctgctgatactcatgatcagcttctacaaatggttatggacctcaggtttcagaatgacttcttgaagtcccagtttgagggatttaaaaatgtagacagtgtacatagtgactctaatatacagaaaggagttggtggcttggaagatggggaatctgaca

SEQ ID NO: 27947 - DNA, 577 bp, Glycine max
ttcgagaggattgggttggacgtgtggatgggttgcttttcaaagattgctgctcaggcgggtatacttgcgtttcttcagtttggcaagacggtcacggagagtaagaaggaccccattaagcttttgaagctgttggatattttcgcatcgttgaacaagttgaggctggatttcaaccggcttttcggtggtgcgccgtgtgttgagatacagaatttaacaagggatcttattaagagcgtgattgatggggctgcggagattttttgggagcttttggttcaggtggagttgcagaggccgaatccacccccgatggatggtaatgtgccgagattggtgagctttatcactgattactgtaacaagctccttggggatgactataagccaatattgactcaggtcctgatcattcatagaagttggaagcgccaaagctttcaggagaaactccttgtcaacgagattttgaacatagtgaaggctgttgaacagaatgtggagacttggatcaaggcttatgatgatcctatactgtccaacttttttgctatgaacaatcactggcatc

SEQ ID NO: 27948 - DNA, 397 bp, Glycine max
ggagttgaaaaaagccaaattgaatctaggcaaaactataaatgaacttggggtgatacagtcctctgttgaatctttgaataagaagatgaagaaggagaaactttttctggagaggacaacgcgaaaagctagcatcaaagtttgcagcagtatctgctcaagagagggtccaagagcaaacaagattgaatccaccggcccctcatgtagagttcacctttggtaaccctgcaaataatttcaattctgattctgggcagtgcaatggaatggcagagacaagaagacctgaaccttcaaagcccttaagtgtatatgaagaatatggatttagtgttaaaactgctgagataaggtggcttgcggctaaaaagatggaagaagctgcaagggc

SEQ ID NO: 27949 - DNA, 843 bp, Glycine max
tgtttgttttataaaagagataattcacaacagactctcacctgataacaatacaaaaccttcgaatctatgactcccataacactaacggtacacagaaaccagaatcccgtgattctaagcaaccgaaagattaactcaaacacaacaagtcgctgacatgttcttttctgcccacttcctttgttctcttctcactctgctctgaatctcaccaattaggtaacacttcaccctctgtgctgaatcggactcgcatgtgaaaaactcttcttctaaagagtttgcacgtacatctttgtcctttcgggtgcaaagtctcattcttttttagcgcaaaattttcaaaggtgaaatcagagtttgcatgactctcccctgttttcaattcctctgttttgcttcaaaaggaatggacacgcttgtgggatggattcactccccaacgagatttgcgtgaaatacccacttccctttcggtgagcatgggttctctgaaagggtttcttcaccaaaattggatccttttttggagtactttcggatttttctctctaagcttttgaatactctgctttgggtattcaccaaaggcttcatgagattatatggttctgattcttctaaagcaatgaaaccgctttgttcttctgagtttttatgtgacaatgcaaaagctgagtcaattcattccgagtctgaatatgttggggcactaaatgctaatctctcacatgtatgtgatcaaattgattctaatggtagccagaaagaagcagagtccatggaaaaatgttgttctgaaactgttcatgattatggaaattctgggcttgaagaaga

SEQ ID NO: 27950 - DNA, 569 bp, Glycine max
aatcaaggtctcaacccctcacgctgcttccatcattctcgaccctttccctccctctcaggcttacttcaaccaatccctcgtttccgttattctccctctccttcagttcctttcacgaaccggttcccctctcatgatgaacctttacccctactacgtcttcatgcagaacaaaggtgtggttcctctcgacaatgctctcttcaaacccctcactcctaataaggaaatggtcgaccccaacaccttgcttcactacaccaacgtcctcgacgctatggtcgacgccgcttatttctccatgaagaaccttaatatcaccgatgttgttgttcttgtcaccgaaactggctggcctgccaagggtgattctaaggaaccttatgctaccaaggacaatgctgatacttataactccaatttgattaggcatgtctttgatcgcagtggaacccctttgcatcctgagactacttccagtgtgtttatatatgaatcgtttaatgaggacttaaggcctccgccactgtcggaggcgaatcggggtttgttttatgggaacacta

SEQ ID NO: 27951 - DNA, 610 bp, Glycine max
aagatccctcaatggagggactaaaaataaatttttttaaaggactcaacatattttatgttattctagagctcgttttgtccttgcaactgcaagtcttagttaggttaataaaaacaacattaatatttctaccttaattcaaaccattcttctgattctgcaaattgttttgtttttgttgctgccatcaccattctccgttaacctaaagccaccttcgtcgatcggtgaaagagcaattgatgttcgattgaaatcaaaaatgagtttcgtgccaaaggagacaatcgaagtcatcgcacagagcatcggcatcaccaacttgtcccccgatgttgccctcgctctcgctcccgatctcgaatatcgcattcgcgaaatcatgcaggaatcggtaaaatgcatgcgccattcaatgagaacttttcttactacagaggatgtggatactgcacttgcattgagaaatttggagccaatatatgggtccacctctaatgatcctccgcagttcaaaagagctgctggacacaaggatttgttctacattgatgacaaagacgtggatatcaaagatatcattgaagctcctttaccaaaagcaccc

SEQ ID NO: 27952 - DNA, 600 bp, Glycine max
atcaccctcctgtaaggagccactagatgtttcgaagaagtttacttttgatgtcctttctggtattctaacagatatgagaaagatatttccatttgaactatttcacttgggaggtgatgaagtgaatacagattgctggactaatacttccacagtgaataaatggcttcggaatcacaacatgactgctaaagatgcctatcaatattttgtactgaaggctcaaaacatagctcttacaaaaaattggagtccagtaaactgggaagaaaccttcaatacttttccaactaagctccatccacggactgtagtgcataactggttgggccctggggtttgtccaaaggctgttgcaaaaggtttcaggtgtattttcagtaaccaaggtgtatggtatcttgaccatctagatgtaccttgggatgatgtctatactgccgagccactagaaggaatacgtaaagcttcggaacaaaaacttgtacttggaggagaagtctgtatgtggcgtgagacagctgatacatcagatgttcagcaaacaatatggcctcgagcagcagcagcagcagaacgcttgtggagtcggagaga

SEQ ID NO: 27953 - DNA, 812 bp, Glycine max
  unsure (1)..(812): unsure at all n locations
ggaggtttctgttcgtttcatttcatttggtcacacagtgttgtcggccactttctctctctttcgcgcttcaactttcgtttttgcactgattgaaattgtgaggagcaacagaccacttgagatagtttaactcagctgcagggatggatctgtggggtgctcatcatcgacttttgttcattggtcggcatgaggaagatggaactcctgatacttctatgggagaggaatcaaacgatgaagaagaaaaaataattaaaactgaacccgtctttgtgcctgaaattaagaaaaggaaacgccttagccttagtcagcttaaagaggtgaaagaggagtcacatgggaagcaaagcagtagcaagcctaagagaaagaagcatgatagtagggatagatggtcagctgagaggtatcaattggctgagcaaaacatgtgggaggtactaaaggctgaaggggcgtcatttgaaaacccaataacccgacctgcactaagattggctgcccgcaaacacattggagatactggacttttagatcacttactgaagcacattgatggtaaagtggcacctggagggactgagagattccgaagatggttcaacaccaatggaatcatggagtattggttggagagtgctgacttgacaaggtgcgccaggaggcaggggtgcaggaccctttctggataccgccatctgcatatagggcagccggtgccccttcccaaaatattgattcttctgatgaatngaaacagcttaaaatagaactgacacaaatgaagaaagatatgcatgagc

SEQ ID NO: 27954 - DNA, 410 bp, Glycine max
gttttggcggttagggtttagcttgggaattttatgagagaaggtaaaataataataaaaaaacacaatgttatttggagcggcaggcacgggttttgtttgaggttttctgttcgtttcatttcatttggtcgcacagtgctgtcggccactgtctctctttctctttcgcgcttcaactttcgtttatgcaccgattgggctggatcagtgggatgctcatcatcgactcatgttcattggtcggcatgaggcagatggaactgctgatacttctaagggagaggaatcaaatgatgaagaaaaaataagtaaaactgaacccgtctttgtgcctgaaactaagaaaaggaaacgccttagccttagtcagcttaaagaggtgaaagaggagtcacatgggacgcaaa

SEQ ID NO: 27955 - DNA, 414 bp, Glycine max
tgcacccagagcatgctgtacaaaatgctgaaaaaggctcaagttcacaacctggcattagttcagcttctacggataataccaagttgcatcctcaagcaacagcggtggcacctgttgtggcttcaggggttggcatcaaaatggcaggtgcaaatatgcaaaaccaggttgtgagtagccagaactctcatgctgaagctcaagggtggggttctgctggggttccaaagccagaaccactggcctggggaggtgcatcttctcaaaggatagaaccaaataatcctgctaccatgccttcccagccagcttcccatggcccctggggtgatgcttcatctgtgccaaccactgtctcgtttaacactggaaatccaactgcgagtttacccacacctggatttctgggca

SEQ ID NO: 27956 - DNA, 328 bp, Glycine max
gctagatcggttgcttaggccaggaggttactttgcatactcatctccagaagcatatgctcaggatgaagaggatcaaaggatatggagagagatgagcgcccttgtgggacgtatgtgttggagaattgctgcaaagaggaaccaaactgtcatctggcaaaaacctctgacaaatgaatgctatatggagagagaacccggcactcgccctcctctttgccagtctcatgatgacccagatgcagtttttggagtgaatatggaagcctgcataacaccttactctgaccatgacaacagagccaagggtagtggattagcccca

SEQ ID NO: 27957 - DNA, 317 bp, Glycine max
ggagtttaagaattgagaaaaaatatcaatcctcttcggagtagcagtggcggggttagctacagtgaatccatggccatggcggctgcatttgcaactacaactgcaacactgagactgccaaatgttggagaaagcaaaagtttgcagctccgtaagtgtaaccctaatcccaataagcttaaggttatgcgggggtttggcggttgttctggagtggcagtgagtgtgagaattggaattggaagggttcgggcgagttcgagttcttcttcttctgaggagaaggaggagacagtgagtgtgcactcaaaagt

SEQ ID NO: 27958 - DNA, 438 bp, Glycine max
ctatgtgtaaatcttagaaatgagatccatactgatatccagattcataatcaaaatatactacctagctttgtggacctgccaaatatttctgcttccatatacagcacagagctttgcaatagattacgagccttcctcatatctggtccaccgacgggcccatcatcaccagtggcagaacttgttattgcaacatcagattttcagagagatcttgtaagctggggtattggtcctatcaagggtggagtggaccgcaaaagagttggtccctttgtagagtcctgtttggatccaagataaacgtctatctttgctggagtcatgcaaattagataaggtgaaatggtcaggagttagaacacaacattctactactccctttgttgatgatatgtatgagcggctgaaggagacgttgacagactacgaggt

SEQ ID NO: 27959 - DNA, 517 bp, Glycine max
  unsure (1)..(517): unsure at all n locations
ctctttgtattttttttcccttttgtggctttttattttccggtagcagttcgaatcgcttagcatttgcgctgctccaccgtgaaagaaaaaaacaaaacacacattaccaagagagagaagagagaagaaatcacagcattattatcttatcgtaactaattagtttaattagttaattaattggttataagttgtaaggccatgtttggcgaaaccgctccacgtccaaagttcgtgcaatcggagccgagaatgtcggcaacggaggtgctcaccgacgacgagttcgcgatgcgacgcagcagcacggtgtcgccgatgagctcttactgctccgagcccggaaggttaagcggcgaaggctcacccatgatgatgtcgccgtggcaccagacaacgaattcctcattctcgaaaccatcatggacacaagagcattacagcaccatgtaagtagcccacgnatgaacttctattcgacaagagggacacagcntgtccctcgctgcctccg

SEQ ID NO: 27960 - DNA, 593 bp, Glycine max
tagccgggcttcccatgatacccagctatgttgaaaatcttcccactgggaatgagaaagggttgttttatgccttggatctcggaggaaccaacttccgtgtgctgagggtgcagttgggtggcaaagatgagcgtgtcattgccaccgagtttgatcaagtttccatacctcatcaactcatgtttgctacatctcaggagctgtttgatttcattgcttcggggctagcaaaatttgcgtccaaggaggatggtagatttcatatctcaccgggaaaaaagggagagattggcttcacgttttcatttcctgtgaagcaggcatctattgattctggcatactaatcaagtggaccaagggttttgcagtgtctggaacagcagggagagatgtggtggcttgtctgaacgaggcaatggaaaggcaaggaatagacatgcgagtttctgctctggtgaatgataccgtggcaacgttagctggagcagaatactgggataatgatgtcgtggttgctgtcattttgggtactggaaccaatgcttgctatgttgaacagatcagtgccattcctaagttacagggccat

SEQ ID NO: 27961 - DNA, 368 bp, Glycine max
tttcttgatttggcttcacattttattactcgattgcgccgttatgctaggttctgtcgcacattggcaagtcatgctgtgactgcaggctctgggagcaaccgcaatatggttgctagtcctacccaaagttcagcaacacccgcaacaagtcaaggaggtcaaactgggaccagcagttctatgggaagcgcccagttgcaaacctgggtgcaaggggctattgccaaaattagcaacacaactgatggcgggtccaatccaactcctaatcccatcagtggcccttcaacatttatgcctattagcattaatacaggaacatttcctggaacaccagcagttagacttattggggattgtcattt

SEQ ID NO: 27962 - DNA, 863 bp, Glycine max
attccatgatggttgcttctctcttctacctttctctttctctttccctcatcctaaccctctcctccgccgcgcaccacaaacccccccactcaccgtccaagccaccggctaaccccgccgtgaccgccgcctccccggcaatcgaacaagcctgcgccgcgacgctcttcccgcagcaatgcgaagcctctctctcccaatcccagaacctccctccgaacccgacccctctccagctcctccagtccgccatcgccctctcctccgataacctcgccaccgcgcagaccatggctaagtccctcctcgacgcctccgccgacagccgcaaccgcaccgtcgccgccgccacctgcatcgagatattagccaattcccatcaccgcatttcccttgcctccgacgcgctcccacgcggcaggaccaaggacgcgcgtgcgtggctgggcgccgcactcgcctaccagtacgactgctggaacagcctaaaatacgccaacgacacccaaatggtcggcaaaacgatgtcgttcatcgataacctcgaaattctctccagcaacgccctcagcatggccttttccttcgatgccttcggaaacgacatcgcttcgtggaagccccccgcgacggagcgcgtcggattctgggggactgtggggtcgggtgggcccgggcccgcgggaggggttccgttgaatttgacgcccgacgttacggtgtgtaagaatggaggggatggctgttataagacggtgcaagaggccgttaacgccgcgccggataacggcaaccgaacgaagaggtttgtgatacacattaaagaaggggtttatcaggagaccgttagggttccgtta

SEQ ID NO: 27963 - DNA, 797 bp, Glycine max
caaacacaacctcgacaaagacattaaggtttcctcccccattgcactttccgcactagcaaactcttacccttcctccgccgggtcgttccgacccgaacttgttgaacccgttttcaagcccatgctagacttcctccgcgaaaccgggtcataccttatggttaacgtgtacccgttcttcgcgtatgagtccaacgctgacgtcatctctttagactacgctctgttccgtgataaccccggagtggtggatcccggtaacgggttgagatattataacctatttgacgcccaaattgacgccgttttctccgcgctaagtgctttgaaatacgacgacgttaagatcgtggttaccgaaacaggttggccttctaagggagatagtaatgaggtgggtgcgagtgttgacaacgctgctgcgtacaacgggaatctcgtccgtaagatcttgaccgctggtgggacccctctcaggcccaaagcggatctcatcgtttttctgttcgcgctttttaatgagaaccagaagcccgggcctacttccgagagaaactttgggcttttctaccctgacgagaggagggtttacaatgttccgttaacgacggaggaactcaaggactaccacgatcgtccggcgccggtgagcggcggcggacagcagaagggaacgccggcgccggcgccggttgtgagcggcggggtctccaagagtaccactggaaacacgtggtgcgttgcaaacccggatgcggataaggttaagctgcaggcggctctagatttcgctt

SEQ ID NO: 27964 - DNA, 474 bp, Glycine max
ctaacactacgcagattcagattcgccatgctttgttaagtacttgagaatctgaagcataggacaaggcagcaacttgcttagcttcttcactgtgaatgtatcttggcctgttttttaagctctgtgctgttccatgaatccttgtgcttcctctttgcttcccttcaggaaagtatgaaggatgacagaggttactttgaattcaagtgtcaatatcttataccatacagccgaaaaaatctccatgaagttctactccttgcaagcgcatcgtttccttttcatcattgttattctttgtcccctggtcattgctgacttaagttctgacaagcaagctcttcttgattttgctgctgctgtccctcatcgccgtaaccttaagtggaacccagctaccccaatctgttcatcttgggtaggcatcacttgcaatctaaatgacactcgtgttgtttctgtgcggctccc

SEQ ID NO: 27965 - DNA, 483 bp, Glycine max
ctcgagcgaatcggctcgacggctcgagcaaagagccaaccagacctagccattccttgcagtgaatacatttgtgaaggactcacaagatccaaatcctttaatccgtgccttagctgtacggacaatgggctgcattcgtgtagataaaattactgaatatctgtgtgatccccttcaaagatgcctaaaggatgatgacccatatgttcgtaagacagcagctatttgtgttgccaaactttatgacataaatgcagaattagttgaggacaggggctttttggaatccctgaaggatttgatatctgataataacccaatggttgtcgctaatgctgtggcagcacttgcggaagttcaggaaaacagtagtagacccatctttgagatcaccagtcacacactgtcgaagctccttactgctttaaatgaatgtacagaatggggtcaagtttttatattggacgctctttctagata

SEQ ID NO: 27966 - DNA, 450 bp, Glycine max
gcggagacgattctcgattccactccgctttcaatttattctgtggacagcgttcttcttccgccggagctgttcgcgaagtcgccgtctcctgccccggcgccgggaccggttactgcgccttctccctcgccggtgtcaactccatcggaagcaccttcgccgcttccggcatcgcctccggctccagcgggagagactcctgccggtgctccggcggatgcaccgtcctcggaggctgagcggagcacttccggcaagagtgacggtgttcacgtgaaagcttctgcgactctcactgttgcagtgattgcattgtctgcctttgtgatttctgctacctttatgtaattttaatatttttatagtttttattgattttctttttgtaagtgtttttgagtttttttttttaaatttgcgctttttatttttatttttatttttcct

SEQ ID NO: 27967 - DNA, 388 bp, Glycine max
caaatatggtgttcacaatgtggttgaggcctctgatactagcctctgtttttgtatgggcagtggcaactccttctccacaaggatgtgatttttctcatggcagatggatcattgatgaagcttccttacaccctctctatgatgcctcaagggactgtcccttcattgggtttgattgctcaagatatgcaaggcctgataaggattatctcaagtatagatggatgccctctggttgtgatcttccaaggtttgatggtaaaaagttcttggagagaagcataggaaagaagataatgtttgtgggggactccataagtaacaacatgtggcagtcactcacttgtttgctacacattgcagtcccaaactcaaattacacttt

SEQ ID NO: 27968 - DNA, 224 bp, Glycine max
  unsure (1)..(224): unsure at all n locations
caacaattggaagaatacatcatcaaaatgtagtacaactaattggatattgtgttgaaggctcaaaacgtgcccttgtttatgaattcatgcccaatggatctcttgacaaatttatttttcccaaagatggaaatatacatttaacatatgacgaaatatataatatagcaattggagtnnnnnnnnnnnnnnnnnnnnnnnnnnnnnnnnnnnnnnnnnnn

SEQ ID NO: 27969 - DNA, 705 bp, Glycine max
  unsure (1)..(705): unsure at all n locations
gaagattcttcttcaagcttctgatcaatcaaaattttatagtggagattgcttcatcttccagtatacatatcctggagaggataaagaagattgtcttataggaacgtggattggaaagaatagtgttgaggaagaacgagcttcagctaattcattggcaagcaaaatggttgagtcaatgaagtttcttgcttcccaggctcgtatatatgaaggcaatgaaccaattcaatttcattctatccttcaaagcttcattgtttttaagggtgggattagtgaaggatacaagacttacattgcacaaaaggaaattcctgatgatacatacaatgagaatggtgttgcattattccgcatccagggctctggaccagacaatatgcaagccatacaagttgaaccagttgcatcttccttgaattcctcttactgttacatacttcacaatcggcctgctgtctttacttggtctggaaactctacaagtgcagaaaaccaggaacttcttgagaggatgctggatttgataaagccaaatttacaatccaaaccacaaagggaagcctccgaatctgaacagttttgggatttgttaggaggaaaatcagaatatcccagtcaaaagattcttagagagcctgaaagtggatctcacctattctcttgtcatttctcgantacgtaaggataattttttgc

SEQ ID NO: 27970 - DNA, 270 bp, Glycine max
  unsure (1)..(270): unsure at all n locations
gttttgggttgcaaatgggtcgctgaagtttccggaggttgcggtggagattgagacgcagttgaataagtataagaaggatgtggatgaggtgaacaagaggactggcgggactcatggcgcggagtttgatgggacggatttgattgggaacacgaagcatttgatgaatgctgtgaattctctgcctgagttgactgagaggaaacagggtgattgagtagcataccaacaatgcgactgtgttgcttggcgagantaaggagaggc

SEQ ID NO: 27971 - DNA, 276 bp, Glycine max
ggatatgctcgattcgagggtgacgagggatagcagatctgaatctcatcttcccaaaaccctctttcttctttttctcctctgatctcatttcaaacctaaccctaaccacaacagaggaagatgttgacgaaattcgagacgaagagtaacagagtgaagggcctgagtttccacccgaagcggccacggatcctggcgagtctccacagcggcgtcatccagctctgggactaccgcatgggaaccctaatcgacaagttcgacgagcacgac

SEQ ID NO: 27972 - DNA, 295 bp, Glycine max
gaaagatcatgaagccattcaagatactccatatgcatcttcttcattctttactcttattcaatatcatattatgttcttctataccccagcataatcatgcaaacttctgtgggaatatcaaaactcaaacacctttcttggattccaattcttctatgttagacaacatcaccttgtgcatatctcagaatctctacttgagaacatcccttggcctttttcatgtttcatcacttgacaacaatggtagattactaaccatcactcactcttcttgttcttctctccaata

SEQ ID NO: 27973 - DNA, 397 bp, Glycine max
ggggggagtgttgagtccgtggtggcatcaaaatctgtgtgaagcaaatgacccaacagtctgagaactccaccaccaccaccaagaagaagaagaagcaatgcaacaaccagccatgacaaaagcaaagtcagacagcgacaacaacaacagcagtggcatgggtatgctcctggtgttattcccccaagacaaatcctcaacctcaacctcaaacaccgacattaaacccatgttcaacttcccttccccctccaaatctctcttctccaaagcacaatccactatctctatttgcctccttctcctcttcacaacgctcctcctttttactctctccaccctcccaaacgcccttcccagccctcccgctccccctccgagctctaaacccacc

SEQ ID NO: 27974 - DNA, 270 bp, Glycine max
caattttggtaaatgaagccctctgtgctacgtttgtcactgcttgttttcgttcctctgcttctatccctcttgtatgttgcactcatgccaaagaaggaaactgctatgaaaacctatgaggtctttggagtgaagatagagaagaacccacctcagtccaagctcaatgagcttggagtctcaacttggcccatgtgggaaggtaggtccagccaaaattccatggtcctttaaagaagaagagactatgtatctgctggagggaaa

SEQ ID NO: 27975 - DNA, 414 bp, Glycine max
ttcatcagagtcatcctcaacaacttctatggctaaacgtgtgtgtaatagttcaaggtccagcattgatagtgggtcaagcagaaaggttttattgaacactgatacagatcaaggtacacatcctcagactcctctgtgtgattcatgcttattagaaaggcaagaggcttggcatagtgggattattagtcagaaggaaaggacagcaccctggagcagcagttcttcctccagcttccaagaaagctccaggcccttcgactgccttcaccaaagattggtttttttgatggggtgaggcccgctgtgcttattatttgatgttagcttagtaaccgtgtgggttagtggttggttagtaccagtttcttgggaaaaaagtatacaaatttcatatcattatgactttgg

SEQ ID NO: 27976 - DNA, 428 bp, Glycine max
caaggaacatagaaaacaaaacctccaaacagccaaacccgtacctttctgaaccctcactcactcttctgcttcttcagatcatcggataagctccaatattctttaattcccactccacttctctggaatgtgatatttcccccttcaaattctgcttcctattttgtctcaattcccactcttgggtttcgtttccctttcaagaaaccgaaaccctagacgacttttccgcctctgaatttgagcaattggaaccccaaactctttcctaggatagtaacattggagatgaaagcgccaaatgctttgcttggtgcaaaacgcagaatatttcaagggattttcaatgctctgtgttccatggttgtgcttttcttcttttacaaccgggaagacatcatcagcaaccccgattctcagacaat

SEQ ID NO: 27977 - DNA, 270 bp, Glycine max
ctcgagccggctcgagcaggcgccaaggcagcaatgtctgacaacccaaacaaagcagaaagtagaagcttcacagaggacaatgcaagaaggcgaactgaagggaggaggaattgaaatgataaagtcaaattatttgtcactgttactcttgttatccttgattcactaccaccatgtggctactgtttccgacgacccattcgtgggcgttaacatcggcacagacgtatccaacctcttgcccgcaccggacctggtcaacttcct

SEQ ID NO: 27978 - DNA, 319 bp, Glycine max
cacactcacttcatttcttctttagtactactcactctctcaagctctctgtctgcgacaacacaaaacgacatcactctgattgtctcattaacgtcgtcaaaaatgctgcaaacccgtcccggcggctccggtggccgcacggtgctggtgggggtgaagatggactcccccagcaaggaattgctcacatgggctttggtcaaagttgcacaccctggtgataccgtggttgctctgcatgttcttgggaacaatgaaaccgtgaatggagacgggaaatcgtcgctgctttcgcttgtcaaggcgtttgactctg

SEQ ID NO: 27979 - DNA, 257 bp, Glycine max
ctcgagccgcgctacccaaccacaacagaatctcgactccgagctcacacaccattaaccgcaccaacgtccggcggaatcgccctcttctcgccaaacgccttatccgccccgcccctaatcgccccttcggggatcggatcatcgtgcagaatcaaacagctgcggaaacgggtctacgcgcttcctcagcacattcttccgcaagtaccacggcagcttcttggaatagtagcccgcgaactgcctattgccga

SEQ ID NO: 27980 - DNA, 297 bp, Glycine max
ctctccgccgccacctacttctggcccggctccgaggtacccaaaggcccctggacttgccctaaagccttttgccagccctacaacgaatccgtcccctttcaggacagagtagacactgttctcagctatttcgatttaccctctcatcaagttccttcctttattacgctctattttgaagaccctgatcatcagggtcaccaggttggccctgatgattctcaaatcactcaagccgttgcggaaattgatgccttgtggggagactcattcagggttggaacaagaggtgtt

SEQ ID NO: 27981 - DNA, 626 bp, Glycine max
ctcacttgttccgccatcgtttcattccattttcttcactcacacaccaaagcaacacaaaagagaaaattacaagcaacgctctcccatcgttttcgtattttccaccactttcagatctgccaatcaccatttcacaccgcagatctcgattctccgcattcaataactcctttcactcgaatcccagggctcgccgatttggattccgtcctctcactccgctctttcatgttcttcttcggtttccagttctctccccatccgtgtgaaaacagatcttgaaaattggcgccccaaagacggtcgcagcgccacatgggtggccagatgcagcagagcaatgcctccgccactgctctgtatgaccacgccggccccggatccctgcacaatgcggcaggaccggccaccgatgccggcgacgccgtcatggcgcgatggttacaatccgccggcttgcagcacctggcctctccattggcttccactgccatcgatcaacgcctccttcccaaccttcttatgcagggttatggagcacagtctgcagaggaaaagcagaggctttctaagttaatgagaaacctcaattttaatggggaatctggttctgagccatatac

SEQ ID NO: 27982 - DNA, 676 bp, Glycine max
atacgtacgtacgcacgtcagtcggctcgaggtacattctcccatgatggatcatcccagctacttaacttgagtggatccagttccggtatagccttctgcagccatgctacccaagcaaataaccactgaacctcctcagcttccatctgctgctcctcagtgtgtattgcctcaggtggaaaacttgggaacatcacaatcaaatgtgtctgaacttgctgctttggctccatttgctggaagagaacattctgcataccatggcgctgctgatcctcagagcaatcttttatttgggattaacattgatccctcttctcttatgctgcaaagtggcatgtcaaacctgagaaatataggcaaagtgaacgattcattatcgttgccattttctacttcgaattgtggtggtgctacaggcactgatttccccttgagttcaaacatgacaacttcaagttgtgtggatgaatcaggcttcttgcagtgttctgaaaatgtagaccaagcaaatataccaactggaacctttgttaaggttcacaagtcagggtcctttggcaggtcactggacatttctaagttcagcagctatgatgaactgattagtgagcttgctcgcatgtttggccttgaaggccaactagaggaccctaagactcagagatcaggc

SEQ ID NO: 27983 - DNA, 565 bp, Glycine max
  unsure (1)..(565): unsure at all n locations
ggaaaactgaagcgttgttcatttgatttgatttgatcctttgggcgttgttcctcttccaaagagaatgaatgactctattcctccaccctgtcaaccataattgcctttcccttctttctcatcccactgttagttgtatactactactatcccactctctctcaccatcaacttttcaaccccacaccacccacccttttccaattctctttccgtccttccccacctcaattctagggttttcccattctttcttctttttttattacccctttttctctcctcttttaattcgttagttaggttaccctctcatcactctgcttttcgatctcctctctctctctctctctctctgatactcagtatatttcttctaaatcttcactctcttgtcctttccttttgtttttcttcctacaccacacgcacacacaattcttcctttctcttcttttgatgtcttaggaaccaaccaaccccccaatctgaattgatttcatcgctatttgtgtattcattgcgtgattgattntccgncttcttcttcttcttcttcttc

SEQ ID NO: 27984 - DNA, 490 bp, Glycine max
tctctattggatccaaagttaccaacttttcttaatatcatctcataaagtcaccatttttccttcccttttgaggtgaagtgagagctgggaaacaaaacatgtctagggcattggttcatttgttgggtgttttgtggctgtgttggtgcctggcatcaactggagaggcccaaatagagtacctgagatacaaagatccgaagcaaccggttccaactcgggttagggacttgatgagtcgaatgactttggaggagaagattggtcaaatggttcaaattgataggagtgttgccaatgctaatgttatgaaaaccagcttcatagggagtgtattgagtggtggcggtagtgaaccccttccaagggctactgctgaagattgggttaatatgataaatgattttcagaaaggagctcttgagagtagattgggcataccaatgatctatggtattgatgctgttcatggacacaataatgtcta

SEQ ID NO: 27985 - DNA, 428 bp, Glycine max
ccctcgcgtccgaaacgaaacacaaacagtgttctctctttctttctttctttctgtctgttgtgctctctgaacatgttgatggattccccctctcgctcctccgtcatcatcgtaggtgccggcatctccggtatcgctgcggcgaaggtgttggccgagaacggcgtagaggacctggtgatcctggaggcctcggaccgcgtcggcggcaggatctgcaaagagagcttcggcggcgtgacggtggagctcggtgccggatggatcgctggcgtcggcggccagcaacccaaccccatttgggaactcgccgctcaattcgagctccgcacctgcttctccgactacagcaatgcgcgctacaacatttatgatcgcagtgggaacatcataccgagtgaaatcgctgctgactcgtacaaaaa

SEQ ID NO: 27986 - DNA, 260 bp, Glycine max
ccgaaacaaaacacaaacacaagcacaaggacagtgatctctctttctatctttttgtctgtctctctgaacacgttgatggattccccctctcgcccctccgtcatcatcgtaggtgccggcatctccggtatcgcggcggcgaaggtgttggccgagaacggcatagaggacctggtgatcctggaggcttcggaccgcgtcggcggcaggatccgcaaggagagtttcggcggcgtgtcggtggagctcggtgccgg

SEQ ID NO: 27987 - DNA, 433 bp, Glycine max
cccttacacatcacctttatcttcaaccaccccgagcctctgtgggcttttattcatgttctatgccattgacatgtctttaaagcacatgctgctccatcgaatcacactgaaactccaactgtcattcttctactttgcatttacactctcggataatggccaaggaagcttctctgtgcctcttgtttctcttctcctttctcagtacctcctgttctggatctctggtgggtttttcctaccgtgagagaggagacacttcaacatctgctagaaccatatcattcctccagcaaagcaacgtttcgccaactcagattcgaatttttgtcacagatcataggattttgagcactttcagcaactccaaagtgctaactgatgtctacttgaacaaaagtcaagttgaaaatttcattatttcaaaacc

SEQ ID NO: 27988 - DNA, 724 bp, Glycine max
cttgagtgttccctgggcatgagtggacgctataagactcagtgcactcactcactcactcactcactcagtgactgtgtctgaaaatgggcaaacaagtattgaattcctttcgtcccccagtggttttcttgttattcttcattgtcttttccgttgtttcctgtgatgaagcttccaagaccttcatctttcgcgtggattcccaatccaagcccaccatcttccccacccattatcactggtacacctccgagttcgcccaagaaaccagcatcctccacgtatacgacaccgttttccacggcttctccgcgtcgctcacgcaccaacaagtcgcgtccataagccaacacccttccgtcctcgccgtcttcgaagaccgccgccgccagctccacaccacgcgctccccgcagttcctcggcctccgcaaccagcgcggcctctggtccgaatccgactacggctccgacgtcatcgttggagtcttcgacacgggcgtctggcccgaacgccgcagcttctccgatttgaacctcggccccattccccgccgctggaaaggcgcgtgcgaaaccggcgtcagattctcccccaaaaactgcaaccgcaagctcatcggcgccagattcttctccaaaggccacgaggcaggtgcgggttcgggccctctcaatccgattaacgagaccgtcgaattccgatcccctcgcgacgccga

SEQ ID NO: 27989 - DNA, 564 bp, Glycine max
  unsure (1)..(564): unsure at all n locations
cggctagagcaacgatgctatctctgatctctctgagtgtgagagagagagagagaccgtgtttgttcatgtgcttttgagttgtgtgtgtcagcattagatccaatctctctctctctctctctcccaattcaaccctaactagccccaaacccatcgctctctcccgattcccctccctttcataattgatgcacctcgatctcctcactcactcgccaaatttccacaattctaaaagcaaaaacatcactctctgctccaaatcttcctccgccatcactgatttgaatccagcttcgccaagaaaggtttttggagcaataaccgatcccaatcttaaaatcgatttgatttttgctttttcctttttccttcttgcgtctattacagtgatgacagtagcagcatagagagagagagagagagaacagatggaggatatatcgaaatacgcgcacagtcctgcacacgtggcagtggcgagacgcgaccacgccgcgctgcgccatctcgtgtccaccatccctcggctcgcgaaagccggngaggtcaacaccgaag

SEQ ID NO: 27990 - DNA, 424 bp, Glycine max
gccgccgccgccccggtgttgcggatgtatctgatctctcggccaaccccgtcatccgctggcagcaccgcttctacctccccctcatcttcggcatgggcttcgccttccctaccctcgttgctggcctgctctggggcgactggagaggcggtttcttcttcgccggtgccgcccgactcctgttcgtccaccactctaccttctgcgtcaactcgctcgcccactggctcggcgagactcccttcgacgacaagcacaccccacgcgaccactggatcaccgcgctcgtcaccgtcggcgagggctaccacggcttccaccaccagttcccatccgattaccggaacgcgatccactgggcgcagtgggaccctaccaagtggttcatctggacgtgctcaaagatgggtctcgcctacaa

SEQ ID NO: 27991 - DNA, 324 bp, Glycine max
tcggacgcttgggcggacgcgtgggcggacgcgtgggcggacgcgtgggcggacgcgtgggcggacgcgtgggcagaaccaaactttgtgcctttttccctgcagttgcggcgagttttgactatttgccaagggctaaggctgagactttcagagatctgagactgtggaaattaagtgtcacaaatgggtgtcaatgtggggattatttgtgttttgtttctcttggcaacacaggcaataggggttcctgcatttgcaccatggaagaagctgcaattgccatggaagaagccttctaaagggaaagtcattcagaaaaac

SEQ ID NO: 27992 - DNA, 255 bp, Glycine max
cacagcaccatcacgacaaaatggttcgctacggtgcctcctccatcgacggcgcaaagtctgctcgcgcccgcggcagctacctccgcgtctccttcaagaacacccgcgagactgcccaggccgtcaacggctggaagctcgaccgcgccctcacctacctcggaaatgtcctcgagcacaaggaggccatccccatgaggcggtacgccggcagcactggtcgcactgctcagggcaaggctttcggtgtct

SEQ ID NO: 27993 - DNA, 281 bp, Glycine max
ttcggctcgcggagttagcgtcagctctctacagatgcaaaacctggatcctttgactcaggttgtgctctctatcttctgtcaacacttcaatcacaaagtccagagttgagtatggcgcaatctagcatcacctgccctgtgcaatcgccatcaggatctgtgcattttgatgctgtgaatgagtatgcatgctcagaaacggaaagagataagcctagtggtcaagtattggttttcgatgcaaaaacaaccaaccttcattacaacggaatgctgcc

SEQ ID NO: 27994 - DNA, 288 bp, Glycine max
gatgccaaatccttttcattcaagatgaagatgattcgcattcttttcatctttgctcttctatccttcacttcccatgcttctaatgtcaatgacttctgtgtggcagacctgaagggtccagatagccctactggctatcactgcaagccacctaaaacagtaacatcacatgactttgtgttccatttaggccctggaaacacttcaaacgtgttcaagtccgcaataacctctgcatttgtcaaagattttcctgctgtcaacggtcttagcctttctgtagca

SEQ ID NO: 27995 - DNA, 614 bp, Glycine max
tagttgaaatacactccatcggcggcggaaggttcttcggcggcggcggcgaccggaggctgaggccgcaccaccagaaccaccaccagcagccgccgataaaatgcccccgctgcgactcactcaacaccaagttctgctactacaacaactacaacctctcccagccgcgccatttctgcaagaactgccgtcgctactggaccaaaggcggcgtcctccgcaacgtccccgttggcggcggttgccggaaatcaaaacgctccaacaagcccaaaaccaccacctcagccgccgccaccaccagcagcaacaataacaataacaacccttcctcttcctcggaaaccgctgcggcaaccgcaccaacgccaccacaacaaccgcctccgccacttgagctagagcataattctcactctcactccagcagcgaaagctccacttataccgtcgctgccacggaggccatgtcagcgccgacaacgaatgcggtgtcgaacaacaatttattacttgacaacaaccgtgagtcgaagatgttcgctaaccctaacccctatttagagcagagtcgtagtggtggccttttctctgacatagagagcttcagc

SEQ ID NO: 27996 - DNA, 432 bp, Glycine max
gacaaatctctctctaacaccttcaaatcttaaattattattcactttctctctctctctctcagcatggcatctcaagcaatcaccttcaagtccttcgccaccgttatcatcgtggcgcttttcttcgccgccgccgccgcctccgctcaggatttgtctccggcgccggcaccgggacccgatgccggagcagccggatccgtttcgagctcggtggccgtgattggagcttcggttgtgctgtcaatgctcgccatcttcaagcactgaatgtcacgatgccgattttttattttgctgtggatttcgtgtgagcgttattgattcgttctacacatagacgtttattgttgttgatttatactgtaagtcgttacggagtgatgatgagtacgcgttgatgttgatctatgtatacttgagagagag

SEQ ID NO: 27997 - DNA, 633 bp, Glycine max
ctttattttttctcattctcattactctctctttgcagagaagagagaaatgtcgctgagttccagctccaggggaagaataacgacggagcttcaagtccccaagaaatggacagagagagaaacaagtcctgagagaaccaaggtttgggccgagcccaagcccaagcccaaaacgcccagaaaagtttccgtcgtttactacctctcccgaaacggccaactcgagcaccctcacttcatggaggttcctctctcttcgcctcacggactctacctcaaagacgttatcaaccgcttgaacgctctccgagggaagggcatggccaccttgtactcctggtccgctaaacggagctacaaaaacggcttcgtttggcatgacttgtcggagaacgatttcatctacccgacgacgcaagggcaagactacattctcaaaggatcggaaattgtggagcacaatgttaccggcgccggcgcgagggttaacaaatcggaggaagaatccgattcgccggtggtgatcacgaggcggcggaaccagtcgtggagctcaatcgatatgaacgagtaccgagtttacaagtccgaatcgttcggtgactcggctgggagaatcggcgccgacgc

SEQ ID NO: 27998 - DNA, 303 bp, Glycine max
taacctcactctataacaacatttctctctcttccttacccctggagtcaaccaccctagcataattactaccatcatcttattttttcttcatcatccaccactctatttgtcacttgctttcatgcaattaacacttctaccaccttttttcattttctcactctcttcactaaaatgagtgacacacaccaacctttcatgtccgtacaaccacccatgaagctccacaaccacccatttaacccacaagcctcaagctcaaattttgacggcgacccaccatgcaaaaccgccggaaaa

SEQ ID NO: 27999 - DNA, 260 bp, Glycine max
ctctccctccctccccgccttctccgcattcattatttctttcttggtatcaaattcagattggagattgtgaattagctggcgagaatgtcttcgtctacgggcttgattttccgagggcacgaggcccaacccatggacgacgcctattacccgaagccgcagaagccatggctctccttccgctacctcctacgcgaacagcgtctccacttcctcctcctcggcattgtcctcgccaccctcttcttcttcctcct

SEQ ID NO: 28000 - DNA, 776 bp, Glycine max
gcaacctcagagaatttactgtatctggactggcaacagccacaaagggttttagtcgctcagtcatgcttggagaaggtgggtttgggtgtgtctacaaggggttgatcaagagtgtagatgatccttccacaaaaattgacgttgcagttagacaacttggcagaagaggaattcacgggcataaggaatgggtgacagaagtgaatgttctgggtattgtggagcatcccaatctggtgaaactagtgggatactgcgctgatgatgatgacagaggaatccagcggcttctgatttatgaatatatgcctaacagaagtgtggaacaccatttatcgccacgatcagacactcctctgccatggagtaggaggttgaaaatagcccaagatgcagctcgtggcttgacatacctgcatgaggaaatggtttttctgataattttcagagatttcaaatcttcaaatatccttctggacgagctgtggaatgcaaaactatcagacttcgggctagctagattgggaccatctgatgggctgactcatgtctccacagcggtcgtaggaacaatgggttatgcagctccagaatatgttcaaactggacgtctcacgtcaaagagtgatgtatggagctatggtgtcttcctttatgaactcatcactggccgccgtccaattgatcgaaatcgccccaagggtgagcagaagctgttggaatgggtaaggccatacctttcagatgggaggagatttcaactaatattggat

SEQ ID NO: 28001 - DNA, 450 bp, Glycine max
acctcgagcgattcggctgagataaaaacgtccgtctctttgtacttgttgtttcagatctgatctgaatgtgattgatgatgggtgctattccagaggccaacggaaatgtcgccgacgaagaaaacgggagcagcgttggtggatccatcgatttcggcacggcggaggccgttcaatacgtccgttccctcaccgacgttggcgccatgacgcgcctccttcacgaatgcatcgctcaccagagagcggtggacgttgaactcgacgagcttctgtcgcagcgcaccgacctcgaccgccatctcctccagctccagcgctcctccgacgtcctcgacatcgtcaactccgacgccgactacatgctctccaacgtcggcttcacctccgacctcgccgaccaggtcagccgcaaggtccgcgagcttgatctagcccagtcgcgcg

SEQ ID NO: 28002 - DNA, 458 bp, Glycine max
gaagcttgttgtgggggatgttttccgtgccccatcaaatcctgccttgttgtgtataatggttggtgatggagttcaaattctggggatggctgttgtgacaattttgtttgctgcacttggattcatgtcaccggcctcacggggaacacttatcataggtatgctgtttttctacatgatacttggtgttgctgctggttatgttgcagttcggctgtggaggacaatcggctgcggtgatcagaagggatggatttccgttgcttggaaggctgcttgtttcttccctggtatcgcctttttgatcctcacaaccttgaacttcctattgtggggaagccacagcacgggagccattccattttcactctttgttatactaattttgctttggttctgcatctctgtgcaccttagccttattggtgggctctttggagcaagggcacctcaca

SEQ ID NO: 28003 - DNA, 505 bp, Glycine max
  unsure (1)..(505): unsure at all n locations
tgaatactaagttcccgtaggttgtcgtgattcatcacagcatattgtctctgaaattcagaaatgacatctgcaatgccaaggtgttggtggtgatgcattgccatcttacatgcgtggagctgtgtattgggaacccaacaagcctctcaccatcgaggaatttaacatgcctcgccccaaggccggtgaagttctcatcaaaaccaaagcctgtggagtatgccactctgatctacatgttatgaaaggtgaaattccgttttccagtccttgtgttgtggggcatgagattaccggtgaggttgttgaacatggagcactcactgacagcaaaaccatagaaaggcttccagttggatctcgagttgttggggccttcatcatgccttgtggcaactgctcctactgttcaaagggccatgatgatctatgtgaagctttctttgcctataaccgggcaaaaggaaccctctatgatggtgaaactcgactttnttttcga

SEQ ID NO: 28004 - DNA, 507 bp, Glycine max
attaaatttctatgtagttgttgtttgtagtaatcatcaactcactcagttgccgtaggttgtcgtgatccatcacaacactttgtcactgaaattcagaaaaatggcatcagcaatgtttcgtaggaacatcatcacccactactccaagtttgcttcttctttgtcttcgttgcctcgccattcctcaatctacaaccctctctctatgtctgtttcttcatttcatagcgaaagtgttggtggtggtggtgggttgccatcttccatgcgtggagctgtgtattgggaacccaacaagcctctcaccatcgaggaatttaacatgcctcgccccaaggccggtgaagttctcatcaaaaccaaggcctgtggagtatgccactctgatctacatgttatgaaaggtgaaattccgctttccagtccttgtgttgtggggcatgagattaccggtgaggttgttgaacatggagcactcactgacagcaaaaccatagaaaggct

SEQ ID NO: 28005 - DNA, 360 bp, Glycine max
cctgctagaagggaatccttgaaattggcaatggagaaagctgagaaggcaaaggaaggtaaattaggtgtagaacaagaattaagaaagtggagagctgaaagtgaacaacgaagaaaggccggcgagtctggccaaggagtaataaaccagagtaaaagccctaggggtagttttgaggggaaagcaaataattttgaccgcactagtgatgcagctaatcccgcacattacttgacaagtccaaaggctaatgagcatgcagacaatgatgaaggtggatcatccccagaatcaaaacatggaaagaagaagaagaagtcaattttcccaagggttttgatgttctttgcaagaaga

SEQ ID NO: 28006 - DNA, 412 bp, Glycine max
aatcactgtatatgattatcttgttaaggttcgtaagatagatctccgatactctgctgaccttccatgtatcaatgttggcaagcctaaacgactaacattaatccccattgacgtttgtgaattggtatcattgcaacgatatacaaaagctctgtccacgcttcatagggctacattagtggagaagtcgagagcagaagccacaagagaggatgataatcttgtctgatgcactgagaacaagcaactatggtgctgaacctatgctccggaattgtggaatttctataagcactggcttcactgaagtggagggccgggcgtggcctgcaccaaggttgaagtttggcaatggtgaggatctcaatcctaggaatgggagatggaatgtcagcagagtgaaatttgt

SEQ ID NO: 28007 - DNA, 384 bp, Glycine max
agcagatcatgttggatatcttggatatgtaccaaaactagttgctgctgttgcatttgaggggaggcgagaaacaatgtcatcaggtgaggtaaacaatgggagacatgcagaacaaacatatgacccagataaggaatcagcagagaacacacaaactcctcaagaacgtgtgcgcctgagttgtttgcgtgtcttgcatcaacttgcagctagtaccacctgtgcggaggccatggcagcaaccagtgttggaacacctcaggttgttccgctgctaatgaaagccatagggtggcaaggtggaagcattttagctcttgagactctaacacgtgttgtggttgccggaaaccgagccagggatgctcttgttgcacaggg

SEQ ID NO: 28008 - DNA, 440 bp, Glycine max
ggggaagcgtgttcattgcgccatggaaatcccgcccttttcccgtttctctctctcatctcactgcttttcccttttcattactttttgatcgagttttatgtttgtcggaagagttcaatcaaatgagtttaaccatgatgatctggggatttcctttctgaggttggtcacgagccctgatgcatccagtgcatctattttcggatggctgataactggatcatttggactaatggctgtgatatatgctgttctcaagtggcagcgaaggtcctcattaaattggattaaagctgcagcaagagaaaagaagaaagtttggaaaaagtttaaagttccgctatcggagcatttgtgggtggaagattttacttatagggaacagccatccacttgttgtttctgcttgacttccctttggccttctcaaaatttag

SEQ ID NO: 28009 - DNA, 379 bp, Glycine max
agtggaaaatactgtctccagtgagaaaaagagaggaaaacctagtggtttcatctttatgtgcagtgcgaagacaaaacctgactgtttccgttatcgtgtcatgggtgtttcagctactaaaaacagtcaggttttaagtatcaatcccgggactaagctttttctttatgattttgatctgaggctgttgtatgggatttacaaagcttcatcttctggtggcatgaaacttgaaccccgagcttttggtggtaactttcctgctcaggtgcggttcaaaattgcttctgattggttcccgctaccagagagcattttcaaaaaggcaatccaggaaaattacaatgagaagcacaagttcaaaacagaacttact

SEQ ID NO: 28010 - DNA, 575 bp, Glycine max
cggtgcgtgggcggacgcgtggggtttaatcctggtggatttgattggcaaaaaacagtggatgattggacagattggaagcgatggatgggaaatcgtggtggtattggtatttcatctgataaaagctgggaatcttggtgggatgaagaaaatgaacacctgaaatactcaaatctcagggggaaaataattgagatagttcttgcatttcgcttctttatgtaccaatatggaattgtctaccacatggatattactcatcataacaaagatttgctggtatttgggctttcttgggcagttttagtaataatactaattgtattgaagatggtatccatgggaaggcgaagatttggcaccgactttcagctcatgtttcgtattctcaaggcacttctttttcttggcttcttgtcagtcatgactgtattatttgtggtatgtggacttaccatagcagatttgtttgctgccattatcgccttcatgccatctggatgggcaattattctgattgcacaagatgcaaggtatgcttgaaaggagctaaactatgggactcagtgaaa

SEQ ID NO: 28011 - DNA, 410 bp, Glycine max
tctttctctttctctgcttcaccattccctttttggttcacgttcatcgtcgtcacccacaaaccccaaccttcaagatttgatttttccatcaatgtatgacgcttaatcgaaaatttcctcaaacccatttcaaatgcggatctcaatttcacggtagaccccacattgctcggattttccgatcgagatctagggtttgcttccccttttcaaagctttgtcagaaatcagcactcttgggttcaattgattccaattcttccttatgagtttaattttcatctgaaaggttcgtaattcgttgatttaagcttctgggtcgcaatgctcaagcaaatcctcagcaagcttccccggaagtcgttgaagcctgactcggacgagttgactaggggagactcggcgcg

SEQ ID NO: 28012 - DNA, 687 bp, Glycine max
cggctcgagcctttcccacacccaacttcacctacacaaatggaatatggaaaattgggaccctctgacccgggtggctcctcacgccgctccactgttcctctcaccaatccaacctcttcttcttcgtccgccagcagcaaaaagaaactcatcatgctctctctcctcgccgccgtcttaatcgttgccgccgccatctccgccgccctaagttaccgttgtccgctctcgcgccaccagcaaccaaaacgggccccacctcgcccacaatcccacacaggcaatttccagaacctgcagcaagacacgtttccctactttatgcatcaattccctccttgacttccctggctccaccactgcctcggagcaagacctcatccacatctccttcaacatgaccctacgccacgtaagccgggcgttctacgcctccagcggcctctcgtttgccgccacaaacccaaaggttagcgcggcttacaacgattgcctcgagctattggaggagtcgatggaggcgctatcacggtccctcgactccgtcctctcgccttcggcgttatccggcagcaccgaggtcaggcccgccactggtggatccaccgaagacgtgatgacgtggctcagcaccgcgctcactaatcaggacacgtgtgcagaggggctccaagacaccagcgg

SEQ ID NO: 28013 - DNA, 268 bp, Glycine max
cggctcgaggattatttgtttgtttcagtcttctcgccatagctgaggagaccctggcagagttcctttccaaggctactggaactgctgtcgactgggtccagatgattgggatgaagcctggtccggattctattggaatcgttgctgtttcccgcaactgtagtggcgtggcagcacgagcctgcggccttgtgagcctagagcccactaaggttgctgagatactagacgatcgacagtcgtggtatcgtgactgtcgatgcgt

SEQ ID NO: 28014 - DNA, 267 bp, Glycine max
cttgaacttcttgagcagcatgaggcagggcaactgggcacaccaggccatgagtgattgatggtggtcctataatcactcgtccatttgttactgtcacttacaccaagtgggtcccactttccttcttaccctttaccaccacctcgtttccctcaacacccttcccttcctacatagtaactaacacacaccactctctctcacgtcacccatttgttccacagacatacacactttctgcacaccacattcccagaaacgatc

SEQ ID NO: 28015 - DNA, 522 bp, Glycine max
gcggcaccgttgcccttaacgccccttccagctgcacattgcactcctccacgcgtgcttttaagcgaaatcgctcgaaccgctatccagggaccttgggccgcttcgtcaatcgtaatcgacgtcttaaacggcaacactgcccacgagtcgcaagccctcttcccaggtcgatgttctcccacgagaaacggtcagagtccacttgatccctacagaccacgcagcagccatgtcatacaaacgccaccacgcagacgtgtctactggtggtgcaggcactcaaatgcagtcagctcggcggccatcgactcaagcaacaattttcaaacaggagacctttgacggcgtctcgccggaggagatcaaaccgcagcgtactccgtcggacggagctgagagcgatgccagctcagatcggccagaccgcgccaggaagaaggctgagcctgtcaaaagtgcatgtgcccaatgtcagaagaggaaaactaaatgttccggtcagcgtccggtttgtcggtt

SEQ ID NO: 28016 - DNA, 439 bp, Glycine max
attcggttggcagagtcgtggaaggggaatgatccgtgtgatggttggaactatgttgtgtgtgctgccggaaagattattactgtcaatttcgagaaacagggtttgcagggtaccatctcccctgcatttgccaatttgactgacttgaggactttgtttctcaatggcaataatttgatcggttctatacctgatagtttgatcactttgcctcagcttcagactcttgatgtgtctgacaccaacctctctggattggttcctaagttcccaccaaaggtgacgttggtgactgcgggaaatgctttgcttgggaaaccccttagtcctggaggtggaccaagtggaactactccttctgggtcttcgaccggtggaagtggtggtgaatcctcaaagggtaattcttcggtgtcgccaggttggattgctggta

SEQ ID NO: 28017 - DNA, 511 bp, Glycine max
tcgttctacgcgtccgctctttctttctttctttccctctctttttcttttccctcactctcttcatttacactctcaaatttttctgaaattcaaattcaaatttcgtttgtttgtgtcttgttacttccatggctgacaacttggacgacggcgagttttggctccctcctcagttcctcaccgacgaagacgacgacgacacgtcgttttgcaacaacctcactgcccaaaacgacgccgtttcgaggtctctgttcttcagctcttcctccagcgagaccgagagcgacgaggaggaccaccacctcgccgagttgactcgccgcgtcgctctcgaactcgatctcaacaacaacaacaactctgcaaaacccaagggcgtgtttgggggtggttctccgcagtcaatcctgagcgcgttcgggagcagcgggaaagggtcgagcccaaacggcgccgttccccacgtgaactcctcgtccacgtgggatctgctgcgggcagccgc

SEQ ID NO: 28018 - DNA, 309 bp, Glycine max
gccccatttccgttccaacatttgtctcagattagtagtatatgctttcaacaatggaagattagaaagctgccagtgtgcgcacgttagcacccaaccccatggattcctctcccccaattcgtaagggaaggaaactataacggaggagggggcaataaacaataagaaaatgttgcggataacgagattctcggggtttttctccgccgcaatgttcgtgactgttcttgttattctctccccctccttccaatccgaagccattcgatcctcccaccgattttccttccggaaagcccctccttt

SEQ ID NO: 28019 - DNA, 401 bp, Glycine max
cttctctcttcttctctccatacatacactcttaccggtgaactcgatttcattattgtaatcagatctgagagagagacagtgtttgcgattgagggaagatgctgaccaagttcgagaccaaaagtaatagagtgaagggactcagtttcctgaagttgcgctccattttgtgaaagatgagagaatccgattcaatttggctttggagagtggcaacattcaaattgcagttgcatcagcaacagcaatcgatgaaaaagatcactggtatcgattaggggttgaagctcttcgtcaaggtaactctggtatagtagagtatgcgtaccagaggactaaaaattttgagaggttgtcattcctttatctcattactggtaacgtggagaaactttcaa

SEQ ID NO: 28020 - DNA, 461 bp, Glycine max
  unsure (1)..(461): unsure at all n locations
nactantcttcttaaaaatgagagagtgcatttccatccacattggccaggccggcattcaggtcggaaatgcttgctgggagctttattgcctcgagcatgccattcaggctgatgggcagatgccgagtgataagaccataggtggtggtgacgatgctttcaacaccttcttcagcgagaccggtgccggaaagcacgtgcctcgtgcagttttcgtggatctcgagcccactgtcattgatgaaatcagaactggcacataccgccaattgttccatcctgagcagctcatcagtggaaaggaagatgcagcaaacaacttcgctcgtggccattatactattgggaaggagatagttgatctttgcttggatcgtatcagaaagcttgcggacaactgcactggtctccagggttttctggtttttaatgccgttggtggtggcactggttcgggt

SEQ ID NO: 28021 - DNA, 566 bp, Glycine max
gaagcacggcaaaactgagaggttgaattgaagaagaagcacaccgacacagtgcacatgaagaggcactggcgtaacaggagccacgacgacgatggcctcccagattcggattccgacacgcgctccagccggagattccctctcacgcgcctcatggcactctttttcttctccatcttcctcttctccctcaccttccttctcccacaccctcccatccaatcagcttccacagcaaagactctgctccaactcaaacaaactcaacaaggtgacgtttctgattctgttgagttgcaaaaagataaactacttggtggccttttagcagatggatttgatgaacaatcttgtctcagcaggtatcattcggccacatacagcaaaggactatcgggaaatccttcatctgacctcatttctagattgagaaaatatgaagctctccacaaaaaatgtggacctttcaccgttttgttataggattcagtgtaaggtcatgtaagtcagtccccagaatgtaaatatgtggtatggatttcatatagtgggttagggaatag

SEQ ID NO: 28022 - DNA, 258 bp, Glycine max
ctgcctccaaacctcacacctcgcgcaatcacgactggaaacgcgcgcaaattgaacacgatgcagcttaccaccctcctcctcgccggccttagcgccgtgagcgtttcagcggtgccttcgatgggcgcatcgtgggtccccaaccaggtcactgtgaaggcggagtacaaggtgcctggcgacaaccctctgtacttctgcgccgacccggcggactacatcctgcagatcgagaaggttgacctggaccccaac

SEQ ID NO: 28023 - DNA, 421 bp, Glycine max
ctgttctgcaagtggcagaggaatatgtggaagttgaagatagcagaaggaggaaaggggttgatatccgtgaacgatttcatcgggcgtcaacactggatatttgatccaaatgcaggaacgccgcaagaacgcgctgaggtagaaaggctacgccatcaattcacaaaaaaccgattttccatcatacaaagcgcggatctcttgatgagaatgcagctcacaaaggagaaccagtgtggtcccattccaccagcagtgaaagtgagagacacagaaaatataacgatggaagacatgattactacaattagaaggggcatcagtttctattcatcaattcaagcccatgatgggcactggcctgcagaatcagctggccctttgtttttccttcaacttttggtaatggcattataca

SEQ ID NO: 28024 - DNA, 274 bp, Glycine max
ctctcgagccgaatcggctcgagctggtctccatgagcacgccaccgctgtcggtgtcgctctcgcagtgtacgaggttgtttggcgcgtctggtttcacgcgcctctgcaagggtctctctctggtcctcatttctcttcacattctccttcacctcttcccttccgctatcacctgcctcgccctcattcccgccaggactattccctttgcctggaacctcattacagctggttatgttgaacaatctgtctatggggtagtggtcagcac

SEQ ID NO: 28025 - DNA, 375 bp, Glycine max
  unsure (1)..(375): unsure at all n locations
ggtggggaatcaagagaaaccactagaatatgaggcacaatttgtccgtgctaaagcaccaaaagggctgattgaacttgtcaatggcaatctatgaagcacggacacttcagtcccttgccgtgtccggtgtccgacacgcgtccgtgtcagtgtctgaccgacacgacacccgtactacgttctatatttgggacattacaggtgtccacgtgtccgtgtctgtgtcgtgtccggtgtccgtgtcggtgttggtgcttcatagatggcaatactgacttaggttgtgcttaaggtctatntgttcattgctgttactcttgatgaacactaattatgtgcctggtgcagctgaagatttcttcgacaagtctc

SEQ ID NO: 28026 - DNA, 280 bp, Glycine max
caaacaccgagaatagtggaaattttaaggcagctttcatgaagcaagttcaatatctagtcaccccattattgttggggatggggctatttcttacatccttttcgtttggtcctcctgaacaggaccagatcagctttcaggagtgtaaaaacaagcttttggaaccaggattagtagaccatattgttgtctcagataaatcagttgccaaagtatatgtaaggcacactcccctcaaccaaacagataatgaagtagcccaagggacccaacctgc

SEQ ID NO: 28027 - DNA, 263 bp, Glycine max
ctaattccttgccggttacagctgggaagatctgctgcaatcgacgtgtccagacgcgtggatgaaggaattaacgaggtatggactctgttatacaccataaaggaatcgtggtggaatttcttttataagtattcaactaattgtatgctcagcttgacaaaatatgttgacagtgacggtaatctctgcatggtaaagttgagcctggatgaaactgatgtgtattcaaactggggtgatttcagctttaccatacaaag

SEQ ID NO: 28028 - DNA, 277 bp, Glycine max
tcactgctcaaatacctctgaatgattcgatggataaagcaacgcacgcaactgacaaacataaccgataaaccaaagtcccatcgccacttgcaattcctttcaccgaactcactcgttcatacccctcattactactattatttattcccctaccttctcctcacttcttactcatctattttctaaaacactactcttctctccataaagccaccactttctgatacccttttgatcgaattgaagaataacgtagaatgcttgtgtgattctg

SEQ ID NO: 28029 - DNA, 326 bp, Glycine max
gttgaattaaatgcccgtcaatagctaaacaactttatgctgtagggcatcgttgtatttctgcttttccaaccaaactcatctgggcacccagaaatttgcaatctttcttctatttcaaccatgttttggcgcttttggaaactgggtgtcagcaagtttgggtctttacggtgaagaaattggtgggttgactttaaattgggggtcaaacatgaagaaatttatgtttttgcaacttgtcacatggatttgggtatgtggtgttgctcacagcagaaggcctgagagtgtgaacattggtgcggtttttgctttcgacactg

SEQ ID NO: 28030 - DNA, 365 bp, Glycine max
gcgaaatgtgtgcagtgatgtgtggttaccctgttttcagatgatcccacgtcttcggaaagtgcgaagcaatttatgcaggaaattcatttattaagccgcttacagcatccaaatattgtccagtattatggttctgaaacagtcgataacaagctttacatataccttgagtatgtatctggaggctccatacataaacttcttcgtgaatatgggcaatttggtgaactagttattcgtagttatactcaacaaattttgtcagggcttgcttatttgcatgctaaaaatactctccatagggatatcaaaggagcaaatatactggtagatccaactggtcgggtcaagttggcagactt

SEQ ID NO: 28031 - DNA, 253 bp, Glycine max
gagcggttctgtgtcgtggcaaagaacccatggcgctatctgttgatcataaaccaaatcgagatgatgaatatgcaagaattcgaggccgctggaggcaaggtgatacaatggaatggccaccgagtatttggtgttctagcaatgtcaaggtctattggtgataggtatttgaagccatggattattccggaccccgaggtgacgtttcttcctcgtgcaaaagatgatgagtgcctcattctggccagtg

SEQ ID NO: 28032 - DNA, 571 bp, Glycine max
  unsure (1)..(571): unsure at all n locations
tctctctctaagctctgaccccaatttctgtggcggctctctctctacttatttttctcttctgagattgagattgagatttggatccaccctcttctccttctcctttttctctgatttgatcttttccttcttcttcttttcattgggttgggttggggtcttcagcttcaacttcaacaacaacaacagctatggttacccaacaacagccacagccacagcttcaggtccagcccacaccaccaccctcttcgcaagatgaggccttgaagaggaacaccgattgtgtctacttccttgcatctcctttgacatgcaaaaagggaaatgaatgtgagtaccgccatagtgagtatgcacgtgttaatcctagggactgtcggtattggttgagtggcaattgcttgaatcccaaatgtccatttcgacatccgcctcttgatggcttgttaggaacacaggcaacagcggctggtggaccatctgtacccccatcacagattccaacagcatctgcagcacatgcaccttataattccagtaaacaagctgtcccttgctatntctt

SEQ ID NO: 28033 - DNA, 482 bp, Glycine max
tctataatcactcactttccacactctcttaatcacatcccttaattatcgttctttctctcactttctctctgtgtgcgccattccgttgttcgcagcttctccttcgccggaacacttctccgaccgatccaactatcaattttccggcattgactccgatgattcctcactcggatccatagctctcacagtctccgggccactttttttttcttcttgttccttgctttccagatccgaatcccgacgcgaaaatcgggagagagaacgaacgaaccgttgatactacatggattagcatcacctcgatgaaaacctcttccacacgcgcctcacgaaacgattcgttttcctctcccacaaaatcatcatcgtccaatcctagggttagggtttttttctcaccgcgacaggatgttcaagaaaatcatgaaaggcgggcacaagaagccctccaagtccgacgccagtgatccggc

SEQ ID NO: 28034 - DNA, 850 bp, Glycine max
tttattcgtccgcggacgcgtgggcttcaagttttggatttgtctcacaatgcatttactggtgaaatcacgtctgctgttggagggttaagcagcttgcaggttttgaatttgtgaaataaacttctgggaggtcctataccacctgccgttggtgagttgaaaacatgttcgagtcttgatttgagctataataagctgaatggaagcataccctgggaaataggaggagctgtgtccttgaaagaacttgtactggaaaagaacttcctaaatgggaaaattccaacgtcaattgagaactgctctttgctaacaactttgattctgtcacagaacaagctgagtggtccaatacctgcagcagttgcaaaacttaccaacctacaaactgtggatgtatcgtttaacaatcttactggagcccttcctaagcaattggctaaccttgccaatcttcttaccttcaatttatctcacaacaaccttcagggtgagctgccggctggtggttttttcaacaccatttcgccttcctctgtttctggcaatccatctctttgtggcgctgcagtaaacaaatcatgccctgctgtcctcccaaagcctattgttctaaatcccaacacctctactgacactggtccgggttcattgcctccaaatttgggtcataaaagaatcattctcagcatttctgcactcattgccattggtgcagctgctgtcattgtaattggtgttattagcatcactgttctcaatctccgtgttcgctcctctacacctcgtgatgcagctgccctcacattttctgcaggggacgaattcagccgttccccgactacag

SEQ ID NO: 28035 - DNA, 407 bp, Glycine max
cttagagtgatggagtggcatgaaagcattcgcatccacggagcgtgaaatccaacgtgcttgactctgcgtgcagagagtgtccaaaacaaaaccccaaaaatttgaaataacactctcagtctcacgcattcttcttcgtctcccactccaccacttcgtaactccccaacctcaccaccaacctacgcgccgagatctaaaccaccgaacattctcgaaccctcccagatcgaacaagttcgtgttcgttcctctctcccttttccttccacaccatttctcattgttcactttcttatttcttcttgcttttttggttaggggcgagagtgatgggggatgagaaaggtgagaagaaagatactatcccagtgccagtgccagtgccgggaacgataagaaga

SEQ ID NO: 28036 - DNA, 283 bp, Glycine max
ggaaaatcatgccaactgcattggagcgggttatctggggattcggggatggatctaccattccagtgtttgaaactcccgttggaaaaataggtgctgccatttgttgggagaacagaatgccactgttaaggacagcaatgtatgccaaaggtgtggagatatattgtgctccaacagctgattccagggatgtttggcaagcatcaatgacccatattgcacttgaaggtggatgttttgttttgtcagcaaaccagttttgtcggagaagggattaccc

SEQ ID NO: 28037 - DNA, 312 bp, Glycine max
aatgttactcccaactgaaggttgaggtcccctttgctactgagcagacaaagccatctttcttattcaacaaagaaacctgacagatccaacaacttgatcggtgcttttatccgcttgtaatgtcgtcgtgtgttctgtttgtcattgggggcttaaaaacatacaagttcccgaaacttcatatatctccatgtattttgaattttaataactatgcccccgtttccaatgcgatgatatttttgtggggatgttccgtataattggatcataactccccacttgctgttgaataactactgtttactg

SEQ ID NO: 28038 - DNA, 482 bp, Glycine max
ggagtggctggtttacagaatttggcggcccaattcaccagcgaccagttgaggatctatcctttgcagttgctcgtttcatacaaaagggtggctcatatgtgaattattacatgtaccatggaggaactaactttggacgatcagctggaggcccattcataactacaagctatgactatgatgctccaattgatgaatatggtttgatcaggcaaccaaaatatagtcatttgaaggagcttcataaagctatcaagcgatgtgaacatgctttggtgtctttggatcccacagttttgtcattaggaacactactgcaggctcatgtattctcttcaggaactggaacatgtgcagcttttctagcaaactataatgcacagtcagctgctacagtgacattcaataacaggcactatgatttacctccttggtccataagcatccttcctgattgcaaaattgatgtatttaatact

SEQ ID NO: 28039 - DNA, 649 bp, Glycine max
  unsure (1)..(649): unsure at all n locations
nnnnnnnnnnnnnnnnnnnnnnnnnnnnnnnnnnnnatcagccgcgtggtgagaagattaatccaaagcgcgcaatgattaaaaactgctaattgtacatattcactcgcatcttgtttaacacgacatcgtggtacttatcgtagacaaggggccccacaatcggagtgtgacacttaaccaaatcgtcccgcaccttcacaatttctgtcatttcatagatcgaattcggatatggcgaggaacacagcagacctcgcaacgaacttcaatgttgctcaccacttcccccacgactctctgctccgctattgctcttcccacgtttctggcttccctcatcccccaactcacttcaccgtttcccagtttgggcatggacaatccaaccccacgtacttgttggaagtaggttcatatggttccgtggtgaagcgctatgttctcaggaagaagcctccggggaaattgcttgcttcagctcatgccgtcgacagagagtttcatgttttctctttttacattgttctccatgcattgggcactcataccaaagttccggttcccaaagttttttgtctgtgcaatgatccaactgttattggaactgcgttttatatcatggaatatttggaggggcgcatatttc

SEQ ID NO: 28040 - DNA, 427 bp, Glycine max
tcgcccatcgtccggttaaccttctctctccttctctccctcccaatcctcttcttccttgccccacggatcctccctccaaagccccattccttcccccccatctccccctccgacgagctcgatgacatcaacctcttcaaccgcgccatttcccattccagcaattcccattccaacccttccaaattcttccacctctcctccaaaaccccctctctcaaaatcgccttcctcttcctcaccaacaccgatctccacttctcccccttatgggacctcttcttctcttcctccccttcccacctcttcaacatttacatccactctgacccctccttcaacctcactctccctctttcccctcttttccgtaacaaattcatctcctccaaacccaccttccgctcctcccctacccttatct

SEQ ID NO: 28041 - DNA, 372 bp, Glycine max
ctttatttttaggtttgatcaattggaggagcagggatactctgatgactagttgctttcatcttttcagaaagaaaggatcttcctcaggcacacagttgaccggagttgatttagatgtttcagaaattcagaatgtcaacatctacacttacagagaattgcgaattgccactgaaggttttagcaatgcaaacaagatagggcagggaggttttggagtagtctataagggaaagctgagaaacggttctttggcagctataaaggttttatcggctgaatcaagacaaggggtccgggagttcttgacagaaatcaaggtgatctctagtatagagcatgagaatctagtcaagatacatggatgtt

SEQ ID NO: 28042 - DNA, 428 bp, Glycine max
gtaagagcaaggagcaggttttctaggtctccacattcacctgcagtttccacttcgcctcatcgaggctcaccttcaaggtcaatgagcaaatcgttttcaaattctcgaagttattctccgggtagacacaggtcaaggagtatatctaggtctccagaggctcgaggtcgctctcgttcttttgaaaggattcgccgttctccacgacgacggtctatttctcctcacaggcattccccacgacgttctcctcataggaggataccttattcaagaagatctagatctccttctcctgtacgacgtagaatgcattctccagtccatcgtagatcaccatcttttcgacgacgtagatcaccttctcctgttcgacgacatagaccgccttctcctgtgcgtcgacgtagatcaccttcccctgt

SEQ ID NO: 28043 - DNA, 522 bp, Glycine max
tttctcgtttcgttcctctttgcaagcttcagctgttggttcgggtatggcttcaacggacgtcagagacattttgacagctttcaatccttcactcgacttcttcgctattaccgccggagacggtcgcgtcaagatatgggacacactgaggggtcaggtccacaccgagttcgccgatattacctcaactcattcaactgctactactttacatcataaatcatccattaacggccatcttgcgctagattatacttgcatcaagtggttctccttcgacaaaaagaggaaaaggaagcatatatcctccttgttagtgcttggaactggtggcggtgatgttttagcacttgacatcgcttctggtcaattgacttggagacttactgactgtcatcctggaggtgtgagagccattgcatcttcagcaaatgtgtcaaccatttataccgctggtgcagatgggatggtatgtttgatagatttcatgacaggaaacctgttggagaaatttaaagc

SEQ ID NO: 28044 - DNA, 395 bp, Glycine max
ctcgagccgattcggctcgagggagtgtggttgcagcagggtcagagtgggagagcaggatagagagtgatgaagttagagaggggatcaaggtgttcaatgcagaagaaaaccctgaagaaaatagtggtgccaaattgaaaagaaatccaattggatgtggaaagaggaaaacatggaaatcagagagttctgaggggtcagaaaataatactcataataatagttgtaatagtaagatcccaattcagtgtaaggcgctgagcaattcttgttcctctgatggaatcaagaaggagcccttttcacaccagaaagattgctgcttgtggagataagtttgagagaggtccaattcataccagaaagatgagatctgaggcacacaagagtgg

SEQ ID NO: 28045 - DNA, 273 bp, Glycine max
gaagcaaagtctttggtgtgaggaaagtgttgatggcgcagagagctgaaccaatattggtcaccacagatgttttccagatggcgaatatcatatggaagcaattcaacattgatacatccaatgcttcctcctcacctccaaaaccattgttaatctttacaccaaccgtgcctggctcataccctgtaatattgttctgccatggattttcccttcgcaatagctactactctgagctcctaggccacatagcttcacatggattcataa

SEQ ID NO: 28046 - DNA, 352 bp, Glycine max
atcctgctaccatgcctgcccagccagcttcctctgccccctggggtgatgcttcgtctgtgcagaacactgcctcttttaacactggaaatccaattgcgagtttacccacacctggatttctgggcatgactgcacctgagccttggagaccaccagcttcaagtagtcagtcaaacaccacagctccatctccagctcaacccaatatgccttggggcatgggcatgccaggaaatcagaatatgaactggggtggggttgtacctgccaacatgaatgtaaactggatgcctgcgcaggtgccagcacctggaaattcagatccaggatgggctgctcctagtcaggg

SEQ ID NO: 28047 - DNA, 347 bp, Glycine max
gtttacttcccccactcattcattatccatcctttcatgtgatgccattatttactctctaaatacatttcattcctgctaggactttgctgtttatcatttgcatttattttttgttggtcctcaaaaaagtgtccccctttctatgtattctatcttcccttaaagcccctctgtgttttgtcacagctattattgctgctttcaatagtaatttattacctaagtagaaaacttgcttatttatcttgtcattgccattctgtgattcaagtttgacaatttcacagcctttggaagaaaaaagcttgcattttttgtcccccccaaaggaatatacttgctct

SEQ ID NO: 28048 - DNA, 260 bp, Glycine max
gccgtcaacaacaacgacgacgaaaccacgaacgagttcttatctcgattcgtgtggataatgcggaagaaggtgaaggaagcgtaccctgactccgacaagcccaccgtcgacggcatgctcgtcgccatcgtcgacatggtcgtctcggagatggaaaagggtaacatcggaacgacgtcgtcgttgttttgttctgctgatttcagcgaggatttgtggagaacggtgtgggaggtgagcagtctggtgctggagga

SEQ ID NO: 28049 - DNA, 449 bp, Glycine max
cagatgcaagatttttgccacctgccgctgctctatgttcactattgagtgtcgcgagactcatgcataatgtcttcctccaacgctctcagcgcatcaaaactggtctcatggaatagaactgggaggctgcagcaaaccctagcggattgcgtggagcggcaaggcaaggcgttgcattcgggataggtttcgacggtgagactgtgtcccgaacgcgcttcccgaggcaggtacttcgattttcgttccaatttcgttcccgcctctgttgaattcgctcaggtctcgcccctctgcaccactctgtacaaaggcgggttccgaattcgaaccgtggagcacttgctttcggctttggaggcttcgggtgtcgataattgcaggatcgagattgaggattcggatactcaaggacacgacgcagagattcctatatttgatgggtc

SEQ ID NO: 28050 - DNA, 407 bp, Glycine max
gttttccaaaagcacgttcttaagctcttttgacgcatttatgcagactgggaggctgcagcaaaccctagcggattgcgtggagcggcaaggcaaggcgttgcattcgggaaaggtttcgacggtgagactgtgtcccgaacgcgcttcccgaggcaggtacttcgattttcgttccaatctcgttcccgcctctgttgaattcgctcaggtctcgcccctctgcaccactctgtacaaaggcgggttccgaattcgaatgtggaagaagttggtttgacggtggccactgatcttgatggcaaaagtgttgagaaaatggcaccacatgtgaatgaaccagtgtatgcttggagaaatgattcttttgttgctgcatttccttccgaagtggttcgaataactta

SEQ ID NO: 28051 - DNA, 273 bp, Glycine max
tcgcgctcgattcgctaagcaacacacccaacaaaaaaccacagaggtgctctgttgctaagttcttaactgtgaatgctccaatagtattatcaatgttgagagtgaagggagggagcaggccgccgtgggttgggctcggcgccgccgtgtgggtccagatcgcgtccgggaacaccttcaccttccccctctactcccactccttgaagtcagttctcggcttcgaccagcgccatgtcacgctcctcggagtcgccatcgacatcggcg

SEQ ID NO: 28052 - DNA, 512 bp, Glycine max
caagccggaagctgccgtgtggaaaacttctccttccgagcctggactggactctgtctttctcttcttcattctcaaaaagtcttcacttttcgaggcaaatgagttatgttgttgtgagggtggtcctcttcagaatcttgtcctaaagggaacttccagcatcgtaatcttattagatcaaaagttttcttttgcaccagagtccggtcagcagcgatgaagtgttttccattctcgtatggagagaaaaaagatgaaccgaaaggcttgcagttgcagtcaacatcgggtcgatcagacaattccacatgtgttgaggctgaggttagaagatctggttctgcattaaattctcaggatgtttcagacaatggcagctcagaatctctcaggaggaatgcgattcccagtttgtcccagagaccctgcaacctcagagtgtttactgtatctgaactgaaatcagccacaaagaatttcagtcgctctgttatgatcggagagggtgg

SEQ ID NO: 28053 - DNA, 274 bp, Glycine max
ctccgttttccaatctcatttttccacctccccgcggacgcagagctgcctctccggcgtcgagtccctcttcctctgctcctcctcctcctcctcctctctcccgcagccacctccgccgtcgccttccgcaagatccacaagatcccagggccgatcaacaccatagtggtgatagtgctggagatatcgctcccccgaccacgttctccgctggctcctatcctcccgccccgacctcgatggcctcaccggcaccgaatccaaccccctc

SEQ ID NO: 28054 - DNA, 265 bp, Glycine max
cggctagagattggaattaacatctccccgaggactagcctccatccaccttttgagttcaaaggggtagggggtgtcaatagtcaaaggaggaggactagtccattgctgtccataatagaaattaagcatcaagatggacataagtccttacactactccaaagaagctatcaccacactccaataaccataacaacatcattgccgatgaggctgcagcgttattagatcacaacaacatgcaccgcagcaaccacagccac

SEQ ID NO: 28055 - DNA, 339 bp, Glycine max
ttgcagaagagatctaaacaacgccgtttcttccattctccgccaaacatccaacaacccctaacaaacgataccaccaaccactacacaattccaattcaattagggtttccaatttccaattttcatggaacccctgtctctccctcctctcccagtcatggacgacgccgaagacccttcctccatttgggacttctcttacctcctcgacttcgacctcgacgaccaagatattattattaataacaacaactctctccctcttcccttaaacgaccaccccgctccaagcgagatccctcaaaacgacagggtccgaaagcgcgacccgaggct

SEQ ID NO: 28056 - DNA, 261 bp, Glycine max
cagcgacggtcaaggtccagaatccagaaccgaatgaataacccactgcccacagattatagaattttggacttgcacgccgtcgtctcccaccactcaatcaccatgccttctccttctgcagatcaatcacaatcccaaccaaaacctaaccccaacctcctttccctcttcctcaggcccatcatcatgctccttctcacctccctcttcttcctcttcctcggcttcgccgccttcctcctcctcaacctcttcctc

SEQ ID NO: 28057 - DNA, 369 bp, Glycine max
ctaaaaaagcagacttgattccaccatgggagcaatcaatgcaaccctctatattccaatccaagtcgaaaagatgatacatttaacataacatacaccatatccccaattcaacccctatggggtataacagttgtttccaaaaaaacggtcatagccaggcttttaaatgctggctcatatcacggttttgtggcatttcttggtattgtgagaattttcagataagtgcagtcgatacagtcacaatttgtgattgcagacacttagaaaaccttgacgttgcggctgaaatggcagtcgcaaatcctttttacaatcttggtatcaacttcatccaaaaagaatcaaagaatataaaacccatct

SEQ ID NO: 28058 - DNA, 254 bp, Glycine max
tctcactaacattattcattccacactatggcctcttcctggaaccaactctcattctttttgctcttggtgcttgttatctccccccaaattcaagccagagaaggcaagctcttcagcttgttctcccatttcagaaccatctataatgtcaaagaccctcttgacaaaacaaatgctgaatctccagcactaccaccaggaccaacaccaaaaccagcctcagcaccagaactagaaccagaatcagcacc

SEQ ID NO: 28059 - DNA, 424 bp, Glycine max
cgtggaaaccgcaaggtcgctccgctcgcgtcgccgcataacacaacttccaattttcacaaccactcccatttcacacttgatctaactactcattagctcactcattagtatcattattcccattttcaattttcaattcaccttcttcctctgccagagcatgacgctgctgcgtcttcgaatcctcctcattgctctgcttctcatgttgtgcgccccattttcatcttcttccaaacccaaagaccccttcctcggcgtcgcccccgaagatgacgactattacaagtcttccgatgtaaaagttgtaaagatggatccggaaaattcaccaaggctcagttcaatgatgatttctgcgattgtgctgatggcaccgatgaacctggtacatcggcatgtcctggtggaaaattctatt

SEQ ID NO: 28060 - DNA, 323 bp, Glycine max
cggctcgagcccaccctacccggagcttcgttctggacattattctctcttctcttctcttctgtgctgtgcttaatttccagtttttgttttcagcaatggatgacgtcaaagacaaggtgaagggcttcatgaagaaagtcaacaaccctttctcttcttcctcatctgccaaattcaagggccaaggtagagtccttggttcttcttcttctacacccgctaattccctatctaccccgcgcccctacccgaagttgcagaaacccgtcgtcgtgttagcctgtaccaagtccaaacccgtgccccagaaaacggagcaa

SEQ ID NO: 28061 - DNA, 972 bp, Glycine max
ctctgcgctctcgaccacctccattccatgggcatcgcctaccgcgacctaaaacccgaaaatgtcctcgtccaaaacaccggccacgtcaccctcaccgatttcgacctctcccgaaagctcaatcccaaacctaaacctaatcctaaccctgtcatcgttccttcaatccccttgccaaattccaacgttccccaacctcgccgcaagcaccgccggaatttatcccggtggatctccttcttcccgccggacgggactaacaacaacaacaaaaacggactcaagaaggccaagtccgcgcaagtcagcccggtgagtcggagaaaaccgagtttctccagcggcgaacgatccaactcgttcgtcggcacggaagaatacgtctccccggaggtcgtccgcggcgacggacacgagttcgccgtcgattggtgggcgcttggaatactaatctacgaaatgctatacggtacgacgccgtttaagggaaagaatcgcaaggaaacgtttcggaatgttatcacgaagccgccggtttttgtgggaaagagaacggcgttgacggatcttattgagaagcttttggagaaggatccgacgaagcggttggggtacacgcgcggtgccgtggagatcaaggagcacgagtttttccgaggggttcggtgggagcttttgacggaggtggtgcgcccgccgttcattccgacgcgggacgacggcgccggagattcgacggataggatttccgaccggaattgtggcttcgatattaggggttactttctgaatcttaaatcgtcgccgtcgttgccgggttcgccgttgccatcgccgtcgtgcaggtttaagaagaatgtttcgctaacagaattctaacgcatgtgcagtattgcacgtgcgagagttagttgttgttttttttagtaatattgtaattttgtgcatatagaataacggtagatagtg

SEQ ID NO: 28062 - DNA, 287 bp, Glycine max
gaagaaccctaaccatctccgcagcgcaagctcgctcattgcaaccctccaaactatcaactgggatcgtaaccgctctctcgccctcgccagatttgattggatcggcttcctgcattcttggactcgggaatttggaccaaaaacagttccccaaatcttgctttttgtcttgctcttgtttctaagtcgttaatgtcagtgcagcgaagtaatctctggcaagttgattgtggcaggggagaggagggttcaaaactgggcagcatataaacttggattaccca

SEQ ID NO: 28063 - DNA, 536 bp, Glycine max
accagctgtcaccaccttttcctcacccacgggtgctcttatcctgaccctagtcaacaactgcaactacaccgtgtggcccggcatccagcccaacgccggccaccccgtcctcgccggcggcggcctcaccctccgctccctcacccaccaatccatccccgtccccgacgcccactggtccggccgcgtctgggcccgcaccggctgctcctactccggcaccgccttctcctgcgccagcggcgactgcggcggccgcctccagtgcaacggcgccgggggcgccgcacccgccaccctcgcccagctcgaggtccaccacggcagcaacgactacgcctcctacggcgtcagcctcgtcgacggttttaacgtccccatgaccttcaccccgcacgagggcaaaggcgtgtgccctgtcgtgggttgccgcaacgaccttctcgccacgtgtccgcgcgtgctgcagcaccgtgtgcccgcgggtcacggacccgtggtggcttgcaagagcgggtgcgaggcttttcaca

SEQ ID NO: 28064 - DNA, 342 bp, Glycine max
cgggtattgttattggttccgtggttggtgtgttgttgattctgctgcttttgttctttttgtgtagaaaaaggaacaagaaagatgagaatgaaactttgccacctgagaagcgtgtcgtggaaggtgaagtagtgtctcgtgagaagagtaatgagagtggcgggaattcaggttcagtggagaagagtgaggttcggagtagcagtggtggtggtggagataataagagtttggtgttttttgggaatgtgagtagagtttttagtttggatgagttgttgagggcatcagctgaagttttggggaaaggcacctttgggacgacttataaggcgacga

SEQ ID NO: 28065 - DNA, 389 bp, Glycine max
gaaatcaaagacattgaatctcacaaaaaatgggtccaagctcgaagaaagcttcacctaaatcaggtgtgacaaagcacatgaagggcttcagcctctgcaactcaaccctaaaagtaaatgggcaagtcatcctctcccaagtccccaagaacgtaaccctcaccccatgcacctacgacactcacaccaccggatgcttcctcggtttccacgccacctccccaaaatcccgccacgtggcacccttaggacagcttaaaaacataagcttcacttccatcttccggttcaaggatttggtggaccactctctggaccggctccaacggccgcgacctggaaaccgaaacccaattcctcatgctccaatcccacccttatgttct

SEQ ID NO: 28066 - DNA, 257 bp, Glycine max
ctcacgcctctcatggagggccccgacccggacggaaccgaaaatggggatccgaagcgagtcgggtcgggcctcggacactggatgacggggcagctgtcacgtgccccctccgtgtcgtcgtacaagaggtctgatctgagactcctcctcggcgtcatgggtgctcctctcgcccccgttcacgtctcctccaccgaccccttgcctcatctcagcatcaaagacactcccattgagacttcatccgctcagta

SEQ ID NO: 28067 - DNA, 429 bp, Glycine max
tgggagaacttcgtcgccaaatgcacagtgcaaatcccagtttcactacatgatggctgacttggattgtttaataaagattttggatcatcgtggatttgtcgaatgctttaagaacactgcgatgctcagctacctgttgtttgggcctttgtgacttgttttgtcaaactcattactaatatatggatcttcaaaatcggactcagaaaatcaaccccgcttgtgtatgtgtaaattgggggggcagcttttctaggagcttaaaaacgtttttttggccctctaagttagcatgtctttttttgtccttcccaattcatttttctaattttagttcaggtaaggggcgggtttttttttttttttttttttgacccttgtaaaatattttgtttatttttagcttatgttagtttgcattttttc

SEQ ID NO: 28068 - DNA, 182 bp, Glycine max
tttagagtcttttcatctgtatcaccaccagtataagatgcagaataccaatgaatgccctttgcttttgtaatgtttaggatttgtacttatgtatggacttgttgtacaatttcaatgcaaaaaagatttgaagattccaaaatctatagtaattccaagaaatatatgtgaatatgcag

SEQ ID NO: 28069 - DNA, 328 bp, Glycine max
ctcgagcgattgattttacgaagagcaatgagtggacaggtggaaggtcatttcaaaggagatgcctgcatcacattggtcatgaacaaaatccatatgaacaagctatatctatcattgggaaaacattgtcttcctttgatgaggataacttaattccctgttctggttttggagatgcatcaacacatgaccaggaagtttttagtttctatccggatgagagattttgtcgtggatttgaagaagtgttggaacggtacagggagttggtccctcaattaaagcttgcaggaccaacatcatttgccccagtcattgagatggc

SEQ ID NO: 28070 - DNA, 478 bp, Glycine max
ctcaaaaacataattaagcattaacattccacaccttttcacacacacacaaaaaaaacaaccctctaaaatctaagcctcaaagagtgctaaactttgttacaatgaacatgttaggccttagagacctagttttcatagctccaactccttctggacttcaccaccatcaacaacaccgacccatttaagcagaacaccattcaaaccttcctttgccttcacacgcctctatcagtgttggtcttggcattttccctctcctaacagtgccacacaccaatgatgttcaagttcaggttcaagactgtgccaacaacaacaacaacaccgacaccaactattggaacctgaagatgtgtggtgccactgaagtgaattccacaagaaaaggtgttatgaacatggaggatgagggaagcaataagcaaatgatggagagtgaggaaggtgggggtgagtttagggtgtgccagga

SEQ ID NO: 28071 - DNA, 361 bp, Glycine max
tacatgtatgacattatggatgcttacttctgtactcgaagtcatgcggagaagtgagaaatgctcggggtcatgtgtatgccacaatcatgttgaatagttgcttatcctaattccttgtttttctctgatttggcataattgaaacaaatataagcggtgcatgcatctgaagaagttatgtatcggggcgtgcattttttgtatgtaatggataatacttatgcaataactcaggaagggggcaatgtctcaagacgggttgaatcctgtcttaccaacctagtcatattgccaagttaagcatatattaacagcattaatagtaaggtttgatggaatatcttgttgaaggagtttc

SEQ ID NO: 28072 - DNA, 244 bp, Glycine max
caaattctcaatcaaaccaaaacactaaaacacacagcaatggagatattatcacaaatgtggtctctgttagggttacttaccgttctccagaacgttcttccatcgcagcttctctccttgcttcattctctatacgaatctctgcaagatctactttctccgtattcgtatttcgagattcctgaattcaacggctactgcggcgtcgaactcaacgacctctaccgccatgtgcacctct

SEQ ID NO: 28073 - DNA, 241 bp, Glycine max
ggaagctggaggattttcatcttccacagcgtcaacatgttatacttccaaaccatatcattgtgcctgattctgaaaagaacaagtttagctttggaagtttgggagttgctttgggagttaatacaagctatgtaagtggcccagagagcgaaaagagttctacacctgtttctgacgcatctcagactgttgaagaaactgtggaggagcaggattcaagtcaaaatgctgcggctta

SEQ ID NO: 28074 - DNA, 327 bp, Glycine max
ggtagtcaaggcctaagatcagaaaacagtgctgaccagaataaaaggcttggtaaaaaaaggaaggaccaaagtgatgaagaagaagaaggtggggaagagaatgaagatgatgaggacccctcagcacagaagaaagctcgtgtggtttggtctgttgagctgcatagaaaatttgttgctgcagttaatcaactgggcctagataaggctgttcccaagaaaatacttgacctgatgaatgttgaagggcttacaagggaaaatgttgcaagccatctacagaaatatagactctatctgaaaaaggcagcccagcaagcgtac

SEQ ID NO: 28075 - DNA, 744 bp, Glycine max
caaaagttggagtgcaaacatctcagatgcaaatgttaccaacaaatactcatatgttctcctgggagagttttgatgaagatatttcttctcttgatgacggctctgcaattacaatcactacttctggtctcctggaacagataaatgttacacgggatacgagtgattatctttggtatataactagtgttgatataggttcatccgaatcctttctccgaggaggcaaactacccactctcattgttcaatccacaggccatgctgtgcatgtttttatcaatggtcaactttctggttctgcctatggaacgagggaggataggagattcagatatactggcacagtaaacctccgtgctggaacaaacagaatagctctgctcagtgttgctgttggacttccaaatgtgggaggacatttcgagacttggaacacaggaatccttggtccagttgtactccgtggacttaaccaaggaaagttggacttatcttggcagaaatggacttatcaggttgggctgaaaggtgaggccatgaatcttgcatctccaaatggtatctcttctgtagagtggatgcagtctgcattagtttcagagaaaaatcaaccactgacttggcacaagacttattttgatgctccagatggagacgagccgttagcattggacatggagggtatgggttcaggtcaaatatggattaatgggctgagcattggaagatactggactg

SEQ ID NO: 28076 - DNA, 351 bp, Glycine max
  unsure (1)..(351): unsure at all n locations
cggctcgaggttatgttaagtatggtttatggcaatttattatatgacatttgaatgaatttgatagatagtagaccggtttagtggtcgattgcctggttacgtccggtatggaaacgatagattttcgttcagccatgtggaggatgtggtggaagggcacattgcagcaatgaaaaaaggagaagctgggaataggtatctactaacgggggaaaatgcgtccttcaagcatgtttttgatatggcatcttcgagtacgcagacgaaaaaaccacngtgcagcagctcagngtggcgaatncttcgcgatggctgcctcactgtantcttctctagaatcaccggaag

SEQ ID NO: 28077 - DNA, 814 bp, Glycine max
catcaccatcacatacatgatgatacgttcatcctcgccactcttcactccccccactttcttcgatttctgaaataccttacaaaacaaacagtcccagaaacaatcattaaactcccaatcttcgttttattcccactcaccactcactctctaacctcaattttttcaaattaaagtttcctcctttcactgctccaatctccccctctttgatctctcacttcaaccacgagatgctcaaaacttccgcttttcaagtttgccactttcgttcgaattctcgagaaagcaaagtattttaaatttgtggagaggcttgtaatgctgaatgttgttgccaaccagtggagtagggatgaattctgcaatggatgatatgaatttgattcagcaaacccagagacatcacttggttgtgagggagattggcgaggagattgatttagaaataggagctggggaggatgacccgtcatttggtagcactactctgattggtgcaccgatgcgggaatcttctgtagaagaacatggtgagagcaagcagatggggatgatttctcagcttcctaatgatgctcaagatatgtccaagacccaacaagggaaaaggaagaaaaaggttgttaaaagatggagagaagaatgggcagacacctataagtgggcttatgttgatgtgaaggatggtacaccgaggattttctgctctgtctgcagggagtacggtcggaagcatagaagaaatccttatgggaatgagggcagtcgtaatatgcatatcagtgccctggaagaacacaacaacagt

SEQ ID NO: 28078 - DNA, 228 bp, Glycine max
gcacaacaacatgtctcagttttccacctcccaacgctgactaaaaaaaaaggaatcacagaaacagagtatccacagcgtatagtcccaaaatgcatctggatcaacatgaccccaaaacgacaacaagagcaacaaaagtcctccctctgttcctctacttgttcttcttcttcagcctcgcactcttcggctcctcccatgctcccctccgacgcagtatcgtta

SEQ ID NO: 28079 - DNA, 412 bp, Glycine max
gaacaactccatcaccgatttccaattccttcgtcccaatccaattaacgaaatgggtaagaggaaacaaaaggacttacaacaatcctcccaaaccgacaccgtttcaacaccttccagcattttcagcaagctcttcgccatcgcgccggtacggaccaccgcaaccaccgccgcctctctattttccgatgacaacccctttcgaagaaaacctactccactttccgactcaacaaaccgcactcagaaccctaacgacggcgaccaccccgtgaacaccgattccggcgaggaaaagaagcggaagaggaacaaggaaaaaacggacaaaaccccagccccagccatcgataccgttgtttccgtaatcgaagcttcggataaatcggagaagaagaggaaacgcgat

SEQ ID NO: 28080 - DNA, 792 bp, Glycine max
agaatggtcgccattgctgacctagcctcaagccctcaagccccatggccatcgccatgggtcacgaacactccaagttgtcagaaggaaaaggatcgcgtcgtgcccgcttcaaagagcgtctgcgtcttcactttcgccgccgcagaagcggcaatggctcttccgatcacaagctcctccacgccgataacttcgccggaatcgctctcctcgccctccttcgcgcggagatgaagttcaaggataaatggattgcgtgcctttccctcggagaacagactttccgtaccaacacctctgaccacacagacaaacctctttggaactctgaaaagaaacttcttttggaacagaatggggctcatgttgcaagaatttctgtcttcgagaccaaccgaatgtccagcaatactcttgttggatactgtgaggttgatctacttgaatttctgaccaaggattctgattctgacgtcgaggtattcaaccttttagatccatcagtgcctggaaaagtggttggcaacatttccatttcatgcactgtagaggatccgattggaacggagaaaggcttcgttagacgcattttatctatagtggactacaatgaagatgggatgctttcactttctgaattttctgacctgattgatgcttttggcaatcaagttgcaaccagcaagaaagaagagctgttcaaagcagctgacaaaaatggagatgtgtgttgtgagcatggacgagttggcttcccttcttacttttcatcaagaacgggaaccatta

SEQ ID NO: 28081 - DNA, 496 bp, Glycine max
caccttcatcatggctgagttcttcttcccaaacaagtcggtcggcgaccagaacagtgtcgaggattggcgcatccgcggcatgactcctttgactcctcccgatctcctccagcatgaaattcgccagacagacaagtcaagagagactgtcgtcaagtcccgcaaagaggctgtcgaggtcgtacacggcgtggacgagaagaggagactcatggttgtcattggtccttgctccatccacgaccctgccatggcattggaatactgcgaccgtctgctcgagctcaagaagaagtacgaggacgacttgctcattgtgatgaggagctacctggagaagcctagaactactgttggctggaagggcctgatcaacgaccccgatatcgacaacactttcaacatcaacaagggtcttcgcactgccagacaaatgttccttgatctgactaccaaaggcatgcctttggccagcgagatgctggataccatc

SEQ ID NO: 28082 - DNA, 524 bp, Glycine max
  unsure (1)..(524): unsure at all n locations
actaggcctagatatccagtctcatctaatggtggacataatgacaaacagaattttaggatacaggataggtcatatcatcatgatcaatactacaacgggacaactgggttttataccatggcaatggaggaaggtgcaagagctaggccatatgcagtgcctttgccaaggacacctgcagtgacgttatcgaggcctcccaattcagggtcaacaactaatggacaacaccaatttgtgcagaacatgggtcctcctataccacctccaaattggattactagagtaccggatacgaatggaatatatgctgggcatcaagaaactgcattggggggaacttatgataagcagaacatgaaggtgtaccaagttaaaactcgtcaaccccaagatatgccagagtacgggaatcaatgatgactggtgtggattntattcgccttgtgacgaagtgccctcttccattcctcgggctgtttctcaaatcggagcccatccaagttctacaatggagtatg

SEQ ID NO: 28083 - DNA, 563 bp, Glycine max
gcagtgaagaaaatgccttctacagaagaagaggcaatatctcggagtcaatatcaacaaggagttagcgcgtggaattttgatattgatgatttgaaagctcaagcttcattggtgagggatgatgatgatattgcagagatgagggaagaagctgaaaagaaattttttactaattacaaggccattgcaattgattcccagtctggtactgtcaaaatgaattcagagaaatcaccacagaataaaatcacatcacaggtaggtgcttttgacataaaacagactgagcaggatgaatacttgaacaaaaaggagaagaatcccaaaagtgatctccaggaacctggattgcccaaaaatattatttggaagagaaatgggtcaattacggaggcaacaacatctactctagagaaagatataggtatgtgcaaaatcaaaggtcaatccaggaaaatccgtcaaacccaaagtggaccgctgttgccaggcactgttctcagtcattctgcattagaaagggacgaacattagaaaggcttgagaatggaaatcagtta

SEQ ID NO: 28084 - DNA, 269 bp, Glycine max
gaggggaaatccgagtctctcatctctcttgttggtcttactctgcatcatctctctcatccttgccttggctcaggcagattcagattctcatttcgaaggctttgaagccgaagacgacgatgacgacttggaagactcttccatccatccagcctctctccgatcagcccccctctccgaccctactcccactccccagcctccaccttcggatctccccaaattccctcccttcgatttttgggacgacgatgaattcgaaggcg

SEQ ID NO: 28085 - DNA, 253 bp, Glycine max
ttcacagctttcttggccaaaaatgaaacctactgatgtgcagaagtatacaaaggtgtttatggaaccccccacccccacggatgggaaaatcactggggagcaggcacgcagtctatttttaagctggagattacccatagatgtcttaaagaaggtgtgggacttgtctgatcaggacaatgatagcatgctttctttgaaggagttttgctttgctctttatttgatggaacgttacagggaaggtcgt

SEQ ID NO: 28086 - DNA, 375 bp, Glycine max
atggactagacttgaaactttcagcaaaagaaaaggaagcaacacatgcaaatagggttctgttacttcttcatgccaacaagattgagcaggcacgagaacttgtttctgcattaccagacatgtttccagaaagtgtcataccgatattgctgcaagctgccctcttggttagagagaacaaagctggaagggctgaggaaatactagcacagtttgctagtaagttccctgagaagtccaaagttgttcacttagcccgggctcaggtagctgctgctgctggccagccacatattgcagcgggttctctggctaagatatcaggtatccaacacatggctcttatgttgccaccctggggtcttaaaagga

SEQ ID NO: 28087 - DNA, 384 bp, Glycine max
tcgaaattggcgctctgctacgaatccatcttcttctccaacttccatttcaccgatcaaattcaattcaatgggtgccaatcacagtcgcgaagatctgttggaatcttccgattcagagcaagaggagcatgaaaccttcgaagacgccaccgaaggaagcgccgaacggaaaccgtcaacgccgtcatccctcgatgacgtggaggccaaactcaaagccctgaaactcaaatactcctgcaactccacccccgccgtcaataacgccgtcaagctctacgtccacatcggcgggaacacccccaaagccaaatgggtaacttgcgaaaaactcacctcttattcattcgtcaaaacccactccgacaccgacacagacga

SEQ ID NO: 28088 - DNA, 295 bp, Glycine max
ctcatcgatctacacacatacttagtttctcctactacacgacgcacaagcatggggaagcctgcgaagatcggagagtcgggtggatacgccggcgatcgtcgggatctgagggctactccggaccggctgatcgaggtgaaggtcacggcggacaacagcagctgcatccgctccatctccttcatctacatcggagccgatggcaaaccgtacgaggaggggccatggggtttcggccatgctggcacggagtacaagattgatctgtgcaggttcgacgagagcttgacgg

SEQ ID NO: 28089 - DNA, 297 bp, Glycine max
  unsure (1)..(297): unsure at all n locations
actcgagccgannatcggctcgagatctttcctctccctctctctctctctttctatctctctgtggtgtaagcaacaaaattccatcaagtgtgatctctaaataatatgtggagttgtgtgtgtgtggagtactcttacttgataattttcatgtctgcaattgcaagtgcaagtgccgtcgaaccgtgccactagaccaaaaagtgtttttgttgttgccaccatgtgtgtgcaagatggtgaacaagctggtgaagatcatatagagagaacgttgataacacatagagttca

SEQ ID NO: 28090 - DNA, 348 bp, Glycine max
  unsure (1)..(348): unsure at all n locations
atacagcataatacttaataccatcggcaacagcggaaaaaggcagaaaccgaaatgcaatgttcttccatcttttatcctcagacacataaaatatggtgctttaagccaagtctttcagtaacgccaccgccacaacaacaacaacaacaacgaacctctcacgaagaaaaaccgaagccgataaccagtgtttcgaacccatttgtgaagcactgcctcaaacttcgcaattcctcttcttatcgtcgctctcatgcttctgctattgttgtgggtgctacccctataagcggattctcctgatgggttggataaatccactgctcgntgtgcgcgtgactccgt

SEQ ID NO: 28091 - DNA, 281 bp, Glycine max
gcttttaatttggaagagagacaaaccagcaagagtggagatggcgacgtcgacgtgcttcctgtgtccgtctacggcgagtttgaaaggcagggccagattcagaatcagaatcagatgcagcagcagcgtgtcggtcaatattcgaagggagcccgaacctgtaacgacgctggtgaaagcgtttgctcccgccacggtggcgaatctaggtccaggcttcgacttcctaggctgcgcgtggacggactcggagacttgtgtcggtgaaggttgaccac

SEQ ID NO: 28092 - DNA, 298 bp, Glycine max
cgggagacatagaaatcttcaaggtctggcatctgctattcttaggctttgggagaaaagtttagttgcaaagattggtgtccagcgtggtattgtgaataccaacaatgaactgatggctcaggaactgaaggcattaacaggaggtaccttactcctaaggaataaatattacattgtaatatatcgtgggaaggactttgttcccaaccagggtggctgctgttactgctgaaagacaggcattgacaaaacaggtgcaggatgttgaggagaaggtgcggtgcaaagctctcga

SEQ ID NO: 28093 - DNA, 452 bp, Glycine max
gatgatatggcagatgaatttgaaatggaagatgtagaagacgacatggatgatgaatctattgatagagaaaggggtggtgtagagtctgacatagatgattatgatcactcgagtggtaagggcgtagacactacagctgctcaggccagaagaggacaggatatccagggaattccttgggatagccttaacctcactagagatagatatcggcaaactaggcttgcgcaatacaagaattatgaaaatatccctggttccggggacaagtcggggaaggattgtcagaataccaaaaaaggatactccttttatgacttcagaaaaaattcaagatcagtaaagtcttcaattcttcattttcagttgaggaatttggtatgggctacatcaaagcatgatgtataccttatttcacagttttcaataatgcattggtcctctttgac

SEQ ID NO: 28094 - DNA, 338 bp, Glycine max
cacttttccatctcgattgggatcaaaatctattgttgacttccatgctcgagctcctggatcccaacttcacaaccaaacagctgttcaagcacgagagacaggacttgcaaatgagtatacatatgatatttggggtgaccatttttctggacttcacttgttagttccaaaaaatgttgcttccatgaagtctagtcccgtggcaaataatttcgacagcttttttgtaagatggccacaaacccttgtgacaaattctcaagaaggctaataagttgaaaaacgtcattccaagttttcttgcctccactccgggcctatgttaataagaagac

SEQ ID NO: 28095 - DNA, 462 bp, Glycine max
tgacaattggattcggtgtaagagctctcctcatttcctctcgaaacagtaaccctctctcgtcgccgccactgctctcactcttctctccctttagcgccgtcagatcccttcattctccgccgcctttctccgcagccgaagccatgcccgaaactgagactcacgatgtggagtggccggcgaacgcgttagggacactttcatcagcttcttccaggacaaaaatcacgtcaactggaagtctagccctgtcgtccccttcaatgaccccactctcctcttcgccaacgctggtatgaaccagttcaagcccatctttttgggaactgcggatcctaacactgccttgagcaagctctctcgtgcttgcaacacacagaagtgcattcgagctggcggtaaacacaatgatcttgatgatgtagggaaggatacttaccatcacaccttctttgagat

SEQ ID NO: 28096 - DNA, 394 bp, Glycine max
ggcgtaacagaggaagcggttgaagaaagaaatggtctgagatggagatttgacttctcctcctggttgttgatttccattgcgcactctaatcgcaattgatttgattttacaaagagagagaagaaacaattggaatttgcaaggatgaagagctctctgaaaaaattgcgaggtctggcacttcacaatcacaagcatgtctcctccaagtccattcggcctctgggccagcttgacgagctcgcccgggcaacccaggatatgcaagacatgagggactgctatgacaccttgctttccgccgccgcagcaaccgccagcagtttttgtgaattctccgagtccttgcgggacatgggctcttgtcttcttcagaagactgctttaaatg

SEQ ID NO: 28097 - DNA, 681 bp, Glycine max
cttcattcataattatattacaaaatctcataatattaataatgtcttccgatatctgtggcattctccctcgtattctcatcgtttccaggcgaaccgttcgcaaaaacaagttcgttgatttcgttggagaataccaccttgaccttatagtaagctacggtggggtgcccgtgattgtccctcgcgtttccggcgttcacacgttgctcaacagctttgagccaattcatggtgttcttctctgcgaaggtgaagatattgaggcatgttggtatgatcacaacgacgatcatgacagtgatggcttggatctttcccaagaggagttggaagaaatcagaaggcttcatgcgagtgacacctccattgacaaagagaaagactcaattgagttgagtctggccaaactctgcctcgaaaggaacattccctacttgggaatctgcaggggctcccaggttctcaatgtcgcaatgttggggtccctttaccaggacatagggaaagagctttcaaaaaaatgtgatcatagccagagagtgatgcacatcaactatgatgattatgatggtcatagacatgctgttaaactggtcaaaaacacccctttgtgtcattggtttcagggtgaagaggaagaaaaagaagagggggaagaaatggagatttgggtgaata

SEQ ID NO: 28098 - DNA, 464 bp, Glycine max
ttcacgcgtccgcccacgcgtccgattcataccccttatcaaatctccacacatatatattacgtccaccgatctctctgtcattctccctcgcgttctcattgtctctagacgaagcgttcgcaaaaacaagttcgttgatttcgttggtgagtatcaccttgatcttatagtagggtatggcgcggtgcccgtgattgttcctcgtgtttccggggtgcacatgttgttggatagctttgagccaatccacggcgtgcttctgtgtgaaggagaagacattgatccttcttgttacgaacaagataccgcgggtctttcagaagaggaattggaagagattagaaggcttcatgcaagtgacacggccattgacaaagagaaagactcaattgagttgagcctcgccaagctatgcctcgagaggaacattccctatttgggaatctgcaggggctcacaga

SEQ ID NO: 28099 - DNA, 315 bp, Glycine max
cacaatttctgggtcacccttaccattccccttctaccactctgcatattgaaatcggctataactataagagcaaatcgtaactttctctgggtcatgcatgctgaagggaacacagacccttatcatcccttgaaacctctcttcaaaaaataggctcttgcccagtgacaggctgatagcagagccaggtgctaaaaaggtcgaagatgtatatgaacccaatccaaatgaaataaacgccacttctgtgttcaggcaattggaatttgtcaccccagttacgcaagttgaattttttccacaagaagtgag

SEQ ID NO: 28100 - DNA, 561 bp, Glycine max
ggctcgagcaagaaatagaagtgagtggttcgttcgagattggagacgaaaattgaattgcgtgagtgaaagttacatcaaccccttacgagcaaaccaattccctttgcaagcaatctcagatagctcattcacacaatccctctctccgctgcttatcggaatcggcatggtccaaccggcgccggcgatgactcagttcctcaactccgtcctctcccagcgcggcccctccgccgtcccctactccgaggacaccaagtggctgatccgccagcacctcgtggccctcaccaccgccttcccttccctcgagcccaaaacggcgtcgttcactcacaacgacggccgttccgtcaacctcctccaggccgacggcaccatccccatgacgttccaaggcgtcacctacaacatccccgtcgtcatctggctcatggagtcctaccctcgccacccgccctgcgtctacgtcaatcccacgcgcgacatgatcatcaagcgccctcatcctcacgttaacccttctggcttggtttccgtcccttacttgcagaattg

SEQ ID NO: 28101 - DNA, 491 bp, Glycine max
ccggtgaagcccgtaactgataagggtctatccgctttggagttggagaagcttccaaaaatcaccggcaaagaactcgtcttgggcaccgaatgcgccgtctgcctcgacgagatcgagagcgagcaaccggctagagtggtccccggttgcaaccatggatttcatgtccaatgcgctgacacctggctctctaagcaccctatttgccccgtttgtaggaccaagctggacccgcaaatcttcacttcccaaagcccctgctgaacaatgaagcattcattattcaaggaatgaataagggaagccaaattttcaattagtaatttcataattatctttattgttttctttgtcagttctttatagtttcttgaacttccgttactaattattattattattattatgtgtcgtgtagtggttcagtggttgtggtgtgttatggcctggatgaatttagcagtagtacccgaaaattcagaagccaa

SEQ ID NO: 28102 - DNA, 568 bp, Glycine max
ggtcattttttgccagtggagtgattgatgggatgatatatgtagctgggggaaatagtactgatctttatgagcttgattctgctgaggtgttggatcctctcaatgggagttggcgccctattgccaacatgggaacaaatatggcatcttatgatgctgcagttctcaatgggaaacttctggtgactgaagggtggttgtggcctttttatgtctctccaagaggccaggtctatgatccaagaactaataactgggaaaatatggctgttggactcagagaacggtggacaggttcgagtgtggttgtttaccggcacttatttgttgtttctgagctcgaaagaatgaagctaaaggtctatgaccctgaaaccgattcctgtgaagccatagaagggcttcctttgcccgagcaaatacgcaagccttttgctgtgaatgcttgtgattgtcatatttatgttgtgggtcaaaatcttgtggttggtgttggccatatcactagactgaacccagaagagagttgtaaggaaaaatggaacttcagtgttcgatggcatgt

SEQ ID NO: 28103 - DNA, 359 bp, Glycine max
attcaacttcccacaccactgaccctcagaggctcaaaaacatttcaaccttggaaatatactacttcttaataataaaaataataatactaataaaactgcaaagacaaatattattttcatcattaatttttttcttcttcctctctgtcattcggttaattagggtacacaaacaatgatggcttcaacaacgcaccagttttagcttttaattttaatttaaaatcagaattgtagtaggttgctagaagaatgaaagactaagtttggggtccatgcatgcaaaaaatgatgaagccaccttcaaactcttccttcccttcctttctcagagtgaagcctcgtctctcttctta

SEQ ID NO: 28104 - DNA, 434 bp, Glycine max
gaaacaacgttttcttcaggatccttattttcaagtcatcaaccaactcccaatgccatcattctctagcaaccttctcaattacaccaactctctttgcaccattcaagatagtaatagttctggaggcatacagggagccaggcatgctcaatttggactatctccatctgattttcccttcaacaagctcccagcagacatgcttctaggtggtttctcaaggcttgaccatgcagcagcacagcctattaggccaccttgtggaacctataagaacaacaccactactaaggccaatgttggcatttcttgcttgttgacagtgggaaatcctggccagaatttcaaggaatccaatgaaacaaaagcacctcacatcttgttatttggaaaactcattcagactgagcaaaagagttcaaacactagct

SEQ ID NO: 28105 - DNA, 295 bp, Glycine max
gttcattgttttattctcttaaatcacagaatctctagtttttgttcagttcattgttttattctcttaaatcacagaatctctagtttttgttcaaatttgactttaactttctaaagggtgtttctgtgtgtgtttgtttgttttcatcttccttcatgataattgtttgtgagaaatgggaattctgttttcagcatgtgtgtttagttggcaagaaaacatgagaaaagcaattttgatttttgaattttccgttttagtaatgttaaagggtagtcaatagtcatcactt

SEQ ID NO: 28106 - DNA, 262 bp, Glycine max
ctcgagccgctcgagccgtgaggttattagcatccagagcaatgaattgattcttgaagctttcaagcagatgaaggataatcgaattggtggtcttcctgtaatagaggggccaaagaagagaattgttggaaacttgagcatacgagacatcagacacttgcttctaaggccagagcttttcaccaattttaggaagttgactgtgatggatttcatgaagaaaattgtctcgtcatcccttcaaactggaaaagttacc

SEQ ID NO: 28107 - DNA, 284 bp, Glycine max
agaacattgtgatgatctaaatacacaacaaattatcatggatgaaatcatgcaatctgtcggcactttagcacaggatcaatatggaaattatgttattcagcatattgtggagaatggtaaaccacatgaacggactgctattatcagcaagtctgccgggcagattgttaagatgagccagcaaaagtttgcttcaaatgttatcgagaagtgtttggcttttggtagtcctgaagaacgtcagattttggtgaatgaaatgcttggtacttctgatgaga

SEQ ID NO: 28108 - DNA, 489 bp, Glycine max
gtatgctcaagtgaatcaaaatttctgtaactggacgaacctgtcttcctttgctgccttaaatttccataccttcatcctcactttttgagtaaaagcattttgtattgaagtatgttataaagtggagattccagtttcagctatttttctaaagctgtaaaattttatttttgattttttgagatcttagagatgttttttgagggaaaagtcaaaccataaagctatggattttattttcctgttagctaatcaggtgccatgtttctccgaaggtgtcccattaggggtccaatgtttttgtatttcattagtctcaatttacttatttttgttgacatagtaattgtttaacttgtcagttcataaataacattatcgttatatgctcaaaaaaaaaaaaaaaaaaaaaaaaaaaaaaaaaggggggcccccctattagggacctctccccccgggaattttttccgggcggggaccttgggg

SEQ ID NO: 28109 - DNA, 703 bp, Glycine max
taggtgcgaaccctctccttttcttgttctgtttaatcctttagatactttatcttttttccaactttccactgatttgtagcttgttctacaatctagttttttttttttggtcttttatgtatccaaaaggtgatcactgatgatccaaatatcaacaccaactctttttcttttgtgtttcctaattttggaaaccttctggctggttgcaaagcaaaattccaaggcataacaagggttggaaacttggaatggattcattcaatcagagtgttcagaattccagcttcaggtacaatccaaatttgaacacaaggacacatgcagatgaagaagctgagttctcaggaattcttgatatctttgtccatcatgccaggaatattcataacatatgcatctatgacaaccaggatgtctatgctaagttctctctcacttacaaccctgatgagactctctctacaagaatcatcaatggaggtggcaaaaacccaacattcaatgaaaacttgaggttgaagatcacccaaatggatgctgttctgaaatgtgaagtttggatgtttagtaggtcaaggattcacatggaagaccagcttttggggtttgctttagtcccaattgcacaagttgttggcaaaggaaaggtgactgaagattacagcctttcctccactgatcttttccactctcctgc

SEQ ID NO: 28110 - DNA, 514 bp, Glycine max
  unsure (1)..(514): unsure at all n locations
gcaggagcagttgaagaagctggtggggagggagctgataatggcctctaatcatggcaactcgaaggagtttctagaactcataaagtccatcggcgagtcccgatccaaggccgaggaggactgcatcgtcctccgcgagatcgaaaccctaaaacgccgcatcaacgacgctgacactccgaaacgcaagatcaaggagtacatcatccgcctcctctatgtcgagatgctcggccacgacgcctccttcggatacatccacgccgtcaagatgactcaccacgactccctcctcctgaagcgcaccggctacctcgccctcacgctcttcctcagcgacgaccacgacctcatcatcctcatcgtcaacacaatccagaaagacctcgcctccgataactacctcgtcgtttgcgccgctcttaacgccgtctgcaggctcatcaacgaggagaccatncacgccgtgcttcctcgtgtcgtcgagcttcttcaccactccaaggacgcc

SEQ ID NO: 28111 - DNA, 525 bp, Glycine max
ccttgcttatgagtacttgtctaatggctccttggataaatggatattcaagaaaaacaaaggtgagtttctgttggattgggatactaggttcaatatagctctgggaacagcaaaaggacttgcttaccttcatgaagattgcgactctaagattgttcattgtgacatcaagccggaaaacgtgcttctggatgaccacttcatggccaaggtttcggatttcggactggctaagctcatgaaccgagaacaaagccatgttttcacaacactgaggggcaccaggggctatcttgcaccggagtggataacaaactatgctatatcagagaaaaggtgatgtctatagctatggcatggtgctactagagatcattgggggaaggaaaaactatgatcctagagagagttcagagaaatcccatttcccaacttatgcatttaagatgatggaagaacggaagctgagagatatttttgactcggagttggaaattgatgagaatgatgataggtttcaat

SEQ ID NO: 28112 - DNA, 881 bp, Glycine max
gttaaatcaggaatcaaacgttgatatctgatgagcccgctttcaattttgctgaagagttgttctgtcctgttttgctcctcttccttgtcttctccaaacattcacatattaacctgtgaaacctctgatctgagacttctcacccattttcctaaacctctaattaagccaccaattagaagaggcaattttctcaagtcagagagagaagaacatctttgtatcagtgttgcatccactctctgatgggtgtagtgaggggggtgatattggatgaatcagtactcttggctgaaagtgatgatgataaaactgtatctttactccgaccaggagctgagtctctcatccaaacactcgttctatccagaacgcatagtggaattgctcatggtgttggccttccagatgacaaggtgagtgttcttaaaaaaattgctagtttgtactcacttgattgcttcatcttaaatgattctgtaagtgaggttatgcctggatggagtaatactgatgatggcagtattattatttatctgatttctgataagaaggagttcttacctaaattaagcagctataattggctggttgttgttctaaatgttggaggtgaaagcttatgtcacaatccaaatatacttcagattgaaaacttagaggagtttccattgaccatatgccacttaaataaaagatcaattggaaccaatgctgtgactgtgggttatacaatgaagccttctcgtgtcgaagattttgcaaagaggggtgcatttcctttgtgtcctactcaaaatgggttgatgttgttcctctcacatccaagcttccattatcatctcagttaaaggatgttgacatagttcttcacaaag

SEQ ID NO: 28113 - DNA, 583 bp, Glycine max
tttatattctccggtggcggtaacgcgattgctaaccagcaaacacagtccatcaaaatgatcctaggtgaccggaacttgctggagttgactggtgaagatcacagccgagtcagaggtgcacttgtcccattcttgaagccagaatccttgaagagatatgtgggaaaaatggatgaagaagttaggaagcaccttgagatgcattggcaggggaaacagcagatcaaggtattgcccctgatgaagactctcacattcaacataatttgctctcttctgtttggtgctgagcgtggaaagcaaagagatcaattcctggattccttccaagagatgatacaaggaatgtggtcagtaccaattaacgtgcccttcacacgctacaaccgcagccttagagcaagtgcaagaatccagaacattttgaaggagattgtgcaaaagaagaagattgaactcaagcaaaatgcggcatctgcacgccaagacttgatcagcttcttgataggcatggctgatgaagatggcaaacaagctatgagcgagaaggaaatctttcacaacattaagcttgtcatgg

SEQ ID NO: 28114 - DNA, 381 bp, Glycine max
ctttccctttctctctttttttccttcatcaatggtggcggtaacttttgagaaagctctgtcttttggctcttggagctcaaaagcaagagcaccttagattataagatcggtttcgctttcattctgtcccttttctcagagagagcaacgaggtcttatagttaaatctgatgctgaagattgaggaacttaaagtttgaagtttgaggagtgtttgtgattacaaagaatatggatcaaaatagggatgagagctggaggaaattagtgaagaagatgcttcctcctggtgcttccatacctgctgatgcttctaatcttgattactccatagctatggaatatgttggtccaccagtttcatatgaagtaccaaga

SEQ ID NO: 28115 - DNA, 438 bp, Glycine max
cggttttggtggtagttctggtggtggtggttttggtggtggcggcggttttggtggtggtggtggtgggggcggatttggaggcgcgtctagggctgatgatgtggacaattgggcggttggtaagaagcctgctcctgttccatcttccaatttcggttccagttttcgcgattccggcgtggagcctgatcgttggacgagaggggatccgccgcgtgaggttgagcagcggacggagaggccaaggctggtgttggatccgcctcgaggcgatggtttggtgaatgagtctccggtgaaggcgatggataaggcgaatccgtttggggcggcgaggccgcgggaggaggtgttggctgagaagggtttggattggaaaaagctggattcggagattgagactaagaagacgagccgtcccacgagttcgcactc

SEQ ID NO: 28116 - DNA, 414 bp, Glycine max
cggctcgagagatgatagtggaagagtgcattgctactcaaatggagctgctgcaggacctgtccatcaaaccagagattctgaccaccggcttccttttgcaaattctggaaatcctgttatggctttggttgcctttttagcctctgcggttggaccaagagtagctgcttcttgtgcccatgcagcgttagcagtattgtcagaggataattctggcagcacgtcacagttggaagcaccgggacatgataataggacaaattcagaaaacatacattgtcgagatggtggccctcatggagaaacagcagtttcaaataatcataatgaggataaggcaaaggtgcgtggttcatggggtctgaatgagggtaggataaccccactctctgctgagaaagttaaagatgc

SEQ ID NO: 28117 - DNA, 554 bp, Glycine max
tgctcgcatcggttactgtgaccagaaggtttcgctcgccggttatcacggcgaggtgaatacgacgtcgttttgcgtttcgtcgcacgcggggaggagtgatgtgttgctcgagaggaggaagttgaagttggctgatactcgcattgttgaaaacacgcagatgaaatccagcgctgaaattgaaattccggtttcgtgctaccagttatgtcattttgcagctcattggtgttcctgatcgagctgagaaagatgaaatagttaaggctgttatgggtttgaaaaatgcggaaattgatgaaggttacacaattgatgtcgttgcagctcggcaggatctgctgatggatgttagggataagcttcttttcgagccagaatatgctggtaatctgagggaaaagataccccctaaatctcgccttcaaattccttggtcttggttgccaggtgctctttgccttcttcaagaggttggagaatcagagcttgtgctggagattggacagacaagtattcggcatcaaaatgccaagccatatactgatgac

SEQ ID NO: 28118 - DNA, 372 bp, Glycine max
ctgagagtgactgtagccctgttgtgggtgctaccataatgaatccaaagcatataaatgtttccagaaatggggatgagtgtatgccattagatcaatcaacttctagtaaagcatggcagtcaaatggtgatagtggggttagagaggataggtatcttgatgaccatgcattgcgtaaaactgaaactttgggcagcaatacacagcatggtaaaatgaatagtattgcattcacacctgatggaccatcaggatttaacaataagcaagaccagtccagcgaacggttagtgaatgctaatgtctcaccagcatctggaatggagcaaagcaatggacggacaaacatagataatttgtcgggactca

SEQ ID NO: 28119 - DNA, 412 bp, Glycine max
taaagaataatcgccacaaggatcattctttcccatttacaacttgaagtaccaaatgtagaatgatccacgagaacgaaaaaagatctattgtattaatatttgaaatagtttcaactttcaaggataaaataacttggcctcgagccgcaaaactttagtcagtggccgggctataattgtatcaagttatgaaatacctctcgaggctggcaacatttttgagacaaaacttgtctttgttcttggtggacagtacctgtttgaatttgttgaggcatgtgagtatagtgtatacacacggcaaaaacttagattctctagtgagttttgtttacatttgtagtcatactttgcagcatgtatatattaagaaatagtgtcggtgattttaattagaacttgagaaaag

SEQ ID NO: 28120 - DNA, 280 bp, Glycine max
ggctcgacggctcgagctccattggtccttaaacactcatccgtcctcaccatggccaagctagtgttttccctttgttttctgcttttcagtggctgctgcttcgctcctagttccagagagcagcctccctaaaacgagtgccagatccaaaaactcaatgccctcaaaccggataaccgtatagagtcagaaggagggctccttgagacatggaaccctaacaacaagccactagaatgtgccggtgttgccctctctggctgcaccctcaatgcaa

SEQ ID NO: 28121 - DNA, 438 bp, Glycine max
aggttgcttatgctaccgaaaggggggtgatggagtagtttgctactgcacttgtctgctgttagatgcttaatgaatctgcttgctaattgcttatacatttgctgaattttgggatttgtttgcataaattatcatcacttattatacctttgaagatttttattgtagcgggagagggcaggaatttttttttttcttgaattgagagcggtcttctagaatttcttctcaaaccccgtcatcagacaagttcgattggaaagtgcatttgcacatttccaaaatgtagtatttagaactaaattcttttttttgtaattcaacaggtgctaatgtcatatatgatctgtgtatcctcaatcactagcctgagataggatatgaaaattgttttgtgatagcacctaagaatcaagaattcacttgtgagttgtc

SEQ ID NO: 28122 - DNA, 637 bp, Glycine max
agccaaaaaaagaaaaagtatgaagtgaaggaaggaagagaggagggttaccacttaccggcggagccatggggaactccataggactcaaaggttggtccagcgtcataaatggagccctgatactccgtccccttaaccgtgttaaactcacctttatcttcccactccacctcctcccttgcaggtgcatgtcctcgtacccgtcccccttgaaccacccttcgcgctcctcgctcgcctcgtattccctccacccctccgagaacccacatccatccgccggcgccgggagtagacggagcaagtccgcgaaggccaagtcgtggttgccgcagaggtcacacgtgcttctgccgcgggtaacgcgagggtaaggagatcaggtagtcgatgccttggcgggtggcgggccctcggtcgcagtagtcgccgagcaagattagggttgcggtttcgaattcggatcggtcgaggctgcctgcgaggttcttccagaggctttggagcttcgttatgaagccgtggatgtcgcccacgcagatgactgctctggtttttgggggctctgacattgatgccagtttgattgctttggttttcgtgggatttgctttgtgtacgcgcacgcgtgaaa

SEQ ID NO: 28123 - DNA, 464 bp, Glycine max
gagaaggttgagaagataaagggcacaaaaacaatacaagttaattcaaatttgaaataaaaaattcgaacttttgaagatctttggaatctcacaactgtcaccactcgccagtgtttatccattcggattattccctagatctgatcgtgcaatgcactcaaaccgtgggtgaaaaacctttttaatcatctggagttttgattttcctttccagggaatgaaggaagttgtccaagttaagatctggagctgtgatgctgctttgacttgctgagtttgtttctgggttggattgtttttgcttgaaattgattgacttgtttccacatttgaacttatacaatggttttctgggaaggatatgtgagcgatgaattgatgggcacgtttgcccctattgtgctttattgggtatatgctgggttttatcacttgctcacacctttagataggtatcggtt

SEQ ID NO: 28124 - DNA, 409 bp, Glycine max
ggtccaacttgttagacctaataaacaaagttgtcatctctgatttgattgtttattaggtccaacttgttagaggaaaaccaattgttttcaacagtaggaaatatttaatttgacattttggttcttgtaattgttggagaataatagggcttgatgctcctaattgtaaatgtggaatattaatttggcagaaatttgccttcaattgtaccaaataccattttgaatttcgaaaaacattgtggaaaaaaaaaaaaactcattgtaaagtagtttatgaatgacccttttctaaagcattgaagtaatattgcagtaacagaatatgatgtagtggtgttgattgaggagttgtaaatttgagctataataagttttaggtaaatagtccccttctgtcgtcttc

SEQ ID NO: 28125 - DNA, 436 bp, Glycine max
ttttgatatctccaccatcctacgtcttcccttctcttctcaccttgttcttgcctttatcaccaggaggacagaaagggaacaataaatcgaataaaaagcaccccatatccaagataggagctttctttcctgtttattctgagtcacgcataccgtgattctcctattagatcggcccttttccatttccatttcatccgggggttcgcaaatttctgggactaatcaattgacaatgctgcattagtgggattggtactgccgggttctttagctgatgaaagaggattgagcggtgctgcttgtggcttgggtggtgcttacctgttctatacgctaattcagaagctctgccaaatttagtgcctgacttactgctttattgagggattcatttcatatatttaattatattgagttgggaaaatcaata

SEQ ID NO: 28126 - DNA, 322 bp, Glycine max
tgttaagtaatttcgaaaggcttctgttccttcctatatataaaaccagcctcttgtatctatttgcggaaaacaccctagtttttctcagttgaacctcgatcgcacaccagagagaaaagaaagaataatgccaccttcttactgcgtgaaggagagaaaaccatgtgtgagatgggtcgagaaatatttcaaagattgcctttgcaatttgaaagatgaaatctcgttcagcttcggcctcacaagtctaaagctctggggtgtggctgaaattcctcaaataatcaccatttttcgtaccaagaaaagccatggagtt

SEQ ID NO: 28127 - DNA, 339 bp, Glycine max
gggatgtgttagaaaacaaaaccctaacacgttcaattctgaaaaaaaaataaatcacaatccctttcttttcctctctgatctgcaaacacatttcaagagaacgtttttgttgttgcgcccaatcggtgttgcatttttcttttgcagagaggaggggaagtctttatttgtgagatttttcttaggaagatgaaaaacacggagaggattgcaaatttggccgtagcaggtttaactttagccccgcttattgtgaaagtagattcaaatgtaaatgttatcttgactgcttgcctcaccgtgtatgtgggatgttatcgttctgtcaaaccaaca

SEQ ID NO: 28128 - DNA, 438 bp, Glycine max
aaagatttcccaaaatatgagttttatgggaagcgggaacaagactcaccgctaaaatttcaaaccacaaacacagcgttaatattttttaattttccgttcttcttcttcttaaacccctcattccccctctctttctattgcactctcttccttccgattcgaataatttccaaatggcaacttcggagaacaacaacgcgcgtccccaacgcgtggccaagaagagagcagcagctgcaatatgcgaacttcaccgcaacgccgccaagaggaaacgcgtcgttttgggtgacctcactaacgtttcatcaaactacgtcgccgttacggaaaaagaaattcagaaacagaaaaaggttaaacgcgagcaaccggcgcggccggtttccacgccggagaaggtagaggaaagacacgacccgcaactctgtgggc

SEQ ID NO: 28129 - DNA, 372 bp, Glycine max
catttcacaattccagtctgattcattgctcgaagttatgtcatcactacccttgaagaatcaattcaactggttaactctgccattcatcttctgctaatggaacgaactactgaaaaaacattcaggatcttccagtcccaggagcacgagcttgttaacaagtacaattatgttgttagcctttggaaaagggtatcaactgtcactggagaattgcactatggtgatgcattgaggctactaaacaacttggaggatgcatccaagaggtttgttgatcaagttaatgtgactcttgcccttctccatccaattaactgcacaagagagagaaaaatacatatggtgtttgatatgacaacaattcca

SEQ ID NO: 28130 - DNA, 521 bp, Glycine max
actaaggaggagtacaatgaattctacaagaagacttttaatgaatacctggagccattagcatcatcacactttaccacagagggtgaggtagaatttagatctatactttatgttcctgccttcgctccctctggaaaggatgacataatcaatcccaagaccaagaatataagactttttgtgaagagagtgttcatttcagatgattttgatggagaactgttcccccgatacttaagctttgtcaaaggtgttgttgactcaaatgaccttccactcaatgtgtcacgtgaaattcttcaagagagccgcatagttcggattatgaggaaacgtctagttcggaaagcttttgacatgattctgggaatatccatgagtgagaacaaagaggactacgagaagttctgggagaacttcggcaaacacttgaaattgggttgcattgaagaccgtgagaatacaaacgtattgctcccttgcttcgttttttctcgtcccaagtgatgaagactgat

SEQ ID NO: 28131 - DNA, 265 bp, Glycine max
ggctctcacacgcaaagcaccgaagagagcggcggaaacgaacaagacgtcgacattgtggacgttggcgtctctaagttccattcccctaattatactacatcgtcgttcgcctccgatcacaaccatcgccggagcttcacgccggcaaaacctctgccgttcaagataacggatgagatgatcggcatgaccgttccgagaaaggctcgttgagcatctgcaaaaaggtttcatgaaagttggatttccgcaagcagcggtg

SEQ ID NO: 28132 - DNA, 426 bp, Glycine max
aaaagtgctgttgagagcttctctactagaaatttagagctttttccagtagagaagctcttaaagctttcaaaagcccttctagctttgtatcaaaacaggctcatgagaagttatagatatgaaatataatgacatactgacatggctattctgattgcttgttttccattcttgggaatctttttcctaacattgagacaaacttatgttaagggtaaggcaagttccatggcagcaccagcccttagccctgaaccaggatgggaggttcttgatgcatgtgcagcaccgggaaacaaaactgttcaccttgctgcccttatgaagagaaagggtaagattatagcatgtgagctgcaaagagaaaggatttagcgtttgaaagacactataaagctatctggtgcttctaacatacaagtc

SEQ ID NO: 28133 - DNA, 335 bp, Glycine max
ctaatgtgcaagttggaactggcagaagagagattcaaaagggacatagatcgttgagaccttaacttacgtatgattcaatgtcagaggaaatggcaagtgagaggttttactctgtatcccagaggttgcagtcagatgaagcaaagcaagatatctatttgaaagttaacaaacctcttaccctcaggtttgaagatgttgtgcataaaataaaaattagcaaagggaaaggcttgttatgctacaacaaagaggtaagttctgaggagacactggtcttgaaagggatcagtggtgttatttttccaggtgaattgttagtcattttaggc

SEQ ID NO: 28134 - DNA, 405 bp, Glycine max
attctggaggcttccttcaataccaaattcgaggagataaacagggttttgtttggtggagaggggaggcggcaccagcaagagggagtgattttggaactatcaaaggaacagattcgggaactgagcaagcgtgccaaatctagttcaaggagtactaattccttcgattatgaaccattctacttgagaggctcccaaatctcttccaacaactttggaaagttctatgagatcacccctgagaagaacccccagcttcgggactttgatatcctcctcaatactgtggatatcaacgagggaggtcttcttctgccacactacaattcaaaggccatagtgatactaatggttactgaaggagaagcaaacattgaactcgttggcctaaaagaacagcaa

SEQ ID NO: 28135 - DNA, 323 bp, Glycine max
gcttgttgttcctgcaatttttttttttaaaaaaaacacacgaagtgttaagttggggctttgctttttgtgtgaaggagagaaaatttgagcactgagttgatgagaagagagaaactataatgtgtggcgagagacaacgagtttctgcttgtgctgcctgcaccaacaactgtctactgttccacaaaacaaaagaaacaacacctacctctttcttcaagctcatcactaaacgagaacatttaacaactttgtacatccctcctgcttttagtagtactgtgtcagacttggttaataagaaaattgctctcactgat

SEQ ID NO: 28136 - DNA, 612 bp, Glycine max
ctcgagcgtgctgagttggaaccaagaaaaagtcaaaggtctgctgcagagatgccatctagctttagtgaggatgaaacggctgaaaccagttcctcagcggattaagtgttgttgtcagatatgatatttgtagggtttctctatgccattggttttgtacagtctatagagacagatccattttgcacagtaacatgtagaaagacacactaacatgactaacttgatttgctgttgtgcttgcttatttgcttctgtaacaaaagaaaccccactccctacccctttttcttgaaattttggatgtaaaatcttattttcatgcagctgcttgtggtaggagggatccaaatgcagttgatagatagtgtcttctttttttcataatggtttgtggtgtttgattcaccttttcatcaggttgagcgtcaatccaacacaagagggagattggcgttcaatgtgtattggattgcgtgatttggcttttccaaacacactatcaattattgcagtgcctctggcgtcttggtttggttcaattggatcctttgttggagtagttacccacttatgcttttagtatttgaaaagaataattttgattcg

SEQ ID NO: 28137 - DNA, 337 bp, Glycine max
cggctcgaggttgggctgtgtccctatcatttgccttcttctcttcttcttcttcctccctccgcgcattctctttcttccttttaatctttcaatttcttttcccctttttctctttgctgactaactcaatcaatttagtgtggcttccgggaacaattcaggaatcatggctagggttttagctcagtctactggtatgcctggcctactgagtgggcgaaggcatgggccgcataaaggatcaggagaaacgaaaagatctgttaaaatgatgagtaccttacgaattcctgctttaagaatgtctagtttctctggattacggacacttaat

SEQ ID NO: 28138 - DNA, 462 bp, Glycine max
gatttggcctgtaccctgtgggttttagaagaaaagtatcaggtgaagcatctcagaacatattgtgaaaagtatttgatcgccaaaatgaattggaataaagctatttctaactatgcctttgcatatcaatacaatggcaaacaattacgaagtgcgtccttggcagtgatcttggacaacatggacctgctcactcaaaatgaatgttatgcggagctggtggacactaatcctcgtcttgttgtggaaatatatgaaacatatatcggcaagcaattaaatactgcaggcgcattttaggttattggaacagagctaaggaagctagtgaaatcatctttaagctgaggtgtgatacttcagttggaattatattcttgattagtaattagtctgtggtagtattttaattgtacattatcatacactactacaattaaacatgcaattggacctcgt

SEQ ID NO: 28139 - DNA, 435 bp, Glycine max
acgagaaacaatgcaaaatgatatttctttggcaatttcattgctgacaaataggaagacaagggatctgattatgattcttaactccaaaagatttctagacagactagtcaattcattagaggaaaagaaacagcatgaagtcaagttgaaagagggattgaaggacttggctgctaaacgtatggaactgcaaaattctttatcttcatcatggtcaaagcaagatgtggctgtggcaaaaacaaaagagctgaaaaaactatgtgagagtacactttcatccatgtttgatggaagaccagttaatataattggagagatcaatgctattttgactagcggccttggagcatgaggaagagaaatttcctcgatgatgatcaagcctttacgtggtggatagtagcggctggccaaaatagctgaagataa

SEQ ID NO: 28140 - DNA, 278 bp, Glycine max
attcggctcgatgaagctaacaatagccttgccaggaatgagccactactcaaaaggcagcaaacacttggggaaatgactttggaggatttcctagtaaaagctggggtggtacaagaatcatcatcactattcaagtcttcattactatatcaaaatcagatgtggtatcattgcaagtaatgggccattgagtgcaagttataggttcaggcatgtaatagggacaggatctagtgtgtcttgtaatgggcttgaaacacaaaacatgttggcac

SEQ ID NO: 28141 - DNA, 343 bp, Glycine max
ggctcgagtgatctactttttgccatcataaatagtgtttctcgtggtaaagggcaggatctatttcttcgctccttttatgaaagtttgcaactcattcaggagaagaaactccagttgccatttttgcatgctgtgatagtagggagtgatatgaatgctcagacaaagtttgaaatggaacttcgcaaatttgttgttgagaaaaagattcagaatcgtgttcactttgttaacaaaaccctggctgtggctccttacctggctgctattgatgttcttgttcaaaattctcaggcacggggaggatgttttggaaggataaccattgaagcgatggcat

SEQ ID NO: 28142 - DNA, 516 bp, Glycine max
gaagagcaccaaagaaggggaaatttaagaataaataaataaaaatctgcggatttatccgttcgcaggactatagaacaagggcctgatagagaatgggagtatggctctcagatatttctgcactacaaatatttcaacccaacatcatcatcatgcttctgttataactcttgtttcttcttctctttctctaacaagcacacgcatgcagaattccatacctgctgcgagaaacagcaagaacaagtttattactgctgagaacgtgaagagcctcgttagcacggtcgtgcttccttccatttcatccactccactcgagtctctccacagaggcaactgggtcaagctcatttgtggtgcaagctttgaggatgttgttgatatcagaaatctcagtctggtttacactcttgctggagttgactgcattgactgtgctgctgatgcatcggttcttagtgctgtgaatgaaggaattgaagctgcaagagatattgtatgccttagaag

SEQ ID NO: 28143 - DNA, 290 bp, Glycine max
cgaaaagacttttcatttaagagttgcagctattcttggtgaaattgcagctgagatggtctcagatagacagaagaaagaatctgcccctccagtaggtatttctgagcatggctcagagaaaacaatgtacttcttggctgaagcaacgcatcccttcagtgctgaatcagaaaaggagctgagcttttcgaagggtgattttgtcgttgtgcgaaaggtgagccaatcaggatggtcagaaggcgaatgcaatggcaaagcaggatggtttccttctgcatatgtgg

SEQ ID NO: 28144 - DNA, 329 bp, Glycine max
catcctttataactctccccatttgccctcttttctcaacaataatgctcccataggagatataataataataatcctctcattctgcctcagccttattgcactacacaaaccctcacattggtagctagctatccaccatgatcaagaccttgaatccttacccaaatccagcaaaaactgctgagatcatgtcaaggtacaggccaatagcaccaaagcctgaaacctctccaaactcgtccatgagtgagggctcttgttcctctctctcccagaagagcaatcaatctgctaaccttaggaatgtatggccacagcttcaagcc

SEQ ID NO: 28145 - DNA, 406 bp, Glycine max
gggtggttttcgccttgcccacatatcagtctcatggttcatgtcacacgtaaggactatgcatcctttccattggatttgattgcggggaccagaataaacgtatttgattgtggggaccagaattctatgttcatttgctgggttaaccatgatcttggtaacaaaacattttgtggtgctaatccgatgaatccagaatagtaaatgtagatagaggttagaagtttctacaggggaggcttgtgcatgtctgagaatttcattattcttttaacttttaattcacattttgtaacatgtgttttttgtaaaagcataaacagatccatctgtatatattagttatatgctgttgatcagcctaacattcaaagtgaaatttatgcacttgttttttctccat

SEQ ID NO: 28146 - DNA, 260 bp, Glycine max
cacattctactttccccacccagcccaacttaggtgctaaaacagtctttctgtccatattataatctgattattatatacacccacaccctccattttgttgcttcatatcttttatttacactctattaattctagtcaacttacatatatttggattccttttttttttaatttaattgtttggtacgaatttaggagggatataaaattcattgattccaaatttccaatcaccttctgaataaaaaacttgtttt

SEQ ID NO: 28147 - DNA, 708 bp, Glycine max
gatgggaaagccatctcttctcccatcaaaggaggaacctttagttttcaacccaaaaaacaaggtccttgccctctatgtgtttgtaggggccatcattggactttatgccccaatagcttatattttagagggaatatttgagggtgacaaagaagggatcaaagcagctgcaccccatgtttttctcttgtccagccaagtcttcatggaaggtgtggcattctctggcaggttctcaactccaatgagagcttttgtgcctgtcttttacaactcaaggaggattttcaccattgtggattggcttaggagtgagatcaacaaggttaatgaagtgcacagtgggtctgataggaggatctttgttgggagggtacttgctgtggctaacatggccttctggtgcttcaatttgtttggatttttgttgcctgtttatcttccaaaagtttttaggttgtattacgctggtcacaaagactgatcaaggacaaggagtcatgtagttttcttttgatgtataaggtcttgaaccataatttactgttggttagtgtatgatattttcatagtaaatgtatttggttgtgtagatatataccctctcctgtgtggcatattttgttgttgccgttatttattcttcttttacacttagaaagagggacaaacaggaggaaaggagagagtagatattaaacttat

SEQ ID NO: 28148 - DNA, 243 bp, Glycine max
tagaagataaaaatcataagtgccaaaaatcttgcttagttacatgttctgaaaatcggatactataatgtatcgtttagttatcacaatgatttttttatatccataaaaggatcaaagttttaaaaaaaaatcaaagttgaatatcaaaaaatttataataattcacttatactatacaattgattgattgaagtactagaccccttaatcattgtgacaattcttaaggggtctagtact

SEQ ID NO: 28149 - DNA, 251 bp, Glycine max
cattcttctatccaattctcttcctcaaaccccatcttttctctctctcacacaccctttctctccctagactctctctcttgtggtttctgcaatggcaacccttgcagacattggggtctcagctgccatcaacattctctcagcctttgccttcttgctggcttttgctcttctgagaatccaacccatcattgatagaatctactttccaaagtggtatatcagtggagatagaagcagtccaagga

SEQ ID NO: 28150 - DNA, 374 bp, Glycine max
  unsure (1)..(374): unsure at all n locations
cggctcgaggaaatttgatcaaatgtcaagtagtttattacgtaactgagctcaaatttgctggctgctcttgcgcgccctgctaattttgggcgggaagcccgaatgcaaccatattgtacacgtccacttgtcattttgttctgtccatcagcagtcttaagaggtcaattattccaacattgttttatgtaatgattatataaggatgttaatgtcgtttagaggttaacatccctttcttttttccaactgatactaatgcaatatgtctgtttatgttaaccttttaaaaaccaaaaaaaaaaaagggcggccgccnnnnnnnnnnnnnnnnnnnnnnnnnnnnnnnnnnnnnnnnnnnnnnnnnnnnn

SEQ ID NO: 28151 - DNA, 751 bp, Glycine max
ccactgtctctaatgccaagaaaaaggagaaacttgttttccatgtagtgaccaattcactcaactttcctgcaatctggatgtggttcttattaaaccctcctggcaaagccacagtccacatacaaagcatagagaactttgaatggttgcccatgtacaatacattcaacaaacataattctagtgatccaagatatacttctgagttgaactacctgcgtttctacctgccagatatcttccctactctaaataagattctgctctttgatcacgatgtggtggtgcaacaagatctcagtggactatggaatgccaatttgaaaggaaaagtaattgcagcagtgggcacctgtcaggaaggtggaacctcatttcataggatggatatgctcataaacttctcagatccattcattgcagagaggtttgatgccaatgcttgcacatgggcatttgggatgaacttgtttgatttacaacagtggaggagacataatttaaccgctctctatcacagatatttgcaaatgggttccaagaggccgttgtggaacattggaagtctgcctttaggctggctcactttctataacaagactaaggttttggacagacggtggcacattcttggccttggttatgactcaggtgtcgataaaaacgagattgaaggggctgccgttatacactacgatggaattaggaaaccatggttggacattgcaatgggaagatacagaagtta

SEQ ID NO: 28152 - DNA, 257 bp, Glycine max
ggcgagtgagtgagatttgaatgggagaaaccgggatcattgtcagcttccagggtaacttagacccgagagcagaggagttcagacccctcaatcttcaatgccaatggtatcctcttcctcttcccacacccctctccaccttctccacccgctccctcctcctcactccgctcccattcgcttccaattccgccctccgcgcagaattccaggccttcggcgacatcagagccctccaaaccgactccctccgc

SEQ ID NO: 28153 - DNA, 356 bp, Glycine max
atcgatttggttacataaaaagagctatgcatggcaccaaaatgttatctactcgagctgttagtgagatgtatgggagagaactggtggacctgcgaaaggagagtcgatgggagtttctcaatacactgttttctgtgtctgaagctgtggcctacatgcagatggttgacagattggatgatgaaactataccagcagatcttgctcttgattataaagggctatataaggctgttggaaaagctctcttctgggcacatgttgaaggtcgtcttaagagtgagatcatgtctaagcctgaactgtttgtggagcctgatccagaattacctttggcacttttggatcagaag

SEQ ID NO: 28154 - DNA, 633 bp, Glycine max
cccacgcgtccgaaaaacagaaaggattttgtgtccattgaatttagacgctagcgtactgaaacctagcccggacgtgttcctgttaagaaaatcggattgaatatcggcgacaggtccgaagattaagtgtaggtttcgtttttggctcaaacagaaacgcataccaacgcgcaaattgatcgctgctggaggcggcatgcactagcttccggggccttgcttgcagataggtcttcgtttttttgctgaagattctttgcaaaatggatttggtagccagttgcaaggaaaaattgcaacatttccgtataaaagagctcaaagatgtgctcactcatttgggactctcaaaacagggaaagaagcaggatcttgttgatagaatattagctatcctctcagaggaccaagtttccaaattgtggaccaagaagaatgctgttggaaaacaagaagtggccaaattagtggatgacacgtttagaaagttgcaggtatccggggccattgatcttgcatcaaagggacagggtgcctcagatagcagtaatgtgaaaattaaaggtgaaattgacgattcctatcaatcagatacaaagattcgctgtctctgtggaaatgtattcgata

SEQ ID NO: 28155 - DNA, 319 bp, Glycine max
actttgtaaaagatgaagtatggtatgccttagttgttgtgataagcaatgcttctgagcttcatggatatacagtaagagcattatacagagcatttcaaacgtcagctgaacaggagactctagttcgagttacagtgtggtgcattggggagtatggtgacatgttagtcaatatggtgggattgctagacatagaagatccaataacagtgactgagtccgatgcagttgatgtcatagagattgctatgaaacgccatgcatcagatcttaccacaaaagcgatggctttggttgcactattaaagctctcttc

SEQ ID NO: 28156 - DNA, 278 bp, Glycine max
catgaaaaatagcaaggttctcgatttgttatcagacccaaacatcaacaaaatccaaattctcgtgtcacggtggcgctggatgtaagaatgggaaatcgacgcttcactcaggtcgcaaccagcgacgacgaggacgaagcgccgccggcgccggcgcctcctcccaagcagcaatcgtccgtcagtgcctccgaagaaaactgttcgaagcagcagcagcagcagcagcgcaagaggaagaggatgaagctccaagaagaagaggaagaggagaa

SEQ ID NO: 28157 - DNA, 458 bp, Glycine max
tacggggggccatagagggagagagaagggatggttgtagtggtcaatatgatcaaatttgcaatgcacgattacctcgagcacttgatccccactctgctccatcagaagagctttccacttctttgggatacatggtgcaacttctaaatcttgttattcacaacttggctgccccagcacttcataactcaggttttgcgggttcttgctctcggatatggcaacgagattcttattgggatgcacgtccttcctcaaggagcaatgaatatcccctttttatacctcgccaaacttattgctctactgacggagaaaactcatggtctgagagaagctcaagcaattttggagttgcttcggtggaatctcagaggaggcatcgcctagattcatctgggagtactagctctaattattctttggcttcttcgcattctgttcaaacacacaaa

SEQ ID NO: 28158 - DNA, 561 bp, Glycine max
aatacttgaagattttggatttaggggaaaataggagacatattatccgtcaagtcacacggtttaaatatcttgggtctgtaatacaggatgatggggaaattgaaggggatgtgaatcatcgcattcaagcaggatggatgaaatggagaaaagcatcgggggtgttatgtgatgcaaaggtaccgatcaagctaaagggaaagttttatcggactgcggtaagaccggcgattttgtacggaacagaatgttgggcggtcaagagccaacatgagaataaagtaggtgtagcggagatgaggatgttgcggtggatgtgtggtaagactcgacaggataaaattagtgacgaagctattagagagagggttggagtagcgcctatttgtagagaagatggtggaacatagacttaggtggtttgggcatgtagagagaagaccggtagactctgtagtgaggagagtagaccagatggagagaaggcatacaattcgaggcagaggaagaccctaaaagactataagagagcttatcaagaaggatctcgaacttaag

SEQ ID NO: 28159 - DNA, 394 bp, Glycine max
tagtcattattaatggagtaaaccaaatttctcactgttgttatactgtattgctgtatttgattcctgcatccaattttaatgttatgcttatgaattaataattttgaaacgttggaattgctcctccttctgcttttaatggggttatagttcacagtttaagagtgaaagattatttgtctatcggcagtggggggagtagcgcctattgtagagaagatggtggaaaatagacttaggtggtttgggcatgtcatgagaagaccggtagactctgtagtgaggagagtagaccgatggagagaaggcaaacaattcgaggcagaggaagacccaaaaagactataagagaggttatcaaaaaggatctcgaactagtagatttggatag

SEQ ID NO: 28160 - DNA, 300 bp, Glycine max
atcaaagaaaggggcatgaacaacaggcttgcagatcgtattaagaatttcttaaatcgactggttgaagaacatggaagcattgaccttgaatggcttagagacgttccacctgacaaagcaaacgaatacttgctcagcataagaggattgggactgaaaagtgtggaatgcgtgcggcttctaacactgcaccatcttgccttcccggtagacacaaatgtcggacgtattgccgtacgactgggatgggtgcctctgcagccactgcctgagtcactgcagttgcatctcctagaa

SEQ ID NO: 28161 - DNA, 280 bp, Glycine max
gttccagagtagaggaagcgcgtctaagaaaggaacattccccactacaacatcttccgaaacttgattcaagtcacgtcacttgcattgaaagagtgtgtggtcttggtctgaacccaagaggtattcgacctccaaagctacaaatgaattcgataaacttggtcatagatcttccaaaacagatttgagagatgtggactttattatagaggattaagaactcaagtgctggttaaacttcaccaagatgattctttggtcagtgcagaactagttc

SEQ ID NO: 28162 - DNA, 503 bp, Glycine max
  unsure (1)..(503): unsure at all n locations
ctcgggtttagttgaccaaaatcttcaaaatatgcttgaaaggttctcaaaaattgaaatggtgacaatgaggcatcaacttaactttaagaagaataaggttgatgactatcccattaagaagcagaatccatatgcacaaaataatctagctgcacttcttgccaatgcaactaataatgagggattgccagaggagtcaatttctttgtcaaagtcgcttattggtgggagtatgaatgcatgtaaaatgagaatcttaactttctgtgtgcctgagcgtgtagttcaaggaagtgttgttactataattccgaggatgcgaactaggatgataatatttgagaaatctgatggtactgtcgctatgcattgtggggagatgaagaagttgattacgtagctgcagaggatcatcttctcnacttacccaatactcattctgcagatttgcttgtacaacagttctgttcagtgatggtacgcgaaggatttgtgaaaga

SEQ ID NO: 28163 - DNA, 535 bp, Glycine max
ctttggacttgcgaggatatatcaagctcctctgaagccgttatctgataatggggttgttgtaaccatttggtatcgtgcacccgagttgcttcttggagcaaaacattatactagtgctgttgatatgtgggctgtgggatgcatttttgctgagttgttgaccttgaagccgctatttcaaggggcagaagtcaaagctacatcaaatccctttcagctcgaccaacttgacaagatatttaaggttttaggccatcccacattagaaaagtggccttccttagcaagtcttccacattggcaacaagatgtgcaacatatacaaggacacaaatatgataatgctggtctctataatgttgtacacctgtctccacaccgccccgcatatgacctcttgtcaaagatgcttgaatatgatcctcgtaagcgtttaacagcagcacaagctttggagcatgagtatttcaaaattgaaccattacctggacggaatgcacttgtaccctgccaacttggagagaaaattgta

SEQ ID NO: 28164 - DNA, 244 bp, Glycine max
caaaagtttttaaattttgtgaggttcattatgaagaacagggacaaacttagttgtcaagttggattcaacccatactccatggaatggactggtttggccactagattactgagtaagggcaatgatattctgtgttgccatcttgctcataacttgcttggtaatcaaaccatcaaaactagcataatggcagaaatgataaacagtctttgtggtggtgatgaaaaattgatgcgtgaaa

SEQ ID NO: 28165 - DNA, 261 bp, Glycine max
tgaaagtgaataagaagaacaagagatgagtcagggtggtcaggcaggaggaggatcccattccctggcgtttcgcgtcatgcgtctgtgccgcccttccttcaacgtcgaacctcccctccgcctcgaccccgccgacctcttcgccggcgaggacctcttcgacgaccccgccgccaatcccccctctttctcctcctcctccgactccgatcccaactaccgcaaccgcttcctcctccgccacttctccgacgccat

SEQ ID NO: 28166 - DNA, 513 bp, Glycine max
tgtttgtgacttcttgcaaaaggctaagaatcatgaaaggatcagaggcaaggggtttgggttgtgctgtatgaggaaccaaatcactaaaaaattactatgagcagagaattaaaagtgttttgggggtgaagggaaaacatgctgaaaagcttgtgttctcggatctgaagggttttgacttttgaatcactctagtgtatgcttttggcatacctttatacggagttatactctgaagcaggagaagatggaagatacggtgcagtttcgatcttcctcaagtttggcaacttttatggttattattttggcatctgtggttggatgctatgcttatgatgttgtttccactgatcctttttgaagtttcatgtgagaaatcttagagatttcaaatgaaactttgtgtagaggagagatagaaaattaaaggttatatgtaatattgtttaatccaagttttttggttgtgttgatacaagaatacaatgtaatatactaagtgttggt

SEQ ID NO: 28167 - DNA, 280 bp, Glycine max
gtcggcgcttactcctttttgttctcctgcttctgcacctcattgccataccccctttcaagcaggagaaaatctctcgctccctttctctttcttctcttcacgccgccatcaccatgccttcactctctctctctgaaactgacaccaccacccctaaacctatttccaacaaaaagataccatagacccaatccctcactgatcccgacctcgatggggtttcggggaagaagacgacagaagcgcaaggcttcaatttttagaccagaggccatgc

SEQ ID NO: 28168 - DNA, 374 bp, Glycine max
cagagatgagcttgaacaattgctggatgatgatgatgatatggctgacctgtacctgtcaagaaagtccggttcagcatcaccagttagtggatcaggtgctgcaaattggtttgctgcctcccccaccataggatcaaagatatctagagcaagtagagcaagtttagcaacagttcgtttagatgaaaatgatgtggaagagcttgaaatgttactcgaggcttatttcagtgaaatcgaccacacattgaacaaattaaccacactgcgagagtacattgatgataccgaagattatattaatattcaacttgacaaccatcgtaatcagctgattcagttggagctctttcttagctccagaactgatt

SEQ ID NO: 28169 - DNA, 401 bp, Glycine max
gattttacctgttgggcatattgaatgtaaagaattgaaatagggtagttttattgatctgaaatgatccgtataaagaggatatgattcaaacgaaatccgtatgattcccttgaagaggaatttgtcctgcaagatccagccccgcacccacgacaatcagctctcctacgtcgtcggcgacaccacgatcctcgccgtcgaccgctctgttatgttccccgccttcctctccaagctcgccggcgaagacctcgacgctctcatctccgtcaccaacgacgacgacctcgaacacatgatgctcgactacgagagactctatcgccctaacctaaaacctattagaatgagactcttccttttcacactctctaattaataacctaattcctctttct

SEQ ID NO: 28170 - DNA, 285 bp, Glycine max
gcaaggtatgggacttgagtctcacattgaaagtatgggattctaactataatgactagcttttgtggttcaaggttcttattataatctttgaattttatttctggtttgtattttgagaaattctgttccttttggatggatttgttccggataacctggaattatcccaacaagcactctggctagtgaccatcatcgtagtagtaacgatgaataaagagcgaaattgggcttatggagccttctaattatggtctaacacttgggtattctaggcgctat

SEQ ID NO: 28171 - DNA, 307 bp, Glycine max
aagaaaatcaacattttttttctatcaattcacacgacaaaatttagcagagttcaaaacaccaaccaagtaaagtaaagaagggaagatgtcactgataccaagtttcttcggtggtcgaaggagcaatgttttcgaccctttctcgctcgacgtatgggaccccttcaaggatttgtctttcccttctgctgaagattcagctttcttgaaaacacgagtggattggaaggagaccccagaagcgcacgtgttcaaggctgatattccggggctgaagaaggagcaagtgaaagtggagattgaa

SEQ ID NO: 28172 - DNA, 267 bp, Glycine max
cggctcgagcggctcgaggaatgcttaagcttaagaacaacaagaagcatcatgttcatagaaaaagtgaagttagcgtaacaaagagttggtgtgcaatgattccttggcttttgggagcagcctatataaatcgccaattcttaataaacgttcgaaacatcctacttttctttcttgacgcaattcagacgccgttcctattcttgatcttcatcatgtccaatcccaaatccgagtcagtagtgtctgaaccctctgattcgg

SEQ ID NO: 28173 - DNA, 621 bp, Glycine max
cgtttctcttcttcttctcacttcattttataaactcactctgcagttagcgacaaaaccccaacccgattcggatccgattaggttctctcggatcctctccaccgcctcctccgattcccaaatccactccctcctcctgtcttcgctcgagatccgagctaagcacgggattcggatttccgtttccatcgctctctcttcaccagttttgcgcttaaatggcatcaagcgaggggtttctgaccgatggacagagagagattctgaaaatagcgagtcagaatgtggagaatttgtcttcctcgccgaaatctccatcctccttgcttgctgaacatcatcatcacgtgagggctccttcagggggtggtaaggcacagactgctgggcatgctgccaggaatgtgcgccggtcgcactccggtaagtatgggagggcgaagaaggacggtgctggtagtaagggcactggggggaaattgcttgataaagatggtgaatcccgtatagacaagaacgatccaaactatgatagcggcgaggaaccttatcaactggtgtggatctactgttactgatccattagatgacttcaagagagccgtagtatccatcata

SEQ ID NO: 28174 - DNA, 571 bp, Glycine max
cgactcacaagatctctttgagatggtttgctccaatagcagtgaagcaaatatttcaattccagtagtcatgatagcaaagtcagcaggacaatctctcaacaagtctttcacatctggaagcaaagtggaaattttgttatatgctccgcctcggccacttgtggacttctcagttgcatttttgtggttgatgtctgttggaactattgtatgtgcttcactatggtccgatctgactaccccagagaagtctgatgaacgctataacaaattgtgccccaaggaatcttctaatgctgaaacagaaaaagatgatttggacaaggaaattgttaacattgattcaaagggtgctgtcatatttgtcatagcagcgtctacctttcttgtgctattgttcttcttcatgtcaacttggtttgtctgggtgctgattgtacttttctgcattggtggtattgagggtatgcacacttgtattgtaagcctcactttaagaaaatgccacaattgtggtcagaagacagtgagcttacctctatttggggagatttctattttctccctg

SEQ ID NO: 28175 - DNA, 576 bp, Glycine max
gcagctgaatatttgagcgaactcactttaaacagtggcaaagagtttagggccaaggtcgaggagagagatacatctggagggaaagcgaaagggcagggtactgggacagtgcttgcggtaactctagtagctgtggattcggagatcagtgttaatgctgccatgctacaggaaggacttgctaggctagaaaaaaggaataggtgggacggaaaagaaagacaacaggcccttgacaacttggttccgttccagggcgaagctcggaccagtaggcgcgggatgtggcagtatggagatatccagtctgatgacgaggacactgctcctcctgctagaaaggctggtggtagaaaatgagtgtattttaagaggggcgataagttataaaatagacattttctaagaaaatgaacaagttataggcatgaacattttacttcaaggtagtggaaaaaaatgccatatgtaatccttagtaagttttgttttgttttaaattttgttggtaggctgagacaattttttgaacagatgttataataaaaggtgcatgtggcaggtgtttcataa

SEQ ID NO: 28176 - DNA, 390 bp, Glycine max
gcgaaggcgcgtgtatggtgtgcaagggcttgccggggcaagaagacagactgttatgcgtcacgtgtgacaccccttggcacgtgccctgcctgttcgcccctccacccactctgtccgccaccgcacgatggctatgccctgattgttccattctggactctgacgttccaccagtccccgctcccgcccgcaaccaactggtggctgcaatgctggccgttgaaaatgacgcttctctcacccaacacgacaagacccgaaaacgtcaatagcttttgactggataggctcccgcatacgacgacgacgacgacgaacaagagaataaatcatccttatcggatattctctccagatctctcaactgatccatctgtatccagttac

SEQ ID NO: 28177 - DNA, 299 bp, Glycine max
gaaaaaccaaatatctcatcaaaatagttcctagatccgatcccatattcatgttcagaccatttccacattttggggccccaagacataaagatagaaaccctctgtcttggttttactttcaccctagggtttctctcgcgcgatcgacacctagggtttgttaggtgtcccaacttcggtgctgcatttgtttcaagcatcgtcgttccgattctttgcgcggggacggcgatttcggtaacggcgatttcaataatgagcagcagttgtgtcgtttgacgaaatggacagggttt

SEQ ID NO: 28178 - DNA, 516 bp, Glycine max
cgcatgtgttagaggtatagtcttctctggaagcttctgcgctatcttctggctcaaaaagcgaggactcatgccggggctcactttctcaaacgaactcatttctcgcgacgaagggctacactgcgatttcgcgtgtctgctctactctctgctgaggcagaagctcaccgaggagcgcgtgagggagattgtgagggacgccgtggatattgagcgggagtttgtgtgcgacgcgctgccctgcgcgttggtggggatgaacggtgaattgatgagtcaatacattgagtttgtggcagatcggttgctgggggcgcttgggtgcgggaaggtgtacaatgttcagaacccgttcgattggatggagctgatttcgctgcagggaaagaccaacttcttcgagaagcgcgtcggggagtatcaaaaggcttctgttatgaacagcttgaacgggaacggtgggacccacgtcttcaagatggatgaggatttctaatttattattatgggatt

SEQ ID NO: 28179 - DNA, 509 bp, Glycine max
ataaattcctgtctcagattgaatgaggagatgaagagtgttgatggtctcgcctctcaattaaaaatcttaagaaagcatgtcgatgctctggacgcagctgttaacaagcttcttcatatcccctgaaactggggggatgcagtcttgtacaaggcaaacatgaaaatgaatatttcgaacgcaggctcatgaatttcatctacaaggcaacttgagctagtgttttgaatttcacctacaaggcaacttgagcacttttccatgtgacatggttatgctttgaaagcaccactccatgttaaatattctgaattaggatagacacctcgctgttacctaacctatggttcatatgtaacttacattcttctatggtaaaagtgggtaaatgatgctagtaacgtgtgaaatcattaactggaactgaatatgatgtataatgatttgattcttaaaatgtgttagtgtaagcattgtgtgagggactgatagttgcacctagtatg

SEQ ID NO: 28180 - DNA, 254 bp, Glycine max
ctgccgacgagccacagaggctcctggcatgggtgtctgcttctcctctggcccgacacagcactcttcttccctcgatcgcccgcactattcaggttcagcaagcactcactgcaaaaacgtgggaatcaccaaaaccacgagcagcagcaccgaaaatagacagtttaccgtgattgcgcgtggaagcatcgccgacgaagaatctattcattatcccccccgtcgtgtatatcatcgtccccttcgtcttc

SEQ ID NO: 28181 - DNA, 988 bp, Glycine max
tggaaaatctccattcattgtgtgcaaggatgctgatgttgatgcagccagctccagagttactggcttcaggttgctgtgtgcagacagttcaagccagtaactctggagctgggtggaaaatctccattcattgtgtgcaaggatgctgatgttgatgcagccgttgaggcttcacattttgctttattttttaatcaggggcaatgttgctgtgctggttctcgcacatttgtccatgaaagcatatatggtgaatttgttgaaaaggctaaagcccgtgctcttaaacgagtagttggagaccctttcaaaaatggggttgagcaaggtcctcagattgattctgtgcaattcgagaagatcatgaaatacataagatcaggcgttgaaagtggtgctcaactggaatctggtggtcaaagaattggctccaaaggctactacatccaacccactgttttctcaaatgttcaggacaacatgttgatagcaaaagatgagatatttggtccagtacaatctatcttgaaattcaaggatctagaggaagtgataagaagagccaatgcaacttcctatggcctggctgctggagttttactaaaaatatggacactgccaacaccttgatgcgagcattgcaagctggaacggtatggatcaactgctatgatgtctttgatgcagcaataccttttggtggatataagatgagtggtcaagggagagtaaggggaatctacagccttagaagctaccttcaagttaaagctgttgtcactgctttgaagaatcccgcatggctgtagttttcccactacctgagtgttcatgttcataatgtcttatctagaaaaaaaactacatctttcatggaacattcctaaggcattgaattagccaaagttattacacaactaaagcttttctgtgccgatctttgctaactcaacttaccctctgttagaatatcacccgtggtgtc

SEQ ID NO: 28182 - DNA, 985 bp, Glycine max
gctgatgtggagcctagcatagcaccagtgcaaattgatcaaagtcagcttctaattgatgggaaatttgttgatgcagcttctggttaatatcttaccttcatgaaaaacttttccaacttttgatcctaggactggagatgtaattgccaatgttgctgaaggagatgctgaagatgtaaatcgcgctgtccatgctgctcgcaaggcttttgatgagggaccatggccaaagatgacagcttatgaaagatcacgtataattttgcgctttgctgatttattggagaaacacaatgatgaagttgcagccatagaaacatgggatagtggcaagacttatgaacaggctgcaaatgttgaaatacccatggtagtacgattgttccgatattatgcaggttgggcggataaaattcacggtctaacagttccagctgatggaccataccatgtccaaactttgcatgaaccaattggtgtagcagggcagattgttccttggaatttcccacttcttattttttcatggaaggttgcacctgcattagcttgtggtaatacagttgtaatgaaaactgcagagcagacacccctttcagccctttatgtgtcaaagctatttcttgaggcaggacttcctgcctggagttctgaatgttatctctggctttggtcctactgctggtgcagcactgtgtagtcatatggacgttagacagcttgctttcacaggatccactagcactggtaaacgtgtacttgaactgtctgcacacagcaacctgaagccagtaactctggagctgggtggaaaatctccattcattgtgtgcaaggatgctgatgttgatgcagccgttgaggcttcacattttgctttattttttaatcaggggcaatgttgctgtgctggttctcgcacatttgtccatgaaagcatatatggtgaatttgttgaaaaggctaaagcccgtgctcttaa

SEQ ID NO: 28183 - DNA, 261 bp, Glycine max
ggggtggagtttgctgtgaagcgcatttctcatgaaaatgatggtttgcgagagcttcttgctgaagtttcaagccttgggagactgaagcaaaggaatttggtaggtttgagaggttggtgcaagacagatgttgggaatttcttgttaatttatgattacatggaaaataggagcttggacaagtgggtgtttgattgtgatgagagcaagatgttaagttatgaagacagaataaggattcttaaagatgtagctttt

SEQ ID NO: 28184 - DNA, 1033 bp, Glycine max
atcacccacctatgctcaacgacgaagtgtggcgcctagagaagattggtaaagacggagctttccacaaaaaattgtccaaagaggggataaacagcgttcaagacttcctcaagttatactttgttgatttccataggctcaaaaagattttgggcgttgggatgtcagataaaatgtgggatgtgacaatcaagcatgcaaagacttgcgagaagggcaacaaatactacgcgtaccgcgggcataattttaccgtctttctgaattccatatgccagttggttagagctgatatcaacggccaaagttttccgagtagagagcgaagcaacatgaccaggagctatatggagaaattggtgagagaagcatatgttagatggaatgacttggaggaaattgatgcggctttcttaacccaaggtgaaactttggagcaatttccaaacaatcatcaagcatcactaatagcatatgatcagaatgactactttggtgataaatctgccgaagttggtaactatgtaccaacccataatgcacaaatgggatgcagcgactggcaagtgaatggaacatttggcacaacatcattcgtgaatggcggcataccttacagcttctcagattcacaatcggacagtgacataaccccctcagttgatgctgccgcaaggtggccttaggacaattatttagtactttgactttcagccgtaaatacgaattaacagttgaagaatcaaattaggtttcagtgacttagtgtgtgaagtcgtgttggcccattacataaactctgccccgcctgccttggctcgtattgggctttcctttttctctttctggttaggcgtagtgtattgtgaggcccatttcaaggatctgtgcaaagatgaggcctggctcttctccaaaatatgcaacctgcctttgctgggctagtgttgctatgttttaccataatttcagctatcacgaaacatcaatgatgttttataaatggtgataatgatctaatcctttcatt

SEQ ID NO: 28185 - DNA, 322 bp, Glycine max
agattatctcatcaccaccatcccgaaataaagtaacctcaaaccacaacttctttgcatcccacacaacatacgatacatctctctcctctctcttctctctctgcgtttcactgcagaaccattacaagctccggagaaaccgcaacaaaaaaagaaaaaaacacacaaatttaacccaaaactgtaaccccagtatgccatgcttcacaccacaccattctcttctcctcctccttctctctattttcttcttctctctctccgttaccgctgcaagaacctcttctttccattccttacgtatttaagatggaattga

SEQ ID NO: 28186 - DNA, 445 bp, Glycine max
ttttgataaaatggtatccaataagtggattggatatggaaattttctgataattgatcacttaaacactaacatctggcaatttctacatgggagctatataattgtcttcgttttatgtcttttgactttttatcctatgtgcttaattagctaaccccacatctagcagtaaagcttttttctgctgttcacagttagtggccatcacggtttatgctttcctctatggcagattttacctgtcattgagtggattggaggaggcaataattaagatagccaggaaaaagggagatgatccattaaaggcagcaatggcttcccaatcccttgttcaaataggtcttctgatgactcttcccatggttatggaaattggactagagagaggattcagaactgcactaagtgacatcataataatgcagctgcagctagctcc

SEQ ID NO: 28187 - DNA, 683 bp, Glycine max
cggctcgagcggctcgagcatcgctacgtcaaatcaaatccacaagaagttgaaaatgccacatggatgttgacggtcttcagctgctttggtcagtatttttgtctacattttgaagcttttcaactaggaatggctcctgtctacataggctttttgcggtttatgggtgatgatgatgaggcatagaattatagctacagtttagaggtaggtggaaatgggaggaagatgatttggcagggggtgcctagaagcatcagggacagccaccgcaaggttcgtgacagttttgatggtctcatcattcagaggaatatggccctctttttttccggtggtgaccggaaggaattgaagctaagggttactggtaggatctggaaagaacagtgaagggagagagatgtccttccactagcaattatatataggctgatagtttgtagtgaaactcgtttgtagtgatatatgtaccttctggtcttctaattgtgttttgtaatttaggaggcaaactctctttgcttatccttacatcaaattcacgaacaggaagttgttcctcttatcattatgatgattacgcgatagagatgtggaaccttaacgtgtcctatatatattctttttgttctatgaatgccaatgattgagagcccttaaaaaaaaaaaaaaaaaaa

SEQ ID NO: 28188 - DNA, 134 bp, Glycine max
caaagtgagagcagagagagtggggttacctattataacagaatggccctgaacgattttttcgctggggagatcgcgacggagcttctgaaaatgctgataaacatctcccggaagtccctactctgccgcgg

SEQ ID NO: 28189 - DNA, 442 bp, Glycine max
atgttagtgtggggactgcaaacattgcttcatggggatggaacctgagttctcagcttgggaggcccggggatggataactaccctctttgattgatgcattggatggggaaaaccctgtctcggtttcggcagggcgtgcacattcccttgctctcacgtccaaaggggaattgtgggtctggggctctggtaaaagtggaagacttgggttaggaagttctgttaaccaagtggagccatcttgcattgattccttggaggcttttcaaattttacaggccgtgtctgggtttgatcataatctggttctggttgcgggctgatttcgcttcaacaaataccttgctttgggggggaaaggaaaggaaaaacagaaaagagtctcttaagtttgaacttcaagttggactgctggagtgaagtctatctctgactataa

SEQ ID NO: 28190 - DNA, 1050 bp, Glycine max
  unsure (1)..(1050): unsure at all n locations
gaaacctcgaccagtggctccacgaacccgatctctctcgctcccctctcccctggcccacacgcgtcaacatcatccgcggcgtggcccatgggctttcctacctccacggcctcgacaagcccgtcatccaccgcgacataaaggccagcaacatcttactggactctaacttccaggcccatatcgctgactttgggctggcccgtaggatcgacaacactcggacccacgtgtccacgcagttcgcgggaacaatgggctacatgccgccggagtacatagaagggtccaatgtggccaacacgaaggtggatgtgtatagttttgggattttgatgattgagaccgcgtcgagccacaggcccaatttgcccatgaaattgggcacggacgacattgggatggtccagtgggccaggaagatgaaggagaataatgcggagatggagatggtggatgtgaatattgggttgaggggggaggaggagagtgttaaggagtacgtgcgcatcgcttgtgagtgcacccgtgagatgcacaaggaaaggcccgaaatgccccaagttgttcaatggttggactcaatgtcactttcaaccaaaccttttcatctcgtgtaaatacctttacttctatatatatatataagtctataataacattaattagtttacatgttcttaataaatgtgatcaaatcatcgcattttgtttttgctgccaattcagttgtgtaatgaactccgatataagggttttacaaggttctaagccatgcgaaagttccccaatttctctcctttctactttgtatatatagtgtttacaaatttgatgggcatacagaaacagccatacagccatacaggcatgcatttttatttttttaataattttattcactttctagtttgtagtgttgttatggacatgacatgacaatacaaatgtgtggctttcagcaatgatggatgggccttaataatttaccatgcaataaaagttttctcaatttatgacgagagatctttgaaaaaaaaaaanaaa

SEQ ID NO: 28191 - DNA, 264 bp, Glycine max
ataggaccagtagcttcctaaatagttatgctcagggtttcaatatgaatccaattggaggttatggagtcaggatggatggaaggtttagtcctcttactagtgccagacgtgggtttaccccatttggctccagtggttatggaatgggagtgaatttggatttaggattgaacccaagctatggagggacttccggttatggtggcaatcttggatacggtcggatgagtcctttcaacgatggcaactctaacagataca

SEQ ID NO: 28192 - DNA, 667 bp, Glycine max
ggttaactgtaacctttttatgattagtgtagttttgcctttaatttgtagttgtgacattgttggagatttagtctttatatctaaactttacagatatacatggagggtctttgccatggaaatctgtcaaaagaagaagcaattggcatagcaaaaatatttaagatgaattttccagttaatccactccctattgaattgaggcatgctgagcgtgttatttgcctcccatccagtgccaatttagttagagatgtcaatgtgaagaataagtcggaaaaaaactcggtggttgagctttattttcaaattgagcaagattttggtctggggtcaatcaaattgaaagctttaattgatctttttgatgaaattgtggaggagccatttttcaatcaactgaggacaaaagagcagcttggttatgttgttgaatgcagcccacgagtaacatatcgtatctctgggttttgtttctgcgttcagtcatctgagtaccacccagtttacttgcaaagtagaattgaaaacttcttaaatggcctgaaagaattgttggatgggcttgatggtgattcctttgagaattacaaaagtgggttaatggcaaagctgctggagaaagacccttcactcacatatgaaagcaatagattgtggaacc

SEQ ID NO: 28193 - DNA, 520 bp, Glycine max
ggcgattgctcgcatgtcagagtcgcccgaattagcaagtgattaccataggaagttgaaagaagcctatgagactgaagagaaattgaaagaagcagatgttttgagaaggagcaaggagcatttggttagactgcttgatgaggtggagaggcagctgagtgaaacacctcatttggcaggtcaagagtttaccatggctgatgtgatgctcgttccagtattagctcgtttagaactcttggatttagagaatgagtacataattggaaggccaaacattgctgagtactggattttggttcagcaaaggcttagttacaaaaaggtgattggtaagtactttaatggttggagaaagcacagaacactattaaaagcatggttcttagttcgtattagaagtttgttgaaaaggtactagtgcagtacttgtatatttccaaaaggaggttgaataaatgaatataggaaacaacctttctgtgtatggtaaaattaggagaacttaatattatac

SEQ ID NO: 28194 - DNA, 374 bp, Glycine max
gctagacatgtcagtacagtatccgcggtcgatagtgaagtaaatgaagaatctggaaaatcaatctggaaaaatagagtgagaagctggaagggttaggatacaaagatcatgaagatatagtctgcacccaaggaagacaaggaggcctcaattcctccagagcagcagatggaagaaacacggcccgcagcggctgctgctgcaccactttctgtagttattctcaatgtcgaaatccaatattgcaccgtacagaactgtgataatcatgctattgataatattgggacttttcttccattatcgagttacacttccagttgagagtgcctttcctctttggttgacttctatcatctgtgagatctggt

SEQ ID NO: 28195 - DNA, 406 bp, Glycine max
taagctacatgtccgtgttttggaataacgcgagcttctgttggctggtatgaaaccttgttcttagatccttcataatttggtttcaatccctatcctttgtttcatatctgaatagagagatgtttagataaataagccagattattgtgtgttgtgttttaagtttgatgttaattcaaaacagtggcttttcttctgtagccatctagttacctggtgtagtgcaacttatagctgatatgaaattacatttgtgtgtaaatgatgtaattttggaacaaggtatgtttgctgcatttgtgggaacatttgtgggagcaactaatgtacatgcggtacttgtacagccacacgtcacataatttcatcacatcatattttgatatatttactattttgttat

SEQ ID NO: 28196 - DNA, 415 bp, Glycine max
acggaagaaaagcacttgaggatcacataacagaaagtcctgcaagggagctttgcattctcgaccactctagctcagagtgatcctccattacttgaagatgctttaaagagaataaaagttattcgtgaaaaggaattgtctcatgctgatgaccaggggagaatgtcttacccttctgctgaagaagctttgaagcatcttttgtggttagctgactctgatgctgtatatgaagctgctttgggtctttatgatttaaatcttgcagctattgtggcattgaatgctcagaaagatccaaaagagtttcttcctttcttacaggaattggagcgtatgccaactctattaatgcaatataatattgaccttaggctgaaaaggtttgaaaaggctctcagacacattgctt

SEQ ID NO: 28197 - DNA, 344 bp, Glycine max
cctcgagccgattcggctcaggtgtttctgcttacttcaacaagccacacactgagaggaaccacaagacttcgtattcgactactgttcaaggtgttgttgaccatagaggggttttcactgatgtgtgcattgggtggccaggttcaatgggtgatgatcaggttttggaaaaatcatcgctttttcatagggctaacaatggagggattaatctaagtggggtttgggttgttgggggttgtgggtacccgttgttggattgggttttggtgccttatacacagcagaatctcacttggactcagcattctttcaatgagaagattggagaggttcggagg

SEQ ID NO: 28198 - DNA, 465 bp, Glycine max
cctcgagccgaatcggctcgaggtcgttttgttcgttcagttctgaccccctaattgaggcacctgtttggcttgttcttgacacttgtggaggctgcaattgacttcttgttgcaattgatggcaagtactgaatggtatccattgcaattgttggtagctcttcaaataattcactcttggaataattataattgttgctgaagagagttaaataaagaccaggaatttcactgccagaaacgttcaatattatggagattgaagccgacgcaagagatagttctctcgttctgctcaagcaaggagctgaagctagggtttttgagtcttcttttgtgggaaggacatctgttgtcaaggaacgcttctcaaagaagtacaggcatccaactttggattcaaaattgaccctcaagcgcttaaatgcggaggcaaggtgcatgaccaaagcaaggcgacttg

SEQ ID NO: 28199 - DNA, 287 bp, Glycine max
  unsure (1)..(287): unsure at all n locations
ctgaagcaagttttncgagntgttccttttcctgctcttccttcattcaaattgcccctgaactcaatggggcagtcaatcaaatgcaaaatatatttgaaacagagacctccgaaggtaatgctacaagtattggtgacactgacataaatgataggcaaaatcaagatcagtgctgggaaaagtcagaaaatgactgcaatctggaaatgcttgttgtagacataataactcctgagtctgcagaaatctgcaaggatgctaaggagaatagggttacattaaat

SEQ ID NO: 28200 - DNA, 388 bp, Glycine max
tttcgtccgttttgaggaaaataagagagagaaggctgagaaacacagaaacgcattacgccatcatccatcacagatcagcaaaatgatgggtttgggatgttgaagcggtggaggattcacaatttgcgatggaaagggaaaattggagagaacacatcaatagcaatgggaattattacgatgacgacggagtagaacgaagccctgcaaagccttcttcgctgtcttcatcgcctcccagacttgcttacatcgatcaccgtgtttccaaattcgataccttggccggtgtcgctatcaagtacggtgttgaggtggcagacataagaaagatgaataaccttgttacagaccatcaaatgtttgcacttaaaacactccacat

SEQ ID NO: 28201 - DNA, 509 bp, Glycine max
cattccttcaaccaattcagacactgcaccagaaatggaggctccacaaggtggatccggatccggacccgagcgagacaaatccaccgctccctcctcttctccgatttccgtcgtctccgccttctggaaagattttgagttggagaaggagaaatctatactggatgagcaagggcttcgaattgcagagaaccaggaaagcagtcagaaaaatcgccgcaagcttgccgagaacactagagacttcaagaaggcttcgcctgaggataagttaagtttgttcaattccttgcttaagggctatcaggaagaggtcgacaatcttacgaagagagcaaagtttggagaaaatgcttttctcaacatctatcaaaagctctatgaagctccggatccttatccagctcttgcgtcgattgctgagcaagatctcaagatatctgagcttgaatctgaaaaccggaaaatgaaagttgagcttgaggagttcaggacagaggcaactc

SEQ ID NO: 28202 - DNA, 343 bp, Glycine max
tgaaagcattgtgatatggcgtggcggtttaggccgaggaagggaaggctgctgcgttttataaggattataggagatttgtgattgataggtctgcgaattgttcacttagtgttgttagcattggggagtaccatactggtgtcaatgcaaggaagaggaagaagcatcagaaagctgggctagagaagacgccactggatctggaccaggcgaacgcgttacctgttgttggagagattgttaatgacagcctccctgtggtcgagtctgagagttcgtttattcatggtaaatacttgatttatgagggtggtggagacaggtgtaagagcatgaacca

SEQ ID NO: 28203 - DNA, 304 bp, Glycine max
gagaaactgaagttaaagacacttttccctgtgcagtttactgaggatactactgagcagaaaaaattcaaggctcttgacaagacctacatttgccctagctgcaaagttactctcaccaacacaatgtcgcttgtggcccttagtacatgtgggcatgtcttttgcaagaaatgtgctgacagatttatggctgttgataaagtttgtcttgtttgcaacaaggcgtgtaaagagagaaatttggtgaatttggacacgggagggacaggttttgctggtcatggagatcatcttgaagcca

SEQ ID NO: 28204 - DNA, 248 bp, Glycine max
tttttttttagtgtacaaatctatctgcttaagtcaatgttgtttgtaattctgaaagatggatgccgtaatattgctcttcaatgtgatgcatgcattaatttaccaagccataatttcttcaatggatggtgtagtaatattgctcttcatgtgtctcggcttcttgatataagttatttgtttctgatcttaaatatgaatatgatggttgggtttcataaaaaaaaaaaaaaaaaaagggcggc

SEQ ID NO: 28205 - DNA, 1135 bp, Glycine max
tggagccattgtcgctgtctcagaggcttacaatagcccttgatgttgctagagcgatggaataccttcatggtcttgcacgccaaaccttcatccatcgcgacctcaagtcttctaatattctactgggggatgattttcacgcaaaagtttctgattttggcctggtgaaacttgccccggatggccagaagtctgtggcaacaaagcttgcaggaacatttggttatcttgcccctgaatatgcagtgatggggaaaatcaccactaaagttgacgttttcagctacggtgtggtcttgatggaacttctgactggactaatggctcttgacgagagccggtcggaggaaagtcgatacctagctgaatggttttggcaaattaaatccagcaaagaaacacttatggcagccattgacccagctcttgaagcaagtgaagaggcttttgagagcatttctattgtggctgaactcgctggacactgcacttccagggatgcaagtcacaggcctgatatgagtcatgcagtcagtgtgctatccgcattagtggagaaatggcgacctgttgatgaagaatttgattatggctctggcattgacttcagtcaaccacttcctcagttgctgaaagattggaaggaatcagaaggcaaagaatcaagctatacaagtgcacacagtgaaggaagcataccagctaggcctactggttttgcagactcttttacctctgctgatgcaagatgatctggaggtaactccagtgcaatttgtggaacttgttactttgtcttaccaataaaattcactttatattggctatttctgtgttggcagcaaaagggtataatttatttgtttccaagtctttgtctttggacttttagagaatacaggtatggagatgtagataaagaaacattatttttattctttttatgtttgtgtctatatacaaattccaaaatctaaagtaacgaatcttggctacaaggtacgttaataatatttatcaataatgctacatgtgctattcatgttatacgtgttatccatgttgtacaggccaattattgtattaaaaatgtttgtcaatagcataaattacaaatgtactaccaagtacc

SEQ ID NO: 28206 - DNA, 239 bp, Glycine max
ctcgatctgatacgcgatatccttttgtggaatatgcggtgcagtattccgtggctgctgcttacgcaacgtttgaccatagtacatagcagctgttccacaaactacttttacctggtcttgacattacaattttcggtggcaatgatttttcttcgtataggaatgacattgacagacgtggactccctttgactccggaatcatcggccacccttcctcccttttcctccattact

SEQ ID NO: 28207 - DNA, 445 bp, Glycine max
gcgcctactcgtccgcccacgcgtccggtgcaaatgctcttttttgtggtttggcaattgtggataagaataagaataacaacagccacagtaataacagggtagagggagttggtgttccaaagatttttgggcaggatttgaattgttccactcaatttagagctcaactggctgtgaggaaaatggaggagaggccatggccgtggggaggtcatccccccaacggaaatagtattggctttcctaatggtgttcagggttctagttggggggctggtgaatgttgtgaggcagcttggtcatcctgaaattcttgctcctaggttggccagctctggagctttgccggatgttgccaatagtgcgaagaatgattttgtgcataacaactttcagcagcaacagctggctgtacagatgcaatttgatttctcaagagcca

SEQ ID NO: 28208 - DNA, 288 bp, Glycine max
atcaacctcttcgccgtctccgtcgccgccggtggctcttcctttgctgccgcatcggaagaaccagaaccagaaccagatcccttcctcttctcctgcgattgcggtgccgccgacggccgccgctctgccgcagaagcgctcctcggcagcggcgttggacgacggttacttcagaaggcattactccgccgtggctgccgcggcggcggcagcggtaggctgatgaggaccatgaggaggaagacgaggaggaggcggaggatttggaggaggaggaggaagaat

SEQ ID NO: 28209 - DNA, 286 bp, Glycine max
cggctcgagaaaagccgttgcgaaaactgaaaagccccggatttttgaagaggagaatgtgacaagtgaggatgatttagcattagttcccacggccacccccaagctcttgtgtttctaagagaggcaaagtcacactacacttgttgcttgtaattaagcagccatggagtcatcaatttccctttccttcttctccttctgtcgcctccaactcacactaccctgtgcggggaagaagacgtacatagtacacatgaaacaccgccacgattccacagtgcat

SEQ ID NO: 28210 - DNA, 271 bp, Glycine max
ttctcctttctttttcccatttttttcctttccaccatctgataaaggataaaggacccaaagaaaaaagttaacatatttgtttgtatcataccactgctgttgtaatcccctctcaaagtgtaataaataaaaacacccttctttgtttgcttgttttgtttgtttccttcctaagactatctttttctcagaagcaaaggttttgaatttcagttatggccttttgctgtctttttgtttttattgttttgagaaaaattggatattt

SEQ ID NO: 28211 - DNA, 1299 bp, Glycine max
cgcgactcctcccctcgctcccgcgaccccgacgccgacaacaacaacaaccaccaccaccaccgccgccagccttccttggacgacgcccctcccaaggtcaagctcatgtgcagcttcggtggcagcatccagccccgcccccacgacaaccacctcacctacgtctccggcgacaccaagatcctcgccgtcgaccgccacgtcaagttcccctccctcatcgccaagctctcctccctcgccaacaacaccccctccaacctctccttcttcaagtaccagctccccggggaagatctcgacgccttgatctccgtcaccaacgacgacgacctccaccagatgatgatcgagtacgatcgcctctcccgcgcctcacctagacctgcgcgcctccgtctcttcctcttccctctccacaacaactgcaatttcgctccaaccgaatccaaatccgagcgccagtggttcgtcgacgctctcaattccgttcacgttccagaagattctccgccgccgcctccggcgacggcgaatccggattttctgttcggactcgacaagccggcggcggaggatgctctggcgaaggactcggagtgttttcccgaggatcgtgaagccgaacctcagattgagaatgagaacaacagtaaacaacttctgcaacggaaaatgaagatagaggaagatgataataacaataagggtagggtttacggcgttaacggcgggggcgactgttatgcccagaagaacgcggagaaaatgacgccgttagtggcgcatgcacacgcacacgcacacgcgcaattcgttcatcctggttcggttactggaacggtgtcgttcatgcaggagaggaataataataacgcgggttattcgctggcgtttgctactacggggaatgagatttatctcattcagactccttctggaatgtttcaagcggttcggcccgttactgggccggttggtcaaccggtttatctggttcacgcacccggtccggtttcgcattcgaaggttggtgcggcggtgcacggtggtgacggaaggatataaaggtcgtttcatttgttcgtttttgtggcatagtgctcgggtactgatattggtttttcagtttttttttttaacttgtttggaatattggtttgggcattgtttcttgtgcataggtggtgaagtggaggaattcagttcaggaattgtttttggaagtgtaattactttcaaatcagtacattgctgattttcgtatcagtgattgattactaaattgtctccttt

SEQ ID NO: 28212 - DNA, 349 bp, Glycine max
gtttcttctgcagctatggcgattcaagatcaaaatggatttttcagatcacagggtggtcctccagaaggaggtggtgtatctttgagttctgggcattctgtcacacatattcaacttaatgaccagttttcttgtgggaatgactatgctctgaaggtaaggaagccgtatactatcaccaaacagagagagcgatggacagatgaagaacataagaagttccttgaagctttaaagctgtacggacgggcttggcgacgtattgaagaacatgttggcacaaagactgctgttcagattcgaagtcatgctcagaagtttttttctaagcttcttcgcgatccta

SEQ ID NO: 28213 - DNA, 1441 bp, Glycine max
  unsure (1)..(1441): unsure at all n locations
gttcaacatagatgagtaatattttttaatgcttgatgaatagagtgtatgaatgaaccaaagcaatttattattaaatcatttttcaggaaactgctttaaatcatgtcaccagctctgggattggtggagaaggatttggagcaacccgcgagatgagccttagaaaactcatttgggtggttactcgtattcaagttcaagtgcaaagatataacaaatggggagacgaaattgaagttgatacttgggtcgatgcagcaggaaagaatggaatgcgaagagattggataatcagggatcattacaccaaagagatcataacaagagcaacaagcacatgggtaatcatgaatagacaaacaagaagactatccaagatccctgaagaggttaagcaagagctgcttcctttttatcttaacaggcttgccgttcctaccgaagaaacagattgtgaaaagatagacaaactcactgatgagactgctcagatcagaatcctatctggactggctccaaggtggaatgacatggatgctaaccagcatgtcaacaatgtgaaatacattggatggattttagaggtacgaattagaaatggcaaaacaaattacctatgtggcaaagattgcaatactctatttcttatagacgttacaaggttttaaatatcggtcgcggttgtgttaggattttgttgcgtttgctgatatcacggcacatcgaatacaaatacgatcccaattgagatcactgaaagttaaaaaatcttgatgttgcaatgcaaattacagtcgccaacctttttaaaaccttttaacgttagagatgataaaatgtagtactgtaaaatgtagtaccaaaatgttgatttggcctattaatttggttgcagagtgtgccaattgaagtgctagaacattataacatgacaagcatgactttggagtttcggcgtgaatgtacacaatcaaatttgttggaatccatgacatgtccaacagcaagagttatggaatccaataataattccaagaatagaaaacccgacatgcaatacacacacttgcttcgtctgcaacaagataaagcagatgttgtccgagccagaactgaatggaattttaagcaaaagcatcagtgatacacaacattgacaaaaaccacagtatctgtggaccctgtacccttcttcttcgatgttcctgtttgctttttgctcttatggttttgctttctaggatcctttaagttctacattcattacaacacatttgtcaatttatcctctttgtgaattctttctgtgaggagaattgtagattgctagttattgagaaatttgttataaataaaagcatttgataataactgattaaaatatatcaacatatatcgcatagtttggnnnnnnnnnnnnnnnnnnnnnnnnnnnnnn

SEQ ID NO: 28214 - DNA, 271 bp, Glycine max
gaaaaatctagactagttgaagaaagaaacgcttgtctttccctccgtcctcagtctggagcatcatcatgatccgttcccttccaatttaccccaaaaattaaaatatactatttcattccaatgtttcccaagaagcggcaacgcaccaccgcagcctgccgttcctcctccacactcgccaccatctcttccctctccgacgtaaccctaaccgaaatctcccataaccctcgaccttcctctcccatgcccgacgaccgtccctccc

SEQ ID NO: 28215 - DNA, 278 bp, Glycine max
gttcgatgctgatatggggtttcgaagaaaagtccatgccgttttgtgcagtcacatgtgcaatatgacatgccaaacatttactttgggatgaaatatagtattatatgtatgtttacctcatcaatgatgcaaaatgtgaattacccgctgataaatgcgtgtatctgctttttttttttttcattttagaatacggtcacaattcacgttagccttttctggaaaccctttttttccattttggaaacttaggctatattaatccattcctttaa

SEQ ID NO: 28216 - DNA, 281 bp, Glycine max
ggacaaactactatttatgctcattacaaatttttgacaaaggaagagcttgagaggttaaatttgaccaacctgattggctccaatctacttagagcctacatgcatggcttctttattaatcatgcattatacaaaaaggcaaaagcactggtggatccttttgaatatgaagcttatattgaacagcagaaacgagaaaagatggaagctgagcgcgcctcacgaatcacggtcaggaaaaagttacccaaagttaatcgggcccttgcagctcgcct

SEQ ID NO: 28217 - DNA, 287 bp, Glycine max
aagacctcagcaatcagatccctatctgcattttgcaggaaggtattgaaatcttcacgaatttcatatattttaccaaacttcacaagatatcggatgcaactcatcttcagtttcatcaactgatatagagatgcattttggagcctatcaagtacattctttgtgtcaatatcttctagaagactctcatggcatacatctctcaaatcagatatgtcatacttgtcggccgcgtgcagaagggccagcctatgagtcagaaactcttcatgtttgatgatccc

SEQ ID NO: 28218 - DNA, 260 bp, Glycine max
caactggcagtccgatggccttttctcctgatagtgcaaatgcttcaggtgaccagcagccagaatagtaaaggagaacaacttgatctaggtgtgaggcttggtttgctgaaattagtaagtggaatatctggcttgacacaagatgatctcccagaaactttatctcttaacttcctgaggctgaggtctgttcaggctcaaattcagaagattattgtgatttctacaagcattcttattcgcggtcaggttctctt

SEQ ID NO: 28219 - DNA, 504 bp, Glycine max
ttgtcacgcgtccgctctctctctctctctgttatgttactaccctaacaattttaacaaattttccctcaaattttcactcttttctgcaccgccagtgatgggagatgggtgcgcggttgagggcaccacggggaattccaattctaataacaataataacaataagaagaagaacaagaagaagaagaacaggggtgggagcaagaagaagatgacccacgaacaggtcttggccttcaagttagtgagtgagtgggttttcttggatcacccttctgcttcgtcttcatcttcttctgctgcttcctgtgttgtcgatgattttggtgttcagaagcctctagggagaggcggggaaaagctcctctttgaattgcattcgcactccaaattcagcgatggcttcttctccccttctaaagttgttgaaagagctcacatcaacggcgtgaaagttcttgctctgacagatcatgacactatgtcaggcattcctgaagc

SEQ ID NO: 28220 - DNA, 394 bp, Glycine max
catctgtgcgctgtgcagtgtttaaagaagatgtaaatgctgcgatactggatggaaaagaaatagatgtttcttttgacaacttcccttactatttaagtgagaatacaaaaaatgtcctggtggctgcttgctttatgcacctcatgcataaagaacatgaaaagtttactgcagatcttacaaccataaaccctcgtattcttctctctggacctgcagggtctgaaatatatcaggagatgttggtaaaagcacttgcaaaatactttggagctaagttgctcatatttgatagtcatttgcttttgggtggtttatcttccaaggaagctgagctactcaaagatggacttaatgctgagaaatccttcggctgcactaaactaagtcc

SEQ ID NO: 28221 - DNA, 524 bp, Glycine max
tgttgttactgcattgtggaaaaccggccctgaagggatctggtacaagtgtataagatgtctgcggcagacttgtgcttttgcctcaccagcttccaccaatcttcccagtcaaaatgaccgggagatttggtggatcagccgctgggcttatggatgtccaatgtgtggtggaacatgggttcgagttgtatagctggcttcaatacaaaattgtcatttgagtttctcttttggtgagggaagaattgcttgtattttacctgcagaaactgaaggtggatggaattgtacaggagaggagacatgtagattacctgacaggttctttatcagtatgttgtcattaaaagtgaccaaacgaacttggatttgagtattattctactgatcactatgtaaagttccaagagttatcaactaattcacctagatctcaaatttctttggaattatgatcatgtgattcgtgttacaccgccaaaattaggtattatccttgtgatgtttgtagttgctccttc

SEQ ID NO: 28222 - DNA, 460 bp, Glycine max
tgtatcttcaactgatcaaaaggattttgatttaaacattccactcacactaaccggaggttctggggagccttctcctttactctgtgtgagtctctttgctgatttcttttatctcatgccatataggaattcctgtatataggctggtccaatttacagtcacaatcattaaaattctagctttcaggttttgtcttggattttgattgtatgcagatatcaataagcttgacggagctaagcgtagctcaagaaagcgtggagccagttcagcgatctatagtgcctgggccatcgccctccgccaagtcgggagaaacagccttggcagaaaaagatgagctttctcctattaaagctggtcttaggaaagtaatgattttcacggagttgtatcttccaagaaatcaaaaaagggatgtcgtgaggaagacggaagtgaaggtaggtgctctag

SEQ ID NO: 28223 - DNA, 1518 bp, Glycine max
atgtgattttgatttagataatactttatatttttttaccgcagggcgttacgaatatagaaacaaaggtgttgacatgtttcttgaatcattgggacgtcggccttaatcaaaaactgaaagcatccaattcttcaacgactattgtcgctttcattattatgccagctgctacaaattcttatgctgttgaagctttaaaaggacaagctgtcattaaacaattacaagaaactgtaaacattattactgataggattggacaaagaatatttgaaaaggctgcaagatattctggtggtgaaattgaagatgcagttatcgatcctagagaattattaacgaatgaagacaaggtactattgaaacgtcgtgtcatagcactcagacgtggaaatcttccaccaatagtaacgcacaatatggtcgacgataacggagatctgataatgatgcaattacgttacttgaagctttttaatcatcgagaagatcgtgtaaaaatcgtgttccatcccgaatttttgagttcaaacaatccattgattgggttagaatatgatgagtttgtacgtggatgtcacctgggcgtgtttcctagctattatgagccatggggttacacgccagcagaatgcaccgtcatgggattgccgtcgataacaacgaatttgtcaggttttggatgttacatgaacgaaatattggaaaatccgtcagatcatggtatttacattattgataggaaaatgaagtcggtagaggaatcgatccaacagctcacagattacatgttacaattctgtcagaaaacaagacgacaacgtataaaccaacgcaacagaacagaaagattatcagattcgttggattggaagttgatgggcatggaatacgtccgagcgagaaggttggcgttacataaggtgtacgctgattcgtttgtagatgctgaaatcggtagcttcgaacaatacaagttcaaaatatcaaaacctttatcagttcctggatctcctaaaattcgtggaagcaatggcattgagagtggcggcgacaacaattcgataaaaatatcaaatgaaataattaatggtttgagttttcttgatgatgacgaagatggatatccattccccataaatatcaaatccaacaatatcattaaccacaatgttctcaataacaacaatgaagtatctgtcatttaaagaataatttatttttttttttttttggaaaaaagattttccattttccaaatatatttccattaatgttctaataatgaaacaaaaaagggattgaatggtggggatcctcgatactttcttctcctgattgaagattgattatttttcttttatttattcgttacattcattattaaatagaattttctataccatctcaacattaatgttatttaaagactcatttatttgtgcaatgttatttttttttattcctatcattaataataatatataaatattatataaacaatatagaatcttg

SEQ ID NO: 28224 - DNA, 261 bp, Glycine max
ctttctctcaaaattttgataagaaagtcttgaccttgaagagagcgagagggagaaagaacctactattcttcttcttcttcttcctgcatagctaattaatttccatggaggacttcaacaactacaacaaatcaaggtctcatggaaataatgggcaaatgatgcagcagatggagaggtactatggaggagccccaccacaaccaacaaggccttatgatctcaggtcatacagtgtttcttcatatacacaagctc

SEQ ID NO: 28225 - DNA, 450 bp, Glycine max
gtcgacccacgcgtccgcacactggcaagacgatcaagctctctgagcatgttcctgcttctcctgtgagacacaaatcaggatcacacaagcaactgacacaagagccatatgatatcacagtgctaaacaaacctgatagaaccaaatactaataatgtccacttcgaaacccatatccccttttcgactcacctccctcctccgttccacgaaagacccctcccgcgccctccagctcttcctcaaccctaaccctaaccctaatcctaaccctcgccccctgcgccactccctccgctcctacgatctcctcatcaccaaactcgcccgcgccaaaatgttcccccaaatggaacaaatcctccaccaactccaaaccctaacccaattccccgtccccgaacccctcctctgccgcgtcatcatttcctacgcacgcgcccgcct

SEQ ID NO: 28226 - DNA, 250 bp, Glycine max
cactttttaattttttaatctccaaggcctacaataggggatgccactagccttatagagtggcggtttttgtttatctagctattcttgttatgtgcaaatggtagtagctcaaggtcctatatatatgtgtatgtgtgtgcacttgttgtgacttcttcaacaactgaagcagggtgttaccactgtcttaaagtctcttttttgggagcaccaatggctttgttcatagtggttcttgttgttgttg

SEQ ID NO: 28227 - DNA, 244 bp, Glycine max
ctgcttgcaattcaagccatctaaaaggcctacttttagtgcaatgctggcaatatttctccgccatttgcaggaaataccacgcagccctcctgctagccctgataatggcttagataagggctctgtgtcaaatgtgatggagccttccccagtacctgaattggaagttcctcaggaaaacccaaatcatcttcatcgacttgtgtctgaaggagatactgcaggtgttagagatcttctt

SEQ ID NO: 28228 - DNA, 143 bp, Glycine max
ttgagtcagagttaactgagatgaatgcaaatggtgaaaagttgcaacggtcatacaacgagcttgtggagtataagcttgttctgcagcaggctggtgagtttttccactcagctcaaagtccagccttagagcagcagaga

SEQ ID NO: 28229 - DNA, 899 bp, Glycine max
aaacagcatacctagtaaaacagcatacttccttaaagcagaaaaattatggaagcccaaagagatgagcgtgtctcaaaactacttggagctcaaacccatgtttggaatcacattttcagcttcataaattccatgtccctcaaatgtgcaattgagttggacatacctgatatcatacacaagtatggtcaacccatgccactctcaaaactcactacttcactatcaatccacccttccaaagccaattgcatatatcgcttgatgcgaattttgacccattctggcttcttctctcaacacaaggtcaacgagaatgagctagaaatgggttacgtgttgaccgatgcatctactctactacttaaggacaaccccttaagtatggtacctttcttgcatgcaatgcttgatccaactttgacacagccatggcttcaattgccaacatggttcaaaaatgatgatccctcgccatttcaaacagcacatgggatgaaaatttgggattatgctgaccgcgagccaaggcttaatgacctttttaatgatgctatggcaagtgacactcaattggttgccaatgtggtgattgagaggtgcaaaggagtgttcaatggattggagtcacttgttgatgttgggggtggcacaggtactatggcaatggctattgccaaatcattcccacaactagagtgtacggtgtttgatcttccacatgttgttgccactttacaaggaagtgagaacttgaaatatgttggaggggacatgtttgagtcaattccttctgctgatgccattctcttgaagtggatattgcatgactggacatgatgagcagtgtgtgaacatactgaagaaatgcacagaggcaataaagagccaggtga

SEQ ID NO: 28230 - DNA, 648 bp, Glycine max
atgctcactacttcttctcaacttcataggcctttcttattcttccttctaagaaaccacttcaaatcatcaacttccctagacttgcacaccctttgggctgctaacaagcaatctcatcctcttgctatcattcagattgatttctctcctagcacctcgatcaaagggctaaaagtttaaactttgctgcttaaacttttctttcacggtttgatacatcttattgattttagtgctatttcaaaggggcgaaatttgagacatgggcttgagctctaagcaggtttctagcagtggacttgattggaaacaaacgttattggaggctcagaatttggaacttccaaagcctaatctgatgaggaaacaacaacaacaacaacaacaacaaactcagccgaattcagagtctttgaagtgtccaagatgtgactctaccaacacaaaattttgttactacaacaactacaacaagtctcagcctcgccatttctgcagggcttgcaagaggcactggaccaaaggtggaacgctacgcaatgttccagttggtggtggaaggaagaacaagagggtaagaaaatcaatcactacttcaattacaacatctttcaccacaacatcaatcacaaccaccacttttac

SEQ ID NO: 28231 - DNA, 334 bp, Glycine max
gtccacgtgtaccgcaacttcgaccgcgggatccacggcaagggcgtcgccgtgaaattcgccggagatggttcgacaccgaacaaggctttgttgatgcgcgcagaaacgaacatgatgctgatgagtcccttaaacgacggaaagccccacgcttcgaagcttcaccagctcgacattgaaacggggaagattgttacggagtggaagtttggaaaagacggtgctgacttaacgatgagggatatcaccaatgacaccaaagggtcgcagttggacccttcggagtcaacgtttttggggctggatgataaccggttgtgccagtgggaca

SEQ ID NO: 28232 - DNA, 323 bp, Glycine max
tgaagaccctcctgaatctcttgattttaactactggaggttggcattatcagacactgaatccacaaattcaagatccgtaaacagtgtcagctcttgcaagttgaagggtgtcaaagttgttcctgtagaagagagtggtatctcagagcaaacagggggaaatgcaactgaaagtttttctgcacaagaggaagataatgaacggtatcttagttttcttaaagtcttgacagaaggaaacaattggaagaggaagtgtaaagtggttgaacagttgaggctgttgctgcgggatgatgaggaagccaggatttttatgg

SEQ ID NO: 28233 - DNA, 330 bp, Glycine max
catgaatgtgttgatttaatccctgaattaaataagatggtttttgcagttcaggatttggttaagcagtgtgaagatctcaaagtgaagtacaacgaagagatggcaaagagaaagaaactcttcaatgaagttcaagaggctaaagggaacgttggggttttctgtcgatgtcgtccattgaataaggctgaaatctcagctggatgcaatacaattgtggattttgatgcagcaaaggatggttgccttggaattttgacaagtggctccaccaaaaagtcattcagatttgacagagtttatacaccaaaagatgatcaagttgat

SEQ ID NO: 28234 - DNA, 375 bp, Glycine max
tgcggaattgagaactggatcatagggctgcttcagcctgtcattgataatctcaagaagcctgattacgtgcagagggttgaaattaagcagttctcattaggggatgaacccttgtctgttaggaacgttgagcgcaggacttctcgcagagtcaacgatttgcagtaccagataggccttaggtatacaggtggtgctcgcatgctgttaatgctttctctgaaatttggcatcattccaattgttgtacccgttggtgttcgagattttgacattgatggtgaactttgggtaaaattaagattaataccaacagagccttgggtgggagctgtttcatgggcttttgtttcactcccaaagatcaagttt

SEQ ID NO: 28235 - DNA, 258 bp, Glycine max
cttgtcatcaaagttaaattccaagagaatgaagaagatactagtatcaatcaagtttctgctttgtttatctctgctctgtgttttgttcttatcatttcctttactccttcaatccttgaagccatccctcatgcaattcttcagctacatggttgaaaaaagctacatgttccttctctgcaatggcctccttcttgttttaatagccatcaactctgctccaatcaatgcctcttcaccaccaacaactgaacg

SEQ ID NO: 28236 - DNA, 615 bp, Glycine max
ttttactagaggtggcatgtggactcagaccacttgagccaaaggcaatgccggaagatatggttttggttgattgtgtttggaacaaattcaaacaagggagcatactcgatttggtggaccctaaactaaatggtgtttttaatgaaagagagatgctcatggtgttgaaattggggcttctgtgttcaaatggttcacccactgctaggcctagcatgagacaggtggtgaggtttttggaaggagaagttggtgtgccagatgagttgagaaagccgggagagggaggttaccaggagggttttgatgaattcttgcactcacttgaatcttcttcgtttgatcagatgaacacaggttcctatggtagaaacagagacatggattctagttttccatctttaactggtacatctctttttagtccccatggtaaaggacaaacaatgtgatcatctacattttacttagagttgtactctatgtacttaagatatttgtttatcatatcaccccatgatgtctcataatagtacacagaaagtttttgtgatggtgaattaaatcccaatacaagaagttcgtattctaattcatccccccattggcatc

SEQ ID NO: 28237 - DNA, 468 bp, Glycine max
cttcagttcctgaattgcacatttctcaaagcttgttgtccaacaaaatatcatggccacgtctctcattttatggagataacatgttacttgagcaagattccaaagtatatgaaagtgcaagctctctgtctttggcaacatttgcttcccttttgatagagtttgttgcaaggcttcaaaatcttgtggatgaattccaagatctcagtgagaaggccaatttcaaagacccctttaacccaccagtgctgaagtaggggacaatgacattgtggcctcgcttcactggcgactatatttcaaaattggaggtatttagaatctatctaactaatgtataatagtctatccataatctataataacacaaatataaaagttatatcgcatttttcttagattttcatttttatttctggtaaattattattgtaacttgttttacttttctactttcccttcttc

SEQ ID NO: 28238 - DNA, 417 bp, Glycine max
agaccaaatcaaaatcagaatcagatcctgatgtcagaagatgggaatggctgtggcgagtgatgatttgctgagcgagaaagctgccgcgatgagagcgtctctggagagaagccaggccatcacggacgacgtcgtttcgattctcggctccttcgatcaccgcctctccgccctcgaaaccgccatgcgccccacccagatcagaacgcattctattcggaaagcccatgagaatattgataggactttgaagtctgcagaggccatattggctcactttgatcaatattatcaggcagaagcaaaaatagttaaaggaccacatgaagatgtgaagaactatcttgaagcaattgatcagctgagaagaaacattagatttttggcataagaagggttttaagaatgatgatg

SEQ ID NO: 28239 - DNA, 258 bp, Glycine max
caccttgtgcttccatggcaaaaccaaagcttcacttgctgtcctttctcttctgcagcatcttgctaagcttcttccactgcacattttcactcgatcaacccagaggatgagcccagctggactggcatggaaactgaagacattaacattgtaagaacccggagagatacttggaaaaaatgtgactactctgttggaaaatgggtttttgttaccgctaccctctctatgattccaattgtccctatctcagca

SEQ ID NO: 28240 - DNA, 405 bp, Glycine max
gttttgtggaagaaagagaggaggaagggaggacaaaattgactaaaaacaaacgggggaagctagatgagacgaggggtagagaagaagatgacttgtaagacaggagaaatataaagagagaagagaggaaattggcgtggcgtggcgtgatcggggcacagtctgaatctgaaatccatcttcaaaatctcaattcaatataggagggagctgtgccctgccctgacgttaaaaaaatgtcgctgaatatgaaaaccctaacccaagcattggcgaagaccgcggcggtgatcgagaagacagtgcagacgacggtgcaggatgtgacgggcccgaaggcacttcaggactacgagctctcgaccagatcggctccgcggggtccgggctcgcctggagact

SEQ ID NO: 28241 - DNA, 357 bp, Glycine max
accccttccatgataagctagcagacaaaaaaaaacataattttgttccaatttgatatgcattttatgcctgctcatctctattttttctagactctagttcaacaagtgctgtaaaccttaatttcgtctaccattttcagacaaaatgcatccaaagaagtgcacagtgttccctttccacccgtgggatccgaaagataatagaagacatggaattgtattatggattccacactccatccaagagctaatcaaatcagcggcagaacaaatagaaatttctggcggttcttgtattttatcagaagatgctggtaaaattactgatgtggacatgatcaaggatggtcagaa

SEQ ID NO: 28242 - DNA, 440 bp, Glycine max
agaatttcaggattgattgttcattgttgtgtgtctctgcttctgctgaaatgtctccaatgcatcctgaaatccagattgctgaagtgcctgctagcacgagattaaatgatgctaagtcacaaccttcaattccattcctgatcgtactttaatgattgaagaagttggagcagagattgagaagcaaaacatgcaggaatcagatgtagacagaaataatgatttaacactccgtcattctaagatgcattgcaattccagtgtctcagaaatatgtggcaaggagggccaagattgtctggacaaaaaatgttctagctcacttacaaacacaacagatagacatattgaaatgattagaaattctgaaattacagaagcagttatcattgatagcaagtgtgatagcttaactttgaatggtgaagggcatcaag

SEQ ID NO: 28243 - DNA, 388 bp, Glycine max
acctcaaccatccaaagcaggggatgattttgaaatagttcctgcacccgatactgattcaagtgatgattcttcctctgatgaatgggaagaagatattgaagccaaagctgagatattggcttatgctaagaagatgatgaggaaaaagcaacgggagcacttactggatgatgcatacaacaagtacatgtttgatgacgaaggattgcccaagtggtttctagatgaggagaggagacatcgccaaccaataaagcctattaccaaagaggaaattgctgcgatgaaagcacagtttaaagaaattgatgctcgacctgcgaagaaggtggcagaggccaaagcacggaagaagcgtgttgcaatgaggaaacttgagaaggta

SEQ ID NO: 28244 - DNA, 385 bp, Glycine max
gtttattaaattttttgaggccttgaaaaatcatcaatgcttccagatgtaacgtagcaacgggggagagaagatctgtgtcacttttcacaccaaaccccgatctgagatcttctcttaccctcgcacaacaatgacatccccgacggcgctgaaggccgtgacgctgacgcacgtgcgctaccagaggggcgaccgcgtcggccacttcctggcctggatatcccttgtccccgtcttcatctccctgggcggcttcgtctctcacttcatcttccgccgcgaactccagggcatattcttcgccctcggcctcatcgtctcccaattcatcaacgaagtcatcaagacctccgtccagcaggcccgccccgccacctgcgcc

SEQ ID NO: 28245 - DNA, 400 bp, Glycine max
aaatctaaatatacaataataagttaaacgcacgcaaacccaaattggcttttgcgagtgctgaaaaacacagaatcgcgtttgcgactgaggaatgagtttcctgcagggtatcgttgattccttcaactccatcttcatacccgataacaacaattatcacgacaccaattctccttcttcttcttcttcctcaacgaatcgaatggaagcttctcctcctcctcctcctcttcctccttcggtttcgaacgagcgcgttgcctacaagctcaaaggctacttcgatttggcgacgcaggagatcgcgaagggcgttagggcagaggaatggggcttgatcgacgatgcgcttctccactaccgtaacgcgcactcgatcctcctcgaagctaattca

SEQ ID NO: 28246 - DNA, 603 bp, Glycine max
gttataattagatgatataaaattattttaaatcaggatttattttttcttgtaatttccataaaccattctatagtacaattatgatattgataatttttaattttatgtgatgtagagagtaatagagattataacagtacgggagtaataattaaacttttccattttggctttgtaccatataaaatccccacacccgcaaacattacaacctgtttttatcgctcacactcgtcacgacttaagagatatttttccaagaagaaaagcaaaaacactctccatttgtgcttgtgttttgtcccgggaaaactgagttcgaaatgatgaagaagaaaccgagcgcgagagagaattcgtcgtcgtcgacgacggcggcgagagaagaagagagcgaatgggaaatgaggcccggaggaatgctggtgcagaaaagaaccacgaatacggatgctgctgtaacacgcaatttgcgcctccgaatcgcgtatggcgctctccgttacgagatctgcgtcagttccatagccactttcggggaagtgaagaaggtgctgagtggggaaacggggttagaggtggatgaacagagactgttgt

SEQ ID NO: 28247 - DNA, 388 bp, Glycine max
atttgggcacaccttctctgtcaagactaagcagttcttttctttctacatcattgacaaggagtgacactcctgaagcacttccttcagtggcaaagcctatgatacaagacacagaagatgagcagcatcagagacgtagctctcacaccttgcttcctcctcttccttctagaaggtcttctttgattaagaaggattccaaggttattcatcatgaagttccctctggccactgctcttttggacaagctgtgcttaatggcataatgttctttgtggtgttggaatcctttctacaccttatgctgccaaagtaggtggatggcttgggctttctatattggtccattttgcaattatttcattttatactgggctgcttttg

SEQ ID NO: 28248 - DNA, 336 bp, Glycine max
agaatttgtctggggtctccacattgatgaagaagcacgtaaaccagaaagtgaagatgttttcatgcatgatgatgaagagactaatgttcctgatgaagaaaacagtaacgaggctggtggatggactgaagttcaagaaactaatgaagatgaacaacacaatacagaagacaaagaggaaatagttcctgatgaaactatccatgaagttgctgtagggaaaggattgtcaggtgctttgaaactgcttaaagagcgaggaacacttaagaaagcattgaatggggtggcagaaacatggacaagaagaaaagtaaattggttgggatcgta

SEQ ID NO: 28249 - DNA, 477 bp, Glycine max
acgaggtgaggcgaagggggagaaagctaaaactaaaaaatgtcatcttctaagctcacactgtacggaatcggaaccgcactcttccgcacccgtagaactgcacccgtaactgtaactccccactctccctttctcttcttcaaacccattcccttcccgccgtgcttcctccgccccgattcctcttcctcctcctccttctccgccgccgccgccgccgccgcagaaaccctaccctccgtcgaccacccctggccggaatgggtctccttcgtcgaccgcttgaacaccaaaggctacctccccaaaacctcctcttccgacgacaccgtaagcctttacgccaacatgaactctctcaaggacgcttgtctcagcttcgcgcgtgaccgttacgaccttttcaatttgctgcctacaaatgatatccaagcagtggttgagggtggtgccctaatcttctccgtaaagctg

SEQ ID NO: 28250 - DNA, 254 bp, Glycine max
tccacctacctacgcaccgagcctaagatggcagaacccaagtacttgaccggcgataagcccgcgatcgaggaatttctcagcaagttcgatacttttctctttgactgcgatggcgtactatggtccggcgatcacctctatgaccgtgttccggagacactagagatgttgaggagcagggcaaacaactcgtcttcgtcaccaacaacagcaccaagagtcgcgccgactacaagcagaaatttgacaag

SEQ ID NO: 28251 - DNA, 492 bp, Glycine max
gcagaaaacattttgatgaatcttttttaactaaatgatgaaaccattactattgctgctaattttggctggtataaaccacttgttgatcgcatgattcaaggaccagattcaagaatatcaatgacaaaagccatagttaatttggagttgaaggatccaaacttaaaactccttggcaaggaaggagctatacctcctttgctagaaatgctgtcaggcaatattgaatcaaaagacttgtcgttatcagccctggttaaattagcaggatctcatgccaataagggaattattgctgcatctggaggagtccctcttattatagatttaatgttctctcctcagtcacggacactaattatcattaaatgttctgaaatcattgagaagctttcttctgatggtgatggaattgatttctttgttgatggagaagggaaacaacttgagttggattccatcatcgccaatttgctagctttgcagcag

SEQ ID NO: 28252 - DNA, 340 bp, Glycine max
gctccctccacctttgctttgcttttcgggtgtgtttttattttttattttctcttcctttctctcttggtggggtttccattgagctgtgataatacttgtgtgttcctccttctgctacctcagtctatccaacgttttgcagtggccaaaaccttaaaacccttttatttttaaggtttcctctgtaggtccttcttgctgttcgctcagactctcgcacttgttgcaaggaagcccttgtttctcacaactacaagatctggtatttatcggatttaagctgcggttagactttgggggattctagagtttgtttttgtttcttgcatacatatat

SEQ ID NO: 28253 - DNA, 343 bp, Glycine max
gtctccaataaacatcatcctcttcccacgaagtcaatatgcctctttgatatgccttctccatcaacttattcctgaacatgccaaatccgaggaaaccttggattcactcactgtctttacagctaagggtaactgataggactgtgagataaggttcaatcaatacgcatggtcgtcattggaaaggcgctgacattgttgtatttaacacttacctttggtggataactggctctaagatgaagatcttgcttggatcttttaacgataaagtaaaggagataattgatatgccaacagaggatgcttatcgtatggctatgaagagtatgcttagatg

SEQ ID NO: 28254 - DNA, 217 bp, Glycine max
gaatacattgccacaattgagttctattgggcaccttttcttcttgaatcaaactccgataatgctgtcatccatagggtaactgataggattgtgagaaaaggttcaatcaatacgcatggtcgtcattggaaaggcgctgatattgttgtatttaacacttacctttggtggataactggctctaagatgaagatcttgcttggatcttttaacg

SEQ ID NO: 28255 - DNA, 707 bp, Glycine max
tacttgctgaaaaattcctttttcatcttatatgtctatatttggcctctctgcaggtatgaagcaggtattgtgattagaaatatgtgcttgaaaaatcatgctttgggtgatgtcctacagattttgaacatgttgattaccattaaaaaatggattgtgcatcaacaatctggctggcaaccacttaacatcactcttactgaggtcaattctgattcagaggacatagcatgcccatagcttcaaaaggcatgcagtgaaaatgaaggagttactgattatattaaaaggcggttggaccaggaacctaggaatgatctaaataaatctctttttctaatgcgaatcaaaggtaggtagtaaataatgaactgtagtatgatcagtaccttgaatgctacatcttactagtgtggttattggtagggttcttcagttctgcccaagggagaaatgaaattagcttttggacaaaatatgaaacttgaaacatgaaaaactctaaagtctcttccggttgccgaggttacaaattctcaaccactatggtctgttatacatcatactatcatagtggtctatcttggaaacaatatgcccttctgcttattttgttactcacattttgcttggagattgacttattgaactaaactccttggatcctttgacttaagcctcctaatagcatccaggatattggc

SEQ ID NO: 28256 - DNA, 348 bp, Glycine max
cctcgagccgaatcggctcgaggtgggagtccaaggatgataggcagcggggacatgataagtactgaggaaattacttaacaagaaaggcactataaagagggacggagaccttctaagggtaattttcgaggccgtggtggtaaaacacgaggtgttgaccacagtggaagatatgttagaggtagccggaaagggtatgataacagaggcaatcaaactcaagcaccaaagagtgttgtgcgagggcgaggaccccggaggtacgagcctactagtaagaacaatgattcagcatccctggtgcaaaatgaacaacctgggaagcagccagagaaaacatcacat

SEQ ID NO: 28257 - DNA, 430 bp, Glycine max
ttttcttaaggttgagattgaagaccacccttacttggcaaaatcagaaggtgtgaactgcatcccagcttttaaaatatccaagaatggatcaagggttaaagaaattccaggcagcaaccacgacttgttggaaaaattagttaaattatatagcacctgatggtgatcgcacttcttcgaatcacaacatatggcgcaagaaatgatgaagattagatttttcagaatggaaatgaagatgcccaaaataaatcaagctgattatatttccttcataaatttagtcacctgaattacaaggcagaggaaaccaaagacgaagcataccattgttaaaacctgtagaaaaatgtatagaaaagtgattctttgtgttagtaattgatttttttaatactttggatgtttgagcagtctttaatttttc

SEQ ID NO: 28258 - DNA, 553 bp, Glycine max
taaagccagccaaccagcagtcgccattattatgccagcgaagcattcatctttcaatatcgtttagtggatcttcctccaatcaatattcgattgctggttagggtttacggttttctgaagggaagggaagagaatggggtttctggttccgcttttcttccacgtcgtcgctttcatttgcaccgttgcagctatcgctctggccgttcttcacatttacaggcaccttctcagttacaccgagcccacttatcaccgttacatcgttcggattattttcatggtcccggtttatgcactaatgtcattcttgtcccttgtaatacccgacagtctcaatctattttaattccatgcgggaagtctatgaagctcgcgtcatttataattttctgtcactgtgtctggcatgggttggtggtcctggagcagttgtaataagtttgagtggtcgagttctgaagccatcattttgtctgatgacttgttgctttcctcctataccgctggatgggcgtttcatacgtaaatgcaagcaaggatgtctgca

SEQ ID NO: 28259 - DNA, 272 bp, Glycine max
  unsure (1)..(272): unsure at all n locations
caaagccagccagcagtccccattgctgtgccagtgaagcattcattcattcatcttctaaaactttgatcatttcgtggatcttctgattcttcgatctcgattctggttagggtttacggttttctgaagggaagagaagtttgcccagaatggggattctggttccgcttttcttccacgtcgtcgctttcatttgcaccgttgcagctatcgctttggccgttcttcacatttacaggcactntctcagttacaccgagcccacttat

SEQ ID NO: 28260 - DNA, 245 bp, Glycine max
gttctagataagaatggaaggcgtcccttactccaattactacatcctaatagttcacgttatttcagtcctgatgatcttgcttctctgaatttatctataccttctctgtctctcaaggatcagtcagaagcaagctctctgacagaaacttcgaaggtttcacttggtgacaaggaatcccaaggatgacatagagttggcattagaacgaagtaataaagataaaacttctgtggatgatt

SEQ ID NO: 28261 - DNA, 208 bp, Glycine max
gttgaagaaagtggcgatgatgccgtaccccaaaaacacgaacgaggaagccaaagccaacaaagccagagaacccaaaccaccaccgagtttcgtttctcgtttcaccaccactttctcctcgatggcgcgaaaaccccttctgaagcaaaccctagctacgctctttctcttcttcgtgctttatgcaatcttcaacgccttcttc

SEQ ID NO: 28262 - DNA, 312 bp, Glycine max
ggtatagagacacatctttctttattccattggatctgaaaaagaccagttacccaacctcatacatcattttattagttcccaatcaccctctttgatgaggatcacaggtgcccatcaaagacacacaggaccctcccgtcctttccttccttctatttcttttcctcatgcatgaaatccgccaattggtgagtatctttgcctctgcaaaaggaaactggaaactgaagaaactagctaactttcccaccccacaaggccaaaaaacttaactttctttcacctctctcaccatttttgctctctcaa

SEQ ID NO: 28263 - DNA, 360 bp, Glycine max
ctctaatatgctgactgattatctgacctcccaaaagttgagaggttggtaacttgcgaagatcacaagaaaaggatatgcagggcccattatcttccatgacctctcttcgaccaaagcttcagcaaaagcagctgaacccatctcagactgaagttactgctacaactaagctgccccagtctaaagtttccttaaccagagaaacttcagaacagttgaccacaaataatttgtcagctgtacctgtcaagagtggaatcatccccaagagatcaatttccagtaatctggattcaagggaggatccatctcagactggggttcaacctactcagtctggcaggcctaccacattaa

SEQ ID NO: 28264 - DNA, 318 bp, Glycine max
atcatatcattcttccgatttcagaagtcagagagagagaagatgaagagcgaaagccccttggttggattctgcattgaggcagcatgtgagaccagagaaagcgtggataaatggcggatgcagagccgcagtctcgatcgcttgccttctcatctcgccgactctctcctccgccgcctcatcgcccgccgcctcctttacccctctctcctcgaggttttcaaacatagtgctgaagaggttgatgtgagacgggacaactccgtggacgcagaatggatggcgtatttgggagcatatcgtcacttgcgctac

SEQ ID NO: 28265 - DNA, 355 bp, Glycine max
ccccagctggccacttctattcttattaggatttatagaagcttatagaagaatcttctagatgtatagccaaatacacctagatcagaagattagatcctctagagaagaatcaaacgagatcatccccatcatcaatacatactactaacagcaggcgatacaagttgcatacttggacagacattagtttataagactagttttcttttcttcctgtcctgttctgttgtactcccattcccctcaacataaatatctagagatatatatgtttcaccagacttaggcagaacaagttactgttgttttactctagcttaatgtataaaacttggtctaccatttagttgct

SEQ ID NO: 28266 - DNA, 447 bp, Glycine max
ctgacgacagactgaagttgtttttctggggcaactaaggcatccacatctcgtgaagctgataggatactgctgtgaagaagaacacagggttttagtatatgaatatttaccaagaggaagcttggagaatcaattatttagaagattctcggcatcactttcatggtcaacgagaatgaaaattgctgttggagctgcgaagggtttagcatttcttcatgaagctgagaagccagtcatctatagagatttcaaagcctccaacatcttgttaggctctgattacaatgcaaagctatctgattttgggttggcaaaagacggtcccgaaggagatgatactcacgtttcaacccgagttatgggtacacacggctacgcagctccagaatatatcatgacaggtcacttgacagcaatgagtgacgtgtatagttttggagt

SEQ ID NO: 28267 - DNA, 402 bp, Glycine max
  unsure (1)..(402): unsure at all n locations
attcacactcttcaagtctcaaccttctctctgttttcctattaatatttatattttatttcatttttaagaatagaaaataatagataaagcatcagcatcatnancatcttctaccacagtttgaatctttcggatcttgttggtcggactcggatcccccatttctcagatctctgaacccacgatgccattcggctcttgacagtgacacctcagctggcttgaatgatggatccaagcaaccttttgccagctgatggacttgaagaagtccaccaaaatggtgttcatgatgaactgtctatttttggtaaggatggtattgcttccaatgtagaccctggtgttaccaaaattatagaaactgcagctacaaatggaaatcttgaaaatttcatc

SEQ ID NO: 28268 - DNA, 288 bp, Glycine max
gaagacgacagaagggcatgacctaggagcgagaaagtatgtgttggctaggttgggacgtataggatgcactccatctgtgatgcattctcatgggacaaatggatcttgtgttgaagagcaaaatgctgctacatctgattataataacaagcttaaagctctagtggatcaattcaatgacaggttctctgctaattccaaattcatccttatacccaatgaatcaaacgccattgacattgcacatgggtttttggtttcggatgctgcttgctgcccatcagg

SEQ ID NO: 28269 - DNA, 300 bp, Glycine max
ctttctcctcaagaagcttctcgccggacagaccatactccacgaccctaaggtctggttggcaggttcagtcttcgtttacttcttcagcgtttctggtgcaatgcacaacatcattcggaagatgcccatgttcctcgtcgaccgcaacgacccttccaagctcgtgtttttttaccagggctcagggatgcagcttggtgcagagggcttcgctgtgggcttcttgtacaccgtcgtgggcctgctcttggcgtttatgacccacgggctcgttagggttagcaacgtcagcgtgca

SEQ ID NO: 28270 - DNA, 408 bp, Glycine max
  unsure (1)..(408): unsure at all n locations
gtntgttttgtattacaataatgcatgtgctgattattcgcggcaaaagatggcaagttctagctttaagctggatggcaacacnccaactgtcacatgggcagatccaaagaactcacctgaccattctgcttcttcacaggttaaagctctatacgtcaaaaacataccagagaatgttaccactgaacaattgaaggaactattccgccgtcatggagaagtaacaaaagtggtcatgccacctggcaaagctggagggaaacgtgattttggtttcattcattatgcagagaggtcaagtgcattgaaagctgtaaaagatacagagaaatatgaaattgatggccaaatgcttgaagttgttcttgctaagcctcaagctgataaaaaacctgatggaggtta

SEQ ID NO: 28271 - DNA, 273 bp, Glycine max
ggtgttttgagttttgatcaatgagactagccatgtctactccttccaagagcataatctgttcaagtgaagatgattatgaacttagaagagggccatggagtgttgaagaggattatcttctcacccattacattgccaatcatggtgaagggagatggaatttgctagctatacgttcaggactaaggagaacaggtaagagttgcagattgagatggctcaattatctaaagccaaatgttaagagaggaaatttaacctcggaagagc

SEQ ID NO: 28272 - DNA, 585 bp, Glycine max
ctcgagccgttgcactgtaaaattactcattaaatttctttagtttaaaaaattaattaaaaatctaaaaaaataaaaattctactaataactaaacctttttagaatttagaatataaaaattctactaatcaattttaaccaaatctccaaatacggttgaaactcagtgggtagagtaggggatttgccagccatgtccgttgaactcaagctctctcgttccaatcgtatctatcgcccttcggtaaaaccttaaccaacatctctctctctctctctatatatatacattgttgatgatttgaatttccaggaagctctggaaggaaaaatcgttgtcaaaactcagtcttcaatctcccactatggaattcgccttactgtcaaaggatccgtcaacttgcaggttcgtggaggatcagctggggttgttgaatcattctacggtgttattaagcccatccctattgtgaataggaccattgaggttaaatcttctggaaagattggttctggtacatcagagataccattctcagtgaatcttagacagcgggatgaaaatttagaaagattttatga

SEQ ID NO: 28273 - DNA, 334 bp, Glycine max
ggagaatgaaatgattctcctgacaaaaactgttaaacttagtgagtactgagtagggagttgccagccatgtccgttgaactcaagctctctcgttccaatcgtatctatcgcccttcggaagctctggaaggcaaaatcattgtcaaaactcagtcttcaatttcccactatggaattcgccttactgtcaaaggatccgttaacttgcaggttcgtggaggatcagctggggttgttgaatcattctacggtgttattaagcccatccctattgtgaatagtaccattgaggttaaatcttctggaaagattggttctggtgcatcagaga

SEQ ID NO: 28274 - DNA, 531 bp, Glycine max
caactttgatattgatggaccgatgtagtggtggttttgttaatttgctatatgtcaatcctgtgttgatcgacagagcaggtaaattttactcaataaaaaaggtttcaacaccttttcgaacctacaaatatgcaatttttgtagtcataatccaggaaatattcaaatatttcatcagtctcctttagataaacatttatttggttccatctaatgttgctatgtaagcaatttgtaacgtggcattcctatgtggcaacacttcgaaggagtcgcataagcatttttttgtaatagaagaataaaaacagaaagtttcaacattattgggattataaacaaaagaaagaaaattacaaagattaaaagtgaaaaaaacaagtagtatatttacaagaatggaaaaggtatttaaaccaccctaaacaatataagataaaatggttggacttatagttgtgtatcatgtacactcagacacatgctaattgaacaccaagattggtgtctgtgttattgaatcaacca

SEQ ID NO: 28275 - DNA, 273 bp, Glycine max
gattgaatcataaaaaatttggagcgtgaagtgtaatgaaataaaattctatcgatttttttatttttagaggtggtatccagattattactcgaaattatgaataatttatggttggcttgattgaaccaataaaataaagtacccaggctctgtttagaaaaaaccaattggtaatatatctacgatcaccacttctatcatatccgtatattttacagaaaatattaaataagaaattcagaaaaggaagaagttttaacaaaaatacgt

SEQ ID NO: 28276 - DNA, 370 bp, Glycine max
atctgaacaactgctattctttgccacgttagttgcaaaaaagattttcaagatgaagatcaaaccttatattccagatttcaagctagcttttgaacatttttgcatccatgctggtggtagagctgttttggatgaactggagaataacttgcagctatctccttggcatatggagccttcaaggatgacgctctatcgtttcggaaacacctccagcagttcactttggtatgagctggcttacactgaggccaaagggaggatcaaaaagggagacagaacatggcaaattgcattcggttctggattcaagtgtaacagtgcagtgtggaaggctctcaggaccatcaaccctgctaaagagaaa

SEQ ID NO: 28277 - DNA, 738 bp, Glycine max
gtggtttctacagacgaaaatcaacaccaggggagaatgtgtagccttcaagacataggaggtcatttcatgaaagtaccaattattgtattccaggttcttctttgtatgcatctagagggaacacctgcttgtgctgtacatatacctcttccagttattttctctccccttttcctactgcaaggagctggggtaatgttatctgcatctaaattaggggagaaacttgtgcttctgctacgaagtggagctggtggaggaatatattttagattttcttcaagagctcatgattgcttggggttcttgcatcatggttctagattattaggttggtggtcaattgatgaagggagtcgggaagaacaagcacgactataccatgagggagcaattgggtataatacattttgtggttatcctcctgagattgttaagaaaatgccaaaaaaggaacttgctgaggaggtttggagactccaggcagctcttggcgaacaaactgaaattacaaagttcagccaacaggagtatgaaagacttcaaaatgagaaagtgttatgcagaatttgttttgagggagagattaacgttgtattgctcccatgtaggcatcgtgtcctttgcagcacttgctcacagaagcgtaagaagtgccctatttgccgtgattccattgctgagcgtctgcctgtatatgatgtttagatgttaacttggtcaactttttttgtg

SEQ ID NO: 28278 - DNA, 278 bp, Glycine max
cacaattcacaatcccaacacccattttggagaatcagaatctaactagccaatagccatgaagagacagagagagaacgaagtaacaacgttggaaagctgggacatgcaaatttgttcaacttcaatcacacccgacacaagtgtttccagttccaccatatctccggaagatgtatttgagtgcaaaacgtgcaaccgcaagttcaactcttttcaagcgctgggtggccatagggcttgtcacaacaagagggtgaagatggaaggtgaagaac

SEQ ID NO: 28279 - DNA, 267 bp, Glycine max
gcgacaaatgcttctgggcttcaacaggttcaacatcctcaatttctggaacagagtcacgcgggtcttgttccgcaaacgttggaaggagtttctcaggttccgcaaggagcaaaaggacgtgtttgttccgcttataagagccaggaagcaaaagcgagacaagaaaggttgtgatggcttcgtagtttcctatgttgacacgttgttggatttggagttgcctgaggagaaacgcaagctgagcgaagaggaaatggtgtcgct

SEQ ID NO: 28280 - DNA, 410 bp, Glycine max
atgtaacaaaaaattgcgtacaggaagctcacttttgggtggatatggtaaactgaagacatcaaggggtgaggacttcatagagaaatcaagtagacttgacattcttggggatgaaagagaaactgctgctgcagctgatgtattggctggtatatgtggttctctttcatccgaggctatgagttcctgcataacaagttcagttgatcctgtagaaggtaacagggataggaagttcctgaaagtaaaccctttatgcaaaccacccatgacacctgatgttactcaagatgttgatgatgagacttgctcagatgagagctgtggtgaaatggatcctacagattggactgatgatgagaagactgcttttcttcaggctgtatcatcctttgggaaggattttg

SEQ ID NO: 28281 - DNA, 376 bp, Glycine max
ggaaaaggtaagaagttatgaactcccagatgaatttgaaggccactccgattccattgaccttggaactgagcttcggaaacttatggaagtctggatattgccaattattaccgacatgggaggaattatgaggacagttcttcttcctacatggttaagggaagaccaaaacgatatagatatcctcaaagatggttggaacatgctgagagaaagtcacatgaatctctctcagcatcttgcttctgggccgaggtggaagaacttcactacaaaacaagtaggagtagtaacattgtctcattggatcaacaatttaaggaaaggattgagaaattagagattcaaataaaagcatggagtgacagacagg

SEQ ID NO: 28282 - DNA, 276 bp, Glycine max
gggagcatcacaagagtgtctcagttgcagaacctcacatttgggtgaacaagaggttgaccataaggacttcaaattctgtactgaactgaattgaagacagaaaaatcaagatggttgaggcagttgtgtcctttgcagttgaaaggcttcacgacctacttacggaagaggccagattgttaattggggtgagtggcaaactcaaaaggatgcaaaatgaactaaagaggatgcaatgcttcctaagagatgctgagagaaagcaggataaaa

SEQ ID NO: 28283 - DNA, 424 bp, Glycine max
cggaaaagaagtggtggcttgtccctattcattgaatgaatcgataaggtgtccatatctatcatcaaatcattcaaatgcacctgttgttgtgattgtgaaactaaaacaccgtatcttatcgatcttcaaacacagcaaaacagtggcatcagttattttgaggttgttttgttgggtggcggcggagagtggaagctgctaattaaaggaaggaaagcattgctgtgtgtcagtggaatacaactactacagttacggttagctcgctaaccctttacaatggccacaactcaggaacaggaagccacgccaaacattctcaataacaccaccaccaccacttcttcttgggctgatcccctccgcaaccgaccctccgtcgccaccgtcatctccgccgttgactccttctccgatcctc

SEQ ID NO: 28284 - DNA, 248 bp, Glycine max
gtgggagacgcaatgatgctgtcccccgtaacgcgcactgacaggctttagtcttgtagccacagcgaactgggacgcagtgggcggtgagcatggctatcatcacagaagaacccgaaccagagcaaccaacacactcacgctcacagatctcacccaccaaacccagcaacaaccccttctccttctggttctacttcaccctctccgtctccctcttcactctcttcttcgtcttcacctcctcc

SEQ ID NO: 28285 - DNA, 388 bp, Glycine max
ttgacgcgtgggtggagcttcacaaaatcaactagcttcaaaaggtgttgagttggaacgggaaattctcgaagcagagcactctttaattaatgataaagttgcacaattgcaggaaaaggcaaggaagctagaagctgatattgaaatgacaaggaaggagatagaagagccaacagaagtggaagttgagctcaagcgaaggcttcaacaaatgactgaccatttaatacaaacaagcaaaggttgagtcactctcttctgagaaggcaagtcttgtattcagaattgaggctgtctcaaggttgctggatgagaacatgtcagcatcaggtgcagcaaacatgaatcctgcctcttcatcaagtgacttagaatcaggattgtg

SEQ ID NO: 28286 - DNA, 263 bp, Glycine max
gggatatgtttacgagtatgtaccacctcacctgggtcttccagtttttgacccttcttcttggaaatatgggtttcatcctcctcggaggcaaggcacttaaggcaataaactcagaatttagtgattctcccttgaggctccaatactacatagtcagcacaggagctgcttatttcttgtattccttcttcattccaacaatatctgcgatgtgaaattggttgggagcttcagcggtgctcactttcacatatattata

SEQ ID NO: 28287 - DNA, 460 bp, Glycine max
ggttggtttctttgaatgtttcaaattctcgtatcactaatgctggactgcagcatttgaagacactgaagaacttgagatctctgacattggagtcctgtaaggtgacagcaaatgacatcaagaatctgaaatcaatgtacctcccaaatttggtaagctttcggcctgggtagttattgcggtattctgatatgtgtatatgtatatattattatacttatatatgtcagtggccctgaagtcgtatcttagagaagaatggaaagacaccctcagattgtacataggctataataatgcctttatggaaggtgtaattctgcttgtcctgcgaagttttgttgttttattgtaaacgtatatgtatatgatatgacgaaaaagaatgatgcagggacgtgttttctacgcctttagtatttaaggtgaaaaatgggcgaataaaccttttatcagc

SEQ ID NO: 28288 - DNA, 276 bp, Glycine max
ctccaccttttcttttttcatttctcgctttatccttagttttttttcttcaacggatgaaggaatcatcttgatcgtacggaacttgttctatctttccgtaatcgaacttggtggccactgtatataaataagttcagttcaacaacacaatcattttgtatatgatcaaattaagtgatggggggcatctgttctaggaagagagatgagcatgagcatgttgtggaagatgaattacacagaggagtctcggggaggtattgtaggagtggc

SEQ ID NO: 28289 - DNA, 665 bp, Glycine max
gagacaggtatcttctatgaaagccaatttttctggtgtcagctgttgaaaaattggggtgcttaatattctacaaggaaattttccatctggtaattatgcatgtctggccccgtgaccatagctgattattcaaatggaggagcactttcttgtgcagagagaacaaaatctgttgatgcgattcctgaattagaccatctgtcaatattgacaaatggtgaaattgacggctttagtgttggacaactcttactttttaatggggagtcatattctggatccctttatggcaatgtttctgaaggccatggaacgtacgtgtggtgtgatggttgcgtatacgagggtgaatggaggagagggatgagaaatggttatggaaaactaagatggccttcaggagcagtgtatgaaggtgatttctctggtggatatatccatggtacgggcacatacattcgttctgataaattgaaatataaaggtagatggaggttgaatcttaaacatggtttggggtttcaagtttatcctaatggagatacctttgaagggtcttggatgcaaggaacacaagaggggcctggcaagtatacctggaccaatggaaatgtgtatgtagggaatatgaaaggtgggataatgtcaggaaaaggaactct

SEQ ID NO: 28290 - DNA, 257 bp, Glycine max
gcagtttccaaagaacccaactcaacttcaaaaccccataataatctctctttgacattcataggaaacacacaccatggactcttgttcatcaccgccagacaacaactccctcgctttctctctttccaatcactttcccaacccttcctcctctcccctctcccttttccactccttcacctatcaatctctctctctcacaggacgccacagggcggatcaacctctggagccaatggccggcggaggagcga

SEQ ID NO: 28291 - DNA, 276 bp, Glycine max
cggacgctgggaagattaaagaataatgggttgttacagagttcagcttgtggcaataatctcgttcatgcttttgctttcaaatacccacggttggggagatgatgggcatgccattgtttgtaagatagctcaggctcgcctcagcactgcagctgcaaaggctgtgaagaaattgttgcccaaatctgccaataatgacttggcgagcaagtgctcttgggcagatagtctgagggttgtcttcccttggtcttctgctttgcactttgctaa

SEQ ID NO: 28292 - DNA, 332 bp, Glycine max
aaattataagaaaaagaaaggaaaaagaagtaaagcatgaacgaacacctcagaacttttgcacttcaactcagctactcaacaacgacgccaaaatcctcttccacaccgcacactgctccttccgttctctcaaggtttctttacactgaaattcagtaagaaatttggaaaactggcataatggaagacaacgactacataaggagatgggaggatctggacatagatattttggtgaagatttttcagttgcttgacatttttgagttgacatccggcatctctcgtgtttgtagtgcatggcgcttggcatgttgtgatccacttct

SEQ ID NO: 28293 - DNA, 553 bp, Glycine max
ggtgtgaagaaaatattaattgttgattgggatgtccatcatggaaatggtactcagaaaatgttctggaatgattctcgagttttattcttttccgttcacaggcatgagtttgggagtttttatccagctaatgatgatggattttataccatgattggagaaggagcaggtgctggatataatataaatgtcccctgggagaatgggcgatgtggtgatgcagattactttgcagtgtgggaccacatcttgcttcctgttgctaaagaatttaatccagacataattatagtttctgctggatttgatgcagctgttggtgaccctctgggaggatgccgtgtcacaccatttggttattctgttctgttagagaagttgatgaattttgctgaaggtaggattgtactgattttagaaggaggatataaccttgattccatcgcaaaatcaatgcatgcctgcttggaagttttgctagaggacaagcctgttattggatcctcagaggcctatccatttgaatctacgtggcgtgtgattaaagcgg

SEQ ID NO: 28294 - DNA, 424 bp, Glycine max
gaaaaaagcctagcagacccaccgttacagcataatgattatctagtattacagtagtagcatagtaaatattagtataatttttccctggcagtgtgagcatgcttgactttacattttcggtggttattgtcatagacgtgtaagaaatgaggttgagaattgaggtaggcttagtagctgttttggaggttgctgcaagtttgactctggcttgtgctcagctgtaggactggctgacagaacaaacaagaaagttgtgtctggtagataaaaattctagtggaatctgctaacggcttgtatttgtaagtaaactgaagcttttgtggctgcctctctatcgagagtgcttcaatgctacagcccaaatgcatctgcctctttctaaacttatgttatacaaatacaactacatgtctcg

SEQ ID NO: 28295 - DNA, 397 bp, Glycine max
gtgatgggttgttgtgggagcttgaagatgaagctgctaactactatgatcttttgcagtctcaactctttctctagttttttttttttggtgggggatagaaagtgaaaaaccatagttttcatgcgttcaagatgaaatccaaggaggaaaaaaatgaaaaatttactagtttttattttttcatttttttgtcccctctttttgtaaattaaaatcatgggacgtttatgtgtggttggttactacttggcaatatgtcgatctgtagaaaaagcagctaggcttatatattccccttaccccaagtaattaattagctagtaatgatcttctaaactatttcatatgttaattttattgacttttaagggtaaatgaaaattccttctttttt

SEQ ID NO: 28296 - DNA, 322 bp, Glycine max
taaattttgatcttccaaatgacattgacgattatgtgcaccggataggaagaacgggacgagctggtaaaatgggattagcaacggccttcttcaacgaaggtaatttgaacttggctaaatcattggctgatttgatgcaagaggcaaatcaagaagtacctgcctggctcagccgatatgcagcaagggctatttacagtggtggcaacagaaataggaagtctgggggatctcgttttggtggccgcgattttaggaaagagggttcgtttaataaagcaacggattactatggcagtggaactggtggtggatatgg

SEQ ID NO: 28297 - DNA, 561 bp, Glycine max
gcttgatgctgcaaccagtgattcctcagaacctgacttactttggcaatttaatcattccaaacttagcagcgtgaccaatggaattggatcaaagactatgagatctatctcaaaggcagcgaaaaacagccctgagttgagcaagaatgctgttcattcttctcctctaggtccttcaccttcattgaaaaactcaaatggtgtcccacatcgatcaggaaggcatccggctccagttgacgtgaaacgtagaactgggaatagaaaataaacgtgtttactgaaaaggtaaagagagtgattgtttatatttgattttttttttaattttttcaatttttagatcgacgcgagagagagagagagagattgttataattttttttgttggtttgtattttgtaatcacacgggtaatggagcaataatgcttgttgctttgtttgtatcgtggcattcttttattttactctacactagatttttaggggatgtaaaaaaatgaaactcctaacactgcaacgattttttatttgtacaaatcaatttccttatctc

SEQ ID NO: 28298 - DNA, 384 bp, Glycine max
aaatgctcctttcatgttgaacttggattgtgatcactatgtcaataacagcaaggctgcccgagaggccatgtgcttcttgatggacccccaaactgggaagaaggtctgctatgtccagtttcctcaaagatttgatggcattgatacacatgatcgttatgccaacaggaacacagttttctttgatattaacatgaagggtctagatggtattcaaggtcctgtatatgtggggactggatgtgttttcaggaggcaagctttgtatggctataatcctcccaagggtccaaagcgtccaaaaatggtaagctgtgattgttgcccgtgttttggaagccgcaagaagtataaggagaagaatgatgcaaatggagaggc

SEQ ID NO: 28299 - DNA, 470 bp, Glycine max
gatccaaatgctaatggtgtgaagcagggggagagctggtgggaaggtaggcatggcgaccgctggaaccgaacttggggtgagcaacacaatggctctggttggattcacaagtacggccagagcagttctggggaacactgggacacacacgcaagagaagatacctggtatgagaaattccctcattatggtttcttcaattgcttcgaaaactccgtccagctcagggaagttcccaaaccatctgaaatactggaaatacagcaagttcaggaaccttgatttgctcaaaccttataaaaaataaataggaaccttattacaaacccccatcgtctttagtatggtaatacgccaacttgtatgatgatcatttttaagctcttctagtactttaagcctttaaggactgaataaaatgttcattgtttcccatacaacagcaaaatatacatatatttcgttcc

SEQ ID NO: 28300 - DNA, 388 bp, Glycine max
gaaccattaaaccatgttgaagcagagagacagaggagggcgaagctgcaccagagattctacgcgcttcgtgctgtggttcccaacgtgtcaaagatggacaccgcgtcgcttctgggcgacgcgatatcttacatcaccgagctgaactccaagcttcagaccctcgaatctgataaagatgtattgcataagcagcttgaaggagtgaagaaggaactcgagaaaacaaccgataacgtttcttctaatcacgcgtgtaataataacaataacaacaagttgtcgtcgaatcagccggcgttaattgacttggttgagatggacgtgaagatcattgggtgggacgcgatgataacgatcacatgcagcaagaagaaccaccccg

SEQ ID NO: 28301 - DNA, 233 bp, Glycine max
gataaagtattgaaacctagaatcttagataccttgagaactcatcatgtttctcaaattagcactggcttgtaccacactgtggtgatcactagcaggggacagatatttggctttggagacaatgaaagagcacaacttggtcatgacacattaagaagctgccttgagcccactgaaattttcattaaagatgtatctgaagatgtagaaagcatctgaggctccaaaag

SEQ ID NO: 28302 - DNA, 480 bp, Glycine max
gcccttttctgaggaggagagaatttcaccaaatcaaggggaaactctctgaagaatatgggtttaatggagtgcaatgtggaggacaataagaatctataccttcatgctcctactttcattgagtggcttaaaccatgttcttctcctaattattcatatctaaacaattccaacacaatatcatcatcatcttcttcttctccttcttcttctttttcttttactcataatcagtttgttcaggaaactatccaattcttgccaattttaagtgaaaagaaggcctcaaaagatgaggaagatcaaacgtttgatgaggtgaaagaggaaaaggttgaacaagtgactgtggctttgcacattggattgcctgacactagtaaagggcatgctgatgatgaggttgttgatgagaagatgattttccatgttaaggaagaagaagaagagtcctcaaagagaagcttccatggatgc

SEQ ID NO: 28303 - DNA, 438 bp, Glycine max
gatacagagagcactgttgatgatgatatcttcacgcgtccggtggttcgcagcttgagaacaagcccaatccattcttcaagggatcgtacctccattgatgactttgagattataaaacctatcagtcgtggggcatttggaagggttttcttggctaaaaagagaacaactggtgatctttttgcaataaaggttctcaagaaggcagatatgatccgtaagaatgctgtggaaagtatattagcagaacgtgatatcttaattacagtacgcaacccttttgtggttcgattcttctattcttttacatgtcgtgagaacttatatcttgtcatggaatatcttaatggaggtgacctgtattcactattaaggaatttaggttgcctagatgaggaagtcgcccgtgtatatattgctgaagtggtgcttgcg

SEQ ID NO: 28304 - DNA, 459 bp, Glycine max
tcatatcccacctcggattttctcagctcgtgtcacttgtgccgaaagaatctcgatggcaaagacatatacatgtacagaggagagaaagcattttgtagcaacgagtgccgttcaaggcaaatatcgatggacgatgaacgcaaagaacggtgtagatcagaagcttcaaggtctgtggagttgtcaagttcaccatacacagcaagggatcaaatgttttcaactgggattgttgccctttagcgtttaatttctgtcactgtagtagagactcatatatacattgaagtttgaattcacatcatataaggctatactttgtgaatgaaattaagacaccttagtggtgtaaccatatgaaaattttggatcggaaaaagtggtagagattttgatgtagttgaatactaataagagctttcttcttctttgttttatcttacatagaagaattat

SEQ ID NO: 28305 - DNA, 384 bp, Glycine max
gcgacaattaaaaccacataaacaggcgagcgtatgtagcagagcgaaagccacccaccagctcagatcagcagcagcagcagcagcaccccctatttctccgttctctttgtttttacactctttctatgcaatttcctcccccctaaatttcaggcttttattcttgtccctatctttctagtccattcttttgttagaacactctgattacccatttcaggacttcttcacttttcctcatcattcctctctgtattttacatttcatcttaaaggatctgtaatttccctgattgttttttctttttttccattttctttcccacttctgttttcttgggtctcatcttatctctctgtacctgactattcaaccccccc

SEQ ID NO: 28306 - DNA, 419 bp, Glycine max
ctcgagccgattcggctcgagatcagagataatcaattttacaagcaaactgctttcagaatcccaagttaaagtgcagagacaacaccctgaaaatgccagcattaattttggatgaaaaagagaagatgatttccaagtttgtatccagtaatgggttggttgaagatccattggctatcgagaaagaaaggactatgatcaatccttggaccccagaagagagagaagttttcttggagaaatttgctgcctttggaaaagattttcggaaaattgcttctttttttgaccacaagacaactgctgactgtgttgaattctactacaaaaatcataagtctgattgttttgagaaaattaagaagcaagatggtgataagcttgggaagtcatattctgccaaaactgacttgatt

SEQ ID NO: 28307 - DNA, 313 bp, Glycine max
tggctgaagacacgtgagttatgtcagaggtaagggatgagttattcacagttggggattagtgagaacatgtgtagggatccttagaggattaaattggggttttattttgggatgtttgttaaattgcaatttttcctttatgattataaataaaatattgatgtcctgatgaaaattgcttgataaattgtgctcttgatatttgtatatttggacctatgattcggatataattgtgtaatattatttgagggattttagtcctcatgttgtgatagtcttttatataaattgttatattgaggatatg

SEQ ID NO: 28308 - DNA, 282 bp, Glycine max
agggaattgaactagcatcatagccctctcaatattaattcttgttttttccttctttctctaaacggctcacatatatatgtatactaacctgcagcttaattttgcgtcaacttaatacgttagttataaggagcatggagggtgaagaaagaaggaagagagaaatagagaatgaagaagaaaatgaggagcagaagatggaaaagttctttgccttgataaagaggacaaaggatgttcgcgatcgcttctgtaaggagaaattaacagatactaaga

SEQ ID NO: 28309 - DNA, 308 bp, Glycine max
caggttccgatagattcgattggactcttttgaaattcatgctgtggttcagtatttgttaattctgttaaacttgttttattatactgctactatggagcaccttcctgttgaagtgattggtaacacattatctcttctcggttctgcccgagatgttgtggttgcttctgtaacttgtaaaaaatggagggaagcatggcgcaatcacctccacagtctttcattcaactactgtgattggcccctctttcatgactttacctctgctaggttggaaatactcatcactcagacaatcttccaaa

SEQ ID NO: 28310 - DNA, 268 bp, Glycine max
ctcttttgagcacaattgtgccctataccaccactcagctttccatctataactctttctagacatcttttgaagatgctgctgtggctatgaacatcaccagagtggcctcggtggcaccctttgagctttgtttcagttccaggggctcgcaagtggggcccagtatgccggttattgagttggtgctgcagagtgagatggtgaagtggaccatacatggaagaaactccatggtgagagtgagcgatgaagtactgtgcttggg

SEQ ID NO: 28311 - DNA, 372 bp, Glycine max
caacaaaggaacttgttatgccagttccagctttcaatgttataaatgggggaagtcatgctgggaataatctggctatgcaagactttatgatactaccagttggagcaacttcatttgctgaggctctccgcatgggcagtgaagtttatcatgtattaaagggaataatcaaggcaaaatatggacaagatgcatgtaatgttggagatgaaggaggatttgctcccaatgttcaagataacagggaggggcttgttttactcatggatgccattgacaaggctggttatactggcaagattaaaataggtatggatgttgcagcttcagagttttacactaaggatgggaagtatgatttgaacttca

SEQ ID NO: 28312 - DNA, 476 bp, Glycine max
tatcgagccgaatcggctcgagattctcctatgactatgtcagagacagtgccaaattgtaggaattttaaattactaaggagctggagttgtagggaatattacacaagtagttctcctgagaaagcgggagtaatggagaggactccggccagtagttttgaaaaatgcttccctggaagaccagatgaattgcagagaaagttccttccattaacttatggctcttccacaaaattgtcaatgaatggctctccatcttctgttggaagcccctctatggatgagttaagaaccaacagcatgagatcatatgctactgaagatgttactagcctccaaactttcgttgctgggatgaaggaaatggcaaaacttgagtatgagaagcagcttgttgatgatgatcaggatcagcaagcagagacaacaacttttagatttgaaaagaatatgaaagatgtaggtgtgggttc

SEQ ID NO: 28313 - DNA, 308 bp, Glycine max
taagactgaagataatcatgaaaaccttggaggatgtgccacttctaatgtagcagacaatgcaagagctgttaatgggaacatttcttgtggtccaaacaattaccgtcagaaaggtcctcggattgcaaaggttgtccggcgcatcaactgcaatgttgaaccattagaatttggagttgtgctctctggaaagtcttggtgcagtagtcaggctatctttccaaagggatttagaagccgtgttagatacataaatgtcttagatccatccagtatgtgttattatatttcagaaattcttgatg

SEQ ID NO: 28314 - DNA, 501 bp, Glycine max
ctaggcacaagcaagaaattgtgaggctgctgaaagaggaaggggaagtggtagccatgactggggatggtgttaatgatgctcctgccttgaagcttgcagacattggtattgcaatgggcattgcagggacagaggtggcaaaggaagcttcagatatggtgttggcagatgataattttagttcaattgttgctgctgttggtgagggtagatctatctacaataatatgaaggcctttatcaggtatatgatctcttccaatattggcgaggtcgcttctatatttttaacagctgcattaggtattcctgaaggattgatacctgtccagcttctgtgggtcaatcttgtcactgatgggccccctgcaacagctttgggatttaatcctccagataaggatataatgaaaaagcctcctcgtcacagtgatgactcattaattaatttgtcatcactgcaacagctttgggatttaatcctccagataaggatat

SEQ ID NO: 28315 - DNA, 305 bp, Glycine max
ctcgagccgatcctcatccaaattggcatcttggaatgcgaggtacccaacaccgcgcagtcatgtggcgtgtctggaaagagggtggcacaggatttttgtactggggagccaactgctatgagaaggcaactgtagccagtgcagagataaaattcaggcatggtcttccccctggagatggagttctatactatcctggtgaggtgttctcaacttctcatcagccagtggcttctcttagactagagcgcatacttaatggcttgcaggacattgagtacctgagactctatgcttcaaga

SEQ ID NO: 28316 - DNA, 243 bp, Glycine max
actagttctagatcgcgagcggcccccgcgatctagaactagtaatagataaagaaatgaagagaagaatatgatctatttatatgcacgctgaatacttatagtggctctgtatgaaaaaaaatgtactgactggggtatgctttcaagtaattttgcattgtgtatttgtactgttattagtcctgtgtaaagggggagagagaccaagaatgacattggaagaagttatcaaaagggata

SEQ ID NO: 28317 - DNA, 295 bp, Glycine max
gttctgcagtgggaaggaagggagagaggaaaaggcttgttttgtggtggagggtgtcattttgtgagaatttcgttgcgtaattggtagtgttgtgattgtggactcgatttcggggttactaatttgctttagcctctgtttttgctcaaatgagactttcttcagctggttttagtcctccaccccaggaaggggaaaatcgagttctagattcagaactttggcatgcatgtgctggtccccttgtctctttaccagcagttggaagccgcgtggtatactttccacacaa

SEQ ID NO: 28318 - DNA, 358 bp, Glycine max
ttttacacttgaacaaaggctcatgtcccttctccaagcactaatgagatggattcatcaaaactgaagaaggaatttcctgagctgttgcctgtcaaggactcattgatcaattgatgtgtttgagccagaaaagagaagcttggggttttgagtagcataattaaccatatataaatgtatacatttcggtctctatcattttattttcccttttttggtagtttggtttagtttgatagaattgaatttcatattccttttacctttttttttttcatttgtatttgcttctgctttttgtagatgcttgggttttgtagtttatattttctattccataacagaactattttgg

SEQ ID NO: 28319 - DNA, 254 bp, Glycine max
ctcatgttttcccttcagaaacgtgaagttggtgatgccttcaatcattctgatcctcaggggttggtaccgggtctccctgatccagttccttctagtgtgttgcctggtgctttgtttaacaaacaacgtggatatgctccttattatgaacttgctcagaggttcaaggactccgaagggatcattgctaactctgggtccgagttggagcagtatgctacatgcatgcttatgtgatggtcaaattcaaa

SEQ ID NO: 28320 - DNA, 342 bp, Glycine max
tgacttttggcccagagcaaaggcatccggaggaagaggcacttcttccaccaccacagaataaagaagcagggaaatctcagctggattctgatgaagtgatactgagcgagttggaagatgagaagcctaaggaagtggacatgctccctgcatcagagaggcagaaacgtatcgcgcacttgcaacaaagactgctccaagcagctgcagaaggagcagtgagggttaagagaaggagaggaccacacagaggggaagatttcaccttgacacaagcattgatcaaagcagacttttggcttcttttcatttccatgatcatgggttctggatccggat

SEQ ID NO: 28321 - DNA, 350 bp, Glycine max
gacagagaaaccaatcggaggaaaatgaaactagtttggtccccagagacagcatccaaagcatacatcgaaacagttcaatcttgtcggattttccgggaatccggggtggcggactggtgtcggcgatggcggcggggtggaacgcgcagctaatcgtggagacgtggtcggaggggggagtgatagcgacgagcgtgggtttagccgtggcgagaactcacacgtgcgggaggcacgtgtgcgtggtgcccgacgagaggtcgagggcggagtacgcggagagaatgggggaggcggggatgtcgccggagatcgtggtgggggaggcggaggaggtgatggagggg

SEQ ID NO: 28322 - DNA, 310 bp, Glycine max
cttccttttctttttattcgctataatattataaactctgatctgatcgatcagtcgcgttgtataactattgtattgtatgtctccacggagaagttcgccggtggttgccgcccggaaaaataaggcgccgcacccctcgccgtctccccgtcgtaggacccagagcaagtcgaggcctatcaagatcctgaagcgctgttcgtcggctcctctgctttcaagccatgataacgccgatgctgacgttgacggccattattcgaggaggagcggaggagggtcgttttccgccccaaaaccgtttcag

SEQ ID NO: 28323 - DNA, 1006 bp, Glycine max
atccggggttcaatccctctgttctggtctcaggaagcctctagatttaatataaaacctgacattatattatcaaggaaggactctaatgttgaagccacaagacttcattttgaaaatcttgtcgagagatatggacatccaattattatactgaacttgataaagacacgtgagaagaagcctcgagaaactattctgcgagccgagtttgcgaatgctgttaggtctcttaataaaaatttgaaaggggaaaatcgcctgaggttccttcattgggatctgcataggcattcaagatgcagcaaggctactaatgtgttgggacaactgggaaaagtggcagcatatgcactgaagctgactggcatcttctactgtccagtgacatcaaatgtgaggctagatggattttcgcagtattcctactccgagaattacattgtcactgatcactgcatcacagaacaagctagtataaacaaggataatgttgataaagaaacagaaattatcaattgttactgtagtagtgatgagaacaaagattacagtgtcaaaccccagatgcttcaatctggggtcttgaggactaattgcatagactgcttagatcgtaccaatgttgctcaatatgcttatggactagctgcacttggatgtcagctacaagctttaggattctgctgaaaccccgtatattgatcttgataaccctttggccaaggaattaatggaaatctatgagtccatgggcgacacattagcctttcaatatgggggttctgcggcacacaataagatattttctgagagaagaggtcaatggaaggcagcagcccaatcccaggaatttattcgaacactacagcgttattacaacaacacatatttagatggtgataagcaaaaagcaattaacttactcttggggcattttcagccccaacagggaaaaccagcactatgggagctagattcagatcagcattacactgtcaagaaa

SEQ ID NO: 28324 - DNA, 274 bp, Glycine max
cgccattagtgaaccttgaaaccttaacagagtaaacttgcttgcagcgaatccagattcggaggaggagtgagtggtccttgttgctgatttggcaacaacaaataaagatgatagtttgagtttgagtttgtgtgaatccagatctgagtttcatttcgcagttttgcggagaagagaacaatggagtcagcaacggtatcatcatcggagtcggagacggcgcttcctcttcctctggcgtcggagtcacagcaaccctacgtctccgaat

SEQ ID NO: 28325 - DNA, 269 bp, Glycine max
gtgctgcaccactgcctcctcaacgtcgccgaccaccggtcagctctagtgatcagcagcaatggcggggaaagtggcaaaggcagcttatgatgcaaagatgctgaagcttctgaaagagtacagtcaggtgctggtggtttcatcagacaatgtgggttccaaccagcttcagggcatacggaggggacttaatgctgattcggtggtggtgatgggaaagaactccatgatgaaacgctctatcatcttggatgctcagaagactg

SEQ ID NO: 28326 - DNA, 318 bp, Glycine max
gagaactgttgtccctggggcatgcctttcctcagaattcagattagattagtgtttgtgagaaatctcaactgagaagtaaaatcaattctttactgagggaggaggaggatgattgggacaagctactgaaacttactcaagaggaagatttttctccagaaaatctacaggaccagctgccgcaaaatcttctgacagattaagctacatgcatggctccttcagaaaataacagaagaggggaaaggccctaatatattagatgagggtggccaaggtgtgcttcattttgcatctgctcttggctatgattgg

SEQ ID NO: 28327 - DNA, 453 bp, Glycine max
ctttgtgggtgcgcacgctattcatcattcatcgtgatcagtcagcagtcggtggctgtgctcgtcgtctctaaagccatcaccgatcaagcgtgagacggtagcatagcctagcaaagcagaacaaacgtgtctatgtccgattccgattcctcttcttgcgccggcgccgactacaaaagtttcaagcaagttagccgcgagcgattattacatgaaatgctgaggtcagcacaaacaggggattccaaatcaactttgaagtgggtgaagacctatacaagcaaaggcagccattgcccacctgggatgctatatatttcatccagccaacccgagaaaatgtaattatgtttttgtcagacatgtctggaaggacacccctatacaggaagtttgtggtggtcattataatatctctcttgcctgtaattcatcatggcttcagcaact

SEQ ID NO: 28328 - DNA, 296 bp, Glycine max
gctacgtttccctccccaagtgcacacaaaaaaatgggtcttcaaatcaaggaaccgctccttttcactcttgtaacaatatcacttatttcaattacaaaactcttgcattcttatttttctatacctttctctccatccaatctttccattgctattgccaccctcatttttgttctaatctcatacaaattttcctcatcctctataaaacactcttccactactctgcccccaggtcctctatctgttccaatatttggtaactggctacaagttggcaatgaccttaacca

SEQ ID NO: 28329 - DNA, 372 bp, Glycine max
ctcgagcgctattggatataattttgatggagatggcaggcaagaggaaaaatctaaatccccatgcagagcgttcaagtcaacttttctttcccttttggatttataatcatattagagacggggaagatatagaaatggaagatgtcacagaggaggaaaagaaaatggtaaagaaaatgatcatagttgcactttggtgtatacaattgaaaccaaatgaccgtccctcaatgaacgaagtagtcgaaatgcttgaaggagacattgaaaacttagaattccctccaaagccaactttgtatccaagtgaaacgttcccaaaaaattaaaaaatcaagtctataatgagataatatcgaattttttcat

SEQ ID NO: 28330 - DNA, 305 bp, Glycine max
caatgtgactcttcgcattttactattcaagtatgagttattggaaactctcttcaggtgtattttattgtcacggattaacaaaaatccagcaagtgactgtcactgtttacatctgatccaaaaataataggttccgcaacaaacaatagaagcacaaaaaatataaggggacactattggcgaattgcaaatgtgcaatcctcaaatcttactccaagacaaagctccccacgatgccgccttgcatgtacttgcaatcccctcgatgcacgtcttcctcctgagcatctaaatctttccaa

SEQ ID NO: 28331 - DNA, 416 bp, Glycine max
tgtattattactagtatatattgctagatactttattgttaatgattctaagcattgtgatagttttgagggagagatatcatgttaaggtaagtctgaatcatgcatatacataaagtatcaaattgtacttataactctacttattcaagctaatgaatcactaaaaaaaagtttttcatcttaagagtttaaatttcatctaattagcattactgatcttggattttcaccatttttttctttctggaacttgaatttccaagaatatgatgactgttagacttaggatgggctatctccagtcctataaatccctggcaatgaattatgcgcttaaagagtttagtaattagatctattataatacttgttttactttacctatcctattatatattgtatattggtttgct

SEQ ID NO: 28332 - DNA, 340 bp, Glycine max
tttctgtgataggatggatttgccttgttctcaacataagcgtttttgctgctcctctttgcatcatgaaacgtgtcataaagacgaagagtgtggaattcatgcctttcagtttgtccttctttttgaccataaatgctgtcatgtggttcttctatggccttctcctcaaggactactacatcgcactcccaaatactcttgggtttctattcggcataatccagatggtgctgtatttgatttatagaaacgccaagccacaaggattagaggagccaacgaaggttcaggaactaaatggccatattattgacgttgtgaagccgaatcatgtaac

SEQ ID NO: 28333 - DNA, 276 bp, Glycine max
caatgatgaagatgatgaaaatggtgttcttgaagcaatggtggctgggcacaagaacagaaaaccacgggcttcagcacacaaacccaaggcttcagtagccccgtcgccaattgaaaatgagaatgatgagcttggctctaaggaatataacaaccggaagggcgcaagacagaaacgtggagccaagacagagaagggtcggaaaaattgggaagaatctcagggggctgcttccagtggggattatgagaatataaacagtgatggaaatga

SEQ ID NO: 28334 - DNA, 490 bp, Glycine max
ataaattcataataacggggaaatcatgcttgcggtttggatgggaactcaagcggatgagtccttcccggaggcctggcactctgatgctcacaacgttagtcactccaacctttgagcgggtgttcgaaaggttggagcgactaacgctgtgagcacccgctcaaaggtctacttctcccccaagctttactatcttagaggtcaagtcatcgaggctcaggatctcgttccttccgaaaaaggaaggccccctgactcccttgttagagtgcagctagggaatcagatgagattcacccggccttctcaaattagaggcaccaaccctgtttggaatgacgagcttatgtttgtggccgccgagccatttgaggattttatcattgtcactgttgaggaccaagttggtcctaatagggaaatcttaggaagggagatcatatccgtcagaagtgtacgacccagacacgagtccaacaagaagctc

SEQ ID NO: 28335 - DNA, 607 bp, Glycine max
ataaaaggttagagaatgttgttgtaatttggtctagttaacttggtggctcgctgacgtcacgtggttaagttgagaaacaacaacagagacacggtggtgtactcacggaatgaattggaatcggatcgtgtcgtagccaccgctcctacctggcgccgtctttcactttctgcttctcccatctcccactaaacaaccatggacctggatcctcgccaatacgaaaaccttgctgtaaatgataatgacatccacaacattgttctgtcatatcttatacataattgctacaaagaatcggtagaatcattcattgcttgcacgggagcaaagcagccgacagattatttggaggacatggataaaaggaaaagaatttttcactttgcactagagggaaatgcactcaaggctattgagcttactgaacagctggcaaaggatattctagagaacaataaggatttgcagtttgatctactaagccttcattttgttgagcttgtctgctcaaggaaatgcacagaagctttggagtttgctcagaccaaattgggccctttcggaaaggagcccaaatatatggaaaagcttgaagacttta

SEQ ID NO: 28336 - DNA, 279 bp, Glycine max
ctacggatagattgaaggcaatcaaatcatctttatacaaagattcttcttcatcgtctatgttttcctgcatattcagttttaaggttcaagcatcttcttgaaactcttctcaagctcgacgggaatttctcagcttttctctcgttacctcacccatcaaagtttcctcttctgggtgtttgtttatcggatccggggcattgcaagatttgatcatttcacgaatcatatcattatcaaacactcccattttctgggtacttaattgggatgggt

SEQ ID NO: 28337 - DNA, 279 bp, Glycine max
cacacacttgttctgttcctacggttttgttatggctcttccttcactatcctttctcttcatcttcacttccttcatcgtctccgtctcacactcaataccctttattgttattcatggaattggggatcagtgctctaatcgtggagtgaaaaaattcacacagcaattgagcagcttctctggtgctgaaggatattgtgtcgaggttggaaatggatcatgggattcatggtttgagcctttgaaagagcaggctgagattgtttgtgaaaaggt

SEQ ID NO: 28338 - DNA, 641 bp, Glycine max
caagttgtttatttgtgcagtatgtcaagtagagataaaacctggagaggggatttcaatacacgagggtgcacccaactctcgaaaatttcgtccctgggatgaacctttcctgtgctcaagttgccaagagaagaaagaagccatggaagggaaaagatcatcaggtagaattagcagtggaagtgacgaatgaactctcatgtaaatttgcattttgagagtgataaacattgttcatatgatgggaaagtcaaacatttcaatcaacaaagactcccttctattatcaaaggggctttatggatataattttgaattccacatgaaaatacatatgaaaagtaaaccaatagcagcctgttagaagatttctgacttgggaagtatgaaatagcaacaagtattgtaaagggttgtgttaaatgtggaagtacacaacaagatatccgaggtaatgcattctttttatatattttttttgggatccgttcatttgtaaacggatcttttggaatcactatggacctttaatgtaagtggtctttgttattgtaatgtaatatagggagtttaattagaattcatagaatcaattctactgtaggttagatgtgtgttataagccttttgaatgattt

SEQ ID NO: 28339 - DNA, 307 bp, Glycine max
gggaaggagtcgtcgttgacgaagtccaagacggcatcggcggggttcttggggctagattgtgatcagagattgagtagtagtagtgtgctatgtctccaattttgcctacactagtgttcaaatcaaagcatgtagtgtattttgcatttgtttaccaatctacaccttaccttaggaacgagaaagctaatgtcagagtcactaattttttggcatcttgtttgtctactgatcttgcttatgtacagaggaaatttatcaaaatctcataaaatagggcgttattttgataaattaaaccgaa

SEQ ID NO: 28340 - DNA, 485 bp, Glycine max
gggatgtacacgtgttatatctgaaggagagtttgtatgtactcagtgaaccttgtggggcatcaagatcttgatggtatactctggttgctcatggagggaaaatttttgtgattggaattaggaattttaacacattttataggataaacgggagatggggagtgacttataattggaatttgatatttttgtggaaagttgtatagaggaagcgaccatcatgggtttcatgaaattgctgtcagatatctcccttctcacatgaatctaactagttttgctgtgttaaagtcatggtctcagaaatggcttttctataggagattagattaaagtgctatgccattcatagcctgagggtggttacatttctcaagctgacttcagctaccatacaatgtaaaatgcttattgttcttgtagactgaactcgcatactgttgattgttttctcctgaataatgaagaatgtgtttttaatt

SEQ ID NO: 28341 - DNA, 283 bp, Glycine max
tccaattcaatggagaaacctcacgtagcagtggttccaagtcctggcttcacccatctggttccaattcttgagttctccaaacgccttcttcatctccacccagagtttcacatcacttgtttcattccctcagttgggtcatccccgacttcctccaaagcatacgttcaaacccttccaccaaccataacttcgcttttccttcccccaatcacccttgaccatgtgtcagatccctcagtccttgcactccaaattgaactctcagtgaatctctctc

SEQ ID NO: 28342 - DNA, 278 bp, Glycine max
gaaactgcactgaagaatcctcaacgagctgttcaactgaatcccagatttgcatatgcacacaccctttgtggacatgagtatgttgcactagaagattttgagaatggaatcaaatgctaccagagtgcgctcacagttgatgcaaggcattataatgcttggtatggacttggaatggtatatcttcgccaagaaaagtttgagttctctgaacatcattttcggatggctttccatatcaatccacgctcatctgttataatgtcataccttgg

SEQ ID NO: 28343 - DNA, 348 bp, Glycine max
cgtccgaattaaagtggctttaagctttggatatcgatcattgaccacccaaattgaacccctttaatccattttcatcacaaggtcaagaacaacaatctagtacttttctaggttgcatcgaggcccttgtgttttgcattgatcagtgacaattggcattaaaaaaatccattttgattggttggtgttggtgattggtgaatttggttttccctcgatctattgatctggggttgtggtttttgggttttgattatgagaatgaataaagggtcacttgattactggaggaattactttggagctcgaactctgatatatttggcatcattgaccatgcgatca

SEQ ID NO: 28344 - DNA, 541 bp, Glycine max
ctcggaattcggctcgagagagaatcgaagtggcacctgctgtatggatctggaaaatttgaaacaacagttctgcatgtaggaaatcgcatgcacaacctggaactttgagcaagttgaagctgaatcttttgaagaggcatagcttgcatgtagaagttcaaaaatacttctacaaggttgttctgaccatgaaatattctataacatttataacagagaaacttgactacctctagcagacaattaagaagctgcttaagatgaaggacacattactaacattacggacatgtattgtatacaacttgttaaagccactgaaatttctggtgtcttggagtattttgtgatttgtgatttgtcatttttattttattctttatgcagtagttattgtgttttcagtctaaagtgcaatgagttaagctttgtaattaagttgggcgggtggctcattaagatgttacgtagaagtaacttacgctctgttttgtaagccaaattgtatcataaacatatgcattttactgtatgaatg

SEQ ID NO: 28345 - DNA, 256 bp, Glycine max
ctcgagccgcaacacgcttctcccatctctcacttccacttctctccactctcctctctctgccccggtaacagtaacaccccattccccttctccagcagaaggcgaaagcgcttattcgccaatttcggctcccgcaaattccgcagaaaatgcaccgtccgcttctgcgccgttccctcctccgacaacaaccaccctacctggcacgccgatttcgccaattccgcgcgcagaaccgccaaaaccttcgttc

SEQ ID NO: 28346 - DNA, 697 bp, Glycine max
gaaaagatccaaattgttgcaaagactgctggcatgcatcggaatgagtgggtggaaaatgctgatcgttgggtagctggttttctggaaatgtttgaagaaggttgccacaagatgggaacagcaattagggatcgaattcaagagaggttaagaggtcagcagtcaagagatggcacacttcgtctacaaaatggcaaggatgataaggatgacgatgatgaggagtattattatgatgaggaggatgatagtgatgaagaatattttgaagaatattatgatgatgatgagcttaatcctcaaaataatggaaaagatgagaaaaaagaataggtatacttcggtggaattgttgggttctcggcagaatgtcaatagcaactgtccatgcgatatctgcaatattatatgcattatgttggatagtggatttgaagttgcacaagggaactttcattttgctagtgtggtcaaaattttacgtgttgaatgctggtatacgagtgtttgtgcatatggttaattttagatcggaaaagtaccatgtccttttttttcactttgctagatcagggaaggaaaatcactacttccccggacaatctaacgtgaattttcacgtcccattgaagtcatcaattataacttttgcatcttgtaggcatcatatatattatgtgcgtgttttggatat

SEQ ID NO: 28347 - DNA, 534 bp, Glycine max
tggtgttgaaatgaagggaaattctgctttagttaataaagaaacagatggaaatctgcctaaaactttgaaggaagagacaaggagatatagctcaagcagggaagccatcagcagcaagtatgctgctgtcagacagcagagtgaattaacatctgcgaaggtttccttgcttgatcacggcaatgctcattctagtaatgctgctggaacttcaggcttggcttcgacatggcaaacaatgacaacaggttttcggagttttggggctaacttagggggaaaaggatttttgcccatacggcaaacacaggaagctaagatgtctcgtgtgtcctcatctgagtcccttgatgatatatttcaaagactgaaacggcctgcattggaccaaaatattgacaatgaccaggattatttgaaagaggggcaatatttctggtccttctagatgatatccataatttggtcgaaaagttgcaaagtgttctataattgatcatgcaaaaacatagtatcatgtacagtttcttg

SEQ ID NO: 28348 - DNA, 410 bp, Glycine max
acttatcaggacaagatataagtgggttcatggaggaaccaacaacattgaggttcaattttcgagaactttacatgtgtccagatgtttcaaccgtttctgacaatgcatatgccagcacaaaacttattgccgacaaggaattttcagagtcttagttcagagaaaaagcctctggctcaagcacatacagaggactctgttcaagaagaggtttcagcaccttctacccatatccctcttcactttgagagtaacatgtttggtggatccgattcatctgatgaagattattttctttacaatgaaaactcagtgacatccgattcggagtcggagtcatctagctcaagtggtttgaactggggcaacagcaacaaaatggatgattcaattgtataccagtttct

SEQ ID NO: 28349 - DNA, 304 bp, Glycine max
ttttccctctatgggagctgcacaaggaatgatggacaaactaggagatgatggtcttgttgtggatggcagaaaacttttctttgaatatagtagtaagccaacaggaggtcctggtccagatggagctatgaaatcaggtcataattataagagcatgatggttccatccgattggatgtgcactatatgtggctacataaattttgcacgccggacttcctgctatcagtgtaatgagccacgaactgatgatgcccctgcagcagatatttcattgtctaattcagcagctataggaaag

SEQ ID NO: 28350 - DNA, 713 bp, Glycine max
gaagcacttttggatgttgcgtcatgtcttgcaagcagtgctcagacccagaagggatggaatcgcataatatttgagaagccatttggctttgatgcactttcttcccataggctgacacaatatcttctttcaaactttcaggaaaagcagatatatagaattgatcatctactaggaaggatatctcattgaaaactcttacagttttaagggtttcaaatctagtttttgagccactttggagtcgtacttatatagataatgtacaggtcattttatcagaggacttggctgtgcatcctggaagatatttcagtggctatggaattatccgtgatattgtacacagtcatgtgctcctaacaattgcattgcttgccatggaaccaccaataagccttgatggagaagatattcgaaatgaaaagcttaaggttttgaggtcaattcgcaaattggagccaaaggatgtcattctcggccaatataaaacaagtggtggagccaaagttgatgcgtgcctaaatggtctgacacctacttattttgctgctgcactatacattgacaatcacgatgggatggcgtgccatttctgattaaaacaggcttggggctcatcaaacaccagtacaatcatcatcttttgtgtgaattttctttagatatgtactttttatgttctagattacatatttagattctttggc

SEQ ID NO: 28351 - DNA, 508 bp, Glycine max
acgaggttttgagcttgcaactggagatgtattatttgatcctcacagtggtgacaactttgatagggatgaggaccacttagcattaatgatggaacttcttggaatgatgccacgtaaggtaacagtactgttctttccatttcttgggtctttatggttcatttgttcatgattaacttgaggctgcggattataattctcagatagcactaggtggccgttattcccgtgatttctttaatagatatggtgacttaaggcacattcgacggttgcgattctggcccttgaataaagtcctcttggagaagtatgacttgagtgagaaagatgcaaatgatatgacagactttttggttcctatccttgactttgttcctgagaagcggccaacagctggtcagtgccttctccatccatggatgaatgctggtcctcgccttttggagccatctgtgccttctaatcacaaccctgctgctgaaacttccgtttcggatcagaa

SEQ ID NO: 28352 - DNA, 568 bp, Glycine max
attgctacctaattcatcatcatcttctcagttggctaaagagtctcccctgatggaagaggtattagtgattgcacgaggacaacgtcaaatcatgcatcaactagacactctgagcaatcttttgcatgaatactttggagaaaggtcacgcctgggaagaccagaccatacaggaagaatgcgtgaagctgaatccgtcgccgtccccctgcttctgactctggccattggtgctgttggtgtgcttttgttcagaggtttgacatcccaaaaataatgtgcatatattttgtttcttgtaaaattgtcattaccatttaggagagaagcctcataagtatatctaatgcataaagggtttatgaaaacaattgccaatctgtgaggggctgcctcacattaagtggtagtagtagtggacgacgaccttaataggtatattttggcattcacttaagctgtaatatataagcttctgtatatcttttttttttttttcctcgttaaataatttgtcaacttggtggaatactgaacttgcatatagtattataatttgttcttt

SEQ ID NO: 28353 - DNA, 321 bp, Glycine max
ggggttaaattttacttgacaaaataattctaaacccccctgtttttgagtactttgcatctgatcgtagttcagaaggagaagttttgatgaaaccagcagacctaatgcgagcagtggttcctgttttccctccttctgaatcccaccttgttagagatggatacttggaaggtgaaaggaggccgggccatttacgctgccctccttccgaattttttatgctttttgatgtaaacaatgatgggctgatatcttttaaagagtatatcttttttgtaacactactcagcatcccagaatcaagcttttcagtgacat

SEQ ID NO: 28354 - DNA, 371 bp, Glycine max
cctacgcgtccgctttttgacgccatcgaggaacgcgccatctccctcgaaggcgtccaccgcgccctcgaggccgaggactacgaatccggcgcctgctacgtccagaccttcctccagatcgacgcccagtacaaggattccggctccgatcagcttcagagggatcgcttgttggccgccaagaagcagttggaaggaattgtaaggaagaagctctccgccgccgtcgatcagcgcgaccaccccgccattctcaggttcattcggctcttcacaccgctgggtgtggaggaggagggtttgcaggtgtatgttggctacttgaagaaggtgattgcgatgaggtcgaggatggagtttgagcagtt

SEQ ID NO: 28355 - DNA, 172 bp, Glycine max
gtggtctcgtaaagtgagagacggatgtcaaacttccactagagaagcttgctcacttttgatgttttggcttcattgtatggagtgagtgctggcgaatcattttgagtctacacatgagcccgtgtggtttcaaggattcacaggactaatgggattgctttggtatatc

SEQ ID NO: 28356 - DNA, 257 bp, Glycine max
gtttcggtttcagtttcttgagcagtatggggaagtaagcatgttggatttaaaaggtgctgatgctaccaaagttgttcttgttattggaataatgactctccattcttttggggacggatctggtgttggggtctcatttgctgggtcaaagggtttcactcaaggcctgttcgtaactttggctattgcggtacacaacattcctgagggcttagctgtgagcatggtgcttgcatcaaggggtgtctctccac

SEQ ID NO: 28357 - DNA, 422 bp, Glycine max
ttcagagaatcatgttggaggacagtgccaatgtcaccaagctcaataatggggttttcatcaactcgtttgaggagctagaaggagaggcactagcagcactcaatggagggaaagtgcttgaagggttgccaccagtgtatggtgttggacccttaatggcgtgtgagtatgagaagggagatgaagaaggtcaaaagggttgcatgagttcaatagtgaagtggcttgatgaacaaagtaaagggtcggtggtgtatgtgagtttggggaacaggactgagacgaggagggagcagataaaggacatggctttggggttgatagaatgtgggtatggttttttgtgggtggtgaagttgaagagggttgacaaggaagatgaggagggtttggaggaagtgttgggcagtgagttgtcg

SEQ ID NO: 28358 - DNA, 466 bp, Glycine max
tctcgagccgaatcggctcgagatcagattcttcaattcttctctgtctcttccacactgtattcgatatggcctatgagtggatttgatgatcaatagggaacaatagcaaatctgtgcagaggagatgagagaggagtcacttggactgattattggggtttccataggtgtggttattggactagttttggcaatttttgcgttcttctgccaccggtaccatcgaaagcgatcacagataggcaatagcagttctagaagggctgctaccatacctatcctcacaaatggtgctgattcttgtaccattctatcagactcaaccttaggtccagaatcaccgataaagtccggaagaaatggtatgcccttctggcttgatgggtttaagaagagtagtagcatgatcccagcgtctggactacctgaatatgcatacaaggatttgcagaaggcaacacat

SEQ ID NO: 28359 - DNA, 529 bp, Glycine max
tccagtggcaattggacagtaaacgcataaaggtgtctctcatgttgaggaatgaatgaggtaacactgttacatgtacattgtgggaaggctttgcattgcagctgaaaggttttttggacaaacatggagatggtccagtcaccttggtgctggagcaagcaaagattaaagagaacaaagcttaaaccaaatatctagttactgctcaaaactcaatatatggttataaactgtacattaatgctgagcttcttgagtttgaagaatttatcaaaagaccagtttctttataatgctgaaatcaaaagcttgggagaactaagtgatgttaaaaagtgaccaattgtatcaccgtggcaaccattgacaaaatatttgtgggaaatgcgtggagctatgaaggctcccaaaatgctttaagaaagttgaggcgcccccatgcaggttgtgcaaatgattgctcaactactattacaagggcggataatgtaccgtgtgggccaaaatttgcagtttggttgagaaa

SEQ ID NO: 28360 - DNA, 483 bp, Glycine max
gagaatcccaatgcctgtgtcatttgttaaaccacaaaactttgatttagttttatgggtatttttggtgttattcttcgattagaattatagttcatcttgataatctgcatgtaaacatttataatgtagattaccgtgacagaactttacttctgatcgaataacaaggtcataagcagcctaaagatttctatgtaagttttgttcggtgcttaatagtaagttgtccaaacacaagggaaggacataccttttcaacatggtaatggattcaattctttcactcccatatgagccatcagccaaaagtataggaactccttgtatataatatggtgatgtcttgttgagttattactgagatattttcaatgtgtagagaagaaggaataaattttttgggatgtaagttaatcatacttttattctgtaatatatagttgctttatgaatgcatgtatcatacttttatgcttgttt

SEQ ID NO: 28361 - DNA, 455 bp, Glycine max
gttctagatcgcgatctagaactagaacggagtttggttttataggaaccctcctattcatccatttatcgatccacgtccatccccatctttcttctcctattctctctgttttcttttcttcttctaaaaagtgagagaagaaaaaagggaattgaaggaagaagattgagaaaaaagggggaatgcccagataattaattcggtgaaatttcggattttcgtaagtgggtgtttctcttttcgtgtttttaccttcagtggtggaaggaagggggtttggtttggtgagttgatggacttgatgagcgctgagtcgtgtgtcatcctcggacggcatggatgagggatgagatccacgccaaccatcatcactctgagttttcttccacaaagcctcgcaatggaggcactagtaacatcaattctgtgggccccaacggaattgctccggc

SEQ ID NO: 28362 - DNA, 418 bp, Glycine max
ggaaaagatggttcttggcttgcatggcttgattctaagaaagagggctctgttctctatgtgtgttttgggagcatgaacaacttccctaccacccagctttgggaaatagctcatgcccttgaagattctggtcatgatttcatctgggtggttgggaaaactgatgaaggtgaaactaaaggttttgtggaggaatttgagaagagggtgcaagcaagcaacaaagggtatctaatatgcggttgggcaccacaacttctcatactggagcacccttccattggagctgtggtgactcattgtgggatgaacaccgttattgaaagcgtggatgcaggcttgccattggtgacttggccactttttgcagagcagtttttcaatgaaaggttgctggtggatgtgctgaaaatcg

SEQ ID NO: 28363 - DNA, 723 bp, Glycine max
ctgctacaagcttagcagaactggagaaaatttttgaaattgcaattgggggatcagaagatgaaaagatatctgctgctgccattctttgcggggcatccctaattcgtggatggaatatacaggaacacactgtacatttcattctgaggttgttatctccaccagttcctgcagaaaacactgaaggaaacaactatttgattaattatgctccaatactgaatgtactctttgttggaattgcatctgttgattgtgttcaaatattttcgctccatggcttggttccacagcttgcatgttcattgatgccaatctgtgaagtttttgggtcatgtgtaccgaatatctcatggacactaacatcaggggaagaaatatctgcccatgctgtgttttcaaatgcatttattcttcttttaaagctatggagatttaaccgacctcctcttgaatatggaattggagatgtacccactgttggttctcaattaactcccgaatacttactattagtacgtaattcccacttaatgtcagctggtaacatccacaaagatcgcaacaggaggagactctcagaaatagcaagtttatcatcgccaaattccggaatttgttgactcctttccaaaattaaaagtgtggtatcggcagcatcaagcatgtatagcttcaacactctccggtcttgtccatggaaccccatttcatcagatt

SEQ ID NO: 28364 - DNA, 281 bp, Glycine max
atggcaatggcataggaggcacagtgttgagttgagtgtctccctctccctctccgctactgcaactctctctctgcttttccaattttactctgcaccgcaataatcataaacgacgccgtttgaatttccacgaaacccagatttcgtgggagcttatggcttccattcacgccaatctcgtccccaacttgtcctttaatcacttccagacaccaccatcatcgtaccttgttggtgctggtattgtgcaacgtggagttagtttgcgcaattgtaga

SEQ ID NO: 28365 - DNA, 832 bp, Glycine max
accagggaagatgggtccgtaagtccagtagatcctgctagttattgtgagaatagtcacctagaggctctgcttgggcatcctttaatcataaaagaagtgaccaaagatgaacagaatgagaaagctaggcggaaacttgcttcatggaccatagcccttctatgtataggcattctcatagttaccagtgcggcttcagctgactggtgtcccaggattttgcgcttaacgttgtgcggaatgggtggtattcttcttttgtgcagtacaattgtactggcctgcgtaaagcaagatgatactaggcacagctttggacactcaggaggttttgcctgcccatttgttccattcttacctgctgcatgtattcttataaacacctacttactaatcgatcttggagttgctacatggctgcgagtttcggtatggatgttgataggagtacttgtatacttgttctatggccgcactcacagctcactgttgcatgcaatctatgttccctcagcatatgctgatgaaatccatcgatctcaagcaagtcatcttgcctagtatttgcacggcagctaccaaagttaccacacttcaggtctatatccatttgttacataattgtgacatattacattacatggcttacaccaatttgtaaatatcctattctaaaccaatgctttctttccgctatcagacggatgattactatgattatttatttgtttatttaaacaagtggccataaccggatgagtccatccttttacaaacttctccctatgaggcattaaccatgtatagtcaacatactcacgaaatacta

SEQ ID NO: 28366 - DNA, 416 bp, Glycine max
gctcaacagtacttctcttttgtataaatgccacaacaaacaaaaagaacaaggtcaagagaggacaaaggtcaaaagaattattccaatatatataccatcactcaacaagccgcgttttcaccctcgaaagtttcgataaccagctgtgtttcactgtttacacccaacactttctatgtgaccattcttaagacaccctcctccattgctttatctcaattatctcacacttctttgtttagtgttctttcctcaataatgaaggaagtgagtgctgaaggtggaggtggtctagggcaagcatcatcatcaggtcctgccccccaaaatgggaacagcatgcaacccagttccatgaaaatttccaaaagtggagaggtgtatagctatgattatgaagaaacaggagatga

SEQ ID NO: 28367 - DNA, 500 bp, Glycine max
tacttactagttagtaattattttgacttgcatgccctttatgttcatttaaatctagttttacctgcaagcattaaatctgttgcttgttgtttcttcagacctttggtttcttcttactgggtggtgttcaagtccatgctttgaatgtgagtggattggttatcaatacagctggtggtgtgtggtattcatatgctaaatatcaccagagaaaaagtaagccggtgaagctagtcccagatgtggaggctcatcgtaaatagaagtggcatcgataagttgtggtgaaaactcacggtttcatggatgtttctctactttgatttcctacgattgtaaacgctggtagtttagttttcctggttctcttttccctgataattttatagtaattgcaggctcacatagtctgagtctaagatgtagtaatactgacatgatattcggaattgagtaaaataattgaactcttgtgattccaaaaaaaaaaaaacaaa

SEQ ID NO: 28368 - DNA, 259 bp, Glycine max
ttctcatcgtagccactggggaattcccaaattctttatccgtattatttgcaaagagttattctttctcatttttggtgatcctgattctttcattggtgatgggcatcattctcaacttcaccatgttcttgtgtacaattgttaattcagccttaactacaactattgttggcgttctcaaaggggttgtttccacgacctttggtttcttcttactgggtggtgttcaagtccatgctttgaatgtgagtggatt

SEQ ID NO: 28369 - DNA, 278 bp, Glycine max
ggttggttcacaattggctgagccagagataaagatgctgatggaagtggctgatgttgatgggaatggagtacttgactatggagagtttgtagccgtgacaattcacttgcaaagaatggagaatgatgagcatttccgcaaagcattcatgtattttgacaaagatgggagtgggtatatcgagttaggggagctagagaaagcattaacagatgagtcgggagatactgatactgctgtattgaatgacatcatgcgtgaagtcgacactgaca

SEQ ID NO: 28370 - DNA, 395 bp, Glycine max
gtacttgtcaccatggccacgcatgtgcattcggagatttgcatccctcttgcaaaaccacacaaagaaaccgggtctgaaccaaagcttatcaagaggtattcctgcccctatgccggctgcaagcgtaacaaggatcacaagaaattccaaccactaaagaccattttgtgtgtcaaaaaccactacaagagaacacactgtgacaagagctacacttgcagcagatgcaacaccaagaagttttcagtcatggcagaccttaaaactcatgaaaaacactgcggtaaggataaatggctttgttcatgtggcacaacattttcaaggaaagacaagctttttggacacattgctctattccaaggccatacaccagctattcctttggatga

SEQ ID NO: 28371 - DNA, 121 bp, Glycine max
ccgcgtcttggtcgagaagattggcaccccgcaaggcaacatcaatgcccggcgaagcagcatctccctggcggtccggattcactgggcaagcaagcactacgaggacaacagccgcgtc

SEQ ID NO: 28372 - DNA, 483 bp, Glycine max
gctgacattgaagaggtcactagagtcatcaaagtagcttcatggtgtgtccaagatgatgaatctcataggccttccatgggtcaggtggttcaaatccttgaagggttcttggatgtgactttgcctccaattccaaggaccctccaagcctttgttgacaaccatgagaacgttgttttcttcgccgactccagctccacacagacttcacaggttaagagtaatgcctcagctgcttcctctccagccaaaagcaacatctcatcatccaatagtagcacctagtcctcaagacagaatcaagaaggcatgtttggtgctttctctcagtctcttaagatacaataagtagtgccatattttgattttgaggcttttagttctaatgttaaggtttgcataggaggaactcctgttaagatgtttgtatattcaaccaaaataatttcatctgattctgatatagctattcttgtattt

SEQ ID NO: 28373 - DNA, 408 bp, Glycine max
ggcaggaagaattggagcgtgcacgtcaaggtcagagggaagctgaaaacaagctatcatccttggaggctgaaatgcaaaaaatgagagttgaaatggctgccatgaagagggatgctgagcattactcacgtcaggagcatatggagttagagaaacgctatcgggaactgacagaccttttgtactacaaacaaactcaattagaaaccatggtcagtgaaaaggctgccacagagtttcaattggaaaaggaaattaagcgtcttcaggaagcaaaggcagaggctgaaagaagtagagtttctcgtcgagcatcatcatcttgggaagacgagactgagataaaatcccttgagcctcttcctatgcatcaccgtcatttggtcggtgcaagtattcagttgc

SEQ ID NO: 28374 - DNA, 368 bp, Glycine max
ttgctttctttactggtgtaaaccatcatgggcaacctgttctctttggttgtgctttcctaattaacgaatctgaagcatcatttgtgtggcttttcaagacatggcttatggccatgtctggatgtccgccagtgtcaataacaactgatcatgattctccctggcggtcagccataatacaagtcttccccgagactcgtcaccgtttctgcaagtggcacatctttaaaaaatgccaggagaagttatctcatattttcctccaatatccaaattttgaagcagaatttcacaaatgtgttcacttgactgagtcgactgatgaatttaagtcgtgctggtccaaacttgtaggttaaatttga

SEQ ID NO: 28375 - DNA, 282 bp, Glycine max
tgttgcaaatgaactccgggttcctttagtgtcatttgccgctacagaccccaccctctcatcgctgcagttccctgtctttgtcaggacaacacagagtgatttgtaccaaatgaaggcagctgctgagattattgattattatggttggaaggaggtgattgccatatatgtggatgatgattatgggcgaaatggtgtggccgcattggatgacgaactagctgcaaggcgttgtagaatctctttcaaagagggaatcaattcaggacctgaagttga

SEQ ID NO: 28376 - DNA, 344 bp, Glycine max
atttccacacgtcataatagataaagtccagttgaagtgatactattgaacagccgatatatgacgctctcatgattcattttgtatcttgtgaaagtagcattagacacataatgagtgttgactaatctcttgttttactgatctttctaaaatataaagctacagaatacaaagtttgtatggttgaagccaagcaatttgtagggatttttgtttatctcacaatatgttagagctttgtttttaagttgatttcacttttcaaattggggtttaattgagagagagaggagtatgtgtgttgggattttgctttttgaactgtgagagatttctttcca

SEQ ID NO: 28377 - DNA, 424 bp, Glycine max
cttgcaggcgaaacgcagcgtttcggcatcatgatacgcggaggccaaaactacgtttcttccgctccggcgttctcgaacgacggcaagcgcctcctcgtttgcagcggctccaccgtgtccatcttcagcaccgccaccggctccctcgtttcctccctcgaaggccacaccgccgccgtcaccgccgtcgtggtggtcccctcctccactggcctaagctactgctggaccgcttccgtcgacggaaccatccgccactgggacttctccgttcccgaatgcgtcaagattatcgacctttgcttacccatcttctctatggtggtgccttcgattttgtctccgcgggaagaaaacgggaagaagacggcgaatgctattgcttacgtgtctgttcaagttataaacgcaccggacaatc

SEQ ID NO: 28378 - DNA, 245 bp, Glycine max
ttgaaattcagattccaattcgtttgaaatgcagttgccataattccactccaactcctgactttccttaatcggaaggaacctcaccatgttgaaatttcacatccacagaattcttgtttgcgccacgggtttcacattcacgagcctaaaatggaagcctattcttgaactccaatttctcaaattcgagtcctggactactctcagctcttacgtggcgccctacctcatcaaaattgtgg

SEQ ID NO: 28379 - DNA, 295 bp, Glycine max
gaagcaagtaacttttttgcttccatttcataattccatcagccatgagttttcaagacatccaaggtgggcccaaccctccctctcgccggaaccagtccccgtcgcaggccgttgccgccggaattttccagatcaacaccgccgtcgctactttccggcgactcgtcgatggcgttggaaccgttaaagacactcccgaacaccgtcagaaactgcacaatacgaggcagagaatattgctgctggtgaaagatcattctgctaagctcaaatccttgactgaatctgatcg

SEQ ID NO: 28380 - DNA, 376 bp, Glycine max
tcggacgcttggggggcacatgatttcatcgcccaccacaccacaatctaataaacacgaatgcacgatgttagattaagcgccagaacaaaatctggttcagaagaagaaagcaactattgtttgacacgagggagatatgtgcatattcgaatcctcttcaacccacttgctacttctctctctctttgccttgctaaactctgcaagtgaagcaactcctatttataccgcacatgcctgcacagatggatcctattacttacccaacacaccattccaaaccaacttgaacctcctcctctcatccctcgatctccagcgccaccctccacgacggattccaccgcaccaccatcgtcgatgtcaagggact

SEQ ID NO: 28381 - DNA, 250 bp, Glycine max
agctgctcgacgacgagggccgggattgggttaatggctcaacaggtcggtgcgcaccggattagcgtcggggggccggacggcctcgtttgggtgaggaaattctcgcgtggagatgaaagggagtgtgattgttcggcacttgagcatgttttgtctacggtgcccggtgttaagagaatggtgatggggcacacgattcagactgtggggattaacggcgtttgcgaggacaaggcgattcggatcg

SEQ ID NO: 28382 - DNA, 303 bp, Glycine max
tttttcttctatgaacacatggtggctgagttgaggggaagtacttagaaacagaaacacagagatggaaccagaaacatctctgaactttactttgatgctgactttcttactttatctgaacttggttatgggagtgctgagcgttgatcattatcgcagagttgactttcctgatgaattcgtttttggttcaggcacctctgcttatcaggtggaaggagcttctaacgaagatgggagaactcctagcatctgggatacctttgcccatgcggtgtatgagcatggagaaaatggaga

SEQ ID NO: 28383 - DNA, 312 bp, Glycine max
tggaggaagaagcaagccttgaagattctggatacaaaattgtacgcatggctgagactgaggcccagcaaattgcgttgctagctaatgcctcattactagctgatgaactacttcctcgtgcagctatgaagctttcccccataaatcaggctgcatacaaggatgataatcgaagaagtacctcagaaaggcaaaatcgtcatcctgaacaaagagaatggaggagaagacttgttggttcagttgacagattgaaagatacattttgtcgtcaacatgcattggacctatttttaaagaggaagtgat

SEQ ID NO: 28384 - DNA, 360 bp, Glycine max
tcgggtaaattaggaaaatgaacaatacattattacagtgattcgattacaacggagcgttgcactgaatcggcaagaaaaagccaaacacaatgaattgagagaagaagaagaagaagattattaattacaataaataaataaatcgccgtgcaaataaaaccgttggatcgatcgagaatgagaatgagaatgagaatgaaagtgtgcgtttgatgagtatggaggaacctcagttccgcgaacatcccaaagccaaaatcgccaccattccgccgtcgcagcactccgacggcgccgccgccgaattgcgcggtgccgattgcaacctggcttccctctgcgagcatgtccaaatcg

SEQ ID NO: 28385 - DNA, 233 bp, Glycine max
ctcgagccgctcgagccgattcggctcgagggaattaagtggaaagcccttaaaagtagcacctgatgagcagactttacctctctgctggcacggtaaaagacctttcacaagcctacgcgaagtcaggaaatacttcaagcctgtggcacttggtttcaccaatggtggaagagctaaagcccaatttgagatccttcctgaagcttatctgataatatctaacctgggaa

SEQ ID NO: 28386 - DNA, 337 bp, Glycine max
  unsure (1)..(337): unsure at all n locations
gtgttatttgttggtatggctggcctgctaaatttcaatggattatgcatagaagagattttgcttctgtctttagttaaattgctcaaatgttttgatgactccaaaaccttctttgttggatgggttgttgtggacagtggctctgtctttatgcttttaattcttaaggaaattttgtactattgtatggtgttggtcctagcagcctttctttttatccttcttctccaatatgatttacagttaataccttcattgcttctgaaagttctgcacaactagttaatgtannanaatgnactggattncctgtgctcaacctcgaaagacaagg

SEQ ID NO: 28387 - DNA, 362 bp, Glycine max
cgaggactgttgctaactttcatgaatgcttcagaaatttgtggaaccatcaaagatagaaagatgggctgttgctaacttttctgcacgctgtgatgtacgaggacttgtacgggacctcattagaattggagatatgaaaggaattactatagaacaaccatttgacgtgtttgatgagaatccacagtttaggcgtgccccccctatggttagagtggagaaaatgttcgagcatatccaatctaaacttcctggggctcctcagttccttctctgtttgcttcctgatcggaaaaattgtgatatttatggtccatggaaaaagaagaatcttgctgattttggaatcataaatcagt

SEQ ID NO: 28388 - DNA, 358 bp, Glycine max
tccgccctcccggaacacctccacgacggtctcctccacaccgcctgcggcacgccggccttcaccgcgccacaggtcctccgccgcgtcggctacgacggctgcaaaagccgacgctggtcctgcggcgtcatcctctacaacctcctcgccggccacctccccttcgacgactccaacatccccgccatgtgccggcgcatctcccgccgcgactaccagttcccggcatggatctcgaaatccgcacggagcctcatttaccaattgctcgacacaaaccctataacacgaatttcgttagaaaaagtttgcgataacaataaatggctcaagaatattcaatggtgggagtgaa

SEQ ID NO: 28389 - DNA, 624 bp, Glycine max
acgaagcttgcgcgtgctctcatcagtggccagcctgtagaaccaggtccacaaccccctgacctgcttgataagcaaataagcttattaacaccagttgtgatggatgcaacccctattggtgtaaagtttggggattgtagctctgatgttcccaagaactcgaactttaagagaggtgacatggtgtctgttactttctggtctgcgtgccctcgtaacgaccttatgactgaaggtacattttccctggtggaatttctccaaggaaaggatacttgggttcctgcttatgatgatgatgatttctgcctgcgcttcaagtggtctaggcctttcaaactcagctctcacagtaaagctaccatagaatggagaatcccacaggatgtaactcctggtgtatacagaatcaaacattttggggctgcaaagggcttgttaggatcaattcatcactttactggttcatctagtgcatttgtagttgcatagtaaaggggggcatactgattgattaaacgtgtttaatggttcgaacaccattactactatattgtggtttactggtaccgacctgtggcccaattccattaaaattaactcaaggttgattcccccggg

SEQ ID NO: 28390 - DNA, 394 bp, Glycine max
tgtgttagatttatctccaactgctattgcaatggaggcgctggaacagatcaaaggctttcttataggtgaagatggcttttaagcgtgtgctagcagaatcttccacacaagcatgctttaattgtgcatatttttctcttcaaataataattatagcatggcaatgtgttatatctttttgttaggaaaaggaatgatgcagcatcatcaacatgcacatatttagtattttttttattcgtaaaaattaaaaataagtactagaattgaagttttacaactttcacgtactgaactagatctcgttagtgtaggaatttagtgtttatgtgtaatttgtgtgatcatatataatttgacggcatgcagcatttaatttgtaaaaaaaaaa

SEQ ID NO: 28391 - DNA, 148 bp, Glycine max
atctacaggtatccaaagttctccagggttttaactcaaattcagcttcatttcactttacctatgatttcctaaccatgaatcatactgagaggttagttactagttattgaaaaacagtgttacatgccattattccacacaacat

SEQ ID NO: 28392 - DNA, 272 bp, Glycine max
cgtagtaaaacatgaactagatgaggttgcaaaacatgaactagaagttgccattgatgcaaagatggcttcactagacacggtatttagccccggagagggatctttagtgaagagagattatgttgatacagactcttcaaatttgagaccaccttctatcatgactttgcaattagaggatgctgattttgtagaggcaacggatacaaaaaatgatgaattgactccaacatcttccgtgggtgaggtaggactaaattctgaggagg

SEQ ID NO: 28393 - DNA, 338 bp, Glycine max
gaattatgaggtaaatgagattgcttggaacatgacgggtgagatgttctttctaacaacaggaaatgggactgtggaagtactttcttacccatctcttcgacctcttgacactctcatggcccatacagctggttgttattgcatcgcaattgatccagtaggaagatattttgctgttggaagtgctgattcccttgtcagtctgtgggatatctcagagatgctctgcgtgcgtaccttcacaaagctggaatggcctgtccggacaattggcttcaattattctggagattttattgcttctgcaagtgagacttgttcattgatatttcaaa

SEQ ID NO: 28394 - DNA, 416 bp, Glycine max
attgtttatcaagcctcagatgatccactttaccgtggctatagagcagcagttcaatcatcaagtcaagaagagtctttggtagattttgcattatgggagccacctcatggtccatacaagacattcaattatccttggagaagctatgttaaagtcagcggagctttgaggcattgtgctttcatggtcatggcaatgcatggatgcattctttcggaaatacaggcacccccagaaaagaggctggttttcagtaatgaacttcagaaggttggtactgaaggagctaaagtattgcgccaacttggaagcaaagtggaaaagatggaaaagctaagcaacatagacatactcttgaaagtgcatgaagcagctgagcaattgtcgatgaagattgaccaacaatcattcct

SEQ ID NO: 28395 - DNA, 280 bp, Glycine max
aagaaacaacacttcagagaaaccaaaaatctcaacaaagcagtttctaagatccgatccattcagaccattccacattttgggggcgcgagagagagactctcttacaccctagggtttctctcgcgaaatgtgcccgatcgagacctaaggcttgttaggtgtcccaatttccgtgctgcattagtcccaagcgtgagggcgaatcctggtgcaacggtacagttgtgccttggtgacttgttggtcatgggttcgaatccggatacagctccttgca

SEQ ID NO: 28396 - DNA, 405 bp, Glycine max
cggacgcttgggctgagattctgctgtactttctttatgctgaggaatttcaactttctgcttttctatccgctcgcgttgcatctaagcagtcacagttttactttgtgtctcttttttttctttaaaggctttgacgaaatccggcagctagcagaggcccgtttggttgctgagaaaacgaaggaaaattagtgtgagattcttttctttcactttctctgcaagcaaacggtgaggataatgcagacgaggtacattgagaggtcgagcagctcggcgagggagaagcgtgccttagattcaggttccgctgacgaagatcaacctcaaagaaagcgacctgctctcgctagtgtaattgttgaagcctgaaggtggacagtctgcagaaactttgttcat

SEQ ID NO: 28397 - DNA, 468 bp, Glycine max
tgaaacaagagcagagagatgtcagcagaattttcaggatcagctgaccttactttggaggggaaccaattaagtggaccagaatttccagttttcaattttagttgcatttctatagccacaaacaatttctctgaagaaaataagcttgggcaagggggttttggccctgtctacaagggaaagcttccaggcggagaacaaatagctgttaagaggctttcaagacggtctggccaaggcttagaggagttcaagaatgaaatgatgctgatagccaaactacaacacagacatttagttagattaatgggttgctctattcaaggggaagagaagttgctggtatatgaatacatgccacacaacagcttggattgcgttttcatttgatccagtcgcacaaacacaactaccttggacaagacgttttgaaatcattgaaagcattgcgagagcattacttta

SEQ ID NO: 28398 - DNA, 339 bp, Glycine max
cttacaaccatggaagagtacattaaggaggcaccacgagtggatacagttccaactgagccattgcttcagttgacttacagaccagaagaagttcttgcaattgaagatgctaaaccatctgatgaagaacaggagccaccagttcctgttgataataatgttgttgtctctgattctgaacctgcacctccaccaccaccaccgtcgtctcacaacaattttgaaactggagacttgctgggattgaatgacactgcacctgatgcatcgtccatagaggaaagaaatgctcttgccctagccatagtccccactgaaactggtactacatcagct

SEQ ID NO: 28399 - DNA, 587 bp, Glycine max
ctcgagccggaaaaggcatctgatattgtgaagttatgtgtgtcagtgttagagtttgaagcatcaagagatgggtttttgcttataccaggccaaccatatcccttcaggagtagtgttgatggtaagacatggcagcaagtgtacttgaatgcactaacaagattggatgttactttccattcttatacacgtactgaacaagaatggaagcttgctcaatgcactgttgaagctgcttccaatggattatatactgcaactaatgagctctgcattgcctctctaaaagcaaagtcagcttcaggtgatttacaaagcacggttctttcaatgagggattgtgcatatgaggctagtgttgcactgtctgcttttgctcgggtttcaaggatccatactgctctaacttctgaaagtggttctatgcttgaagaggttctagcaataactgaagatatacatgatgtttataatctggggaaagaggcagctgctatccacctgtctcttatggaaggcctttcgaaggcaaatgcaatcctttttccacttgaatcagtgttcactaaggatgtagctgctat

SEQ ID NO: 28400 - DNA, 297 bp, Glycine max
ttaacatataacttggttgtggcaaattgtgaagcatgaggaccttattacttgcactcttgttagccttcatgatgatggtgaccatgctgcatgctggtgcagtgaaggtggagcatgagcaaagaacaaagccaaaacgcaatctactgagtgaaacttctcttggccgaaagggtatgggaaccgacacaaataaccaacaaaccatgaaggtttctgcaagtagtagtgcaaataccattagcactgctgattctgtcaacaatagcaaagcgaaaaagaacagcgacaata

SEQ ID NO: 28401 - DNA, 472 bp, Glycine max
cagagtggaaggtgcccaccactttcatgtatggtttccaagactggatgaattatcaaggtgcccaagaagctcgcaagcatatgaaggttccatgcgaaatcatcaggattcctcagggtgggcactttgcgttcattgacaacccaactgccttccattcagctgttttttatgcttgtcgaaggtttcttacacctgatccagacaatgaatctcttcctaaagggctaacctctgcataggttaggtcttaattttgtgctattcctgtctatatgtattttaatatttttttttactaattaaatttcataattgaatgaaatcatatgtatattgtttcagtaaagtggaatttactgaaaatatttgtaatagcaacttcaacaaaaatcgatttgtaggagaaatttcttccctggaaattgttctattttaaatcttgttgctcataagataatatgacttc

SEQ ID NO: 28402 - DNA, 645 bp, Glycine max
gcgatcacctttctgcttattcaaaagaaccccttagtttttctctgaggttgaagattgctctaggatcagccaaaggtcttttatatctacacacagaagctaatcctccaatattccaccgagatgtgaaggccagcaatatattattggactctaggtacacagcaaaagttgctgattttggactttcacgacttgccccagttccagatactgaaggaaatgtacctggtcatgtatcaacagtggtaaaggggaccccgggttatcttgatccagagtacttcttgactcgcaatttgactgacaaaagtgatgtttatagtcttggtgttgtacttctggaacttctgactgggaggccaccaatctttcatggtgaaaatattattagacaggttaatatggcatacaattctggtggaatatctttggttgttgataaacgtattgagtcttatcctactgagtgcgcggagaaatttttggctttagccttaaagtgttgcaaagataccccagatgagaggcctaaaatgtcagaagtggctagagagcttgaatacatctgttctatgttacctgagtcagatacgaaaggacatgattatgtcattacaagtgactcttctggtacaatat

SEQ ID NO: 28403 - DNA, 665 bp, Glycine max
ggatcatctaaatgatcctttgaagactcccttggattggaggacaagattacagatagctaatggcgttgtggctgcactggaatacttgtttctcttcagtgacccaccagtatgtcatgtctctatcacctcaagcaatatcatgttagatgagaacttcacagccaaactatctgactttggccttcttacatctggtggaaattctgttatggtgccatattcagaagatttgaagcagaaaagttgtaagattatattccaacttggagtgctcatattggaactggtcaccggtcagtcatcagagatggaaggttcggatttaatcgaatggatccaagaatcccgtttttacaattccatagataagatgatagatcctgatcttggtaacaattatgactgtacggagctcaaaagtcttctagctgtggcaaaattatgtatcaaatcatgggacaagccttcatttacaattccacagttatttcggcatctccaaaagaagattgatattagcaattactaggattcttatatgttttgtttgaaaaccttgtggtttcttgggagagtatttagcactcccttgtgtgaatgctttcagttttcgtacctcttgaagagtcagttttgataactgcgataatgttcatttg

SEQ ID NO: 28404 - DNA, 419 bp, Glycine max
cgtgcttgaacggctggaaacaaagattgtgtctcctggtattggaaatgagtcggcggatacatgtgacattcaaaactacatactggatctgaaagatatgcttcaaagagaaagaactgattatcattgtttgctacagtcaggctcagtggccacacaaccagggatgatgaaattagacattctggaactaaatcggttgaggcgttctcttcttattggttcacatgtttgggatcaccgactattctcgttggactctctcattaaaagaagttttagctccaaggttaaacaagaagatgaattatgtgcagatgttaaagagttaagagttgattcacttcacaaggagcggaattttgactgtggacttgagcaaaataatgctcgtctttcaaaattgcacgagtctc

SEQ ID NO: 28405 - DNA, 385 bp, Glycine max
  unsure (1)..(385): unsure at all n locations
tagtcggatcggtcatacgctgcgagagagacagaggggtagccanattaatagaatatcatatatggcatggtcatcctcctcctcctccacctccaatactcctccacaaaagcatgaggtgttcattagtttgtagaagtgaagacacccgcaagacattcaccagccatcttaatgctagctttggaaagattagatatcaaaacctacttagacaacaataatctagatagaggagaggaaatacccacaacccttgttagggccatcgaggaagcaaagctatccgtcattgtattctctaaaaactatgcggattctaagtggtgtttggatgagctcctaaaaatacttgagtttggaagggctaaaactctaatta

SEQ ID NO: 28406 - DNA, 252 bp, Glycine max
gttctaagtgcatgtgttaacacaaatctctaatggcagaagcaccctgtcgttcttcttcgcgtaagggtaagagtaaggtcgtgaaggatcactgcttggtgataactgagtctgacgtggacgcggcacagaacctttcaggaagcaagaggagcagaagcatggatgaagaaaagggagaagaggttggtcagaggctaagtaatattataatggcgaaaatacaagagatttttgggaatgatatag

SEQ ID NO: 28407 - DNA, 666 bp, Glycine max
tcgcgatttctcgttcttctgccataatcaagcgaaaaccatttcgttgcggtcactccttcgaagaactcggtttcagatctgaaccgcaatcgtttgaagagatccacagtggctgcgttctccgttcacttctcccacctttcatgttcttctccgcgtgcgaacagatcttgaaaattggcgcctcaacgacgttcgcagcgccacgcgagtggccagatgccgcagggcaatgccgccgccgcagcagcgctgctggaccacggcggcgatgccggcgacgccgtaatggcgcggtggttgcagtccgctggcctgcagcatctagcctctcccctcgcttccaccgccatcgatcatcgcctcctccctaaccttctcatgcagggttatggagcacagtctactgaggagaagcagaggcttttaaagttaatgagaaacctcaattttaatggggaatctggttcagagccatatacacccaccactcaatctttaggtgtggctgggtcggatgggttttattctcctgagttcaggggggagtttggagctgggcttttggatcttcatgctatggatgatacagagcttttgtctgagcatgtagtttcagaaccttttgagccatcacccttcatgcctggagatactagagta

SEQ ID NO: 28408 - DNA, 275 bp, Glycine max
gcgaatatatatcttgtttcgtcccttaattctctccttacaaactcagtggttcttttgctcaagatttctgaactcagcctctgattcccaggaaaaaaaagtataaaagcaaaaatcagagtccagaagtaataataagcggcaaacagaagacatagatcagcacaagaaaagcagaggaagatgggttttctgggactattgggggtggcgtctatgccggttattcaagtcctacttatcagtgcattgggagctttgatggcaactca

SEQ ID NO: 28409 - DNA, 462 bp, Glycine max
tcgtattttgttgtctctctctctcttcacttacatagcataggttcctttcattgtacttttcactcagagagatacatataatagaaatagaaacacttttttgagaagcacttcgtttcattgtcatcatcatcatcatcattcagagagtgcatagaatgagttcttcttctggtcagagcagtggctatgatctttccttcaagatcttgttgatcggtgactctgctgtgggaaaaagtagcctccttgttagcttcatctccaactctgctgaagatattgctcccacaattggtgttgattttaagatcaagatgctcactgtaggtgggaagagattgaaactaactatttgggacactgctggacaggaaaggttcagaacgctaactagttcttactatagaggagcgcaaggcatcattcttgtttatgatgtaagagaagagacacctt

SEQ ID NO: 28410 - DNA, 282 bp, Glycine max
gatatttcagggacattccgctgggccccgtttcttgctttagagagatcaaactcatttctaaccatgctcttgctgctttctaagtacaagatgaagagtgttcctgtgttggatttaggctctggtgcaattgataacattattacacaatctgctgtgattcatatgctggcagaatgcgctggacttcagtggttcgaaagttggggaaccaagaaactatctgaagttggtcttcccctggtgacaggaaatcaaatcatcaaggtttatgaggat

SEQ ID NO: 28411 - DNA, 470 bp, Glycine max
cctccttgaaacaactcctcagagccaaagctgttctcttttttcatctgggtctaaagaaccactggtgaccaaaattgtgaaaaggggttccttgattttcaccaattcatggcatttcagcactacatttcccgggatttgaaaaccatcccaaatgctgtgactgaggcagaaaaccccaatggttgttttgattgtaacatctgcttagactttgcacatgagccagtggtgacactttgtggtcacctctactgctggccatgcatctacaagtggctccatgtccaaagtgattctcttgcacctgatgagcatccacaatgccccgtttgcaaggcagatatatccaatagcacaatggttccactctatggccgtggccatgccgccacagctgaaggcaaaacatcttcttgtgatgtttttataccaccaataccatctgcttcatgtgttcaagtcct

SEQ ID NO: 28412 - DNA, 293 bp, Glycine max
tttgaaactcctcagagccaaagctgttctcttttttcatctgggtatgcaatttccttcttgttatcctctttggtctcctggattccataatctgtgttaggaaaacttccacatccaaggtctaaagaaccactggtgaccaaaattgtgaaaaggggttccttgattttcaccaattcatggcatttcagcactacatttcccgggatttgaaaaccatcccaaatgctgtgactgaggcagaaaaccccaatggttgttttgattgtaacatctgcttagactttgca

SEQ ID NO: 28413 - DNA, 397 bp, Glycine max
  unsure (1)..(397): unsure at all n locations
gagtggaagtaaaccaatttaatggtaatctgtccttattaaacatgaagaacgagcaacaggggttgtcagcttgaatgttctaacgaggtacanaagtgcattaggagggttttgggtggttttcgtactctttgcatgctatgtctcaacggaaacgttacgaatatcaagtagcacatggttaagccattggactgatcagagtcgctacggagggttacaaccctgccttctacaatatgatatatgcagctctatcatttggtcaggtcttggtgactttaacaaattcttattgggtaatcatatcaagtctttatgctgccagaaggttgcacgaagccatgcttagctccatattacgagctcccatggtgtttttccaaacaaatcc

SEQ ID NO: 28414 - DNA, 593 bp, Glycine max
accagggaagcatgggtgaaggagatgcctaacgtgttgatacttcctcgaagtgcagattacagtgaagaggtttggatggaaataagggagaaagctatatctatattgcaaacattcttcattgatggaattataccaaagaatgccatgtcagatgtggaagaagagagtgaggttgacaatgaaagcgaacaatctgatcagcaatacaacggaaatgctctccagattattgttagagagcaaacagatgatgttcatgtaagtcctgacaattcccaaaagaaaataagtactcaaatgaaagagtcttcgtcccagcatcaggtttcaagtttgtctcagagtacctctgctagatctgaaggaaggcgcagcaggtcaggtaaaaaggccaaaaaaaggcatacccgtcacaagtcccaacaaaaacatgaagatccttctgcactggagaaagaaggcacatctcagagagatgatactgctatgagtggcactgaccaagctttgagctccagctctgaagactcaagaaatagaaaaactccaatagaatctatggaagaacccactggtgctcaagtcat

SEQ ID NO: 28415 - DNA, 349 bp, Glycine max
agtagatagctagctaggttcaatacaattatatagagtaatctcaagggggtttagtccagttggttgatctgaagagtgtgtaaattgttgtaaatctcctgatacctgtctttgattcttatattttaggaagaaaaaaaaaaaaaactagagcaatggatgttttatctttaagatcaagttcaagcctaagcatgtccaagccctttgaatctcatggccttccactctcaagtaaacaacatcgaataccttttagtgtgaatgttggtaagagctcatgcggagccacaacgtttacccaagaaaacttggacaaaatattatctgtgagtccaggaagtgc

SEQ ID NO: 28416 - DNA, 439 bp, Glycine max
gcattcgagcagttctctatcgtcgtgagctcaatcgaactgccaccatcacaattcaccaacaccgtgttctccatcgcttcccagtatcgaagatcctccgtcgacgcagagaatcgaagatcctccttctgcaggttctcgtccctagatctgaaatacgttttgttttcatccttgttacttatttgtccttgacaagaaggattgaggattgaaaacgcaatgaatctgtgcggttcggctttaggggttttgaggcttggggaatatgaaaagagaaaagggcctgggcaatttgtggcgatcaaatactacccataatttataagtttgaaagtatatagttatattatttttttacattttaaaaattataaaccctaacctaaactatctgtcaaatgagtgaatgatcagagcaaagacccctaattta

SEQ ID NO: 28417 - DNA, 340 bp, Glycine max
cctcaaatgaatttttcaacttgtccttcccttttacttttctaggaagtcgcatgaagcagtttgtttgaccatgttctgaggaaccgttccttcattgccacatctaactgttctactttgtttcacgttgtacagattgaactttccagagtttagattcgttagttgttttgtgagttttgcagagaatataactcttccttcgattcaacgctttcttcctcttttgtcaccttacaggttctgattttgattgagaaggctcaggcttcatatcagaatggtttccgttgataatggtaaagatgaaattgaagaatctaatggaagtaaagta

SEQ ID NO: 28418 - DNA, 435 bp, Glycine max
cttttctgcaagaaaacatttcagggtaacccatgccctccttatctggaggcagtttgcaggaatatcttaaaaatgtgtggggggttgccactggcaattgtggcaattggtggtgcattggctacaaaaaacagggcaaacatagaagagtggcagatggtttgcagaagttttgggtctgaaattgaaggcaatgacaaactggaggatatgaagaaagtgctttccctcagtttcaatgagttgccttactatctcaagtcctgtttgctgtacctaagcatctttcccgagtttcatgctattgagcacatgcgattgattcgcttgtggatagctgaagggtttgtgaacggagaagatggaaagacactggaggaagttgcagacagttacctaaggagctcttgacagaagtctgctgcaagtggt

SEQ ID NO: 28419 - DNA, 371 bp, Glycine max
aaacctccgcgcccctatcaaccaacaaatccgtcgctcctagccacgaatccaacgaacaacctgcgacccctaactttccgcaaacccaagacgctccacctacgaccaaacaccgcgcaccctcgttgatccgcatatctacgaagagaagagaggttgagcaatggaggggggcgagggagggagaggggttgaaccaggcagtgcagcagcagctaaatctgaagcaagtgaagacccgcgctatcagcctcttcaaagccatctctcgtattcttgaagatttcgaggcctacggtcgcaccaactctacccccaaatggcaagacattctgggtcaatattctatggtcaaccttgagcttttc

SEQ ID NO: 28420 - DNA, 469 bp, Glycine max
atcagctcgagaactgttttcaagttctggtttagatatgcatgaaggtagcaggttgcagactttagtgatgggtggtgggatggggagtggtggtggcaggatttgtggtggtggaagaggctcacatggtagggatgggacagatgcttattaccagaacatgattcaagcaaaccccaataatgctcttttgcttggaaattatgctaagtttttgaaggaggttcgtggagattatcctaaagcagaggagtatcttgaaagagctattttggctaatcctggcgatgctaatgttttgtccctctacgcggatttaatatggcaaacagagaagaatgctgatcgagctgagggttattttgatcaagctgttaaaactgcaccggatgattgctatgtcttggcttcttatgcaaaattcctctgggatgttgaagaagatgaagataaagactgccaacat

SEQ ID NO: 28421 - DNA, 294 bp, Glycine max
cttagttctaaaaggactaagatttcaatttagaaaactgctctgtatctatctaaagagaccaatggctgtgcatgtaccaagaaggtgggatgtgaaatgggttgttggaaaggctctcattgcttttcttctccttgtttcagtctcagctacttcttctcatcaaaatacagacaacaaaacaacttcaccatccaatggaactataggggttgatcatcatgctaaagcattttacaagcaccattggccgagtatgaaatttgggtggagaataatagtaggcgccgt

SEQ ID NO: 28422 - DNA, 418 bp, Glycine max
cccttcccagaatctgcaacctaaattaatttcctcttccgtaacgttcccattgccgacccatggaaacaatgcgtgcgtcagatactggaaattcctcattttgctctcagtcttgcggttcttggccgagtgtaattgttcctgaaatggacaaaacagatgatggcgaggacagacaggataaagggtgtaagaacaagagaaaattaactcatccttctatactgcctgctagttttccatcatctctgattgagttccctcggtatcaattaccggttccacaaagtggcttaaacggatttagtccatctgagttgtgggcagagttgtttagagaagacgaacctgaactttatatgcatgagcttgtggattggaatgatcctattgcaagccagcttgaggaactact

SEQ ID NO: 28423 - DNA, 614 bp, Glycine max
gctttttaattaattgggtactaggaaaaatatgcctgagatggtggatagtaatagcacaccctctagttccacaggttcaagaactgtccttctccttttgagggtcttaacctttgtgttccttctcattgcactcattctcattgcgatagtcaagcaaactgatgatgagacaggtgtggaaatcaagttcaatgatatctatgcttatcgatatatgatctctacaataataattgggtttgcgtataacctgctgcaaatggcgctctcaatcttcactgtggtctcaggaaaccgtgtattaagcggtgatggtggctatctatttgatttcttcggtgacaagatcatatcataccttttgatttccggttcagctgctggatttggtgtgaccgtagagctgggtagaggtgtaccctcaaactcgtttatggacaaggcaaatgcttcagccagccttctactgattgcatttttgttcactgccgtagcatcaactttcacttcctttgctttgccaaagaaagattaaaaataatcagctagcttaattgatgcagaaatgatgttcaaggattataaatttataggagtaattctttctt

SEQ ID NO: 28424 - DNA, 503 bp, Glycine max
ggcaagcatttgaacaagctgatttggctagctatctcagtcacatgtaattctaccaaattggactgttgttttgcaccctgacaaaacttgttcggtacagcaagagtggctagttaatatgtggctaaatgtaaccttaaatcttactgataaagatatggcagagtagatgaaatgaagtttcgccaatatgcgcacatgtttatggccaagtggagtctcctgtgaacattttcaagcaaatgcttacatcatcagcagctgtagtgaactccaatcaaaagttggattaaaccgcatccatctcctgcactgttgaatgttttaatagtaactgcttagaccaaaggcgttcccaagtgggccaataattgtaaaattttagtctccaccaagatttgccattagcaaggatgctttccaactctcccccttttttttccatcattgcctgtaaatccctacctactctgaaataaaagctggattatttatcccgt

SEQ ID NO: 28425 - DNA, 303 bp, Glycine max
tcacctcatcatctatctttctttctttctttcctatcctcttccttgtagtgtacccattttgaatgtgttctctctctctctctctttctttgggtccctggtgaatatctagaaccactctctagctagtttctctcttcttgctagctagctatcgatcatcgatcactctcttggtttaaaccacctgaatgccggaaaacatgagcatatcagtgaatggtcaatctcaagtccctcctggcttcaggtttcatccaactgaagaagagcttcttctctacttgagaaaagtctctt

SEQ ID NO: 28426 - DNA, 285 bp, Glycine max
gcgttttgttgttgcgtacgtcgtcgtttagtaataccaacgcggctttctttttgccctgatcatgacattaattatattgagggctttgctatggcttattttattagtctgcaacttctgactgtggttgccataactcctaacttactaacacaaatacttaaaacattctaatgctgccattttgctgtacctagatcataatatttggaaaatggcaagatcatatgtttctcactcctttcgaatttaaataaaacactcctgaatctatacataaaa

SEQ ID NO: 28427 - DNA, 288 bp, Glycine max
ggcgtcctcacactgtctctccctcactcgctccgacttctacttcttgttaatcccaaatcattgcatccccttcgctgacgcgaatgcgaccaagatgccgagaatggagggcattctgaaccttcctgtgcaagaccctctttgtcccgagttttctgctgctcacataaattgggtcaaattggaaggtggtcgccaaggtggtgatgatattgctctcattcctttttgccagagttgatgattttgtcacaggggaatctcacccgaatgcctgcgagtttc

SEQ ID NO: 28428 - DNA, 669 bp, Glycine max
caccgaccatcatctctctctgtttttatccctattatcttctcttcccattttttggtcaacctttggtcgttggtttttttctctctttccattccatgtcttcctttctctggttcaaatgacttagagacccttaagcactctagaatatatggcaaactagccatcttcttcagttctctgtttctttctctccttttttttgcagcgttttgaagcctcttccaagtgtctcttactcaagatttccctctggttcattctctcaagctgctgttgagttcatcttccctcttaactcaaagggtaacataacaccctgtatgtaatatttattcttcttttgctcttcacgtctttcccatgttagttaagtgctaaaagttcaaacttttttgttctcatgcctcagtttatttgatgggccatccccagatgaaaaatcatctcagtttttgcttctgggaatctgagttttgttgcttgacttgcaagtgactttggtcttgtggtaggggaaacagtgacctttctcaattttgcttatttaatttgagcttagtttgtttagttatagattatgttagctagcttttcagtttagatgggtacttaaaggggtttaatttcttcttttgcttctaaatttgcaacaggcttgctcaa

SEQ ID NO: 28429 - DNA, 487 bp, Glycine max
ttttctcatcctatgagaattctattattaatcatgaatggcaaaatttgagtggatggagcttaggggagccaagttctagtaatacaccgaatgagatcaacaataatgagcaaaaaagagaacttggatggtcatcaaccattactgctggtgcattggctggtccaagactagaagaaaggcgccttgaaccaaccaatgctctttcactagacaatgtcaatacaggtcctatctacatgtgtagccccaattctcatttgatgtcccagaatctcaacttaaatgcaggtttagcggacagtggcagtgatgatagtcaacatctggagctccctaacttaaacaagtctagtgggtcagcaaacgagtgtataccacctaatgttggatctggttcttttctgcttccttctggaaataatgccttcctggtagaagatactgatggtaggccaggctgttctcatgatactcgacgtgt

SEQ ID NO: 28430 - DNA, 461 bp, Glycine max
agttgaggttgaagtgtgaagaagacgaaggattattggcggtgaggaagaatgagtcagccgacacagcagcgcctctatgatttcgccaaaatggctctcatcaacatcttcgctcacccctacgccacggtgtgcgacttgtactgtggggatgccgacgctgataaatgggcccacgctcaaattggccactacattggaattgatgcgccttcgtctgggatagaccaaatgcgagaaacttgggagactcacaggaaatcctacactgccgagttctttgagcttgacccttgcacggagaatatagaaacgcatttggaggagaagaccaacatgactgatgttgtctgctgtttgcagcatttgcagttgtgttttgagactgaagagaaagcacggaaactgctgcataatgtgtcttctctgctgaaacctgggggttattttcttggtat

SEQ ID NO: 28431 - DNA, 281 bp, Glycine max
ctagctccaataaacttctctattctacatttcaaccggtgaattaagctccttctatttcaaagtgctgaaggagaacacttaatttctctccgtttcttcattttcttagaggggatataattaattaccaatggctctctcacacagaaggatcctcttcacggtttttcagattcttttgttcaccctcatcatttttgttgcttctccggaatctggggtagcttgcaggccattgttcttgcattatcaatggtcatgggattatgggcttctca

SEQ ID NO: 28432 - DNA, 882 bp, Glycine max
ggcaaagtcaacagtgaagaggtgtgacagagagacaaaagaaaagatgtcagggcctcaatgctgttcaaatccaccaagcttgaaccccggtggaggagttgggcatgtggacaaagtgggtggtgttgattcctatttcactggatctcctcactccaaactcgctgttcttatgctctccgatgtttttggatatgaagcgccaaatttaaggaagcttgctgacaaagttggggctgctgggtattatgtagttgttcctgacctcttggatggcgaaccctttaatcctcagaattcggacaggccctttcctgcttggataaaagatcatggaccagtggagaaaggtgctgaagctacaaaacccataattgaagccttaaaaagtaaaggtgtttcagctattgcagctgttggtttttgttggggtgcaaaggttgtggttgaacttgcgaaatccagactgatccaaactgcagtgctattgcatccatcatttgtctccctggatgacatcaagggtgttgatattccaattgctatacttggagccgaggtagaccaagtttctcctccagagcttgtgaaacaatttgaacaagtcctagctgctaaatctggggttgccagttttgttaaaatatttcccaaagtttcacacggttgggctgtgagatataacactgaagatgcagaaaccgtaaaggtggcagaagaggcccaccaggacttgctggactggcttgctaaacatcataagtgagacatcttgctctgttaagactgtacaatggagtacttgagtgaaggatgtaatgtaaaatggtactcaatcaacgtagctgtagtttgcaagaaaataaatgttgtattgtt

SEQ ID NO: 28433 - DNA, 204 bp, Glycine max
ttcggctcgagtccaaaatccaatagagaatggacagcacaccaattcaactctgatcgatgtgaaaattatgaaccagaggtctcatatcctctatgaacagttaaaaggctttgttcaaagaatggacatgaatgtggtgaagaaggatctaccacccaaaactgtcttcgtgataactgtccagctatctcgcttacagag

SEQ ID NO: 28434 - DNA, 692 bp, Glycine max
  unsure (1)..(692): unsure at all n locations
attgtggtgtgtgctgttactgtagctgcaaaccatatagctccgattgaatcactctgagttcaatcttcctgtttcatgtggtttagcttagcgcatgaccttaggtgggagataagtctgctagattcatctttcgtattaaggaattttctttgaaggctgtgatcttatggagcctgacaggttaaattccccaaccacatttgagatgccattggaggttatgggccatgagttacagttttctcaggatcccaattccaagcacttagggactacagtatgggatgcatcacttgtgtttgccaagtttcttgaacggaattgcagaaagggaaggttttccccagctaaacttaaaggaaaacgtgtaattgaactaggagctggctgtggtgtttctggtattggcatggctttgttggggtgtgatgttattgtgacagaccaaaaggaggttttgccattgttacagagaaatgttgagcgtaatatttcacggatcacgcaaaagaatcctgagtcatttggttcgatcaaggtggctgagcttcagtggggagatgagagtcatattaaggcagttggtcctccatttgactacatcattggcactgatgttgtntatgtagagcatctattggagcctctattacagacaattcttgctttatctggacccaggacta

SEQ ID NO: 28435 - DNA, 310 bp, Glycine max
ctttctcttcctcttcctctctctctctgtctgtctttgtcgtacctttccttcatcctcagggcgttttgtctcattttgttattcaagaatcaattaaaaaaaatgactcgcggtaaccagagggaacgagatcgtgaaagggctcaggcaagagctggtggaaagacacagcagcctaagaatgatgggttgacccctgaacagcgaagggaaagggatgcaaaagcattgcaggagaaaacggcaaagaaagcagctcaggctgcaggagggaataatgcaggtggtggaggcaaaaattaggcaa

SEQ ID NO: 28436 - DNA, 242 bp, Glycine max
tcgagcggctcgagattttttcattcatttgtgttatccttacgttaaatttctatctcctatggtaacaatactgcttaccatttatgtactactatgattggttatgaaaacagattaacctgttcctgacaaattgcaggttgctcttatcaagttgaatccgctattacactttggactttgcaatggtacaaagtccagcccaaacgttaggttcttcacaccacatagagttgtag

SEQ ID NO: 28437 - DNA, 525 bp, Glycine max
cctgaggaggacattgatgaaacaaccaccctcaaggaccttgatctcaactttgtatttcgtgtacaaagaaattggttccacgaactcatcatgcaaattgagcgggactgtgagttcttggaagctgagaaaattatggattacagtcttttggttggcattcattttcgtgatgatattacgtgtgacaaaatgggattgtcaccttttcttttacgcactggcaatcgggatacttatcagaatgaaaagttgatgcgtggttatcgctttcttgaagcagagctacaggatagagatcgagttaaatctggaaggaaatcattaatcaggctaggagccaatatgcctgcaagagcagagcgagtggcccggaggagtgattttgatcaatacactactgctggaatcagccatttgaccccttatcgcagtggggagacttacgatgtcattctatactttgggattattgacattttgcaagattatgatatcagcaaaaagcttgagcatgcttac

SEQ ID NO: 28438 - DNA, 287 bp, Glycine max
tcggctcgatgtccaattccttcctatggtgcaggttcccacgttcttcttttcccgttcatgtccagaggtcacaccgtaccccttatccacttggcccaaatcctcctccgtcgttccatatcggtcaccgtcgtcacaacccctgccaaccactcattcatggccgaatctctaaacgtgcaccgtcgcctccatcgtcacgcttccattccccaccgcaacgaatatccccgccggagtggagaccacaggcaaagcttccctcatgggcttgctcagttcta

SEQ ID NO: 28439 - DNA, 582 bp, Glycine max
gagctgcttggtgcagacaaatttgttgtttcatctaatcaagaggaaatgacggcattggctaaatcgttggactttataatcgacacagcatctggtgatcacccgtttgatccttacatgtcactgttgaagacatatggtgtttttgtcctagttggtttccctagtcaagtcaaatttatccctgcaagccttaatataggatcaaagactgttgccggaagtgttacaggtggtacaaaagatatacaggagatgattggcttctgtgctgcaaacgagattcacccaaatatagaggtgattccaatcgagtacgccaatgaagctcttgagaggctcataaatagggacgtcaagtaccggtttgtaatagatgttgagaattccctgaaagaaaaatgagttgttgcctccccaattggacattattggacttcaccttgttcgataaataatgatggtcggagttcgtaatttacttacatagagttgatttgaattttctttaattattttgtgaactaatattatgtgattataagaatattttggatttttaaataataataattatgg

SEQ ID NO: 28440 - DNA, 413 bp, Glycine max
cccaagtcaagtcaaattcagccctgcaagccttaatataggatcaaagactgtagccggaagtgttacaggtggtacaaaagatattcaggagatgattgacttctgtgctgcaaacgagattcacccaaatatagaggtaattccaatcgagtatgccaatgaagctcttgagaggctcatcaatagggacgtcaagtaccggtttgtgatagatattgagaactccctgaaagaaaaataagttgtacttgttgcctcctaaattgggcatgattggacttcaccctggttcgaattaccaagatgttcatagttcataattacttacatagaggtgatttcaatggagtatgcgatgtaaatgttgaattttccttaattattttgggaactaatattatttgactatt

SEQ ID NO: 28441 - DNA, 508 bp, Glycine max
cttcataatacaagtcctcaaacttgcaccaccatgtccatagcaggccttatagacccagaaatgaatcacaacaagtccttccaccggcgaaacgactctggcgagctcgatgtgtttgaggcagcaaggtactttttcaggatacagtgaagttgttggctacactagtggctccaccacctacactcagaagatcatgagagaagaaaggcaccatcatggacaaagagctgccagaatcagcttagacatgccaatgagaagcttgctcccccaacaattccatggcatggagaagcaaatcatcatgaaggagaagaagaacaagcagcctagctctccaggtggaaggcttgcaagcttcttgaactctctcttcagccaatcagcatcaaagaagaagaagtcaaagtcaggctcacaatccatgaaagatgaagatgagagccctggtggaaggagaaggagaagaagcagcattagccatttcagaagctcaagcacc

SEQ ID NO: 28442 - DNA, 513 bp, Glycine max
ccaagttttaattcttcttctcttactcctcccaccttcaagtctctaataattggttgtattatatccctaacaaatgggttcctccaagttattgggtattatggccatgcttttcatagtgcttctacccatggctgccaaaggggataatattactgatttctttgataaggtttgtgaagaagtggaatgtggtaagggaagctgcgtagtaaacacaagttacccattaaacttcgtttgtgaatgcgattctggctggaagcgaacccaagatgacgatgatgaatatgccactagctttcttccatgtgtcattcccgaatgtagcttgaactatggttgtcagccagcaccaccgccagttccagagaagagttttccacataacttctcagcttttgatccttgctattgggcgtactgtggggaaggtacatgcaccaagaacagaacacatacacacagatgcgaatgccaacccaattactataatcttctcaacatctc

SEQ ID NO: 28443 - DNA, 254 bp, Glycine max
gatagttgacaaatgaagattataagccagcaatagcatcaactgtgatctgctgtccaaaatcctgcgttatatatgcagcaaacggcaaagtttctttaattcttcatatatatttattttcacaatccgatcaaagcaagaccaacatatatattcattcatcttcacgtacatatccctcgttagttttcagataatatggagcaggagagtgagacaaacattgtgctgacgaagccattctctttagg

SEQ ID NO: 28444 - DNA, 236 bp, Glycine max
atcaactggcaacttggacaattaatgctgtggtggcaaatgatttatatacagatgatagctttgaggtgaatacaaaaggagcgcgataagaatataaatggacaaagcacaaatgctcttttcaattcaaagaattgttgtgtcaagtttattgttatactctgaatggaggaagtcaccattcagatcaaacaaacttgatcagttgaggcagcattcacaattttttcact

SEQ ID NO: 28445 - DNA, 390 bp, Glycine max
ccctcgcgtccgcatagaccccacgcacacactgttctgttcattcgtgtcggctcgcatttcaagctttagcgccaatattcagcttccgttcattccacgcatttctcgttcgtccgattcgtcgttctgcattccatttccttttaaattttacattttcaaattctttctgcagcttaaaatttaaagaatttgaaaagctcactcagttctcgctcgcgattttctcactctctcgtccgacgctcgcaatactcgctacgaccctcgctctactctctctgtctcacgcgcagtggtgcagagcgtctctcatctctgcgatttagttatttcaagacatgtatggttaatattggacagctgaaatgagatgcaatgcatgct

SEQ ID NO: 28446 - DNA, 494 bp, Glycine max
ttagattggtgaccaaattgttgaatgaatggggttggtgttagaagcagttttccatgtgggttttgattttcatttgttagcgcgctcttttgtttctcttggcgatataggtaaactgtgaactcagttggttataacttgctaacaggcagaaagttgttgaagtccctcaattgtgcttccctgcatcctttcccaaagtctctgtctggtgcaatggtttatataactgagtgggacaagtttgtggagcaatccattgagctgttccgtgcagatcctgattctacacggtacgtcatgaagtacaggcactgtgatggaaagttggtactcaaggtcactgataaccaacagtgtctaaagtataagacagaccaagcacaagaggctaagaaaatggagaaactgaataatatgttctttgctttgatggctcgtggtcctgatgttgatctatcagaagtcactggaaaagagcaaatggatgc

SEQ ID NO: 28447 - DNA, 276 bp, Glycine max
gtcatttgaccatatgataatcgagataaaacaaatggatgatggatatgtttggtgttggggctacaatatatatggtcaacttggtatacatggagaggaatttcatggcagaaaatacaccgatggagattattctatagtgccctgcttattgaataagtttcttgactggcacccccctgtttcttcatcaatatcaattgtcccagacacaggacgcctctcaccactaaagatgattgatgtcaaagcaggaggaatgatgtctctgtg

SEQ ID NO: 28448 - DNA, 271 bp, Glycine max
gtctgtagatgtgtcatctgacgttgtagtatttgatccatttgatgctgtccctgttgccggaaacgaaatggatttgattcctaaccctaatgctaaccccaagcaacctgcgttctgcctacaatggccatggaatgatgcaaaccatatctctaactctaaccctagtccctgcaattttgagggtccatggctattcaagtcactccaaaacgttggcttaatcgctttcaattttgcgagctctttttcgagtcggaagaagaaa

SEQ ID NO: 28449 - DNA, 309 bp, Glycine max
ctaatacaaaatgactagaatctgatcgagaaaaattggcaagctcaaatggaaaatttgtgcaatacttgaacaaaatcttggatgtatatttctcttaccatcgggaggcatacaatgtcaaaggggtttaccttcatgacccaactgtggttcttgcagctgttgatccttcacttgtaacttgcatagagggtattgtcagagtccaaacgagtggcattacaaggggaatcacaatactctacaacttgcaaaaaaggtttgctgaaatcaatgaatggtccaataagccaaccgtaaaggtag

SEQ ID NO: 28450 - DNA, 772 bp, Glycine max
  unsure (1)..(772): unsure at all n locations
caaactgcctctccgaagattgccccaggagagaatactacaagatctacatctgcatctccagggtctacgaaatcagtgccttcacctgcacccgcaaccgcaaacttgaaagatggacagccccatgctgcagctgttagtggttcctctgatcttcctgtggcaaatgcaagggatgagaacagtagcagttctagtccatctcacaacagtcaatcttattccagtgatcatgtgaaagctgggggtctctcaggaaaggaggatgccaggagctctactgcaatgagcgtgaataaggtatcgggaggctcttcacggcaccgaaaatctatgaagggatttccgggttcaactccatccggagggcaaagggaaactggatcaagtaggaattcctccttgcacaaaaatttaacttcagagaaaatatctcaacctggattaatggataaggcacttgatggaacttctcttgaaggagttacttgcaagttgattgttaaaattccaagccaaggtagaagccctgctcaaagtgctagtgcaggttcttttgatgatcctacaatcatgaatagtcgagcctcatctcctgttcttccagagaagcacgatcagtttgatcactgctcaaaggaaaagagtgacctttatcgagccaatattggctcagatattaatactgaatcttggcagagtaatgattntaaagatgtattgactggctctgatgaggctgatggatcacctgctgcagttactgatg

SEQ ID NO: 28451 - DNA, 485 bp, Glycine max
cccacgcgttcttgtcaatcttattccagtgatcatgtgaaagctgggggtctctcaggaaaggaggatgccaggagctctactgcaatgagtgtgaataaggtatcgggaggctcttcacggcaccgaaaatctatgaagggatttccgggttcaactccatctagaaggcaaagggaaactgggtcgaggcagaattcctcacacaaaaagtcactttctgagagaatatctcaatctggattaagggaaaaagcaaatgatggaactactcttgaggggcatactccgaagctgattgttaagatccaaaaccgaagtcgaagtcctgcacaaagtgccactgcaggttcttctgatgatcctgcaatcatgaacagtcgagcttcatctcctgctctttcagagaaccacgatcagtttgaccgctgctcaaaggaaaagagtgatttttatcgagctaatattggtgcagacatttatac

SEQ ID NO: 28452 - DNA, 456 bp, Glycine max
gggtacaacaggaaataatcctaattatggaactacaagaaatcctcatgcacctgacaggtatactggtggatcttcttcaggtccggctgcaattgtggcttctggactatgttctgctgcattgggaactgatggtggaggttcagtccgtattccttcttccctttgtggtgtggtgggatttaagacaacttacgggcggacaagcatggaggggtcattatgtgattctgggactgtggaaattattggacccattgcttcaacggtggaggatgtcttgctagtgtattctgcaatgttgggtgcatcacctgcaaatagaatcagtttgaaaccgtcaccaccttgtttgccaagtctgtcatccaacgataattcaaatgccttgggatctttaagaattggaaagtacaccccgtggtttaatgatgtgcattcaactgaaatctc

SEQ ID NO: 28453 - DNA, 435 bp, Glycine max
cggctcgaggaggggggattttttctctctatttgaaggctgcggagtgtggtagagttatcaactctcacgctcacgcggacaaactcagtttgatcatctccatcaacatttttccagattcactctccaacaaataaaaaaaaatatccctttaccctattttctcgaatcttgtttgctatctcctgagtccggttaaatccgtgcctcttttaattcctccgtcgacaaggcaacttcccaacttcaatctcacacttatccatcacaccccatgtgacaactttctgtctctctttgagctttttcttcaaacacacaacaacaactttctggaattagttagctagttctactcccaaaaagggcttcatttattagtattttggtcggttctatatccttccttttcttattttgtcttctttccat

SEQ ID NO: 28454 - DNA, 678 bp, Glycine max
  unsure (1)..(678): unsure at all n locations
ttaccaggnttggcttatggaggcattggtccagggcataatgatggaaatcacatggttaatgtgggtggatctgttaatcctaacattactatcccgagaaatatatctgataatggttcatcaaacttcagaatgagatcttctcctaggcttagccctgtctttttgggaaatggcccttttccaggactgccacctaccactttggagggtttggctgaccgtgctcggagtagatggatagagaacaatgggagccaagttgatagcaagaaacaatttcagctcaacttggataagattaaaagtggtgaagatacaaggactacattaatgataaagaatatcccgaacaaatacacctctaaaatgttattagctgccattgatgaaaatcacaggggtacttatgattntctctacttgccaattgactttaagaataaatgcaatgtgggctatgcatttatcaacatgctgtctccctctcttattattccattcttcgagacattcaatgggaagaaatgggagaaatttaatagtgaaaaagttgcttctttgccatatgctagaattaacgaaaagtctgccctcgtgagccattttcaaaattcaagtctgatgaatgaagataagcgatgtcgncctattctcttccactccgaagggtct

SEQ ID NO: 28455 - DNA, 357 bp, Glycine max
ctttagctccaggctgcccagaaaagcagaaagtttctccttcctgttggaatatctttcaattttgtttaatagctgatatatgctgccagtattcagaaataatgcttaaaaggcaagtctaagcagcatgcatcagatggcttgggggagtatcgtattgttccgtgtattctgctcaagagccttgagtcaagtggtattaagttattttaggagctgattgatcacaggatcgaaactgagtccaatttagctttacctatacttcagtctgcctatgtaatctgtatacctcatttgtaacaaaaatagaacaacattgttgtgcagcttgtgctagcatacttttcctga

SEQ ID NO: 28456 - DNA, 281 bp, Glycine max
atcagcttctccacaaggatgggcaagtttacaaaatacaaagaggtgataagggagactccatgaaggtgtcatatttataccagctagaaagattgaatgggggagctgttgtgggagagattagcagaaggttctctacaaatgagaacacattgacagttggatgtttatatgtggttgattctcagacagctttgaaggcaaagctgaacaatcacggcaaccttggggccttattgcagcatgagctaacacgtaagtcattcttgacaaccccg

SEQ ID NO: 28457 - DNA, 300 bp, Glycine max
tttccattttacacaacacaacccacactcctgtctcttcaatcgtttgagtttgagtttgaatttgatttggacgaggttggaggtttgcaatttccttcggttgtgacctgtgaatccgattgtattctgaattagggtttaagctttacacacagagatgggtagcccctcgaagaagaacgaaagtaaggggtttttcgccgccgtgtcttccatgttcaccagcgctgtcaaccgatcggtcaacgggcttagtgtagaagtcataaatccagatggaggtaaagaagattcgga

SEQ ID NO: 28458 - DNA, 269 bp, Glycine max
caacgacggaggcgcaaccaagggataccaggattttggtaagaaggtggcgcgtatcgtggtgatcgccaatttaccaggagatcctgaaaccgacatcgagtacttgctgctcgacgaacttggtgcgggcatgcaagcgcagggaatcaatgtcaacgcggtagtaagttacttccgcaagccgaaaggattccagtgctcctttttcgctgtttggggcaatcgaacttcggacggatccttgtggaccatgagaaccggattgg

SEQ ID NO: 28459 - DNA, 272 bp, Glycine max
agcatttggtaataactgcaagagacaggggattgcttgccatcatccaaagttgattgttttgcaaagaaaagatagtattcaaattgttattacatcggctaatttggtggaaaagcaggtgttctatgaaccaaacttctagttatcaccatccggtttgggaggccacttcactcggttaagttaacttatatgataccttcagtcagtataaaaacattgtaactcccttagcattatacttgtaaaatggttatctgtaagacatc

SEQ ID NO: 28460 - DNA, 401 bp, Glycine max
gtcaaaagcaagtgaactcactaaacttttgagtcatcctcaatcttttcaatcaatcagcattgagatatttgctaaaaaggttgttgcatactgtgcaaaccccgctaatgtgccctttgcaaatgcctatgtcattgttcttgttacatctcaggtcccacatgctatggatattttactagctgagcttcacagggcttgcatatatactgtcccaaagcacctggtttacaagaagtctgcctatcaatcaaaagaggcatacttcagaagtattggctatcgagaagatgatgaaaagatggagagtacggaagattatttaaagcggttagaatcatacatgaagatgtatggtgcactggttcagactgaaattacaaactgtcaaaattttc

SEQ ID NO: 28461 - DNA, 277 bp, Glycine max
aaatattcatttcagtgaagctgaatgctataagatcgataacaagaacaacaaagtttattgccgtgctagtaaagacaaaaagttgggtggccaagaagacttttccattgattatgattacctggtaatagctatgggaggccgttctaataccttcaacacacctggtgttccagagcatgcccatttcttgaaggaagtggatgaagctctaaaaattcgtcattcagtggttgacctttttgaaagagctagcctccttctttaccagtgg

SEQ ID NO: 28462 - DNA, 363 bp, Glycine max
tttctctctctacatctctttctctctctagaaaaaaaaaagtttccttctccttaacgattttctctgactcagcgactatattccaagttcttgccgtgcaccactgattcactgcaccttcggtcggagttatatctgttgtcgctatgtatgacgatggagatatttgattgaagttattcaccaaaatttgcataaggggaaaactaaggctaggtttgggctaatgggggcctcaagctccaaaatggatgatgatgataaggcactccagctgtgccgtgaaaggaagaaatttgttaagcaagcacttgatgggcgttgctcttttgcagcttctcatgtttcatatgtccagtc

SEQ ID NO: 28463 - DNA, 511 bp, Glycine max
tgcaacttcaaatgtcagggcaggaaagaataatggtcgggcaccttcagctccggttaaaaaggctgaaaccttttggactatctgtaataggtgcaggacacattatgaatatctcagggtttatttgaatcacacccttttatgtccaaactgtaatgaagcttttgtcgccgtagagaggggtccaccaccaaatgtttttaagccaccaaattggtcttctcatcaacggcatcagaattctcaacaccatgctggaagtaataatacaaattttcagtggggttctcactctagaatggctggttttggtagcacagatggatcaacatctgttgcagctcaagctgcaagtgttgtgcagcaggcaagtgagaaagtaaggagggagggttcttttcacaaacctatgaaaaaaaggaagacagatgatattcgcattaatggttatcaaggatacatggcaaatcatatggctacaagagatggagcggctggtttgggcacc

SEQ ID NO: 28464 - DNA, 239 bp, Glycine max
ccatattattactattaatattttttggggttgtttttatgcccatgatcttaaaggcccagttagtaacaggccgtttctatggtatcacgaaatgtttatggattttgttgggctgggcctggctgggatggaccgagccttgtctggcccaatctatcaactgaattcatgctcacttctgatgagttgcggacttgttaacacaaacaggcccattgagcattaccacgctaggc

SEQ ID NO: 28465 - DNA, 1142 bp, Glycine max
ggattatgcacagggtaatcgtcaggttaatgattctggccatgttgaaaccgtttatcaagcacatggccatgctaattttgtgaagcctgtatcagctggaaatgacaatgggaaagacgcaggacagcgtccgaagctgaatttgaagcctcggtctcagcccactgaaaagctggatggaaacagtgaaagagacaggaatgttttatttggtggagctcgcccacgtgaactagtattgaaggagcgagggattgatgatgtttcaatcaatgtggtggagcattcaaacagggttgaaaacaatattttgtgggttcagaaacatcctgaccattcaacccagactcgatatggtgaaaagaccgaggatgctcatcttgatcaaaagacaggcagaaaacctgaaaggaaggagcaaagggcagatggtgatagggctcatgcgcagaggagaaattggcggggtgatactcggagaaatgggaaggagaccgataggcagccgcatgccccggagaggcaaccttcacctgagacatggcgtaagcctgtggagcagcagctaaaatcagctccaggtgctgctagcacacggtacagtagagcagcttcggcggttgaacttgcacaagcattctccagatctgtatcagatccaaaagtgaatgataggttttcaggtcaaaggggtctgaacactggcaacagcagcaggacacaagttccattttcacggcttgttggtcctacatcaaggcctcagatcaatggttattaaaatatttggtggataattggactcactcaagaccaatttctatgagatagcattggattcatgcaatgtggaattgcagagcacttcatgtagtggctgtggttttagttattttctcctcattcacaacaattgagtgagaaattaatgatttctcaagttacatagccttggttgtgacaataccttcttacaattaccatgctttattttgtttttatttattgccccatatcatttgctgccaaaacactaatttttttttctttctttgtggtggagctgaaaaggctgttacctaatgaaaacattgtagcatgattaaccccataaaattgttcgttttagtttcatcaac

SEQ ID NO: 28466 - DNA, 273 bp, Glycine max
atttctctatgctaaatcaagttcagtccatgaaaaatatggagcttgatcctagtaatcgagatgtcaagaggttcaaggtttctgataatgtgatggacaaacaactggtagattccatttccaaccgtggacaacagtcatatggatacaataacatagtcaaagatgtgtcagataatagttcttcagtgccaccatcagatccgaacttgctaaggttttcaacaaagccaggtgatgcacgagacactagtgcatctctcaggaggt

SEQ ID NO: 28467 - DNA, 445 bp, Glycine max
aagaaatgaaagtcagatagaaaccctaaagatcgaagaattgattaatttacctgctggtagagagaggagcgagggttgaggtcctggctgaggagcgtggccatggaaatgtgcgggacttctagaagcttcgagagtctctgagcgaactggtgcctcttggcgccgggctcccctatcatcacccactgcactccgttctccggcgcgcaaccctgcgcgtccagtgcgccacgtggcgcgcgctcctcttccatctcctcctcgtcgtcgtagtcgtcgtcgtcgtagtagcactggaccgcagccgccgatccgaacccgcggttgggccggagcccgagagcggcagtcctcagtcgcgcgatcgcggccatggcgacggcggcggcgtttgtttggttgctgaggttttgggcgagtgggaaatgggaatgctgcg

SEQ ID NO: 28468 - DNA, 429 bp, Glycine max
tcattcaaaaggcccaagcatagcaccgagccaaaggtttccaaagttcttacacggacagatgcatctgatactggcttatatgtgagggacggatatcagtggagaaaatacggtcagaaagtcactagagataacccttctcctagggcttacttcaagtgttcatatgcccctagctgtccagtaaaaaagaaggtgcaaagaagtgtagaagatccaagtgtgttggtaacaacttacgaaggggagcacaaccatgggcaacaacatcaaactgcagaaatatcaattaattcatcaagcaaaagtgaaacacctaggcctgcagtttcaccctcagccatgaatattcggagtagtgcagcagcaggtacaattgtaacacttgacttggtcaagtcaaaagttgtgacattaatgcgcaaa

SEQ ID NO: 28469 - DNA, 265 bp, Glycine max
ctcatctaacgttaaagtgacaacacatgttgtttctctcattcgttgctgaattctccttcatcttcttcactgcaatttgcagccactaacagataaacaatcattctcaaaccccttcacaggtgtgccttcattaaatgttttgctcttgggaagttgaaagctaaccaggtgctgctttattccttgacagttctagaagatttctaaggagttcatcttcaatattctccagtgtcctttacaaaaccagggaatgctg

SEQ ID NO: 28470 - DNA, 276 bp, Glycine max
tctcgagaggaacgggaagagaataatatgaagagccatgtctcagaaagggttcagccttttgccaagtgcctccagagttgagatcacctcggaataaaacttggagaattattacaattttcaaggtgacaaaagtgcatgtcagatttttttatccttataaaatcgaagacaagtatggtaatttacaacagtccacgcatcctgctcaatcaagacctcctggtaaaggagatgtcatagattaaagctacacacatgctcaacaaagtt

SEQ ID NO: 28471 - DNA, 312 bp, Glycine max
gaggaacagtgtctacttctccaaagttcgtttctatggtaagcgttgcatttcattctctcttgatgactatagatactatccccgtaaacagtgtcctgactggggagaaccagacccttttgagaacatctggattgagccaccaaaggacttttctgcttgcatgtgaagaattttagtgaagcaacattttttattcatcgtcaagtcctaaaccctaatgcagtacatgtgaatatttggaaacattgctatgtttgcagtctgcatataggaggctaatatatgcagaaatggaagttacttgta

SEQ ID NO: 28472 - DNA, 302 bp, Glycine max
cggctcgagaaaaaataaattattttgaaaccctaggttggagatggtggtgggaggaacagcagatttcttctacaaagaagctcaacggttagggtatgtggctcgctccgccttcaagctccttcagatacagaaccagcacaagattatcagccctggctcctccattctcgacctcggctgcgcccccggcgggtgagctccaggtggcttgccagagcttgggtcccttccgcggcggcggctccgtcctcggcgtcgacacaaagaaggtcaaggtacccctctccactgcgatt

SEQ ID NO: 28473 - DNA, 547 bp, Glycine max
ggaacatgatcttaaaggactaatggagggaatgaagcagccctttagccagagtgaagtaaagtgcttaatgctccagcttttagaaggtgtgaagtatcttcatgacaactgggtgcttcatagggatttgaagacttctaacctgcttctgaataataggggcgagttaaaaatttgtgattttggattggctcgtcagtatgggagcccattgaaaccatatacccaccttgtggttactctttggtacagggctcctgaacttcttctggggacaaaacagtattcaacagccattgacatgtggtctctgggttgtataatggctgagctattgtccaaggaaccactgtttaatgggaggactgagtttgatcaacttgacaagattttccggattcttggcacaccaaatgaaacaatttggcctgtgttctccaaattacctggagtcaaggtcaattttgtcaaacaccagtacaatctcctgcgtaaaaagtttcctgccacatcattcactggatctcctgttctttctgattct

SEQ ID NO: 28474 - DNA, 275 bp, Glycine max
gcttcattaccaaagtcaactcgagtatactgtggccatgagtactcagtgaacaacttgcaatttgctctgacacttgagccagacaatttgaggatacaacaaaaattaacctgggctcggaatcaacgacaagctggccaagcaacaattccctcaaccattgaggatgagttggagaccaatccctttatgagggttgatctacctgagatccaggagagggtgggctgcaagtcacctgttgaagcattaggagagataagaagcagaaa

SEQ ID NO: 28475 - DNA, 609 bp, Glycine max
ctgtcgcgtgggcggacgcgtgggtgggtaccacagaatgagtttctcaatctgaaatattttttcaactagggacagccataaagcaagccaaacagactaatcactcatgtttcttcattgagaaggagaaaagaaagagaaagagacaccccatgaaagataaaataaaaagttgcaaagaggatcatatctgagaaaaagactggaccctctcttgtgccaacttacaacatagattagatattactttgacaagaaagccttgatctttctcccctctatgaccttctcaatatagacttgtatttatccctaaaacacacatagagcttcagggaagatgataatggtctaaaaataaaagctttgcatggcgagccacagaataggagaacttggtttgtctgagtcaggaccttcaagtcaccacatcccttatggagtgcttcacggaattaacactcctgcatcaagcttaatcaatcaaggatctgcttttgattttggggagctggaggaagcaattgttctgcatggagttaagggtagaaatgatgagggcaaagcatctttattcacagccagacctgcagctacactggaaat

SEQ ID NO: 28476 - DNA, 296 bp, Glycine max
cccaaacgcatgagtggaggtgggaaagcgctgtgttgggttgttgctttattttcttcctcctcgtcacaagatacttcatcaaacgacagccaaagttcttctgggtgtcagcaatggcaccactgacgtccgttatattgggaagtctgctggtctatgtcacacacgctgagaaacatggagttcaagtgataggaaatttgaagaaggggctgaatccaccttcggcaacggatttggtgtttgtgtcaccttacatgggcactgccataaaaactggattcgtcactggc

SEQ ID NO: 28477 - DNA, 719 bp, Glycine max
  unsure (1)..(719): unsure at all n locations
ggagctggagagaccctgaaacagattctcccaaaatatccttcaatgaaaggaattaattttgatttgcctctggtgattcaaaaagcaccacctcacccaggtatagagcaaattgcaggagatatgtttgaaagtgttccaactggtgatgccattttagtgaagtttgtatgtcacaattgggctgatgaagattgtataaagtttttaagaaactttcacaaagccttgccacaacatggaaaagtgattgttttcgaatatataataccagaagtcccgaatccaagctatatatctaagcatacttgtactctcgacaatgtcatgtttttagcacatggtggaagggaaagaactcagaaggaatttgagaacttgtgcaagagctctggtttttccaagtttcatgtagcaagtagtgacatctcatctacgttaggagtaatggaattctataagtagaaattgcccatgacaaatagtaatttgaatctatgatagcccacatgttacattgggtgcatccagacccaaaagcctttaaataaattgggcccagttgcataaaatctgatgttggcccggcaaatgttagcccactggtcagcaactgtaagattatttatgttattgcttttgagactatgtaatcatgaataaaaagtttggataaataacttatgtagttccaatattttggnnnnnnnnnnnnn

SEQ ID NO: 28478 - DNA, 274 bp, Glycine max
gaacctttgctattgtctgccatgggagaagaagtgtcctacaaaaccgaaccagagtcagagctacactctgttccccaagagcataattcctctgctcaggaaaaagaattggagaaacctgaacctccaaacgacaaggtcactcctccttctccagttgctgctcaagaggttgcagatcatgctagtaaaaaggatacagaggagtcagtcgacaaagatgctatgcttgcaaaagttttaacggagaaaagattggctttatcaaagc

SEQ ID NO: 28479 - DNA, 289 bp, Glycine max
taacaaatccctacacatccttaaatcagttttggtttttcatccccaaaaggaagcaattaaaattatgggagccaacttttccactttcgagtttgtagaaaaatcatcacactcatcgctggtcctcaccttccattccactgctaaatggaaggctcactttgatgcctccaaagaaacaaacaagctgatggtcatcgacttcactgctacgtggtgtggaccttgcaaatacatggacccaattatcaaagaatttgctgcaaaatacacagacgtcgagttc

SEQ ID NO: 28480 - DNA, 252 bp, Glycine max
gccatgcttgacaaatttcccgaaaaatatgaacctgctgtttggtggccttcatctcatcagttccaaagaagaagtaaaacacaagagagtaacaatggatggagtgaagatctagaaatggaaatgagggaagtgattgaagtggtaaagaataaagacttagaggattatgagaggcttgggaacatagctttgaaggtaaacaagagtttggcgattgcagggcctctattgagtggcattgcagca

SEQ ID NO: 28481 - DNA, 256 bp, Glycine max
gctggacataatatcaccattactgaccgtgctggcacagcgagtccatacagcttggaaattggaccaagtatcatgccaccaccaatgatgcaactgggagatcctagtgctcatttcctttatggaagaaactacatgaacagtcgctgagttagctgaacttgctagggttctaagagggggtggatcaaccagtagtgtcaacctcccgattcagtctcagttgagctactctacatcatcatcagctgga

SEQ ID NO: 28482 - DNA, 469 bp, Glycine max
cgaaactgctgctctaaatgtttctttcgtggacaatccagtgctgagtgattctgctattgaattagaaattaatggtttattcacagggagaatgaagttttggtacctcaagcttaccgcagaggatcagacctttctgcttcctgtggtgacagttcaccaaagatgataacaatttcattacacgaaagtgttttcaaatccggttccttggtttatttcactgctgatagtatgcaatggattgttgatgaactccctgatcaggcccttttgaacactgctgaatggagattccttattccacaattatacaaaaaatatccaaatgacgacatgaatcttaatatgtctgtatcttctccaccagatatacaagtgacaaacaaagatgtcggtgtcaacattttcatagacataacaattgatgttctggaagatggtgaagacatacctgttgcatgca

SEQ ID NO: 28483 - DNA, 505 bp, Glycine max
cgtacgcgtgggcgaaggggtatagattgtgggagaaaaaccgatgcctcatcaatctccaaagagggagctatccccagatggcgtcgagtataattcacccaacaagaggccaaggaccaacacttaccaaccacaacaagaggccaaggtcaagaagaagaagaaccctttcaaaaagttcgtcacagaaaaaatagtagccgctaagacaatgggtgtaggggtttctggttcttctcccgcacatacatcgtcaagtaataatttagttccagggactacccccgaatccacgccaaaaaatgacaatcaaaaaacgtctcacgaatccaccacatcaaccgtgaattcagtgggaaaatcaggagctagtgctggagaagtcaccgatgcaccagatgatccacaaactcctattcagacaactggtagtcgtcaattacaaacgacgccactctccattaagtcaagcactggtagcataccacacgttgattcacct

SEQ ID NO: 28484 - DNA, 452 bp, Glycine max
tggttaattcaaatctatgaggagcagatatgggccaagtatgaaagcagttgtgatgctttggcactgagaatgatgtgcaaatgctgttgtcctctcttcttcctttgattcgagagtccaaacatcgtgactgaatttgagagctgtattgaagtgtgacttttggaacttgcaattcgttcatgtaaatatggtaattgtttgaatgcttgatcatgtactcaaatttgtacataactgtatataaattttgtataacatgggtgtacttatgtgtatatatgtgtgttttttgtagtttgcttggatgtatagttaaattagcactgttttgtataggcccgttaataatcaaaagcctctagtcttttctctgtttctctaaaagataatagcatttccctttggggattcaaggttattggagtttcttgtaagcgtttatttgg

SEQ ID NO: 28485 - DNA, 280 bp, Glycine max
cttaccttcgcatatgaatgagcagcacatcttgaacgctgtcaggattgagaaggatgtagatggttttcatccgttaaatattggtcgtcttgccatgcgtggaagagaacctctgtttgttccttgtacaccaaagggatgcatagagctactgcacagatacaatgtttctatccaaggaaagagggctgttgtgattggccggagcaatattgttggaatgccagctgctctcttgcttcaaagggaagatgctactgtcagtattgtccattct

SEQ ID NO: 28486 - DNA, 289 bp, Glycine max
tggggatggccatactgagcttgttgtgccaacactatctgggaagattcatgttcttgatggcagggatgggtcatctattgggcggtatccatatcaaactcatggaagaataatgaatcaagtgcttctagtcgatttaagtcaagacaaggagaaaaagaagggattaactattgttaccacatcatttgatggttatttgtacctcattgatggacctactggatgtgctgatgctgttgacattggtgaaacttcgtatagcaggtcttggcagacatgttga

SEQ ID NO: 28487 - DNA, 514 bp, Glycine max
cattaaatacttagttatttttttagatctaattagtcctctaaattacaaattgatgacaaaaatcaatccagaacatgttctagcaacattaaaataaatcatgttaattgtagtcaacttttgcattgacttgccatttatttattggttcaggcattcaacctaaggcccccagtatcaggaaagtcaaatgataccactggttccacagcaaacgtcaaagttacagcaattttggagaaggcaaatgcaatccgtcaggttgttgcgagtgatgatggtgaagatgatgataactggagtgatacatgacatgttttttttaataaagaaaaaaaatatttcatacacgagtagtcctttatgttttttagcctcttgaagtgaagttgcttgaggctttgttgtatgtacacatgtgtgaataaatcctgtttatctgttattaagtgtagtgcagtttcatttcattatcgtatgatgatgaatttatatcttcgttagttgaatc

SEQ ID NO: 28488 - DNA, 237 bp, Glycine max
ctggatcagcagaagttgaagggtcagaaggaagcaaaccagttgagaatgggaaaggagatagatgaaagagaagatttcctatatcaaatcagaacaaaagcattcaacctaaggcccacagtatcaggaaagtcagatgataccactggttccacagcaaacgtcaaagttacagcaattttggagtaggcaaatgcaatccgtcgggttgttgcgagtgatgatggtgaagat

SEQ ID NO: 28489 - DNA, 470 bp, Glycine max
ttctttgcgtccgctctcagaaaaccaccttggacgggaataaaccactctttgcccaaaattttcgcccgaaaaccgctattgtgccttgttcctccgtacccacatcaccgaaaccggttttccgataccaagaagcctcttttcacggccaccagtcatttttattccgtctttgacggtcttttggtcgccggagagtgtggtggctttttaaaacgaggacggcgtttgctaacgtgagccgggtgcataggatatcattaaaaaaaggttgttgtagttttttatcagaggcgtgcacgtgtacggtgatgagaacggaggtgatggggaggtggggcacctgggaagagctcctccttggtggcgccgttctccgctacggagcccggaattggaaagtcgtcgccgccgagctacgggcacgaacagtttgtccctacatcattacacctgaggtctgtaaa

SEQ ID NO: 28490 - DNA, 396 bp, Glycine max
attttacattcaggtcagggttaggacatttacctgtttttactggcacagtagagttagctggaatcatgtttactggtgaacctgccaagaataagaaacaagcggagaaaaatgcagctatggcagcttggtcttctctaaagcaattggcaaaagaaactgcaaggtcttcaactgaacccgagaacaatgacgaactagaacagatcactatagcacgggccttgctgaactacagactgaaggaaaagatttcaatgtcaaattcaaatgctccagttccatttccaaagaagtttcagattcaaaatcccaggccaaccagtcctcagcctccacctgccaccacatcaaagattcttcctttaatttgccaaaagggagctcatcgaa

SEQ ID NO: 28491 - DNA, 534 bp, Glycine max
  unsure (1)..(534): unsure at all n locations
ttttaagccctacaaatacccatcaccaccaccaccagtttacaaatacaagtcaccacccccaccctacaagtacccttcttctncaccaaccttctaagaaaccctacaaatacccatttttctccacccccagtatacaagttcaagtcccctcctcctccatacaagtactcttctcctccacctccaccatacaagtacccttttgcaccacccccagcttactactacaagtcacctccaccaccacctaagaaaccatacangnnnccatcttcaccttctccacactatgtctatgcatcaccacctcccccataccactactagatagtgattttagtatagcgccccatggatctgaagaacttgtgcaaataaaggagagggaagaagcaccatgcagtttatacagtgaagagtggaacgcattttgtgaaagcagtagtgtttatttggtttccctttattatttttattttgtactttatatattcaaagttttaaggcactgttctgatctgatccatg

SEQ ID NO: 28492 - DNA, 535 bp, Glycine max
gttggcatctactattggtggcttgaggaatattgttgctgatgcatccagttatagtttctacacctaaactatatgatggtattgcaataatatagcaaatataattaatccagtaaatcaagctggattagattatctaattattttggtctttgttactttgaactctaggctgtagcctttttccaccatcttactctcctttttttaatggtaaaatcacctctgaaagtttattttgtcaattgagatcaagggttattgaataacttggtaaggggcgattttattacattgtatgtgtcatgtcagcaatgtggagtatgagtcatgtcagcaatgcggagatgttgaaaaaagccgcagatattccatttatacttgattgtttttcttctcaaaatggctaaactgttattgagattctcatgctagtgattttatgtaacccgttccaagctgatgaatatcttggataatgtaactcttgttcacatttgcaaagggaaaaaggcaatttgcttacgattgt

SEQ ID NO: 28493 - DNA, 415 bp, Glycine max
cgagcgcttacataaacaacatatcggaatcatcgttcattcagagtcagcatcgctatctccaaaacaaaagtactaccgttttttcgtcttctccattttcttcatcagcatagcgacacaaacgcacaacaagcaccgttgactttttccaattttccaatttcctcggtgattctatcatctccgtcacaatcgcgcgccaaacgctgaatcgatcggtgccaccgtgccaccactcagaaaattggttaaagtggtttggacacgtataaagaacaacttctcagctttgggactgtgtattcatttttgacttttagagagagtctctaacaggccaacatgagtgtggattcaaagaaaagtgcctctaatggccaggagaaaatgttgctatcacaagaacagcaag

SEQ ID NO: 28494 - DNA, 367 bp, Glycine max
ggtgcacgttgtgttgcaactttgttgaatgagatgaaacgcggtggcaaggattgtcgctttggtgtaatctcaatgtgcatagggtcaggtatgggagctgctgctgtatttgaaaggggggacttttaaagatttgtgcaagtttagaatagttcataaaaataacgatcttttgtcaccggatgcttgatattagacataatttgaagtgtttctattttgaattcagttttggttgaaatgttacaaaaaattggaagtgtaaacaagatttattttaaccatgattatgactcagatggagaatagaaactatagcactgagtttgcttactcaaaaaaaaaaaaaaaaaaaagggggggc

SEQ ID NO: 28495 - DNA, 301 bp, Glycine max
gattagaagagacatgaagcttgatgcactattgggaggagggcttttggttatttacttcatttctctattcctgaggctgattcagacacttggttctctccaatttcagcatatgttgttaggcttattcttcagcagatgataatgaattgtgaatttctcatcatattggtatagctattagccactgacatcactttctgtgcaggagctatattgtgcaaccatgataggtaggcctaaattagatagcgttagaacttccactgctatttgtacttagcttttcttggctaat

SEQ ID NO: 28496 - DNA, 371 bp, Glycine max
acgggatcaaggtaaatgcaacttctgacttgatgctggcatatgtggacttctttcttggtggggatgaatagagaatagaccttcctcctcgattgcatgaaaggttcccaatgtcattgccttttggaggtgatggaagttatatggctccattcacccttcacaatgataatatccttaccagcctcatgagtcagtctgtgcaacctacaacctggtatagattggttgctgggctgaatgcacaactgcggttagttcggcgtggacgactaagagtaacatttttacctgtcctcggatggcttgagactcatgccaatcctgcattgagtgtccatggtgtgcgcattgaccttgcctggttt

SEQ ID NO: 28497 - DNA, 307 bp, Glycine max
atcttatatctcgcgtcgcaatatattatagtattaccttcttaattatcacaaacgcgcttttcatattcgaatctcgcgccaacatggcggccaccggagcccgtctcttctccgctgcactcttaccgccgttatccgccgtcgccggacggaaaaacgaactcccgccggactccgattgcgactccgcgcctcgccgtgtcggtggaccaggttccgccggcgacggtggagaaagagaagcctagggaagagaagaagcagcgacgcatgaacggttggactgagtatttggagcggtcga

SEQ ID NO: 28498 - DNA, 353 bp, Glycine max
cggctttcttggtgtttgtgttgggagtggtgctggctttcataagaaggcctagggtggtgcatgagattaaatttggaccctcttctatagaggtggtgaaaatgtctagacatgcatggaagcaaggtttcataaagggcacaatccctcaactcccgttgtcactcttgaactccgtgatagccgtttgcaagctctcatcagacttgtttccaggtaaagatttttcagtgacatcactctcagtaactgtaggtttgatgaaccttgtgggagggtggtttggggccatgccatgttgccatggagctggtgggcttgcggggcagtataaatttggagggaggagt

SEQ ID NO: 28499 - DNA, 322 bp, Glycine max
cccagagcgtccgatcacgcattggcgccacccatcgcggcacaactcctggccttcgccctccttgtcaccgccgtctccgccgccgaaaccggttaccacaaccatactgtcggcggcggaaccggctggtccttcaactctaccaccaacacatccgccaccaactactcttcttgggcttcaactcaaaccttcgacctcggcgattatctcattttcaatacgaactcgaaccaaacggtggttcagacatacaacaagacgacctatctgaactgcaccgccgattattccgacaatggaaccttcgtgtacaacg

SEQ ID NO: 28500 - DNA, 319 bp, Glycine max
ggcagagaaagatgttggtggtggcggcttgactcgagacatctgttggtatgtcaatggcaaagaaacccgtgaaatactatgtggtggacgcgtttactgagtcagcattcaaggggaaccctgcatctgtgtgtttcttagaggaagagagagatgaggagtggctgcaagcagtagccgctgaattcaatatctctgagacttgttacttatcacgcatcacccactcgctccatggaatctctaatccccgttttcgtctcagatggtttactcctgttgctgaggttaaacttgtggtcatgccacattagct

SEQ ID NO: 28501 - DNA, 699 bp, Glycine max
gaaaaagaaaaagaagaacaaaggggaaaacggtggttctgcatctgcaactcctaataataatggaggaggagaagaaattagtaaagttgaagcattagtcccttcaaatttggacacttccttcactcccaaggatcttattagtcctccaattcagcatgcttacccatatccaccacaggtgtattatccacctcctccagcatatggattaagctataacacagcatatcctgtctccagtactgcttcatattatgttggtgctcctatcatgcccatgcatgcttacactactccatactctagactgccaccacctcctccaccatctgatccaatcaagcactatgttgaggatgagtatgaaagtgatggatattgctccattatgtgacaaacacacaccaaagtggaggatgatgtactagctagctagtgttattacttattaatgatagtactcaggttaagtggaggggttgaattttgtaatatgctcaacaaaattagaaatattaaatatggggacaaaaataaaaaaaagagggcatgtgcaggtatggggggggtcttgaatactttgtctttgtttagcatgatctctctctttcctcttctttttttttcttcacttgttaagagcccaaagctcttggggtttgtcaaagaaaggccagtagccttgtaatgctc

SEQ ID NO: 28502 - DNA, 471 bp, Glycine max
tccacgcgtccgcacttctcaaaagcaagtgttggtttccagtacattgaagaatagtatatctgctgaagaaagcaatatgaagcaggaaatcattgtgaattctacagttgaaacctccaaatgtccatctgccaatgatctgaagcaagttaaattttgtcgaactgatttttgctctcagctgagaaagtcagattctgttggtcccacttctggaaagcctgtagtgagagacttgcccaataatgccatggaaatatcaagtattctttcaaagatgtcagtcattccagaatatgagtacatctggcagggtgtctttaaagtgcatagaaatggaatgcctcctgacttgtatactgggattcaagcacatttatctgcatgtgcttcccctaaggttcatgaggtagtgaagaaatttttacctgaagtttcgctaaatgaagtttctcgtttgagcgtatg

SEQ ID NO: 28503 - DNA, 606 bp, Glycine max
tgggtaagtgggtttcttggtgcttgtgcaagctccaactaggggcgcacacacacaaagatcatataccacatactcatagtccctctctaattatagatatattaaggaagcaagtgctatttatatcatcattaacatatatattagaactctctaagtgagagcaaaagaaggaaattaaattcaatggaggctaggactaagatgtctgaagtgctaccattcatagtgatggtgattatggaaggttggaccataggactcacgatttttgcaaaaactgcaataactaatggaatgagtccatttgtgttcattgtttataccaatgctctggccactataatactgttcccttgtttctttttaccacaccaagaggacagaaaggagaggccatcttttactttctctttgttcatgcggttcttgttcctcggttttatagggatgacgatgactcaggcctttttattcctgggtctaagctatagttcgccaatacttgtgtgtgccatgagccacttgatcccaacgtttaattttctgctctctctcattctcaggaagacagagttgaatctgagaagccctggtatccaa

SEQ ID NO: 28504 - DNA, 255 bp, Glycine max
tttgtgtgtattcatctatcatatttgattaacgttattgctgggatgatgagtcaaattcatagtttatgccttaagtgatatcctctatttgatttggcagtctctgagccttatatatccaacaacgaataatttattggtaaactgaagaattattaattagctggtgcatctttgacggaataattgtttgctttattctaagcaatgacaagcttagtttatttggaattcttgatttttcatctcata

SEQ ID NO: 28505 - DNA, 258 bp, Glycine max
cgactccttgaatatgaaagctgcagttggcgcacaatacaaagggaagaagcaagattatttctctggaatcgacagtttcgacaaggaacgcttgctctatctcagctgcgaaaggttgttctatggggaaaaaggagtgtggaatcgatccctgaaagcccagctgacgccaattgaaaaagtgcaagcaaacaacactaggacattcacagcagcaccaattgatacactacttggagccaaggtttgcgttga

SEQ ID NO: 28506 - DNA, 410 bp, Glycine max
attgccccctcctcttccttctaattctttctttctctttcgttaggtagggtttcccaaatccatcgtcgttttcaacccttaacgacgccgtttcaagatgatgcccccgggactcgtttccaatctccaagaagtgcttctcaaccgaaaaggcgattccaattcgaattcgaattcaaataatgcagagcagcatgaacaatccagcgagaactcggagcctgttgaattcgacgcctcgaagccaattgtgttggtgacgaacagtgatggcgtcgaatcccctggcctcacgcacctcgttgaagctctcgttcaacaaggcctttacaatgtccacgtctgcgttcctcaatcgtgagtctatagtatataaaatgcaacactataacatctttttttcttct

SEQ ID NO: 28507 - DNA, 341 bp, Glycine max
caaatctaaaatccccttttctccttaagtagttaaagttaattaagtcgtgtttccacgtaaacggcgttagaagcgcctctaattctattagggttttccaaatccatcgtcgttttcaacccgtaacgacgccgtttcaagatgatgcccccgggactcgtttccaatctccaagaagtgcttctcaaccgaaaaggcgattccaattcgaattcaaatgcggagcaagaacaatccagcagcgagaactctgagcctgttgaattcgacgcgtcgaagccaattgtgttggtgacgaacggcgatggcgtcgattcccctggcctcacgcacctcgt

SEQ ID NO: 28508 - DNA, 351 bp, Glycine max
cgtacgcgtgggcggacgcgtgggcggacgcgtgggcggacgcgtgggcggacgcgtgggcaaccccactttttctctactccaactacagcatttcctaaacaaaccaaaaaaaaaaactctctcgtaataatatcatcatatctcactagacaaacacaaaaatgtcaccatacaattacactctcaaacacttggctctctttcttctcttcttgatcacttccacctcagcggcagccggaggcggcagaagaaagctccgttttgacatgtcaagtggcggtgcaccattggccggaacccccacaggggccactggctctggccatggtgcaaactgggactaca

SEQ ID NO: 28509 - DNA, 337 bp, Glycine max
tgcacgtctctcctctgggctaagtgcattatctcagcccataaaattacgtctctgccgagcccagggtgaaaagtcacttagggattattcatccaatgtggtactgattgatccattagcaagtctagcagccatcgaggaatttctatgggctcgtgtccagcgtggtgaatctggtctgaagtctactgtaggcactgaaacttctgaatctggcacaactcctgctggggctggtgttacatctccttcctcttatattccctccactgcctttcgttattcaaccgggtccagatccagatcatctgttaatataggagatacacctaga

SEQ ID NO: 28510 - DNA, 455 bp, Glycine max
tttggggtttcggtgagtacgagatatgaagggaaggatgatgttttgtttgccaacattctgcgatcgaggaacaaatttgtggatgctcttgcactatacgaacgcgtgctggagagtgatggcgggaatgtggaggctcttgttgggaaagggatatgtttgcagatgcagaatatgggtaggcttgcttttgagagttttgcggaggctatcaggatggatcctcagaatgcctgcgctctcacacattgcggtattctttacaaagacgaaggttgccttgtggaggctgctgagtcatatcaaaaggctttacaagtggatccttcatacaaagcagctgctgagtgcctggccattgttttaacggatattggtaccaacataaagcttgcaggaaatactcaggaaggaatgcaaaaatactttgaagctctcaaaatagatccaca

SEQ ID NO: 28511 - DNA, 264 bp, Glycine max
gatattttgtcataacaaggtctcctttcttggggggcctaaaagctatgagagagtctgaagtcctttacaccattgaagccattatagcctaccctgaaaatgaaagctcgtggagatatctacgaggactttataaaggtgaaactacttcatgggtaaatgatcctcaagtttcttcagtatgcttaaagattttgagaactaagagcaactacgtgtttgctcttagcactattttagatcttacatgctttggttatc

SEQ ID NO: 28512 - DNA, 523 bp, Glycine max
cttatatgttgatctgtccaagaacaactttgttggtgggattccctcagatatttctcaagccacccaactggagtatttcaatgtctcttataatccgcaattaggacgcatcatcccttcccaaacatggtcattgccccaacttcagaatttttcagcatcttcttgtggtatttctagtgatcttcccctatttgaatcctgcaaatcaatttcagttattgatctagatagcaatagcttatctggaaccatcccaaacggtgtttccaaatgtcaagctcttgagaaaatcaacctatccaacaataatctgacaggtcatatacctgatgagcttgcctctattcctgttcttggtgtagtggacctatcaaacaacaagttcaatggccccataccagccaagtttggtagttcttcaaatttacaactcctcaatgtgtctttcaacaatatctctggttcaataccaacagcaaagtcattcaaattgatgggaagaagtgcatttgttgga

SEQ ID NO: 28513 - DNA, 417 bp, Glycine max
ccattgcgttcggtgcgttgtgtctaacagtctaagtctaacgttgtggagcatagaagagaaagagatgatattgaactgtgtcagagtgacagctatgcctatgatggctgttcctaggtggagatccacctgctgctgcgcttcttcttcgtcttcagtttcaaccatcaacacagaccaacttcgttctcaacttgatcaacttcatgcagaagctgatgccaccagaaccaaggcaactaatgctagattgaggcttctgcgactgtcagaggctgcagagaagcttaaaaaacaagcagctataagcattcaaaaggggcaggaaaattatgcaagggaaatgctttttcagaggaagaaagtgttgcaggctttagacaagtctaaaagacgcattgaattgctcgatga

SEQ ID NO: 28514 - DNA, 500 bp, Glycine max
ctgatcaaaggaaaaagagttacaataataggctcacagaaatctggtcttgatctagcagctgaatgtgcgaatgcaaatggagtgaagcatccttgcacagttatccaaagaaccgcacactggtttcttccagattttaacttttggggtgttattgctggattcttgtacttcaatcgctttgcggcgcttttagttcacaagccaggagagtccttcctatttggccttgttgccactctgctttcaccatggagatggggaatttctaaacttgttgaaactactctaaaatggaagctgccattgaagaagtatggaatggtacccaatcacagctttcttcaggatctctccacatgtctgtttgcggtgtatcctgataacttttttgacaaactaaaagaaggatccatcattatgaagggatcgcataactttagcttttgtagagaaggtgtaatcattgacggagaagctaagcccctggaatcaga

SEQ ID NO: 28515 - DNA, 241 bp, Glycine max
cagaataatcagcatcgttgaaaagtggaaccgttcagaagaagctccccaggtagcttatacatttgatgcggggccaaatgctgttctaattgcacgcaacaggaaagctgctacctctttgattcagaggctgctttactacttccctccaaattcagatgacctcagcagttacattattggggcccagtcaattgcaaaagatgctgggatcaatggaatacaggatgtagaagct

SEQ ID NO: 28516 - DNA, 328 bp, Glycine max
actcgagccgattcggctcgaggaatttagcccacgctatgatcatttaaagagcaaagacttgttctttcccatagatctaggattcgccatggatgtagaaggaagagcgagcaagggcaagtctctcactttgaacctcgagcaaggtcaacaagaaaagggtacccaaaatgatgattatggtctcgcttctgctcatgctattgaccaagattcgtggcaacaagtggggctgatgctggtgacaagcttcaattgcgggtggatattaagtttttctaatttggtcatgtggccactgggttggacatggggtatcatatgc

SEQ ID NO: 28517 - DNA, 291 bp, Glycine max
gctaggggaagaattgtacttcactgttggctcacaacacattccttttggtgcatctccacaggatgtgtggactgagcttggacgtccctgtggcattcatcaaaagcaggttgatcaaatggttattcattctgcttcagatcttcggccacggacaactctctgtggtgactacttttataattattttactcgtggtctggacatcttatttgatggacagactcacaaaatcaagaagtttgtgttacacaccaacttccctggtcatgctgatttaattctcac

SEQ ID NO: 28518 - DNA, 295 bp, Glycine max
gcacaaagagatggcggtggcggccaattctgcaagaaaaaccctccaaatagcttcctctgccaccagaaccctcttctctcgtcgatcttcgtgcgccactaagctcaatggacttgcctcttcttcttcttcttccaagaaacgcgccctctcgttttcccggcttccggtgcagttggttggtggacaagtgtctttgacgccgttgcatagtgttactgcctctgccttgttcacttctctgctttctctgcacaacactaactggggttgtctttcagaaggttttgca

SEQ ID NO: 28519 - DNA, 416 bp, Glycine max
ctcgggcccttcttattgcaccacccacgatgatcatgggaatcggtgataagaagaagaagacgaatacgagggagtgtgaaacgacgtcgtcgttggagttgcagcttaagaagcggaacgaggagttggaggaggagctgagccagagcaaggagagggaggagcacgtgaggcgccaactccgcgccgcactggatcgcctcaccgtggcggaggaagcggaggagcgcctctgcgcccagctcggtgacctcgaagccgaggcgctgcagcaggcgcgtgagtaccacgctcgcatcgtttcgctcgtcgaccagctttctcaagcgcactctctcctcctcaacacccccattccccttcattctcgctcttaaatcaatcttcttctcttttcttctctcatgtgcttg

SEQ ID NO: 28520 - DNA, 767 bp, Glycine max
cctccctttcagtattattaatttctatagagctgaagaaattaatattaatcaatcaatcaaaatggggttgtgcaaggtttcatttcctgtattatgtgtgttggggttggtcatgattgtgagtcacgttgccaatgctcaagactcaccagcagattacgtcaatgcacacaacgctgcaagatcagaggtgggtgttcaaaacttggcttgggatgacacggttgctgcttttgcacagaactatgctaatcaacgtaaaggtgattgtcaactgatccactctggtggtggtggccaatacggggagaatcttgctatgagcactggtgacctaagtggcacagatgcagtgaaattgtgggttgatgagaagtctaactatgactacaattctaattcctgtgttggtggagagtgtctgcattacactcaggttgtttggagagactctgtgcgtcttggatgtgccaaagtagcatgtgataatggaggcactttcatcacttgcaactatgctcctcctggcaactatgttggccaaagaccctactaggttgttacatttgtagcagcgagatggctaccatttaagatgatgagttatataccatacatattaagaataaataatagcatcatgaatttatatagattcatgttatgatattttccatcgtattggaatacatgtgagctcataattaactcacacaaatcaataataatgttactcttcaacttgtcatgtgtatttgatgttc

SEQ ID NO: 28521 - DNA, 367 bp, Glycine max
  unsure (1)..(367): unsure at all n locations
gaaaaatgtgagaaaagcgaaggnngtacgcaagtgataggaaggagtggagaaagagaaagatgaacatgggactgattcgaaagaaagcattccttaacacacactctgtctttctctttgggtactaatcctaaaccttgtagtcttattcctatgcggtgtggccaatcaacaaagcaacacaagaagatattactatgcagaggtcgtggaatggtagtgtttggcgtaagacatcgacatcgttatccttgacgcccaacacctgctacccacatacgatcccctctcccacgttgcccagtgagacttctctcgtctcagttcagctcaaaacgctgtccatcttatccctctcctcgtt

SEQ ID NO: 28522 - DNA, 627 bp, Glycine max
acgagctcatgcgcctagattgggagcgagttggttgtaaattcttgttctctgctcttgcttttgataggagtacagtgaaggagctctcgctccaatttcagatggttgacttggggtggtggcttgaaggaaactgtagttgctccaacaatgcatcctgcacggaggtgaatcatggtggtggaaaacggggcttccggtgccgctgcgatgaaggtttcgtcggagacggattcagggccggcgatggttgccggagagtttctgaatgcaaagcttcaacactgtggtctggcggatgtaggaaagcagtcaaaattggtgtccttgttggagggatcatatttggaggtatccttgtggctgctctgtttcttgtatgttactttaataggcgtcgttcctcttggctgagaaaacaagtaacagtaaagcgcctattacgcgaagctgcaggagactcaactgtccctctatatccctacaaagaaatagaaagagccacaagttttttctctgaaaaacataggcagggaactggagctttcggcacagtttatgctggacaccttcacaatgatgagtgtgttgctataaaaaagatcaagtatagagacaccaaca

SEQ ID NO: 28523 - DNA, 510 bp, Glycine max
cttatggcatctggagcatcagagtagatggaaatgatgctcttgctgtttatagtgcagttcacactgctagagaaatcgctataaaagaaaaaaggccagttttaattgaggctctcacttatagagttggacatcactctacatctgatgattcaactaagtaccggggaactgatgagattgaatattggaagatggcaaggaatccagtgaataggttcaaaagatgggtagaaaggaatggttggtggagtgacaaggatgaattggagcttagaagcagtgtcaggaagcagttaatgcatgcgattcaggtggcagagaaagcacaaaaacctccacttcaggacttatttaatgatgtctatgaccaaataccatcaaaccttcaggagcaagagagactaattagaaaaaccatcgagaagcatcccaaagactacccttctgatgttcctttgtagatattgccaattcaaacaagaaattgtactaaatcttacaatc

SEQ ID NO: 28524 - DNA, 228 bp, Glycine max
gcaagactaggcactttgcctctgtgaaatggttatatttagcttattaaaaagagagatgcacatacacgattttattttccctttatttgtttatttcaaaagctaggtgactttttagacctgcttaattaactatactattccaaattctcaatgcctaaaccagaattgaaaactgtaatgatgaaatgagaagaaaataaaaagcaaaaatgctattttaat

SEQ ID NO: 28525 - DNA, 851 bp, Glycine max
acaatgtctcattattcatccttgaattctcaagaatggagttcccatcttgatgctattactgttcagaactctcctcaggttcagattctaagaaaccggtcaattgcaaatgcaagtgaaagtaatgggatttctagcaacacttttgatactgcaagaatctcaagtgtatcaagggatggaacaaatggtgtggcatctatggcaaaggaggaaactagcccttcaaattcgtcagcaggagtagatacacttattcccccttcagaaagaaaaaccaattttatcataaaatggaaaagggtactgtggaaatcttgtgtttacatcatcacagttggaatgctggttgctttacttctaggtttaaatatgtcatggactgcaattactgctgcacttgctctcatagttcttgatttcaaagatgctacaccatgtttagagaaggtttcgtattcacttttgatattcttttgtggaatgtttattacagtggatggcctcaatacaactggaattccaagtgctctgtgggacataatggagccctattctcatgttgatcgtgctagtggaattgcaatacttgccgtggtcatacttgtcctatcaaatttggcttcaaatgtaccaactgttctcttgcttggagcaagggttgcagcctcagcggctgcaatttccaaagcagatgaggagaaggcatggctgatcttggcttgggccagcaccatagcagggaacctttcactattaggatcagctgccaacttgatagtttgtgaacaagctcgtcgagctccaaaccttggatacacattaactttttggacccatctaaaaat

SEQ ID NO: 28526 - DNA, 650 bp, Glycine max
tcgtggacagcagcttccactccgttggttgccagcatattgccaacccttttatggccttggtagacagtttattccaacagcatatgtgaaaaaggcacaaaacccccaacatgtcacctcaggagttcacagtcgttggcttctcagaacctatttcagcttctccctcaatttccagcactggattagacacaggaacagtacctgcaacaggagtgctagaatccccccaagaacagaagtcttcaacttaaagctatgatgtcaattgactagaatagtgaaagtaaaaagaaaaatgacgctgctcaataaaccaagaagctctgagtacatgctcgatgaggtggtccagcaaaggaactaaatcaagcaataacgtattgagatttcccatcgatggaacatctgatcttagagaccagacactgaggatgaaatgaattctggatttgttcattgtctttgaacatttttacttttcagcattctagtgcacattattcattcttcggttttcctttttttcttcattttaattttcttttttaacattggattcctgctaagctatagttgaaaaagaaaaaaaaaatgtttgttattattcttttattcttatacctatgctttgcattcctattttg

SEQ ID NO: 28527 - DNA, 527 bp, Glycine max
caaccatgtcctccacacaacctacaacacaaacaccttcacctacgaacccacctcggtcctcgacctatgccggtgcccaagccccgaaaagaagctcactgttcccaagccagaaccacaacacaacaaccagctagacctggatgatcatgttttgcctaattctgattggtgggagtccatcatgaaggacttaaccctacccgaagactctcccactccccttttgaaaaccaatccatcatgcatccctgatttcccaccttcttctcaagacccatcctttgatcaccccactcctgacttcacctctctctccgaaatctacaaccaaaacatccccttcaattacccctccaacactttagaaccttcctttcatgaccttaaccatagcctccacccccacaacaacaactgggacttcatcgaagagtttatccgcgccgccgattgctacgacagcagccacttccagctggctcaagccatacttgagcggctcaacaaccggcttcttcgct

SEQ ID NO: 28528 - DNA, 802 bp, Glycine max
ataataagcaagagttatcctcttgcagttactaaggttgaggaatctggggagcacactattttagggactggtgagctgtacttggattcaattatgaaggacctgagagagctctattccgaagtagaagtcaaggtagcagatcctgttgtctcattttgtgaaactgttgttgaatcttcctcaatgaaatgttttgccgaaacaccaaacaagaagaataaaataactatgattgccgagccgctagaaagaggtcttgcagaggacatagagaatggtgttgttagcactgactggagtaaaaagaaactaggtgactttctccagactaaatatgactgggatcttcttgctgcacggtcaatctgggcatttggccctgataagcagggtcccaatattctgttagatgacacccttccaactgaagttaacaaggatctgatgaatgccgtgaaggattccattgttcagggatttcagtggggtgcacgagaagggcctctctgtgatgagcccatcagaaatgttaaattcaagattgttgatgcaaagattgctacagagtcacttcatcgggggtctggccagatcattccaacagctagacgagtggcctattcagctttcctcatggctactcctcgtcttatggaaccagtatattatgtggagattcaaacaccaatagattgtgtatctgcaatttacactgtattatctcgaaggcgtggacatgttactgctgatgttcctcagcctggcaccccagcttatattgttaaggcatttttgc

SEQ ID NO: 28529 - DNA, 373 bp, Glycine max
ctcgtattcaatccgacgcgcgctagatcaaccgttgaactacgcgcgcatgtacctcgcggatcttcttccggcgaccgtccggcgaatcatctacttcgactccgacctcatcgtcgttgatgacgtggcgaagctatggagcattgatctccacgcgcgcgtgctcggcgctcccgagtactgccacgctaacttcacgaactacttcacgcaccgcttctggtcgaaccctagctacgcggcgtcgtttaagggacgcgacgcgtgctacttcaacactggcgtaatggttatcgatctatggaagtggcgcgagggaaggtacacggagaagctcgagaggtggatgcggatccagaagcggaaccgt

SEQ ID NO: 28530 - DNA, 323 bp, Glycine max
ttacatgcttgtcattcttgatattctagtgcagcatccaaacatagtggttgatgattcggtggaaccagatgagaatgagactacagaaaggggttgactataatgggccgattcgggtttggggtaacttggttgctttcttagaaagaattgatgttgaatttttcaagagcttgcagtgcatagatcctcatacccgggactatgttgagagactcagggatgagcccttgtctctggttcttgcccagaatgttcaggaatatcttgaaagagttggaaatttcaaagctgcatctaaggtggccttgaggagggtt

SEQ ID NO: 28531 - DNA, 455 bp, Glycine max
ctagccttcttgtggagagtgtccgactctttttggcaagtgtggctatatcataaattctcaaatattcttcgagtttctcttgaatatgtaaagccaagttctttttggtcaattactgacttggtcttttggtactcataacaatacatccaaaagttgttcataaattatttgaaatgtaaattctttccactggattcatttattcaattttgctttgtcaagggctaaaaaaaatgagtataccttcttccacctttcttggtgttgtggatgatacgtaggattctggtgtccctgtccggagttatattcgatagtttcacatatgcatctttgatcactatgtaaacctctagagctccttccacgtacatgtttttagatttcttgttcctttctgttaccctttagaccaaaatttaagatcaatattcgttccgtataccaag

SEQ ID NO: 28532 - DNA, 1111 bp, Glycine max
  unsure (1)..(1111): unsure at all n locations
caaagtctcagatcgagcaagtggtgggttcttccacttctgttcgcttctctggctatgcttgtagatattttggcttcctaatttcacggaaaaagtatgttgtctgcattgatgatgattgtgttcctgcaaaagataattcagggattttggtggatgctgtggctcagcatattgtgaacctgcagactcctgccacccccttcttctttaatacactgtatgatccattctgtaagggtgcagattttgttcgtgggtacccattcagcctgcgaagtggggttgattgtgctctgtcatgtgggtcatggctcaatctggctgaccttgatgctccaacacaagctctcaagccagggcagaggaatttgcgatatgtagatgcagttctgactgttccttcgagagccatggtgcccgtgagtggaatcaacattgcctttaaccgtgaagctgttggtccagcattggtcccggctttgaggctggcaggggaagggaaattgaggtgggaaactatggaagatatatggtgtggaatgtgtgtgaaaagtntatgnnatnaanctagnccttggtgtgaaaagtgggttaccttatgtttggagaacagaaaggggtgatgcaatacaaagcttgaagaaagaatgggaaggggtgaaattgatggaggatgttgttcctttctttcagtcattaaggttgcctcaatcagcaactacagcagaggattgcgtggtcgagatggccaaaacagtgaaggagcaactggggaaggttgatcctatgttttcggcggctgctgaagccatggaagagtgggtcaagctctggaagtcagttagatctgtttgaagctcccgaacttgaggactctcgtaggagtggaggttattgccttattggcttctatatttctttattttatttaactaatttatatctgccttttttttcagtttgtagtgaactaagcttacattttacctgacacagttagactaaaggctgaataaaatgagtacttattggctttgtgacaaaaaaaaaaaaaaaaaaaaaaactcgaccaatttctccaccgatcagaaaatgagttcaactg

SEQ ID NO: 28533 - DNA, 413 bp, Glycine max
caagaaaccagggattaaataacgttgacttggctactggagcagggttgagacctggttttgatcaatcaatgccccaaaatggaccaggagttgccgatcctcaagatcggtcagaaaataatcgagacagggttgcgaaccctgcccagattcctgggcaagctgacattcaacaagcagaaaggggtccgaaccctggatccatgaattcattcagttctttgttattatggatcttaggaggtgcttcgtctgagggcctaaactcgtttttttcaatgttcagagacgtgagagagcaaggacaagtttttaatgaaacacctggggctggggctggggctggtgatgaaagccgtgagaatcaggataatattgacagatagcggtgaagaggtggagagcttgtt

SEQ ID NO: 28534 - DNA, 433 bp, Glycine max
ggataaatcacgggagaaacaaaggaagaagaaccttcaagcaaagaaagaagccaaagagaaagagccaaaacctcaaaaaccgaagaaaaccccaaatgcacccactgacatgcggaagaaaacagcccgacagagacgtgctcagcagacaatggaagacgaggaagagttgatgcatgaataccgcttgttgaagaaattgaagaaagggaccatagatgagaatgaatatgccaagttgacaggcactgaggaattactttgaaagcaaagtatgcatgcctgattatgctgttctggataccatggttgaaagcaaagtaatgaatgacagtttcaaacaccacaattttggctagtaagttactagattcttgccatgtgggtacactgtaggcatctaatctaataatataaaatttgttaatcc

SEQ ID NO: 28535 - DNA, 504 bp, Glycine max
cgcgtgccctttctttcgcgtgttcaatatacaacactgaaactttcaaagctcttttgagaacttgttattgcaatggctgacatagatcgctcctttgataataatgtttctgctgtttctactgagaaatcaagccaagtttcagatgttgaattttctgaagctgaggaaatccttattgccatggtgtataatctggttggggagaggtggtctttgattgctggaagaattcctggaagaactgcagaagagatagagaaatattggacttcaagattttcgactagccaatgatcggtggcagaaaacgaagcaaggaaatttttggtgcctacaagtcattacagtgactttgtggggatatgaaatggaaattgatcctattaatcatatgggtacttatatttgcattttgcggtaaccaacataaaggggcatgccattctaaaagcccttatgtgtaatgttacttaattttatctttgtaatgttcccaag

SEQ ID NO: 28536 - DNA, 458 bp, Glycine max
atgatgcgtagaggtttccaatgtgtgggaccaacagtagtttattcgttcatgcaagtagcaggcctcgttaatgaccaccctattaacatgcttcaagcaccacaaatgcaaagtgacaaccaaaaacgaatttaaaactgaggttaaggagaacaatgaaacttcggagatgacaataaacaatgaccgaaggtcgtttaattgaagatgttccacgacgcagggtcgattgtcatctttttcttattattgtattgttatgctataattttattctttcttaatctgtttgtatgccacctaacctaaccggaaaatgataggcttcatcttgttattggtgtttccacgtgaaggtgcatgtttcttttaatacccttagctaataagttgcatgttctaatctgtttcggtgttctgtaataaatttccaacgtagtcttgccaccctgtac

SEQ ID NO: 28537 - DNA, 235 bp, Glycine max
ggaatgagttgggctaagtaccttgtgagcctttgtgccttgaagggaatgactactagcttgcttgttgggtcaatggggcaagctaggtacactactcagattgcaaggtcgcacatgatcccaccctttttcgcattggttcacccgataaccggaacccctgtgaatgcgactctcttgagcactattagttgctctgccatcgctcttttctcaagcttggatgtattgt

SEQ ID NO: 28538 - DNA, 292 bp, Glycine max
cgccaccttaaatataacaaatacttgtctggtaaatgtaagttttatcctcctatcctcttcacaacacttgactacgtggtgatgagaacaccaattgcaagcagtgatgaaagtggtttgaaggtggggccttggagcccagaagaggacagaatattagtggatttcattgagaaacatggccatggaggttggagagcccttccaaggcttgcaggcttaaacaggtgtggaaagagttgcagactgaggtggactaattacctcaggcctgacatcaaacgcggaa

SEQ ID NO: 28539 - DNA, 329 bp, Glycine max
cttgaatcctcatcttgtgctggaattgtgaaccttgtgccagaaaggttgctacttcagccatcagaggataagcattcttctaagcaaaaaccattgtctatcttacaagaacaagacctatcttccttgagttctttctctggtcggatacaaacctcacaagctatcaaagttgaacaagaattatcggagcttcagatcatagcggcacctgcaaaaccaaaacaaggttctggaagagtggaagcaaaaggaccagttgagagccttcaaagtacgaaagcacaagctggtagtgagaatgggggatttacattgattgcagg

SEQ ID NO: 28540 - DNA, 362 bp, Glycine max
agaaaacatgagatcattcatagatagaagagtaaaatttcactcacataataataatggggtctatgggtaactcaaatccaaatctaaatccaaatccaaatccaaatccatggactccaaaggattgttctgaaggaatttgcagcatctattgtcctcagtggtgttacaaagtgtactctcctccccctccaattctactaggtgatggcgatgatgacccttcaggctttgaattctctcctctcatagttgctgtgattggaatcttggctagcactttcatcttggtcacttactataccattatctcaaggttctgcaggcgcagaaacaacaccaatgattcaacagaagac

SEQ ID NO: 28541 - DNA, 367 bp, Glycine max
atctccaaaaaccttcatctcagaaccctagccgtgtaacccccttcatccctagccgcgtaacccccttcatctcagaaaaaggtcttcatctccgccgtcgtggcctcagtcgtggcaaaactatgttgtgggtcatatgcgtccaatcagaggttccatttctcttccttctttcgcaccgaagttccaatcgtcgttgttagggtttttcctcgtcgttggagagagatgtgttggattcgtgatgacaaccctatccctggccgcgccctttgcctttgcccatatgtcttctacttccttgatcatcgtagaagagaagaaatgtttctctatgcgtttggtggaagcagaaagaattttc

SEQ ID NO: 28542 - DNA, 282 bp, Glycine max
ctcgagccgcaaaaatgagtgacaaaaacaacatggttatagcctccaaaacagccactggtagttcttcatcatcttcaagaatgtccacaaaaacattctcgggactcggaaacctcgtcaagctccttcccaccggcactgtctttctgttccagttcctcatccctgtcgtaaccaacagcggacactgcaccactcttcacaagtacctcactggctctttccttgtcgtatgcgcattcaactgcgccttcgcctccttcaccgacagctacaccg

SEQ ID NO: 28543 - DNA, 436 bp, Glycine max
gtccggggtcccaggcaggtggattaatttttttttctggtcaaaacattgagaacttgagggactcttctggtgcctctattactgttcttgcaccaaatcagttgcctttatgtgcttctgctcatgaatctgacagagttgtgcagttatcaggagatgttcctgcggtaatgaaggctttggaggagataggttgtcagctaagggaaaacccaccaagacaagtcatttcaattagcccaacatacaattatgctgcaattcgaccatcccagccatatcttgacccaacttcaggacaaccaatcttgcagttgattatgttacattcgagatgctgatttcggaaacgatggttggtgggttgattggccggtgtggctcaaacatatcgagaatcagaaatgagtctggagcaatgattaaggtttat

SEQ ID NO: 28544 - DNA, 368 bp, Glycine max
acaatttttaatcgcatcgaaataccaacttcatttgatcctttaaatggtctatacattggtgcgcatgggctttactcctctgaagttattcatctaagacgtagatttggtcagtggcaagaggacaatggggccaaggagccttcaaatcttgagttttatgagtatgtagaggctttgaagctaactggggatccttatgtaccagctggccacgtggcatttcgtgcaaaaattggaaagaggtatcaattgcctcataaagggataatacctgaagagtttggcgtgattgctcgctataaaggtgaagggaggctggctgagccagggtttcagaatgcccgatgggttgatggtgagct

SEQ ID NO: 28545 - DNA, 218 bp, Glycine max
  unsure (1)..(218): unsure at all n locations
agtgtatctatggagagtctactccaacccaggtgaatggattcaaacctttactgcacttaatttttaaggcaatgcttctggttacatgtaaaccctcttaaagtgtatcaattttgagacagatcaagggaattagttgtatgtgtaaatgtatggcagttattcgttgcgctgccnnnnnnnnnnnnnnnnnnnnnnnnnnnnnnnnnnnnnnn

SEQ ID NO: 28546 - DNA, 388 bp, Glycine max
atttaatttgccaaccgcgccagatcgccatgactacaacaacatagactagtgcggtgcattccctcgtttaccatgctttcctaagagaaagagaaaagtaaaacccctcactactgatagattttcattcctccgaggaaaaaaaaaacatgtcggatgctttgatcaatggattggccggagctggaggagggatcattgctcagctcatcacatacccacttcaaactgtaaacactcgccaacaaaccgagcgtgatccgaagaaagacacgaggagtcaaggggccctcgaacgaatgtgccaggttgtaaaagaagaggggtgggaacggttgtatggaggcttgatgccatcggtagtgggtacagctgcgtctcaggg

SEQ ID NO: 28547 - DNA, 330 bp, Glycine max
acaagagaaagtcgatctagttcgaggaagcatcctctctgcgtatctgctactactgttctaagaaaatgagtttaatcattcatctaccatggtcaaaaatatcaaaataccaatacctcttacgtcccatgttaatctaacaattagtaataaccttcttcttcaacccctccactcactcctgtttcctttccataacccccatgagttccctcatccacctttttctctttttcttcttcttcctctgtctctctcactcttctctatgtgacacgtgtcccctgaacttcaccatcctgggcagaaccaaacccacatccttcg

SEQ ID NO: 28548 - DNA, 378 bp, Glycine max
ctcgagccgctcgagccgagaagctaattgatagaactatcaatgctacgattgtgctcgccgctggcactttcgccgtcaccaaacttctcacgattgatagcgattactggcatggatggacgctatacgagatactaagatatgcgcctcagcacaactggtctgcttatgaggaagctcttaagacaaatccagttcttgccaagatgatgattagtgggattgtttactctataggggactggattgcgcagtgcgttgaaggaaaacctctgtttgagtttgaccgtgcgcggatgttcagatcagggcttgttggttttactcttcatggttctctttctcatttctattatcagttttgcgaggagctat

SEQ ID NO: 28549 - DNA, 502 bp, Glycine max
gccatgatgcaattgggggaaggactatgtaaactgagaaagatggaattctcaaatgggccgtttcaaaagtttgagaaagacatttcagctgttctagattttatctaccagactcagatagaattagctgcatgtagtgaggatatgtgtgttgcaatggatcgatcagaaaggtcttaccaacttctaggggaatatgcttcagggcagcgtgtgtatgatctagaactttgtagtgatgcatcagtgtacatggtgttctgccctcaaggctctaataatggtggtgccaccgaagccccaagggtgaagcttccaacgcttaaggctaccacagaacatcttgtggcctatgaataaaagtgaacatcatttaaggccaaagaccaatgctatagataaaaccacatgcaaaatttgttcttgtgcagttgtcacataatagaaccctaattaaattaaaagcagtaacaaatcacaatatgtcaaaccttatgtt

SEQ ID NO: 28550 - DNA, 421 bp, Glycine max
agcaagaggaggaggaagagttgaatctgtggaacgcgatggtggaagaggcttcgagaatggagggtttggatcgcgatgttatgaaacggttcgtttcgccggtgatggcgagaattgaatccgatgactatgcagagtatctgagaacagagcttgtgtaccaaactgggttgtctcaagaccccagcaacactctcctccttgtcaactatgcccagttcctctacctcgttgttcacgattttgacagggccgtggagtttaagcatccttaacttttttttatatatatatatatatatatatatatattatcaacgttaaatttcagtttttgctatgtttattttacttttattgattgataatacatattatttataagactcaaaaaacaaaaaaaaaggggcggccgccg

SEQ ID NO: 28551 - DNA, 288 bp, Glycine max
cgactaccagacgtccatcgacctcgacaaggacttcatcttctctcacatccaattgggcgttacacagtacaagatcggcagcatcgcctcgtccatggccactttccgccgctgcatgaagaacttcgccacagtacccgatgtgtacaactactacggcgagcttctcctcgaccagcaaaaataccaagaagccatcgagaagttcgacacggcagtagacatggaaaagagctccaagcctctcggcatgaacgtcctgccgctgatcaacaaggcgctcgc

SEQ ID NO: 28552 - DNA, 1154 bp, Glycine max
ttccacgcgtccgaacttgtttcttgggtagcaaaatctgttacctctggtttggatgctttgtacctaactagatttgaatcccaagctgctgagcattggcaggctttatattcttctgttaattttggagctccatttctcattttatgttctgagaatgatgaccttgtgcgataccaaagtatctatgaatttgctcaacaactacgcaatctcagtggtgatgtcaaccttgtcattacaaacaccatccaattgaatatagagctgctgtgagccatttattagagaaggcttcttcaatatattcacaaaaaatgttgcttgaacgagaaagaactggtatggatggtacacaggatgagatatctgagttaatctgtgacctgcagaaggtggcaatcaattcaaataagagccttagaagagttgcagttgggccaaccgaccacttctttttgcctagttcagcaggacattacagtgatagagaatctggtgctccgcaagacgaacaaaaagaaaaacctgtttttgtacctagcttcccaagcatcagcgctcatagtgtccttggccaatttcttttcgacgtttgtgttccaaagaatgttgagggttgggatgtgaaatcttctgggaatctaaatgggaggtcatgtgcttcagctccaaggcattcactattcaggggtactaaacgcatcggtcggtccaaattatgaagttgttcccatatctgacttgaggagatactttatgataaacctgtttgaaacatcagcagtttccctagacaatacaggaaggtatgatagattttggtgcaatgattggctgttatgtctggcaggggacatgtaatggctgcaatggttcaacaattaattccttggcacttttgagaaagtgatggggtgatgtggataaaggttacttgagttccattccttctaatggccctcagaaaaagaaaaaaaaaaccatgactgttgtatcagaaaaaagagcttctgatagttcaaacaggttgatgcttggctatggtaattactcatttggtaattgcatttgcatgaaatgggataaactgtactgacacttatttgtagttagagcaaaagtaaatagatgtacataatatatttttg

SEQ ID NO: 28553 - DNA, 447 bp, Glycine max
cgaaaatcagaaaagctattgttgatttccatggtgaactggttctcttagtcaactacagcaacatcaattacacagggttggcaaaaattctgaagaaatacgacaagaggacaggggggcttctgcgtttgccgttcatccagaaagtgttggagcagccctttttcacaacagatttgatttcaaagctcgtgaaggagtgcgagagcataattgatgcagtgttcccggccgaggaagaagctgaaagagcaaaggaagcaaaagaggcgataactgtggcaggaaaagggattttcagaaacacggttgcagctttgcttacactgcaagaaatcagaaaaggtagctccacagagagccctttttctctgcctccactcaatttgccggactctgatctcatccaatcaatacagctcaatgctgcagttcctattgtct

SEQ ID NO: 28554 - DNA, 287 bp, Glycine max
agaagagcgaacacacataatgaaagactccgatgacatggaatcccaagaagaagaagaagaagaacgagaggaggcactctcgctctgcgaccttccacttaaccgcaattcccgaactccaagcttggacgacatgtcgtttaagaaaattctccgaccgtcctcgttacccgatcacgccggcgagattttcaacggcttcagcagcagcagcagctccgacatgtgccccgccgacgacatcattttctgcggcaaactcgttcctttcaaggccgaacagc

SEQ ID NO: 28555 - DNA, 451 bp, Glycine max
ttcgttttggcctcaaccaacaataattctagtttctctcattccttctgtcccttaattgcgaagcaaatctttcttcttcccatggaaatggaaccgacgtgcgtcgacacttccctcaaccttaacgttgttccttccccacacatcgaccacctcgcgggagaagttttgcttgaagagctgcggcgtctaagcagtgagaacaagaggctaactgagacgctgaaccacttgtgcgagagctatgttgccttgcagaaacatttgagtgaattcagccaacttaggaacgcaaattttgataaagaaggaacttgtgcagttccgtcgctaaagagaaagcccgagagtgagaattgtgtgaatctgtttggtactcggtgctccaccatcacagaggaagaaacattcaaaaggcccaagcatagcaccgagccaaaggtttcca

SEQ ID NO: 28556 - DNA, 271 bp, Glycine max
caatcatggaggagttcgaggatgcagtctcattcgtatctaagaacagcggcatgaagacatcacaagatgataacattgagattctattcgatgtacaaattagccacggtcggcccgaacgatacaccacgtccaggattttttgactttgcaggtcgtgcgaaatgggacgcgtggaaatcgtgtggtgaattatcaccagaagatgccaagactgaatacgtcaaactgctagatcgattagatccgaaatggcgggaaactctgc

SEQ ID NO: 28557 - DNA, 391 bp, Glycine max
atgatcctctacaactccctcatcctcctctccttggtcctcatgatcctcgccatcgacaccgacaactccctcctcctcttcctcgctatcctcatcgtcctcactctctttttagtcgcccacgtctacatcaccgccctctggcacctcgcctccgtcgtctccgtcctcgagcccgtctacggcctcgccgccatgaagaagtcctaccacctcctcaagggcaggctccggttcgccgctgtcctcgtctccgcctatttggtcgcctgcggggttatctccggtgttttcagcgtggttgtggtgcacggtggggaggactatggggttttcaccagaatcgtggtgggagggttccttgtggggcttttggtgattgtgaact

SEQ ID NO: 28558 - DNA, 369 bp, Glycine max
ggtttgtgcagcatcttcaatgtgtacctgcatgtgtctcttcaatcctgaagattctctctaacaaactattattttctgaaaatcaagtatgcggctgaagttcatcgatttatggtttccatcacatactctcaactgtggttgacagacacaccactgggaatgccaaaaaaatgtgccttcttggttgcagctttgtggttgagattcataaggtgatacctttgctattgattccccacttaatgcttgacaagagtggaccacaagtttgtagttcattcattagctattccttgatgcaaaataggcacacaagtttttgtagagtgcctgttctgcttatacacgatccatgtgaagacg

SEQ ID NO: 28559 - DNA, 240 bp, Glycine max
gtcgaccattaattcgacacacaatgagtacccacgccgtcaagccgctgcaaaatctgctggacccgtttggcgcgcgtctggcacgtctagagacgcaactgggtatggagggagcgcttacctctgcgcatgttgtgactgctgccgtctcgcccgccgccgtttccgaggatttgtcgccacagctcaaggcgtacgacgagtacgtggctcagtatttcccgcccttcctggacg

SEQ ID NO: 28560 - DNA, 267 bp, Glycine max
ctgtttgcagatgggttgaagattgggaagataacaaaattattatttgtaacagatgccaaatagcagtccaccaagaatgctatggggcaaagaatgttcaggattttacttcttgggtttgtagagtatgtgaaactcctgatgttgagagagagtgttgcctctgcccagtaaaaggtggtgctctaaagccaacggatgttgaaatgttgtgggttcatgtaacatgtgcttggtttcgacctcaagttgttttccaaaacc

SEQ ID NO: 28561 - DNA, 449 bp, Glycine max
ctcacaacaatattgtttcatcactcagatcccttaaagatgacaacagcagaagacacttcaaacttggatctcatacgccaacacctattaggggaaaatatcatctcagactcctcctttttctccaatctccttcatcatcctatgaaacttgaagcaccctcatcaccagaatttgatttcacctcatatatctcagacaacacaagctttttcactttccttgaaggctatgatttgatggcagacatgaaatttgttgattcagacaacaccatcccttcaaaggaggttaagaaatgcaatatttctcctgaaccattggtgtcatcaaaagagaagccaaagaagttagaatacgataaggcaaagcgttataggggagttagaagaaggccttggggaaaatttgctgctgaaatccgtgaccctacaaggaaagggac

SEQ ID NO: 28562 - DNA, 331 bp, Glycine max
gattgagttccgtgatctttggcagatctggctcagacgcacttcctttcagaagtgcttccaaagatgtcatttttcggcaaagctgggacttgagcgatgcaaccgcaggagtaaaccacattcatgttgaaccggaacgcgaagctatcttggtccaattcaccatttcctgcccaaatattgagaaagacacatcactatatgtcatcggcagcactacaaagttggggcagtggacagctgaaaatggactaaacctcagctattagagtgaatctgtctggaaagctgaatgtgtgatgcaaaggagtgctgttccaatcaaata

SEQ ID NO: 28563 - DNA, 271 bp, Glycine max
ccggcgtcgccattcgctcatggcatgcttcagaatgttaacgcttctgggagttcccagctgttatcgacgcatcccgcgattatatccaattctgcagtgaatcccatggttgttcaacctccaggtgtctcttcacatgccgctccttcattttcatataatattccccaaagtggtgccattttttctagcaaccagcagcatgcacaatctagcactctacttcatggatgccaactgccctgtcttttcctgtgcatccagtaat

SEQ ID NO: 28564 - DNA, 832 bp, Glycine max
gactcgccggacaggtttcaggtggagagtcttcttctcgggcggcgaatcgcggcggtcattggggggcccgggtcggtgaggagggagagtatggaggacaaagagcagtggagggttctgatggagcgtgctggttttgactcagtgagtctaagccattatgcaattagtcaagctaagatacttctctggaattacagttacagttctctgttttcgctggtggaatctacaccaccggggtttttgtctctggcttggaaggatgttcctctcttgaccgtctcctcttggcgttagttaatgggttcgacttggttgattgttattggaaagggtttccacctggtccttttttccctggtgtggaacaactaattattattattattattattatttgtcgatatgccatggatgatcgatcatgttgtgctatgctagcctcttcaattactgaagttatgcagaagatttgatatgtgaattggctggcactacaagaaattgaggtttttgggagaattgccacctttagcagcagtttggtcctctactagttccacacctccttacttttgtttttttagttgatttttctatttcttatcagcgttttttttttcttctagtggcaatgatgttattattagcttcaagaattggctagccaaactgtgacaatgaaaatagggagaaatgggatggagaaaagctttctttctcattgcttctagtcattgtgatttgtgactctgtaaattggattttgttgtatggatttaaattggtctgaatgaatgaaatgaatatcaaaggattttttatc

SEQ ID NO: 28565 - DNA, 621 bp, Glycine max
cctcttctttttccacatgatactaatcacaaaggtcagtgattcagtagctgagaatctgagggcatcactacctatgaatatgttgtagcaatgagagccatgagtgaagcacctgcaggagcatccgtagatgaggatttgccaaatatacttttctctccaacaggctcagccacaactggattgagtggaggaagttctcttggttcgcagtataaaggggcttggtgtacccctcctagggtattcgtggattatcaggatgaagttgtgcctcacttggagcctggaatgctaccatcaactgttgatccagatgcagctgggattgccgaaagagggcaaaagatgccaaaaagacctgttcgtattagtgcttggaagcttgctaagttggattcacaagaggcagtgagagcagctgcaaaggccagggcatcttcttcagttttgcgacctgtagataaccaccgtctaccagatgtagaattgagttctagtgggaacatgagcatcagaagtagtttgagcacagagactggaactaacaaggaaataaaagccgagttgagattgtctccagtgagaaattctattgctcctagtcaaggaagtcgt

SEQ ID NO: 28566 - DNA, 961 bp, Glycine max
cagggaatagcatatgatagacgatgcagttttgggtgagaatgattctgaaacctggtcacaaagtcagaatgagttccatgatgaacaggaggcattaaacaattctagccgtgaaaactcctctgattttggagtagttgaaagggaaagagtgaggcaaatattcagggaatggatgaatagtggttctagggatcatgcatcaaatcattcccaaggaaataattcaaggggagaatggcttggggaaactgagcaggaaagggtgagtgccataagggagtgggtacagatgagcagccagcagagaggcgtttcttctggggaaagtagggaagaacaatcttctgaaattggtacccaaatcgaatgcgttcgtgatggatttgttgttaatcagaatgagggccaacaccaaactgagcatacacggcggggaatccgtaaattacgtggtcgacaggtgtttcttgatatgcttaagaaagctgagatggaaaggcaaagagaagttcaagaattgttgaaccatcgagttgtatctcattttccccatcgcaatcgcattcaggccttgcttagaggcaggttctcgagaaatgatagatcgattgataataacaggtccacttccattgcagaaagtgaattaggcttattgagacaaaagcagactgtatcaggtctaagggaaggtttcgtttttagaaaggacaattttggttgtagtcatgcaaccagtaacacatctgatacctcatccgagaacgacattgatgttaatacaattgaagacactggagctagcagcttacaagcagtcccaactgtacattctcaacaatctgaacctaataacagggtaagtgatggacttgagatatcatgtgatcagatctgctcaaaaggaaccatttgtgagaatttagattggcaaggctctactgctcatgtggaa

SEQ ID NO: 28567 - DNA, 477 bp, Glycine max
ggtgataaggaatgtaccgcgaagacagtgtagaaagagaaactgaattcaatggcgccactttcattgcctctgaatttgaaatggacgccgttgagtgtgaaggccaccgccaccgccaccaccaccagcaaggtccctgaggtgccgctgccggagaagatccgcaactctagaatcctcgtcctcggcggaacgggtcgggtcggaggatccactgccattgcactctccaacttatgtcccgatcttcaaatcctcgtcgccggcagaaacagggagaaaggtgaagttctcactgcaaaacttggcggcaattcacaattcgctcgcgtcgacatcgacgacgtgaattcgctggaaacggcgttgaagagtgtagatctcgtagttcatgccgctggtcccttccaacaagcagaaagatgtagcgtgctagaagctgcaatacatactaagactgcgtatcttgatgtt

SEQ ID NO: 28568 - DNA, 325 bp, Glycine max
atgtgaacaaaggtcaaactgttggtgagaatgcttatgagctatctaataatcatgagacacagatacctgttgagaatgaaggcaatgtagaatcacattttcactcaaatggtaatgatgattctcaggccacagaactggcttcatcagctcaagacgatgctccaaagaagtcttatgcatcaattgtcaaagtccaaaaagggagttcagttccaactaaagtctatgtgcctactaatacactaaagtctgggcctaacaaaactgagagcaaggtagttgagtcagtagaatctactgaagtgctgaagcagctttg

SEQ ID NO: 28569 - DNA, 581 bp, Glycine max
gccaaatgtgctcatgacaaatctgtgattgaacagcttaagcaggatattgctaatgctaataagcagaagctgttgatttctaaagcacttacaaaaaaggagaagtctgttggggatgtccagaatcaaattgaacagcttaatgctagtatcgctatgaagaaagctgagatgggcactgagctcattgatcatttaacaccagaggagaaaaagcttttgtcagatttgaaccctgaaatcaaagaccttaaagagaagcttgttgcttgcaagactgatcgcattgagactgaagcacggagagcagagctggataccaatctaaccactaaccttaggagaaggaaacaagagctggaggctgtaatatcatctgcagatgctgactctttggttgctgatgctgaatcaaagtggcaggaacttagtgatgctaaaatattggttgatgatgcaatagggcagcttagaagtgttactgaaagtataaatgaccgaacacgacaaattaaacagatccaagccgtcttgaatacattgaagtcattggaggatgagtatgaaaggaaacttca

SEQ ID NO: 28570 - DNA, 489 bp, Glycine max
acttggtcttgatccaactgttgcaaacatagtacatcaatttattgttgatgggattggttccatcttaccatctggtttgcagaaggtagctttggatggaatttttggtataggtcgtgcacaggtttcagaatttgtcctaaatgaaagtaaccctcttggatcctcaaggttggctaagctaagacatatatttgaagaaggaaaaagccttcaacttcagttccctgctgaagatcttggttttaggtacctacaaggagcacttatgccagagagtaaagatgttgaaagtcctccagaagtactaacagggcgtcggagggactacaccccttcagcacaaccaggatcaagactgcctcatatatctgtgagagtaaacccgttaagtgaggagactgtttctacacttgatcttgtgtcgggagataaagttgagttcattctcatcatagcacctgtggaggaatcttatcatctagc

SEQ ID NO: 28571 - DNA, 271 bp, Glycine max
tgacgagcttgtggaagctcttgttcagagaggagaagctaaactcttaacagaagattgggagggagctgtggaggatctgagatcagctgctcaaaaattgcctcaggatatgaatatccgtgaagcagtaatgagggccgagaaagctttaaagataagcaaacgcaaggactactacaaaattttgggaatttcaaaaacagcttcggctgctgatataaaacgtgcctacaagaaactcgccttacaatggcatccagataagaac

SEQ ID NO: 28572 - DNA, 467 bp, Glycine max
cgtagatatggctgaaactgacatccaagactatctccaactcttcttcctctggttactctccatcatcgccgttagagccatactcaccaaactccgccacaagcctcgccgtccaccgggcccacggtccctccccatcatcggccacctccatctcatctccgccctgcctcaccagtctttccacgcgctctccacgcgctacggccccgccgtgcaagtcttcctcggctccgtccccgccgtggtcgtttcgtgcccggaactcgcgaaggagttcctgaaaacgcacgagcccagcttctcgaaccggttcgtgagtgcagcggttcaccacctgtcctatgggtcccaggggctcctcttcgcgccctacggaagctactggaggttctctgaagaagatttgcatgtcggagcttctcggtggccgcaccctcgaccagttccggcacttgagggag

SEQ ID NO: 28573 - DNA, 851 bp, Glycine max
aaaaaaacaaggagaaaacaatcattttttcccattggcattaatttttatggaccatatctctcagcaccaaccttagcattaactatcctttttgccaactcggggctccattttctccacttttcttcagtgcccagattctccatataccattatgctcttgatggtcttgctctcctcctacttctggttccctctacctgtgcagctcttggccactggttatagtttatcttttggttctatgcatttgatgccacctccttttgtgtgaatctaccagttttgcaggtcatggcaagacgcactgtggcaataataggcccccatagttctgtaacagctcatgtcataactcatattgcaaatgagctccaagttcctctgctgtcattttcagctttggaccctaccctttcttcacttcaattcccattcttcattagaacttgtcacagtgatctttatcaaatgactgcaatagcagaccttgttaactaccatgattggaaagatgttattgctgtctaccttgatgatgataatgggagaaatggaataggcgcattaggcgataagcttgctgagaggcgttgcaggatatcatataaagcacctttgagccctgatgcatctatggaagagattactaatgtgcttgttcaggtagctctggcagaatcacgggtaatagttgttcatgcaaatactcaatttggccccaagttgtttagtgttgcaaagaatcttgggatgatgggaactgggtatgtctggatagccactgctttcctctctgctctccttgatatcaacagtcccctctctccagattcattggatgacat

SEQ ID NO: 28574 - DNA, 580 bp, Glycine max
gttagattcacactgaacaaatgctctcaatctatttctattttgtaagacatcagatctcctcacgaatgctggtgcccaaagccaaaacgcacccacaaagcagataacgccgtcgtatgcaaccctcaaatgaagtgcaagacacatacctcagaccttagcagcaccgtcggcgtctgcgcctcctgtctaagggaacgcctcatatccctcgccgccgcccaggcccaagcccaagcccatcacccgcaggcccaattaacgcgagtcatctcacgcgcctccgacgattattccagaaactcagaccctaaccctcccccaccgttaatcttccctcgctctgtttcgccctacgtctctcgccggaagtctgactaccccgccgactggctcgacgaccgccgcgagaggctgttctacagcactccgcagctcggtcccaccttctgcgccggcgattccgaataccacgccgacgcgaagtcgttcaagaaacgcttcaacaagttccgcatattcgcgaagattttcaggacaagatcggagaagttccagtcggatccgtcgtgcgagc

SEQ ID NO: 28575 - DNA, 502 bp, Glycine max
accagaagagctttttagtggtgacggacagtccaaaaagggccggagaggactaaatgagatgcctcttcctccaagcatttaccaaagattgacatcaagttctactctaatgaatttggcgcaggctttagcttaccataaaatgtgttacgaagatatgccgctgcaggagctgcaagcgacccaggagcagcggactattcaaaatctatctgacacccttcgaaccattcttcggttgtaggtaggtatcttattgtgactattttaaatcccctacctttaatggctgcaaagatcacaaaacccattttcttttctcgtgtcattggtttatatattcatacaggtcaatggcatggttgtgtaactagtacccaatgttttgctggttgctttaactatttttcctagttttgttaagtaaaccctagaagatttagagttttgtaagctgccacatatttgtatgtaaatagaatatgcatgactttcgact

SEQ ID NO: 28576 - DNA, 248 bp, Glycine max
gtagctactgaaggagagtctaacactccaatttcaagaaagattgatgatgaaataataactagcactagatggtggcaaaaagtgtttagtccaccgcctcgaggtgaggactatactatacttcaagccctattcagcttagacatgatactgctattctgcgctggcacatgtggtgttggtggaaccttgaccgcaattgataaccttggtcagattggaacatcgctagggtacccagaggt

SEQ ID NO: 28577 - DNA, 235 bp, Glycine max
ggacctatacccgatgaatttggaaatttaactcgactagaaatacttgatctcacttggaataatttcaatggctcaattccaaaaagccttggacgcctctcatcagttgtcaatctgtcacttttgggaaatcgacttactggttcaattccctcagaaattggtgacatggctagtctgcaagaactgaacttggaagataatcaacttgagggacctcttcctccgagcc

SEQ ID NO: 28578 - DNA, 354 bp, Glycine max
atccgatcagattcttaagtcaatggttttgatttgagggttgcttcaaagcacacaaagtaagcttcttggaaccctagttttcttggttctctcagcctaggttgattttctcgagaaaagaaaatttctttgtgtgatgggtacggtggaggctcgatcaaaggagccatctgggtgttcatcgccttctccagagaatgacaagaatgagctcagggaagctctgtgtgctttgaaaaatggggcttcagaaaaccaaggttctggtgatggtggggttgttgaaatggggaagagcagggtctctgagaccaaggtttccgatgagaagggttttgaggggagggaact

SEQ ID NO: 28579 - DNA, 246 bp, Glycine max
ggcttattgaggaacttgctgatttaagcataggcaagactgccacgggtaggagataagattttgttggaagctgtgtatctatccaaatatttctacttcttcagatattcttctttctcggatgcgtcattctggattacacttttacggggagacgtaaaccagcttttttactcggggagggattaaattgtgttggtggaggttgtttatttgtccttggaaacaggagatgaagagcag

SEQ ID NO: 28580 - DNA, 654 bp, Glycine max
acgagatatgatgccaatggttccacctcctggctataattcgtactggaatggcatgcaacctatggatggatttatggcaccgtatggtaatccaatgcaaatgatgggttacggcctgggccccttggacatgccatttggtggtatgccacaagacccatttggcatgcaaggttacatgatgcctggtttcccgcctcatagggatcttgctgacttcagtatgggaatgaatgttccacctcctgtaatgagtagagaggagtttgaagcccggaaagctgatatgaggaggaagcgtgaaaatgatagacgtcctgaaagggacttctctaaagatcgagactttggtagggaagtgagcagtgttggggatgtttcttcaatgaaatcaaaaactaggtcaattccaccgtcctcgggtagcgattaccatcagccccgtttccgttcagagcgacactcacctgataggtctccgcgcgatgtggaacctccacctccacgcccaaccaagagaaagttagagcaccactccgatcgcgaacgcgaagacagggatcgcgactatgagcacgagcgccaccaccgccgtcaccgatcggaatcctcatccagaaggtcatcggaaccagtcgccaaaccttcatc

SEQ ID NO: 28581 - DNA, 281 bp, Glycine max
tctggggtgcgtatagagagcagatgtggggcttgttcattgccaagaaaaattgagatgctttattgctatcatatgccttgttctagctatatttagttcctgtgtagccggaataattaattatctctatgtctgttttgttggtttaaaattcatagctttcgaactataatgatgatctgcggagaggagaacgctcttcgatttgaataacacaatggtaacttggcattggctgccatgctaaaaaataatttcaacgtcttggtttttggttt

SEQ ID NO: 28582 - DNA, 603 bp, Glycine max
aatagatatgcacatgaaatgcaagcaattgatgagctactgaagaatagaaatgaaatacaggcatcatacaccagtgctcctttaaaacgaactacaagtaggagcagaagtaaaaattcttccaaggaggcaaaagaagatggccaagcaaaggaaaagaggagtacaagagaacggccaaagaagaagaaatggtataaccttcacttaagagttgataagagaaaggcttgctaaggtgagaattggacaattaagttcttctgtcactcatgtattgatataagtaatgaattgttttattatttggttgtcaactctgaattccacggtaaaattattaccagtttatctgcacccttttgattgtttagcacttgtgcaagttaataggaaggctttgctaaagcaacaacaaccaaatgaagtggaaggtttcgtttatgtctgtcactcaagcatgtcaaaaatgacaagtcctcattgtttatgtataatcccccttctccccttttttatttgtctctcagtagctcattttcagaattcgtacttgtaaattgtttgatttattgaggaagcacgattaactcttaaaaa

SEQ ID NO: 28583 - DNA, 275 bp, Glycine max
ggagaaaagaaagaaaggtaattgctaatttcattcatatccctttgccttattacatggaagctgtatatatagcttattacagtaacagaatttggaatttgcaggatatgctcataatagaatggattctgcactatggaattggcaagcaagcaggggacaagattgccaggtcagctctagccgttacaagtagtctttgaggtattctggccttgtgctctttctgttgggccttgccattggcaccccttctttctccttcttcatat

SEQ ID NO: 28584 - DNA, 827 bp, Glycine max
agaatcaccaagagagctggggaagcaagtagattacagttagtggaagctataatccaagttttggaagacaacaccgcgagtgagactcatgaatgggaactagtgaaattgaaatcatatgccttgatttctccatatttaccaaagaaataatagaatggaatagaaaggccttcaagaggatgtaaaacctcaaacacttaatattagaaatggcaaattttccaaaggtcccagataccttccaaatagtttgagaatattggaatggtggagatatccttcgaattgtttaccatctgattttaatccgaaaaaacttgtcatatgcaagtcacccaatagttgctttacgtcatctgagatggatggcttatccaaggcaagtttaaagagtacattttcctcaccacggaatattttcctcatggatctactcgacattccgtaatgagtgagcttttgtatccgtatcgaagaatccggttatctactcggcagctattgaatcagcaaccgctggtacagtaagcggtgttcaaatagccgttgttgggatcttctccgctgctagctcttcttcttactaggttttgcttagcaagcatcttcagaaaattagagggattccgccaaatttaaggtttttctttgcaataaactgtaaatccttgacttccttgggtacaagcatgttcctaaatcaggaactgcatgaggctgctggaaccactgtgtttcatttcccggaagcaaggattctagagtggtttgatcaccaaagcagggcaccttcaagttctttctctcgttattgcacctgt

SEQ ID NO: 28585 - DNA, 263 bp, Glycine max
gggtgattccagtggggtggcagtgaacaaattggaaagtattagccaaggagagaaacagttccgaacagaagttaccacaatagggacagtgcaacatgttaatctcgttaggctccgcggattctgctccgaaggtgccaaaaggctgctagtttatgattacatgccaaatggctccttggatttccatctgttccagaacaagaactctaaggtgttggactggaaaacgagataccaattgcgttgggaacagcaga

SEQ ID NO: 28586 - DNA, 257 bp, Glycine max
acgaaatatcacgatgaaggctactaccaccgctaccatccttgcgaccgccgctgtggcgtcagctcaggtcgctttgcctgacactatccccatcttgggctaccccttcgggcagcagtgccagcagaccgtccttggtctcttcaccaatggctctttctcacagtgctttcccgctacggctctcttgcctctgctcacctcgacgacggactcgattgtccccgtcctggacaattcatgaccgagttgtg

SEQ ID NO: 28587 - DNA, 384 bp, Glycine max
cggctcgagcagagtccaaatataatttcagaaaatattctaaagtgcttatcaaacattatcttgagaatgagtgccgtgaagaatccaggttctacatgtgacatggcacccgtgtgggatctaaaacctcaaaactgtgatgaagaagcagatttttggggatccatatggcatctgtttggaatttgggaagagggatattggtccatacaggcaattatgtgcaattgatgccaaatctttcaatccaaaacgaactgcaaatactttatttttactacatcggttgacactactttttaggaacgtagcctctgtcaacttggaaaacctcaaccatcaggagaagcttgcattctggatcaacactacaattcgtgt

SEQ ID NO: 28588 - DNA, 885 bp, Glycine max
ggagaaaagaagtagtacggtttacgtgcctagagacgaaagcttctcggaagttaagcaactaacgttttcgacaaagacgttatcgtcggggttgaaagcgctcgtgccggcgctgaagacattgatagttgacaagaatctagggtttcctgtgttctcggccatagatgaccttttcgatgaaggcctttacttgcctcctctaaaaggtatcaggagtatcttgcccaggctcgttaggcatattaaggatattcaggaagacattctcctttttgatcctcccgcaacaatgaacaaggacagatttttctggttaagggacgaagaatttggaagacagactctcgcgggtcttaacccttgctgcatccaattggtcacggaatggccattgaaaagcaaacttgatcccgaaatttatggccctgcggaatcagccatcactaccgaaatagttgagcgggaaataagagggttcaatacggtggaagaggccataaaacagaagaaactgttcatcctggactaccacgatttgttgttgccattagtaaaggatgtgagagaacttgaaggcacaacgctatatggatcaagggcattgttcttcctaacccgcgaaggcacattgagacctctggctattgagctgactcggccaccaatggacggaaaaccgcaatggaaggaagtcttcacgccttgctggcactcaactggtgtctggctttggaggctagccaaacttcatatcctcgcccatgactctggttaccatcaacttgttagtcactggctacgaactcactgtgcaacagagccttacatccttgcaacaaacaggcaactgagtgcaatgcacccaatctacagactact

SEQ ID NO: 28589 - DNA, 282 bp, Glycine max
tacgaagacgacagatggggggagctgagctgagaaaacccccaaccccaacctcaaccttaacctctcctcactttcttttcaaccaggttctttctttctcacaaatctgattccttttccctataatttcccacttctactattttctctatttcttttattccctttatctctgatttcccgacgatccctttgcgttagggtttttcgctcgcttcttttcaattagtgatttaactatacctttgattgagatattggattggattctgtattgtg

SEQ ID NO: 28590 - DNA, 259 bp, Glycine max
gtcaaactcaatttaattcaattgtgaatcgcaacaaccactagattattgcttgcgctcctctaagccaattcaacttgctccttctcctccttcttcttcttctaattcgttgtacatgaaatgtgtacggtaccaaagtatggctagtttgaatgaaaatcatcataacataggttctgtcaagggagaaagaaaaccagtgggggctgtgaaggcaactatcgctaccaccaaccacataaccacgtcaaaacca

SEQ ID NO: 28591 - DNA, 250 bp, Glycine max
ccaccgcctagaaaatttcctataagcgggatacatgcaaatggagaagacacgggcctgccttctaaatcattcaaccttgtttctattgcttttgtggttcatgaatgtcctgcaagagctatagtgaatttagtgagggaagcattccgtctccttcggcctggaggcacactagctttggtagattctacgacaaagtcaaaggtccttcaggaattgtctcctgtcctgtttacattgcttaaga

SEQ ID NO: 28592 - DNA, 433 bp, Glycine max
gttcatacctcaccaatggaactctcttcttccttcacacactcccacaacttgttctctttctcatcatccctcactcccactcttcgacgtcaaaccctccgcgtctccgcagtaaccatagacccaccgcaagagcttcccaagaacagcccccagcgtctccttaaggagctcgccgagcgcaagcgcccctccccgcgaaccccacgcgctcccccgcgaagattcatcctcacgcgcccgctagacgacaaaagagtcgcggacaggttcctcaacagcccccagctggcgctcaacacgtttcccttgctaagctcctgcctccccttctcccctctggatcacctggacaagtcatggatggagaatcacttgatggaagccaagcaggcgcttgggtaccctctggagccctccctcaccctcg

SEQ ID NO: 28593 - DNA, 358 bp, Glycine max
aatgcatataatcatgcattggaaactgcaaaactgaaatatattgaatcccttagatattatggggcggcaaggttagaactgaatgccatcaatgaacatgatgattctgttacaagcagcttgaagaatgaggcacatacacagtttgctcatacttttctgcggtttggaatgcttctggcaagagaaaatactactgcaatttatgaaactggatcactggaaggtacatgggtaagtcacaccacgccccatgacagaaaagccaggaaagatttgagaaagcatgagatttcagctaacgaggccattagagaagcattatctgtgtatgagtcgctcggtgaactgcgca

SEQ ID NO: 28594 - DNA, 241 bp, Glycine max
ctgatgagccacgaagtcagccattacaactaaatgagcaaggccaaattcttgaggtagccattgaagctgctgcaaatgcaattataaatctgaaggacaatttaaatgaatgggatggtaaagttggtgatggtgactgtggatcaactatgtatagaggtgcaaaagcaattcttgaggacatcaaaaattaccctctaaatgatgctgcagaaactgtcggtgaaattggttcatc

SEQ ID NO: 28595 - DNA, 497 bp, Glycine max
ggatcttgatctggtcttgccaactggtgaaagctactgtctttatcatatgtttgccttacacagatggaagtctcagtttacagtcagaggaattcagttgctctctgttgtgtacaagaataagctctttgcaaaccttgagatacgtgggaggcactcggaagtaaacttctgtaatgcagattctgagctacttttttgtgcggaaagatgctacatccagattatgaattgaagatataataggtgaatgtgggtagacttagaagtttgaaactatttgctatctttgtcctcttctcattctggagggtttattattttgtcaatgtgtaaatgtataaagttgtaatttctggtgagaggtagttgtggattttgcattactgcaatcatgcttctaccagtgggtactgcactttctcctcttgtccaatctctgcagaaaggaaagtcaaagagagccaggctaatgttgtcttgtacaatgtcag

SEQ ID NO: 28596 - DNA, 539 bp, Glycine max
ctcagtctcgtccattttccaaaaatacatgtctcttcaaccttcctgttaggcctcaacatgctaaaagctggacacatgtcacagatgaaaatggcaccagaatcatcagccttcaaatgagggatttgaagaatgcaaagaacataggaaatcctggaaaggaggttgttggcctcatgaaatctggtgaaactcgcactcttgctgagtttatggaaaatggatggtctattttggagaatctttggttgtttcaccttccaaacaaatctacaaatgatggtcatctctttgagcttactggtgccaacaaaagggtgagaattttccccggaagaaagctagactatgaactgagacacaatgggaaacggggaaatgaaatgaatttcctaacagctgttgaattctccatagaagaaccctatggcaaagcagtggcattgcttgacttgagatctagacatgtctcggcaaaggagaagtggatggtgcttcctggaatcattttgacttttattgcttccaatataatg

SEQ ID NO: 28597 - DNA, 443 bp, Glycine max
tctgtctgccacgcgtccggcggtgaagagtgaaagagacagagatagagtaaaccagaacgaaaggcaaagtgagtagcaggaggagtacggaaatggcatgtggctctgttctttcatcttttccttcacataacgaactccatggccatcaagggtgtcctctccttcgcaccaaatcctcctctgcttcttcgtctccccaaagctgtcacctttctttccttttctgcttccactaaatcccccactaagtcttttcaagtgagatcaattgctggtactacagaagctgcatcggggtttgatgagatggtttctgggactaagaggaagtattacatgctaggtgggaaagggggagtagggaagacaagctgtgctgcttcacttgctggtaatttgccaataatggacaccctactctcgtggtttccaccgat

SEQ ID NO: 28598 - DNA, 261 bp, Glycine max
ctccaaccccaacaagtattagtaaaggcaaagaacaaaacaaaacatggacgaatggcgcgccaccatcaaaatggatcacagaacccaacgaacttagaaaacctaaccgagtcctccatcagtcatattcccaacgaccgttcagaatgattgatggtagcgatcatgcaacagcagcagcagcatcaacagcaacagcagaacccctctgcactggtgccacctcagctcaagaatccccaatcctccacacatcat

SEQ ID NO: 28599 - DNA, 310 bp, Glycine max
gacagaggcaaatcgcaggttcgtccgtgaatctaatcaaagtttctcattaacttctgcgttagattcacgcacaaacttgtcatttcccttttcttaaccttttttttttccttttccgtcaaaactttgtttgttacattcgacttcgaattcagattcagatttctctgtttagtgctcctcaaaccgatgacgccgcggcttgttagcttctggctccgctacggtatggcatcttccatattgcacccattttgttctgttttttttctttcttccttttccctaaattttccatgtcaatatt

SEQ ID NO: 28600 - DNA, 743 bp, Glycine max
cctcgagccgctcgagccgattcggctcgagaataacaaaagcaccttccaacaacaaccattgccccaaaaccatggtttccttcctcaacttccatgcattcctggtgttccttggccctatacatggaattctccagttcctccacctgctttgtgtccttcaggatttcccctaccattctatcctgctacattttggaactgtggcatgcctgggaattggaatgttccatggttttcctcaagttcacctgcttcaaacctcaagtctccaagctccagtcccaattctccaactttggggaagcactcgcgggacagtgacatgattaagcaagactctttgcacaaagaagaagcttcaacgccaagaaacgggggtgttttggtccccaaaacgttgagaattgatgatccaagtgaggctgcaaagagttctatatgggcaactctaggaattaagaatgagtcagtgagtggtggaggtatgtttaaggccttccaatcgaagaagggtgaaaagaatcatgttgaagcctctccattgttgatggctaaccctgcagctttatctagatccctcaattttcatgaaaactcctgaattaatcacttcttgtctagctagcaagagacggtgaccatctgagtgatgatgggttattgacttgcttcattgaccttgtatagaagaagcaaaagggttgtagtctctgatttcctcagcataagtgggacga

SEQ ID NO: 28601 - DNA, 288 bp, Glycine max
cgacagtgcccactatcctaaaataatggagaaaacaaggtcctcagaccaagttgttgtcttcctcgaccagcataaccctaaaccaccctccatggaatccgaaaaccatcaggacaaacccaaacatcccttaaaagtcagagctcttaaccgtctcagcttctcaaaacccaaatcccgaatcctagaatacaactataatgtcccccgcaacaaagttgctgaagagagtgacattattcaacccacctataagttctcttccaacgatgacgatgacgatga

SEQ ID NO: 28602 - DNA, 628 bp, Glycine max
ccaagaagcagcctcagatttagaagatgatgtttctgtgaattccttcggttcaaggaacaacttggaagactttccaatcccattgaggcaaagatactcaaaaatgtgttctcttccaaacaacaaaagaacactatctataaggacttatcttcctagtccttcagccaaaaaacattttcatgcaggtctagtacaaggtgtgattaaggtaaagccacaaatgcctctacctgttcattcaacatctaatctttttcaagaactatctatctcttctcattcttcgaataataagcaaaaacgtgttgatataatgggaccctcttgctccaatcgaccaatggatggtgatggcacactacaattgagctataagcagggctctttcaataagaaactgatgaatcgatatttttcttttggagcacatggccaggctttggaggatgcaaatagctgcacgatgtcaaatggcagttccaagcattttagttctttagttgcataaatgttaaataggagctttgaaaaagtttgtgctgatcacgtttaaaaagttcatgtggaatatgcaacaataataattaatattaatgatactgataatatatgttcggcgctc

SEQ ID NO: 28603 - DNA, 296 bp, Glycine max
cgcggaagttgcaactgaagtgaagctctttaacaagtggtcgtacgatgacatcagcgttgcagcggatatctcattggaagactacattgccgtgaagggtaaagccgccacgtttctgccgcatacggcgcagcgcgaccagaagaagcgctttcgtaaggcgcagtgccccattacagagcgtctggtgaatgcgttgatgcgcaaaggtcgtaactcgggcaaaaagctcaaggccacgcgtattgtcaagcacacgctggagattatccacttgctgacggacaagaatc

SEQ ID NO: 28604 - DNA, 555 bp, Glycine max
cgaaaccgtcgattttcagatatctgtggggataagagaaagagagagtagagctcaacgtaaacgacgtcaacaaaatccacaatccatatctcaagagagattaataaaaagaaaagaggttaaaacaaaacaaattcaatctagggtttccaaatcattcttccctccaaaccaaacacccgcattctttcctcccaagaaagcgggttcagcctttctccattcgtcaaccgcatttcttcaacttcaagttttgtgtctcattggatgattgatccaagggagaaaggcccatggcatgggagggaggggaagagagttcttcgcggtgtttatgaattgaaaaaaaaattagaggatttcaccgatcttttctcaccgtgttcttcatttgttaaaatcatcgggcaatttcgttttattttcaaaattgtttcggtttgaatgcatgcatcttaatttatggatttggaatcttctggcgattcggtgaaatgttgcaagcactgtgaatgcgggtgtagtgattgctccatggcagctcaatcttca

SEQ ID NO: 28605 - DNA, 325 bp, Glycine max
acagtgagcaaatcatgaggactgagtttgccgcgctgcaaagccagctctgtactgcttaagcagaagcattcagccctcattgacaccttgcgtcaattagagacagaaaaggttgatctggaggatacagtagttgatgagagccaaagacagtggaatcgtgaagaggcttcctcaagattagcacaagaaaaatttagtgaaggaactgcaagtgaatctgaagatgacaatgagagatatgatgctgcagaggaagaaacagatgatgatgacaatgccttttttgatactcgtgatattcggtcatccagtcctttta

SEQ ID NO: 28606 - DNA, 272 bp, Glycine max
cttttcagacaaataatccttatccagatgttaagtacactttccttccaatattaatcaaatcactatctatggccctcagtaagtacccctttatgaacagttgcttcaaagaggatgcattggaggtcatcctcaaaggttcacacaatgttggaattgccatggcgacatcacatggtttagttgtgccaaacattaaaaatgttcagtctctttccataatggagataaccaaagagctggcaaggttacaacaattggcttcaaat

SEQ ID NO: 28607 - DNA, 273 bp, Glycine max
ccggcatgaacaattatcgaatgaacgaaacattgatggaagattttggttggagaaattttttgtagatggaacataagatttttggttgacaagtggctcaccgcttttaggtgtgcacgaatgacattcatagagaattatatgcagggatatggtagcgaacgttctgagcgagcagcttcggcaaattagtgcatactgtattttatttgagaaatgctagcaacactcttagacacactcttttaaatacactttctcatattggtt

SEQ ID NO: 28608 - DNA, 482 bp, Glycine max
ttacgtgttccccggttacattttccaaatgctaacctccctctcttggatttgctggttatatcccaacaatgttctggcccaacaacttgggtcgggcctaaacgggcttggcataggagcaattgggcttgactggtccaccatttcgtcctacctcggaagcccactcgcaagcccatggtttgccactgccaatgtcgcggtgggtttcgtgtttgtgatgtacgttctgactccgctgtgctattggctcgacttgtacaacgccaaaaccttccccattttctcggacgaactcttcacggagaaaggtcaagtttataacatcacagccataatagactccaatttccacctagaccttgcggcttatgagagacaaggtagattgtacatcagcactttctttgccatgacctatggtgttggctttgctgcactcaccgccaccattatgcatgttgctctctttcacggaa

SEQ ID NO: 28609 - DNA, 278 bp, Glycine max
gttgtgacaaatgattcgatgaagtctgataaaagtgaggacacatcaaaggaccggacctcaaagaagagtaagaagaaggaaaaggaacatgtggaaaagcctccgagcaagtcactaattaagaaaaggcttttggttttacctctggaaacatccatcattgctattatcttgcttgtgttgctaggtgccttctatgtggttcacagtgtatgggcagcagcagaagcttattcagccccttctattgttctaacatcgcattcacatgatgg

SEQ ID NO: 28610 - DNA, 825 bp, Glycine max
gccaactttgcttcccataatgcgtagaatgttaacaactgatggtcaagaggttttcgaagaagttttggagattgtatcatatatgacttttttctctccaacaatatcattggatatgtggagtctttggccattgatgatggaagcactggcagattgggcaattgatttctttccaaatattttggttcctttggacaactatatttcaaggggaactgctcatttccttacttgcaaagaacccgactatcaacagagtttatggaacatgatttcatctattatgtcagataaaaatatggaggacaatgatattgtgccggctccaaagcttatcgaagttgtcttccagaattgcagaggacaagtcgatcactgggttgagccatatctcagaattacagttgaacgcttgcgtcacactgaaaaatcttatttgaaatgtcttttcatgcaagtgattgcagatgctctttactacaatgcagctctgactctcagcacagtgcaaaagctaggtgttgcatcagaaatattccatctttggttccatttgcttcaacaagttaagacgagtggaatgcgtactaattttaaaagggaacatgaaaagaaagtatgctgccttggtttaacatcattactggcactcccagctgatcaattgccagcggaggctttaggtcgggtgttccgggccaatcttgatcttctagttgcctacaaggaacaagttgcagaggctgcaaaagaggaggaagctgaagatgatgatgatatggatggctctcaaactgatgatgaagatgaggaaggaaa

SEQ ID NO: 28611 - DNA, 204 bp, Glycine max
accagatcacaacaccgaaattgaaaaagctgcagatataaataaatccgaaatagccagattgagcttcgctttcgtcttcttctatcggtgctgcgattcgattcgttccgtttcctttcgatttgaggagcatggaccttcagaacactgtgaaggaagccctaaatgcactgtaccatcaccccgatgatgcggtgcgca

SEQ ID NO: 28612 - DNA, 289 bp, Glycine max
atttttagttcaagtaataatggtggtactgtaggtgggaagccagaatgcgagtcaaggcagcaggataactcattgcatggttccttggtggttcctcgggtggaagataaatcagcttctgtatctgatgtcacttctggtaggggcctggttgagtcttctactaataccaatagggctagaagtagaacagagaaggagccagttggtaggtacaggcaaaacaatagggtggctatatttcgggaccgtgaggttgaccgcaaagatcctgattatgacagga

SEQ ID NO: 28613 - DNA, 449 bp, Glycine max
  unsure (1)..(449): unsure at all n locations
gcgaacgacagaagggggttttgtttgtttttgtttgggacttgactttgcgctctttttgtctctgattccgagggaaactaactaaccttctcagtctcatagccaccaccatgaggaggatttatgatgaattgaaagagatagtgaagattcagaagttccgaagattggtgtcgtacaccggcttctactgcttcgctacgcttataagctacttttacgtcaacaacacgaccagggctggtttctctggaccccatcaattctacgcctcctaccccgctggtaccgagcttctaacggacactaccaagtgtacaaagctgctctttgaaattgcttcgaggctgnagaagtggggtcgnttgagttctgcgcatggccaagcacttncggcgtcaagggaaattcgcgtatgcatatcatgcgcaatatatggcacacct

SEQ ID NO: 28614 - DNA, 380 bp, Glycine max
cacctctctacttttctcaatcaacactgtttgtttgtgtcaaacaccataaaccattgtatcttttttctttgttctttgtctaggtcttggcactgaacattattttccatcaaaaataaaaattcagagcagaataacaacaacaattcaggaaaacaaaaaaactcagccacataatttccttcaactcatggcttgtactgagcatggccatggctctgtgttgttgggtttggtgttgttgagtttagctgcttcacaaagttgttgttatggtttgagcacatttgggtttgacatacaccacaggttctcggatccggttaaggggatgcttggcattgatgatgttccacaaaagggaactcctcaatact

SEQ ID NO: 28615 - DNA, 399 bp, Glycine max
catttttaaaaggacaaaacttagatacaagttcattgggtattgtttgtattgtcctccaattagaaatggagtttcaccttggtaatttgtgtaatcctttaatatagacctttattacacggattacttggtaaaatttcaattctaattggagagcaacctaaggcactatcttggtttggtcctttttcaaaaccctggttctgttctgtgatagatatgtttgctagttagctatttatctttcaaatttttgttaccacagtttcatttgcaattcttcatgcttcatggatacagttattgtattggaatttggatctatgtgtttcttttagttatggtctaaatctatggagaactttgtgcattgacagaggcaggattctttagcac

SEQ ID NO: 28616 - DNA, 511 bp, Glycine max
  unsure (1)..(511): unsure at all n locations
cctttattcatcttcacatatatctctcagctggctgacgcataattcttcttatccgtcaacatacccacattgtcactcacgacatcgagcagcgctcattcacactctttaaccctaccttacccatttagccgagatccgcaatgccttccatcatatctttcgctgccgtcactttggtcgctttgttacctgctgtgcggggacatatggccatctgggatccatgcgtatatggagtcaacgatggggacagtaacgtccctcccctcgctggaatgtcttttgaccaatggtggttccacggtaaaatcaatgataaaccatcctcagtctgtacactcgttccaggcggaaacatcaactttgaaatctcatgttccaaatggcacacttcactcaccggaaacactggaaccgacgcttgtccaaatgacgctggcgcttatcacgctggaggaactacaggangtcaatccggttggngggggaataacgaggacaattt

SEQ ID NO: 28617 - DNA, 276 bp, Glycine max
ggggcttcttgagtggcatactctgagcagaatgaaaagcaatgaggaagcgtctaagtctttgattttctttattattattgaagaacgatggaaatcagctgtgtgattgtagatagtatcaaagtcagagcttgtagttcaacttgctggtggtggagcacctcgcttaaaattgagtgtagatgactgggaaatgatgatttgacaaaaaagacttatcacataataaatgatccaagatttaagggacaggaggaacaactttgtttataa

SEQ ID NO: 28618 - DNA, 262 bp, Glycine max
gtaatattggttgattcaagaactgggcagtacatgagccgtgcttaagatttcacctcaaattttgtagttgaagtcctgagaattctcgtttatttttttattttgtaggatataatttaccaattgagatggattaagttcattaagcttagcaatttggctgtgttttataacaccgttaaaattgtttgtagtttatttgcgaaactgaagctcttgcggtgcataaagtttttataaaaaaaagccagccattatt

SEQ ID NO: 28619 - DNA, 416 bp, Glycine max
aaaaaagaggaagaagaaaaagaaaatacactttttactgagttgatatcatcactaagaaaaaagtgtactaattcctgaagtccccatttcaagctttcaaccattttgctctttcattcctcttatcttctcttagagattaatttgaaaacagaagttccttttctttttttcattttttgtgtttttggttttgtacatgatcaatggcttctttagtgtcttctccatttaccttacccaattctaaggttgatcaactctcttctcttgcccagagacacctttttcttcattctttccttcccaagaaggccaatggctatgctagcagctcaaaagcttccctgagagtgaaatgtgctgctatgggcaatggtcttttcatccaaaccacgccggaagtgcgtcgg

SEQ ID NO: 28620 - DNA, 431 bp, Glycine max
actcgagccgaatcggctcgaggcccaatatcctaaaatcgaaacccaagtccaaatgccccattagcattggggttttttgaaaggttgtgccttgcgctaccggttgaaactcgagcacacagttgaagtcgaacacacacgcagagatgatggaagagaattcgcgtggttgggactcaggaggaatggtgttagaaaccctaagaaaacgaggttggtgtttggaagatacggaccgattgacggccatcatcgacattcaatccgcactcgctgatgaccgttccagattggtagattctgttgagtcagagctcctcaattccgacctcagatccatcgccgccaagtccttgccccaaccctctcttcttcgcaacgcttccactttccttcacggccgcaaagtccttcagataagttcagtg

SEQ ID NO: 28621 - DNA, 198 bp, Glycine max
tgtacagcaagagtaaagttctagtagacatagaacaagttaagccatactatatgtcgctcatcgagaagtatttcccagcaaagcttaggtggtgaaactcaaagacatacacatcgatatggaatcaaagtcatgggcaagctaaggatttaagtttatacttatgaattatgatcgttatgccgaacgtttaag

SEQ ID NO: 28622 - DNA, 279 bp, Glycine max
  unsure (1)..(279): unsure at all n locations
tcggatcangtatgcgtttgatcgcaacaatgccaaatataaattccccctttcgctgcgtagaatctttgcctcactcctctcaacctctccgatagatctccgatatcacaatctttacctctttttatcatctccgttacgtcatcgttttttgccgctcgatcctgcaagcacactttagtccattctctcagcggtggagaattgaattcttgaattgaagcctttgtccctgtcaccgagattcaattcttctccatcattgaaatttgagac

SEQ ID NO: 28623 - DNA, 275 bp, Glycine max
ctcccgcttcttacgcatcgactgtagtccgagtcgccggaattgcaaccgatgacaaacttcttttcgccaacaccgaacgcgacgtgaagcacaccgagaccaagcaagacgagaccggctggccggagcccacctcggcgagctaccactgggtgggaaagaccgaggatggcaaggaagtcactgcagacctttctggtgctctgggaaagaccatcgaccgtgtcgatgttcatggctgaagtgccaggtttcatcaagaccatcgtcgc

SEQ ID NO: 28624 - DNA, 261 bp, Glycine max
cgttgaagacttcattgtccttcccaatgttggacattgcccccaggatgaagcacctcatctcgtgaacccacttgttgagtcatttgtggcacgccatgctaaatcctcaactagtacatcgcattgttaattgattcgccaacagttttttgatgctgctcaactcattgaaattgtgtacatttctccatttgcttccattaagaccgagtttcattttctgttcagtataagcattatgtccttgtatggttacaa

SEQ ID NO: 28625 - DNA, 250 bp, Glycine max
acaaaactatgtagggttctaaggctggcattcatgttggaagtcgggtcttgtatcaaccgctcataatttgtaaccatacaaggacataatgcttacactgaacagaaaatgaaactcggtcttaatggaagcaaatggagcaatgtacacaatctcaatgagttttttgatgctgctcaactcattgaaattgtgtacagctcgccatgcgcgtccattaagaccgagttgagcagcatcacaaaac

SEQ ID NO: 28626 - DNA, 464 bp, Glycine max
cttgtctcaagctctgcggcagaaaaaggaggatacaaaacttatgtgatggaaataaagggaaatcgtgtttacagtaaattgaaatatgaatctggtgtccaccgagttcaacgggttcccctaacagaaactcagggccgggtacatacttctactgcaacagtggccatcatgccagaggctgatgaagttgaagtcgtaattgacccaaaagatattgaactgacaacggcacgttctgggggtgctggaggccagaatgttaacaaggttgaaacagccattgatctcttccataaaccaacgggaatccgcatcttttgtactgaagaaagaacacaacttaagaacaagaatcgtgcttttcagttgctccgagcaaaactatatgagatgaagataagggagcagcaagagtcattacgaaatcaaaggaaattacaggtcggtacaggtgcacg

SEQ ID NO: 28627 - DNA, 292 bp, Glycine max
cgaggctttactttctgattggaagcaacaattagaacgtgatattgaaactatgaaagctcagtccaatattgtcagcgttcgcacagttctcaacaggattggattcgattgccctgaccttgagactctttgcatcaacgaccaaaccctcacaactgaaagtgtggagaagatcattggctgggctataagttaccattttatgcattcatctaaagcttctatcaaagattccaagcttgtgatatctgcagaaagccttaattatggaattaacattctacagggc

SEQ ID NO: 28628 - DNA, 391 bp, Glycine max
ttttctcgctacaaaatatttgaggtcaccaattgaggacactagaaccataacaaatttcaaatgcgcatacaaaattttcttccactcttcataaccacccgaattctaatctgaacttcaacactccgaagaacacaaatgctactccttcccgtgctttctctctctccctccttcccctctctcgcttcgaaccgttatctccaatttcgacctcgtcggagccgccgcgtcgtccgatgcgccgccccggagtccggtggcgatgagttcacggcgaagtcggggtacctgttcgagctgagcgccacggaggcggattcgctgggggaataccggataccgaaaatcgcggccgtatactcgcggaagcctctgctcgtggctc

SEQ ID NO: 28629 - DNA, 494 bp, Glycine max
tggagatggtgaccgggaaaccggcgtggcaggtggagaagggggcgagcatgtggtcgctgttgcttcgaattggggtgggagaagaggttcccgagatccctaataatttgtccgaagatggaaaagatttcattgaaaaatgtttcattaaggatcctaagaagaggtggagcgcagaaatgctattgaaacacccttttcttctcaacgatggcactgttccatttaagcgcgttcatgagtcgcccagaagccactttgatttccccgattgggtttctagcgtggcgaattcgcttcccagttcgccggaatttcaagaaaagtggggttttgatgatgagttctgttcgccggaggaccggctcggcagcttttgactgttaatcggccggcgagttggtcggaatcagatgggtggagtagtgttaggtgaaattgggggttttcaagattgttcaacgaaatggttcgattttgattatattcag

SEQ ID NO: 28630 - DNA, 515 bp, Glycine max
aaacaatagcatcatcaccatctacgattatcttcttcttcttcttcaagtgcagggctaacttcgtcttttccacctacaacgcagtggatctgcaattgtgaaacacccgacacttccctatcgagtcgcacgagcaactaacacagataagcctctgaaacaacaagaatatctggagaaattgtgagatggatatttcctgaatgtgtagacagagtcaaagatctgtatttggagaagcgtgtaagcacagatgaaagggagaaatagttatagctttagagggaggcatatttccttggctctggttactcttgttatttttaccacgttactgtggacatgggagagaaatccgataattgccatgactttaagatcagctcatgaatggtaccgcttaccttcagaatttcctgtggaagccccgactgaatcagtgggaactccaacactggaaaagggtgtggaaaaatccatatcccccatcagagaaaatggaacaaaacttc

SEQ ID NO: 28631 - DNA, 281 bp, Glycine max
tcaaaagcttattttaacttgcacataagttcaattcttttttccttcttattttctctctcttgtaagtgcttgttgaaaagtatatctacaccgggccaaataattggttgtttttttaacatgttttgtcgtattgtgttttttatggttcacttttgaaaggggataaagaacatgcttgtgcctaatttgaatcttgcacagatgatttgttggagatattcttgtttggttgggaatctgtgacgttgatgtctcttctcttgctttgttgtttg

SEQ ID NO: 28632 - DNA, 282 bp, Glycine max
gttgattttgtttcatagcttgttggttatgctgttgtggagttacttctctgttgtttttaccgatccgggcagtgtccctccaaactggaagcctatgattgatgaggaaagaggagaggctgatccgttggttgggacagagtttagtaatctgccgtctgatcccaatccaacgggttcggtactgtcggaagtgcaatcagctcaagccgcctcgatgccatcattgttcagtttgtgggcgctgtgttttgaagatggaccaccattgtgtgtggg

SEQ ID NO: 28633 - DNA, 501 bp, Glycine max
aagaaggggcattgctggaaattattgaggtgggcaaggtgtgctccatgcatgtgccgcacatgatcatgattgctgtgtacgtgagaagaaaaaaatccaacctatgtgttggtgtggtttttgctgcttcaatcatgaataaaaaaaaagggttctgaagggtttgtgtagaacacggttcttctttccttttgaatcaaccaactcaaccatatgtaaatatcaactgcatccaccaagttcgatgtgtgtgaccatctcatactccatccatgtgcttaattagtgtggtatcgaaattgttgtatgtgtagtttctgctgtgtttcatcatcatcatcatcatcttggtatgtgttcaaccagacgttcatgtattgcttttagagatccatgaatcgtgtctatctcaggcttaattccagcttggtttttgtatcagaaaactatatatctgcattctgcagaagaaggtatataaatatgtgtagttattat

SEQ ID NO: 28634 - DNA, 573 bp, Glycine max
ttttgaatgaatagaagaaaactcattacagtatctgttgaaatctcaacttgaatctacatttcagattcctacctatccttaaccattagaaaacaatgctgcgctcggaggactaccacgcccacatatcaaaagttcataggacacagagtgttctcacagatgtccctcgctaccccaatgctcacctagccttcagcaaccaacacagccatcacaacaccctttctaatgaaagggttgagtatgatgaaaccactcctgagactgagggtggtgaagttgtggatgttgaaagggaacagtgcatcgccaagaagaacaagggtggctttgaattgcacaagtggaagacctataggccttaagaaagcttatagccacaagcctagtttgtcataaaaaaaaaaactaccaaatacatacatcaaaatcagcaatatgattgtgtgaaataaatgcctgcatagccagccattatgtttgcttaaccccggagtgttttatatatgtagtagtacattagtactaaactttcccatgaactattaatgaagcatatacatcggt

SEQ ID NO: 28635 - DNA, 321 bp, Glycine max
ataatttattatctgttaaaacttctgcctcccaaccttctatgtataatcagacaagtattggggccactgaactttcccaggcctgcatttcatcttcaggagccagattgtcatcttacccaaatcccccaatgatgtctgcgggttttagtaggtcagacttccatgccattgactatgttcggtaactccccaaatcagcaacagactgagaaccagccaagcatcttacaaagtatctctgttcctccagcttcctttcagtcaatgcatccagttactcagttgcagcccctccagccaccccagtttcaaggc

SEQ ID NO: 28636 - DNA, 633 bp, Glycine max
ctccgttctaattctcagcgatcacttattggatcatcaagtcttctgtcaaaaactggaaggaaacttatgataactgttgtagaagcaaaggatctcgctgcaaaagacaaatctgaaaaaattaacccatacattaaattgctatatggaaaggttgtcaagaaaacaaaggttgctcttactactactagtactactacaaatcctgtctggaatcaatcatttgaatttgatgagaatgatggtgatgaatacctaaatgtaaaatgctttagtgaagaaatttttggagatgaaaatattggtagtgcaaatgtaaatttggaaggactgggggatgggtcaatcaaggttgaatggatccctcttgaaggagtgagttcgggtgaattgaagcttaaaattgaagtagttaaggtggaggaccaagaaggatcaaggggttcaactaatggttggatagaacttgttgtgattgaagcgagggatcttattgctgctgatcttcgagggacaagtgatccttatgtgagggtaaactacggaaactcgaagaaaaggacaaaggttatacacaaaacactcaaccctcgttggaaccagacattagagttccttgacgatggcagt

SEQ ID NO: 28637 - DNA, 287 bp, Glycine max
ctccaaataaggagactttgtccagacactcatttttaggaccaaatggccttcggggccaatggcttggacctagtgcggaaataaaggttcaatatccaagcagtggtgagctcacacaggccaaggattcaagcccgaatcaggctgggctatatgatcttggggcaattaaagatggcgatcaaggacctgttacatccacaatggactcagttctctccttggatgatggaagttggttgcgtcctgctgttgagtcctgttctcctgttgtaactgaatca

SEQ ID NO: 28638 - DNA, 608 bp, Glycine max
gcacgagcataactcagctccaagcagattcgtgaactatgacacactaggctctagtggctgttccggaatgcgttcggagaagccatgaggatgatgtcttgctgaatggaaaggaagactttgcaagtgttgaagtttgtacatgtttttttctggatatgagaaagatgagataatcgtgtcattttgctttgcttatctgtgattgatatatctattacaattttgaaggaagtgcttaggcaaggtgaaaatgttagtattcttttcctgttgtgtatagctcaatgcctgactcattgacccaacatgagaaacagagaagatatttttgtttttaccaagccatatcaggcatatttgccatgcattacgctaagcccaagtatgtaataatgccaaaggaatattatataccatatgtaatacccaaatagggcgatgtgatatactatgtaatgtttttttttttttttttttttacatgtcctcatgtattccaatattattcagggtgatgggcgcattagccttgtatttgttttccagttgtgcttggtcttcagttaattaaattaagttaaaactaaaaaaaaaaaaaaaaa

SEQ ID NO: 28639 - DNA, 490 bp, Glycine max
ctaacatcaacgtgtcattgagtgattctggatcgagcgaggggtcactaatacctcctggtagaaggcttggtcccgagactattcgagtttgcaatggtttggctgcctctgagcggggtgggactgaaattagtcgaaagagggatagagtacaacgaattaaaggtaatggggagggtattgctgcggagaaagggttggagcagtgggaaagaaagcgtagtaagttgggtgtgtacgattttgatgattacgatggcatggatttggagaacatgaggaggaggcatttggatggtcatggaggaggaagctttatgggatcagtgcatgctgctagaagtggcattgatagggaattcataacaggttcaagtgtacgaattcttgataagagaaagaactcttacggtgacagacctagtggcttgtatctgggagataatgttgatcacagtaggtacaagataaacagggatggagtctg

SEQ ID NO: 28640 - DNA, 506 bp, Glycine max
caatttttggtgcatgatcgtttagggtttgtgcttgttgttgccgccttagtgacaataatcgcgccaactcttgtatgatccatcactcagatccttccaattccgctgtctcgctttgaccgccgccacaccaaactagcatgttcttcagtgtttccctttcagatatttgatgcttggaaacgtagggaaagttgcccaatctattcttagaacccatagaagaagatatttggaagcaagtagaaatgaggcctttaactcagttggaccaaatattaagcactgcaggatgtacatgcaatataagtttccaagtgaaggacgtagttcattcttgtggcactggacaagagaaaactttcacagaggctgttcttttaggaacttctctgtaacttctgcaagaaatgtagcagcatataattctcgaatagcttggaagttgctgtacaaaaaatactctttcaatggttataatggatttacctccataaatatga

SEQ ID NO: 28641 - DNA, 584 bp, Glycine max
gatgtgagaatgcaaaatatcttgcatcattgttgtgttgtgggtcatagaattatataggagccgaacgtgatcaaactctaccatatgatacgatgatgtcttatctttttcccttagcttcttcctcttacactcattattccatcatcaacaacaaggcaactattgcatctgcatgtcttccttcctacatcatcaaaaaaccacttggatttcacccttcaaacctccacaacaagtgtttctctaagtccaatgcctccacctccactctcacatgcaaggcatcattatcgtcatcaaccatgatggactttgacttgtatgaccttctgggcattgacagctcttgtgatcagtcacaggtcaaagtggcgtatcgctctcttcagaagcgctgccaccctgacattgctggccctgctggccatgacatggccatcatactcaacgaagcttattccattctctctgacccaaatgcacgccttgcctatgataaggagcaagcaaaaagttcagaattcaaaggcttcactggcagacccatatactcggtctggtgtgggtcagaaagtgag

SEQ ID NO: 28642 - DNA, 520 bp, Glycine max
aaggatttgaatgtttgggcgagcaattgaatcttgcagaagggatgaatgatttacaggagcctcaaggagtgggcgggcccgtgggctttaagcacagtacatcttcctcaactcaaggatcaagatggaagtctatgttaaattctgttgccaagcaagtttcacaggttcctctctctttggcaataagagtagcgtccctcaaagggacattgcgtttgcagataaagccacctccctctgaccaattgtggtttggtttcacatttatgcctgatatagaattcagcttggaatcatttgttggagaacacaggataactaattcacacatagctttgttcctggtcagtcgactcaaggcagtaatccgggaaactttagtgctcccaaattgtgaaagcatatgcattccatggatgctagctgaaaaggatgattgggttcctaggaatgttgctccgttcatatgggtccacccagaattggggaacgagacttcaacctcagttgatac

SEQ ID NO: 28643 - DNA, 403 bp, Glycine max
aggtcccaacgatcaaaaccttgtactacaggtgaggcacatactgaatgaccgcaagaagcttcgtaaggtgatagatccagagctggctcgaaattcttacaccattcagtctatactcatgtctgccaatctggcatcaagatgtgtccgtactgagagtaatgaaagaccttcaatggcagaatgtataaaagaactcctaatgattatctatacaaattcgaacggcttgggaatggttatgcatagtttgagaatgatctagtgaaatcacaagtttagacattggaattatgatgatatcttgatgagaataaaaagtgaactccaaaagtgatcagcacaaagcataacaagtttggctcattttataagatgaggaactcaatccattatggac

SEQ ID NO: 28644 - DNA, 524 bp, Glycine max
tcccgtcctcccacagtgatttgagagagaaaataatactccaaatatatcgtcaaaatgcctgtgagaatccctcgtgatagcccaatgaagataattcctgatccaaatcgcaagacaggtccagatgacgcggttataatgcagaaaataatgggaaaattgagagaagcagatagcaacaacgacggtcgttacgacaaagatgagctgaagcatgctctcaagggtttaggtgccatcctccctgggtggagagccaaccgttgttttggaagggttgatgccaaccacgacggtgagattagtggcgctgaaattgaagctctccttcaatatctccgttctcatgggtatggaaaataatcatcacttatctgtgtgttgtctaatcatatagtactacaagaaattcgcgtagcgagggtcagttccgtcgctaatccctcgtgtgtgttgtgtaatgatatagtatgcgtgtgtttgtgtttatgtataccctgcatgcctatacaactaacgct

SEQ ID NO: 28645 - DNA, 466 bp, Glycine max
gggagagggcttgtttggctcctaattctgcacccgctgatgagttggttattccgtttaactcctccggcgagtggttcagacagaccttcacctcgtggcagaaaggtgacgtcttgggaaatgggtccttcggaactgtctatgaaggcttcactgatgatggattcttttttgcggtaaaggaggtgtctttgctggatgacggaagccagggcaaacagagccttttccaacttcagcaggaaatatctcttttgagtcagttccgacacgacaacatagtccgatatcttggcactgacaaggatgatgataagctgtatatcttcctcgagcttgtaacaaaaggatcattggcaagtctctatcaaaagtaccgtttaagggactctcaagtttctgcatacacacgacagtttttaagtggcttgaagtatcttcatgatcgtaatgtggttcacag

SEQ ID NO: 28646 - DNA, 260 bp, Glycine max
tccacgcgttcgaggaggtgtctttgctggatgaaggtggccacggaaagcagagctttttccaacttcagcaggaaatatctcttttgagtaagtttgagcataaaaacatagttcgatattatggctcagacaaggacaaaagtaaactatatatcttccttgagctctatgtcaaaagggtccttggcaagtctctatcaaaagtatcggttaaacgattctcaagtttctgcatacacaaggcagattttatgtgg

SEQ ID NO: 28647 - DNA, 290 bp, Glycine max
cacagtcacaatggtttcttctaattgctactatcttgcattggtatgctgctgtgttctgctgctgctgaaccccaccgtgggggagcaggacgagcagaacttggtgctccagtaccacaaaggcgcgctcctcaaggggaggatcaccgttaacctgttatggtacggcagcttcaccccaatccaacgctccacaatcgttgacttcataaagtcgttaagctcctccccgggggccccacttccctcggtggcatggtggtggaagacgacggagaagtacaatg

SEQ ID NO: 28648 - DNA, 324 bp, Glycine max
ttgtttttggttggatttgatttgagttatttgtcaaaatacgtataactcataataagcatggcaagcactatgcaactaagttgggttagtaagagcacggtccccgtggctttgagtagaagagtgtgttgtcaatgtcaaccacccctgtggctgccatggcgaattgggtttgttactcccgttccccttgtgaggagagtttcgagtgagagggtggcggcactcagggttagttgcagcaaggaaactgaaagtgatgtggttgagggtgaaagtgggggctttgcggaaactgaaatgagttacacatgtgtcatg

SEQ ID NO: 28649 - DNA, 266 bp, Glycine max
tctggatgttcaattcccaattgagcaactgtttggacatcatcattgtttctatgccctggtagtggtagaagctttagctttggggagatgctgagggctctctctttacatcccccttctagtaaaatcatttttctttagtttcttttttctaaataggtgggcaaatgccaaactcttattgttaaattcatagttaaataacgagaattttaagaagcctgtgcagaaggaatccccttcattatttgcaatgggggtat

SEQ ID NO: 28650 - DNA, 579 bp, Glycine max
ttaaataacaacacttcttattagattcctcgtggttcaacggtgagtgtttactttcctcatggattctaagagcttcaaattttacgcgctgagcggctccattgctcggcgcgtattcttccgcgcgttattgctctcctccgctgtctccctcgttgccctgatccgcttcctccccaccgtcgatttgggatctttgactcccaagacctactttgactgcgtcgacgacgactcagattcgctctccgaaaacgccaccttaacagccggctcctacttgttccagagccgcatcctcaacaccttctggggctccttcgactccatgaactgcaaaaacgacacgagtttagcttccaccgtcatcaccattctaacgggtaaacgactcttgaacttcggcgctagaagcctctgcgttggagaagggtctaatgtaattgtctccgcaatgcaacggttgggattctccagtgtcgttggtctccacaagcacccttttttctccctccacaaaaagaaaaccgtgtgccacttcgagtacgatgattccaccttcgacttcgtgttctc

SEQ ID NO: 28651 - DNA, 307 bp, Glycine max
ctggaattccaattttcgctcctccaggtggagcggttacaagaactttaccaccgaggatgctgagggcagtactgacttttcaccccactcctgctcttctatgacctaacgtcaagatcacaagggttccaagacgaggaagcttctgggttctgtctaagcaaaggtcacatatgtgggcaagcatttatgaaagccttaagcaagtggtcccatggagacgcaagcaacagacgcagaaaaaatttgcttccaaatttgacactgtttgagtttttactcttgtcaaatggagttatttaaa

SEQ ID NO: 28652 - DNA, 395 bp, Glycine max
gccaagtgaaagtgagaaaaaataaaaatcaaagagcataatgtcagggatcattcacaagattggggagacccttcatgtgggagggcacaagaaggaggagaaggtttctgtttcagtctcagagggagaaatgggtcgttgcagagctgcgtcgcgccccggtgacgatgaccccaaccacagatcaaagagaaaaagggctgctctgaatgtagaaaattcagaaaccttacctactggccaaggagtaactactagcaaggtatctccctatcactgcaattattgtaacaaagatatttcggggaagattcgcatcaagtgtgctgtctgtcaagattttgacctctgcatagagtgcttctcgttggtgctgaggtgacacctcacaa

SEQ ID NO: 28653 - DNA, 336 bp, Glycine max
gccttttcttgtgtggccatagacccagagctattcctcaattatcaatatcttctgcttctctctctcgatgagaaacaacaacacatacagcaaaacatgacaaccaaaggaacaactcactctgaacccaacaacactgaatgttgcatgtgtggggatcttggcttctctgatcagctttttcaatgcaaagcctgccaattcagatctcaacacagatactgcagcaatctctacccgaagccagagtctcttggaacctgcaattggtgtttgagtcaaagagaggacaccaaagagaggtcaaccaattcatcaaattcttcctcatct

SEQ ID NO: 28654 - DNA, 610 bp, Glycine max
  unsure (1)..(610): unsure at all n locations
gacgccgccgatgttagagacgttgccgtcgccgagatcgttaacatgtctctgcgctccttggatctccaattgcctcctagagcacggaaccttagtaacaatctcaaggaagttgagaaaggcaaaggagcaacctccgaacgtgcttagagattagaatgtggagcaaccaaaaggtctgatttacttcaaaaggaaaagggtcatgttaccaaaagttgagaaaggcgaagtcatactcggattttcatgccttcataaattgggaaattatgtattttagtaggttgtgattctttcaaattttgcagtcaatttcataatcatcacaatgtgagtgctagtaaattagagcttgaaagataggggtgggtaaacggattcaggtccatggactgatccacggggcctgtagtccgcgcgggtaacggaccaatttttttaaacggtccatggttatgtcatatttttgggccgtccgctcaacttgtgaactatgcgggtttggctcgtgagttgtccgcatttgaattttattacttcaaatatgaaatcatttgttgttggnnnnnnnnnnnnnnnnnnnnnnnnnnnnnnnnnnnnnnnn

SEQ ID NO: 28655 - DNA, 397 bp, Glycine max
atggagactaagaccaagaagaccctatgtggtcctcgctcattaattctctcatatcattcattcctttttatatcaactatttatatggtcatgttttccttatgtaacttctgagccttttttttcttctcataacttcttctggatctctctggaagttattatggacacaagcaggtatgagggaaaaagggtcttgaggtacaaagaggaagatgaaaatgatgatgatgaagaagaagaagaggtgagtgaggtgggttttggagcagacagaagaaggaataagagagtaatgagagatctccatggaaagagatcagggtccaaaggtggaggctcaatgccaccttcttgtcaagtggataattgtgatgctgatctgagtgaagct

SEQ ID NO: 28656 - DNA, 596 bp, Glycine max
atttcgagttgttcctgtcatcaaagatggagattatagcttatatggttacactttgtgcttatttgttctgtttttctacttatagtttgtttgttggttaaacgtactattcacttgctttttatatctctttaagtttagcgtctttgtaagaaaactatccgttttagcgttagaaattcttttatggtgttagcatgattttgaattgcgattgcggtcgtggcggtggttgcgttacggtaagtcagaaaacctttatagttcaggtaatcgcgggaaaatgtggattgcaattgcggcattacaggagtcaaaatactttgatattgcggttgcaattgtggttgcaaaacgctatttaaaaccatgggtgttagcattagaatcaaaacttaacttgtatgtatgtgtagggactaaaactcaacagttttctgaactaaaattaaaaaagatcaaatgattaatagcttaacctattttcttgatctatgattgttccttcagtttttgttactggtaccctctaatttgagtgttttcatgtttttctgcagagtctcgtgctataatgaggtattatgcagaaa

SEQ ID NO: 28657 - DNA, 286 bp, Glycine max
ctcgatcctcaagttccaccttgtgacatctatttccaaaagagagatgccgatatttttgggaagccggaagatctcaccaccctcttatgtcaattatcagattagaaggtcagaatgctctctgcaaccaaggaacatgaatatcacaagactacagggaggtgtcaatgtcagcagtagtgacaatcccaaacctaaaagtttaggtccagacagttcaaatggttcagcccatgtggatcatccatctagagagttccagattgcaagttagcagcaatag

SEQ ID NO: 28658 - DNA, 374 bp, Glycine max
taggaaattgataaataacacaaatttgtctttacgaaaatcataaaagctatcaggttttcggtttcaaaataatgacctgggaatgagatgagagcattattaatgataaaaccttgtatccacgatacattggaggaagtctaagacagcgatgagatgagagtgatagtccctctacaaggagttgtccaaggcacagggggtcttttctggggttctgtcattccttgtgctctattctactttcttcagctctacttcaaaaccaagacacctgaccacccttcaccttcccaaaacaaccacaaggacgatgactccaccaccttccaccgctctctctcttccaatcacaggcactccactaccac

SEQ ID NO: 28659 - DNA, 497 bp, Glycine max
gggatggtgataatgtgttgctttttgttggttccattggccacatgataaaatttcaaggccaaaaaatgtggggtacaaaatagccccaatttggttttacaagcatggaatggatgtatatattgattgcatggacaagaatggttgcctcaagccacagtttattcgggaattttccttctaaaggtgacctttgcagtttgttgttgtgaaaaaatctcaatggcctgagttcaacggtttatctgctttcatactttaactttgatggaagcatgcttcatttttttgttgccaatgtttagtgttaatcttggttcctttgtgtaggtgagttggttgtttaaggaaattgggcaattagagcttatcttatatgaattgcggtggacactgtattttatatatgatatgatgaaagcaaattattttagtgaatgttttgtcaatttgtcacggataaaaatattcaatgaatctttctcttctctctt

SEQ ID NO: 28660 - DNA, 268 bp, Glycine max
gtacaaaaaagtgtcgtatctgagaagaatatacattaagcaagtcatgcaggttaattccccagatatttgtaacatctttgcttgttgacgtcttgacaactcacacactacagcactttacacggtgacacttcactcaatgttcttttgggttagaatcctctaccggtcaaaactcttcgtaagtagccccttctgaaactgccgacaatctgcttcgccgcacggccaggatcaatgattgtcaccacaaatcaacatgaga

SEQ ID NO: 28661 - DNA, 477 bp, Glycine max
acaaaaacttctagaatacactgagctcattgggctaacgaacgggtaacatgatgcgaatgccacgatggaaatggaagcaaataccagctgggagccaccctatgagcaaaatcaaggaccttgaatcgtcgtagcaaaaagcaaagtagagttgtgtaatgatggctccactgagaccaacgtagccttcgaggatgcccagcacaaccccacggctttctgggaagttcttcacgcaagtcacaagggaaccggtgttggcgaaggactgagaattcgagcctatgcagatgtagaggcacatgtgccacacgtgcggcttgggtattttatttgtcaccgccagccatatcatgaagtagccaaagaagttgaggacggaacccatggcgaggaccacccacgagggagtgatctcgttgatgaggccctatagtaaaatttaattgtcctagctaccaaaatcagtgaaat

SEQ ID NO: 28662 - DNA, 399 bp, Glycine max
  unsure (1)..(399): unsure at all n locations
gggcacctaagactacagatccagaatnccatcttctatcaaataagcgaacacggttactagcggcagagaaaggagatggaatcggcgggggtttggctggagaaggcgttggtggagttgtgctccaagattgaaactggcttgggtttaggtttggaccaagacatcatcaaaggcctcgtgtcttactgtgaccttgccgagccacgagatgccaaagagtaccttgacaatataatcggtcaggatgcagggaaaactgtgattgaagaatatttacgacggagaggttactcagaatccagcatcggctcaaatgttccaactaccaaattacatgcgtatgtcaaaccgccttcagttgagacatctgctagtggaactaagagatcattt

SEQ ID NO: 28663 - DNA, 500 bp, Glycine max
aagcttttggggcctctatatgatctgtgggcttgcctgcttgcttgcactcttcatatatcttatacagatttggaggcaataccataagcactacgtctcagaggaacttcattctactgacggccaaaacataggatcaaaatcttcacatctcaagactttcctttcatttgtagatgaaaaagaagagacctttaagagccggtccaagagaaggaaaatggagaggatctcatacagaaacagtgaaggaagcttatccatcagctccaaccagggatatgcttcacgcagaagtgaatgtgctagcgaagtatgatcaatatttctacatcattttctagcctcttatgctagctacaacaccaacgctcttcattcatgctgcaactactgggctactagtacttccttcttttcaagtaaatatatatgttggatactttagaacttttgttagctatatgtaacacttatttttaacacggtctttatac

SEQ ID NO: 28664 - DNA, 345 bp, Glycine max
ataaggcagacagcttcttcttgctttgactgaagattcaaagcttcatattgaagagcttgtcgatgtgtataggttggttgaagatcagatagacataccttctgtggctgtagaagtagctagagactttccaacagttgtcagggatctcctactttcatggagtgaatcagtcttgtctgatggatagctaaatctttggactacctgcacatagcaaatacaatactgtttcagtcagatgagtatactgtacacatgttctatatttcctcttcatctttcttttgccttttctatagtgccgaagtttactatatgaaattttgaatgatgtgtagg

SEQ ID NO: 28665 - DNA, 344 bp, Glycine max
gtaattgcatagggacacaacatctctatagctatatgcagctaggagactcaagtgtgttggagatctcctcccatacccagcctgagatggcggtgacggcagcagtgttgccaccagatgaagtagcccatgatggcagcgacaacagtggtgatggtggtggtggtgagatgattgggatcgacttggatgcaaattcaggtgaaggaaatgaaggtaataataagatgagctttggagggaacggtggccccgccaagaaactttggctctcttgaagataaggtcggatatggatacagtttttcgagattcaagtcttgaaggtccactttgggaag

SEQ ID NO: 28666 - DNA, 572 bp, Glycine max
gagaggaaacatttgcaatggctaacaacgtcgttgttgttcttaaggtagctcctgtttctctgcctccatttcccataacaaacaatgctctcactttcaagagccaaagacacacacttcatctgaattgcttccaaaccaaaaacagaacaacctcattcccttcttcctcgtcaatcctcagaaacaaagctagttgctctgtgttggcgtgtctccctcctgaatcctcaacctcatcttccactgctaaaccctcttttccttctcctcaaactaagctttatgtcagtgggctatcatttcgtaccactgaagagagtttgcgaaatgcatttaagaattttggtcaacttgtggaagtcaagctggtgatggatagaattgctaatagaccaagagggtttgcttttcttcgttatgcaactgaagaagagtcgcagaaggctattgagggaatgcatggaaagttcttggatggaagggtcatatttgtggaagttgccaaaccgagatcagagttagcgccaaggaaacaggaagacactagattgtaatgaagatccaat

SEQ ID NO: 28667 - DNA, 471 bp, Glycine max
attagtgagcgtatgaggaaacttcaggatcttgtcccaaacatggacaagcaaactaacacagctgatatgttggacttggctgtggattacatcaaagaccttcaaaagcaagttcagacactttcagattgtcatgcaaagtgtacgtgttcacacgagaagcaacaataacggaaaaaaagggagattggtcgacttagcttgtgtttctatatcccgttgaaattgaaaagcttgagttcaatgctccagaagcaaccaatcaattcttgctattgggaaaacgtgtgtttaggacttttcccatacacttagtctctgtagtctgtacagactagtaataatttgatgatcgcctagctagaaatctagattgccttttctctatttctgtacttagaaaaatacatttaattgtttggcccttcgtgtatccaaaataaagataaatatatataaatttatgta

SEQ ID NO: 28668 - DNA, 665 bp, Glycine max
ctgttcgcttgggtgcacaagcagtgaccgcggcagcagttcatccactgctacaacaatcccagacattggctggagcagttgatatggtaggacctggaggcaatgtttatcagcagcctcagcactcacaaatcaattggccgagcaactactgaggccaggagtcttcctgacagctaaaattagataattgagtcctatctggggaaattttttgagaaatgccaaaatatggttggatttctgaagacaaacaacatggcaattggctacatttgagtgtaagaagatggacaatttgccaatatgatcttctgattgcttggtttgaggacatatgaagggtaggatacctgtaaccgatatgaccattaaagttagacgaggtagaaacatatgcaggccttctcttttttactcctgctattttgtgttaccattaatacctttccatagctccaagcttttccttccctatcttttgttgaggtccttgaactctattaagagtattgttgagtgatgagaaatgtccattctttcgtttttagtttgggtttatagggtttggaaggtttaggttggttggtggggaaagcttttccggtgccccttgtcttacctgtaaagtgaattttgatagcaagaaaaatcatttactt

SEQ ID NO: 28669 - DNA, 484 bp, Glycine max
atcatgcatggatccccattgtctgatgattcatctcatcattctgattcaggaattctgaatgatggtttcagcaatggagtggttatccacactggaccaaagcccttggacaatgcattgtattcgcaatgtgtacttgctatgtgtactttagcaaaggatccttctccacgcattgcaaatcttggtcgccgggtactgtccataataggtattgaacaagtggttgcaaaaccattgaagtctagtggtgttcggactgctgaatctacagcttctccactggctcgttcatcttcttggtttgacatgaatggaggacacttgcctctgaccttcagaactcctccagtcagtcctcctcgcccaagttatataactcgaatgcgtcgagtttgttcattggagtttaggccccacctgatggattctccagactcaggattagcgatccactcttaggttctggtggagcttctgg

SEQ ID NO: 28670 - DNA, 254 bp, Glycine max
cttttgcagaaaaaaaatgaaagagctgctataaaagttgaagtgcctaaattggttttgacttctgggagaaacttaactccttttacttatgttattctttcataagtatttattgagccaaacaaggccataattgaaggtgttatttagcaacggaggaaatcttacagtaatttcggtggaaaggaaagaatagttttagcttatttctaattttgttggagtaactaagcaatgaaatcaaatttggt

SEQ ID NO: 28671 - DNA, 690 bp, Glycine max
ggagggcaaaggtttcacggaagagcaagaagctctggtggtgaaatcatggaacgaaatgaagaagaattctcaagaactcggtcttaaatttttcaagaaaatattggagattgctccagcagctcagcaattgttctcattcttgaaggattcaactgttcctttggaggaaaaccccaagctcaagccccatgccatggctgtctttgtcatgacgtgtgaatcagctgttcaactgaggacagctgctaaagtcactgcgagggaatcaaacttgaaaagattaggtgctactcattttaaagccggtgtagcagctgagcatttcgaggtaacaaagttggcactattggagaccataaaagaagcagtgcctgaaatgtggtcaccagccatgaagaatgcatgggaagaagctcatgatcagctggccgaagccatcaaatctgaaatgaagccctctgattagactctagtagttgctttctctcaaattgaataagattgatagggtggtggtgtttgggtctgtgcttctcgtttgtatgaattttaataatgtatctatgttgctattggggttgctatgtcggaaagtgttcacattttaacaattcagttattgaaggtgatgtgaattgtaaggcaagggaaaatgataaatgcatggatggtatgaattgttac

SEQ ID NO: 28672 - DNA, 398 bp, Glycine max
attgtcgtcacaacaaaatcaacatagttattgattaatggtcctgtgtttgttgttttgtgtgtccaagtctatcaaaatcattctttggttttgtgttctattgtagattgtaggtactgcttcaatacatctttcaatcaccgagatcttgaattcttcagtttcaagacaataattgaagttcaaggccattagttccaacaagaaggaaaatggggctcactagtacaagtgaaaaagaagagatgttcatggcggatgcagaaagagcaaaggagctcaaagctcctgatgacacaaaacttggtgtcaaaggacttgttgatgcaggaattaccaagatccctcgcatattctatcatccctctgataatttcaagagggtctcagaattt

SEQ ID NO: 28673 - DNA, 339 bp, Glycine max
gcggaggcggcgaagaataaggcgggggaggcggcggtggggggttcgtggactgggagacggaaatgcggcagagagtgagggagttcgaggagaggagggagctcgagaagaaggccgaggagttgcagagtcgcgttggagaggaaggcgaggaggaagaaaccgaggaagaaaagaggatgagagtcaggaaagagctcgaaaaggtagctaaggaacaggcagagaggagggccactgctcagttgatgtttgatttgggtcagaaggcttatgggaagggatcctatggacgtgccattgagtttcttgaagctgcacttactatcatacccg

SEQ ID NO: 28674 - DNA, 295 bp, Glycine max
gaacatctgtgaccgtgtgaagtctctgatattcacaaagggagaaacaatagctagagaaggagacccagttcagagaatgctatttgtagtaaggggtcaccttcaaagcagccaagtcctaagggatggtgtgaagagttgttgcatgttaggtccaggaaacttcagtggggacgaactcctctcatggtgtttaaggagacccttcatagaacgccttccgccgtcttcatccacactcatcacgttggaaaccaccgaggcgttcggccgtgaagcccaggacgtgaag

SEQ ID NO: 28675 - DNA, 284 bp, Glycine max
tactcctgcaatgcgtcgggggccagctggaccaaggactttatgtaatgcatgcggccttatgtgggctaacaagggcacacccagagatctcagtaagggtggaaggaatctttctgttgagcaaagtgatctggacactcctattgatgtcaagcctacttctgttcttgaaggggaattgcctggcatccatgatgagcaaggtagttctgaagatccttccaagtccaatgcagcggatggttctagtaatcatgctgtaaaccccagtgatgaggaat

SEQ ID NO: 28676 - DNA, 567 bp, Glycine max
ctatgccaaaagatcgaaatggaaagctttcaaaggagtatctaagggtggcactggacacggtggctccatctgctggtttacctcctgttggtgcaattgaagagatggacaaggttattggtgaagtctttaagatggtgaatgcagatgatgcgaaggtggtgaaagaagacgaattcaagaaactattaactgaaatactggggaacataatgttgcagttggagggaaatcccatatcagtttcttcaaattcggtagtacacgagccactagactcatcttctacacttctgcagccatcccctagtgaaacagcagcatagctgagttgtttaagtatatgatgggtaaaagaaccgagcaatataataaaatttttattctatgtaaattattactggcataatttgtgttttgagctgtcaaatttaaatggtgttgtacttgagtcatcgttcaggctgtttgatcgtaacctaaaaagagtaagattaattattttactataatgcatacattatcaaaccattatggatattttcagatgtgatgtgattatat

SEQ ID NO: 28677 - DNA, 571 bp, Glycine max
aatgttctgtcatctatctgttgctcttagtcccttgccaatccccgtgccttttccatcaatatttgggaccaatgttggccagcacggtgaattgatgagtggtcaaattactaattcttcaccaaaaggatccctcgacatccattccattcccatggctgccagattacgatctagcagtattgtgttaccactcttggagagtaagctgcgaaatcttcatcagtttggaattcaacgaggagcagcgggggctgagttacttaggagttggggctttggccaggaagaattggtggaaatggaagagatgttgtctaaaatggtagcggcattgcatcctcctcagttggtcaccagattcagattagaatatatgcgttgttcttcccaaaaaaagaaaagaaaaaaccaagtcaggtaaaaatttgtaaggctactgattgtaacaaatttgcactgtgctgcgctggctgttcatgccttttggcaattgtataggtttcatgctttttgttggttaattccccgaagccagatagttgattttttctttacaggtataaag

SEQ ID NO: 28678 - DNA, 707 bp, Glycine max
cactgcccaagaccgcccccattgttgaggatgcgaatgcgcattgcgttgccatggaactgtgttctaagaatgatatatatgttagcagtgctagtaatggttttaagaacgagagtgctgtagttacctctgctcctcagaagaggattgaggtatgcatggggaacaagtgcaaaagatcaggggctgctgcattgatgcaagagtttgagaaagtggtgggtgttgaaggtgtagctgttgttgcatgcaagtgcatgggcaagtgcaaaactgctcctaatgttaaagttcagaattctgttgatcataatagcctggctcagggacttgatgattctgttaagattcctgctaaccctctatgcattggggttggcttggaggatgtggatgccatcgtggctagatatttttgggagagtcacacagatataggcatggcaggtgcaggtgcagctacagctacttgatgttgtgggaatggctagtgtgttatttgtaattatatatatacgtagccaggatgccgaggaaacattattgacaatggttttttttagttgttcatattgtataatataaattagttatgaagtttcttttccttgtttattgggaatgccattccattgtttcactcttatgcaataataaactgaaattagccgttgtcaaaaaaaaaaaaaaaggacggccgccga

SEQ ID NO: 28679 - DNA, 627 bp, Glycine max
agccttggcctattttcaggatagcaactcccctaaggctcgctactttgccgcttttgttcctctcgtcaattgcttgaggcttttggtcaatggtctctcactggcttctgatgagggactcatcaaatccgtcaccagagaaggagatccactgggatggcatagctgatatcattggtagaagatatgggtccatgaagattccctacaatgaacataagagtttagccggtagcatgtctatgcttgtctttggattcttggtttcaatagggatgctctactactattcagttttaggacatgtgcagttggattgggcaagcactctgcccagagttgcttttatttctttcgtggcaacattggtggagtctcttcccattactaaggtagtagatgacaacatttctgttccactagctaccatggcagtggcatttttcactttccatcattaactcttaggagtctactggtctagttcccctgtaatgtcttacttgccttccctatccaattttttcctgctagtgcgacaatatgaaatttagtttgttccttgtaaagaaattagtgaaaattttatagcataaagaatgagtcaagtattttgttgtgttg

SEQ ID NO: 28680 - DNA, 464 bp, Glycine max
cacttctctcactctaaaattctgatgcaccttgttttcaactgtttctctttcctggtgtaggtgagtacttgtcacttcttagctggttggtttcaacttgcaccatttcttcctcagcattctatatatgtcctcatcccactgtctgcattgctagctctcatattaccccaactctttgattggcatttttattttttattgtttctatgagttgtggaaaatgttacttagaagctcctccgcaccaattctaacttcattgttattctattccaaggagttcccctccgaaccagaacacattcttcaccttcctaaaacagcatcagctttaagtctaagccaaagcttggtggatatagaccttaaaaactcatcaagtcccaggagaaaaaatcgtgtgccacttagtaatgttcctaataatcaacagagtataaagatcaatgaaagatatg

SEQ ID NO: 28681 - DNA, 465 bp, Glycine max
gtggggagtgaatcccattacacagtgttgtttgctcttgaccccagtgtccaaaatgagaatgaactggaaggaagggaaactcagattcgcaaagcttttgatgcacaagatcagagtggaggtggtggtttcattagtgtggaagggttccatcaagtcctcagagaaacaaatatcaaatttccaccagagaagctggaacatctttgctctgcagggttcattgtatggagtgaattctggcaagtaattttggatctagacaaaagcttggggggtttgaaggattcatcaggattgatgggtaagaaggtttttgatctttaccattttaatgggattgccaaatcggacctgaacggcagtcaagtaaattccccgggcgaaactccactgcaaagaccccggctcacaaaaattgagaggttcagtccccccaagatggacgcctgaggaatttat

SEQ ID NO: 28682 - DNA, 421 bp, Glycine max
ttggattcaaattggatagccttcttaaattatctgatacccgtgcaagaactaacaaaatgactttaatgcattatttgtgtaagcttcttgctgagaaaatgccagaattgctagattttgataaggatcttgtccatttggaagcagcttctaggattcaactaaaagcattggctgaagaaatgcaagctgtgagtaaaggtttagagaaagttgagcaagaactcgctgcttctgaaaatgatggcgctatatctacaggatttcgtgcggtgctgaagaattttcttgatattgctgaagctgatgcgaggtctcttatagcattgtattctgaagtgggaagaagtgcagactctctgtcccagtactttggagaggatccacctagatgcccttttgaacatgtgacacaaat

SEQ ID NO: 28683 - DNA, 159 bp, Glycine max
accacatccagaagatcgtccctgctgtggaccgtaacgccaacccttacatgttcgttggaaagaatctcctcgcaggtggtatagccggaagcattacttcttgtattgtttaccccctggactttgctagaactagactcggagtcgatgtcggta

SEQ ID NO: 28684 - DNA, 224 bp, Glycine max
atatggtcgatccaatccagtgtgtgataagagtcattgttgtaatattctttttcctattatcttaaactgaaaaagttttgtagtcctagtgtaggacatgggtatgtatgtatggtaatagtgagtaaaggtttataagaatacgctggatattataaagttccaccagacttgaaagagattgggatctaaagttattaagcttaagctttgttctgttt

SEQ ID NO: 28685 - DNA, 424 bp, Glycine max
ttcttaggatgggaattcatgggcatcctttggagattcaggcactgttttattctgccttactttgtgcacgtgagatgcttactccagaggatggatcagctgatcttatacgggcactgaacaaccgtctggtagctctttcatttcatattagagaatactattggattgatttgaaaaaattaaatgagatttaccgttacaagacagaggagtactcatatgatgcagttaataagttcaacatatacccagaccagatttctccttggttagtggaatggatgccaaacaaaggaggctatttaattggcaacctacaaccagctcacatggatttccgatttttttcactgggaaacttcccccctgtcgtaaacagcttggccacagaggagcaatcacatgccatattggatct

SEQ ID NO: 28686 - DNA, 273 bp, Glycine max
ctctttttgttgtttagtcagctatgtcactataaagagaaccctagtgcaaatacatattgtataactttggtgactctagtctgtgcaaaagaatgcttctaggcaaccaatggcaccagtcatgcacaagtataataaaccactctattccatgcacatacaatttgtcttctttttagtttccagtgaagaaccctctttaagtgccacgtgggcatcattctccttgcccagggctaaaagagcaacagcttgtaaataaaacgcaat

SEQ ID NO: 28687 - DNA, 401 bp, Glycine max
ccctcgcgtccgttatcgaggtggtatctactcatggtcataattatttttgaaaatatgttttttgcgctggcattcctttcagcaaagttcatgaagtaatttttcttttcttcaatatggacttctttatcttagctgaagctcagaagaaactggagcatgcttttgagacttcattaatttatctcaatgattggatatatactgctgttgatgcctggtatttggtgactttaagaaactctgaaggtcctgtatagtgttaggttctgttatgaattgttgaaaatcaatctataaatgagagtgtgtcctaatttgacatcacctctccccttatgtataagagatgctttattcctgatgctaaactataaattttcaaatcatttagaaaa

SEQ ID NO: 28688 - DNA, 524 bp, Glycine max
caccaagctgcatgaaggacacgtttctgccgcaagacacgttagcatctggcttggcacttcttatctcacacctctcattggagctgttctaggagatggttactggggtcgatactggacacttgctgttttctctgtggtttatttcattgggatgtgtaccctgacactttctgcatctttaccagcattgaagcctgctgaatgcttgggttctgtatgcccttcagctactcctgcacaatatgctgtgttctactttggtctatacgtgattgcacttgggatcggtggtataaagtcatgtgtgccatcttttggggcaggtcaatttgatgatactgatccaaaggaaagggttaagaaggggtcgtttttcaattggtattacttttctatcaatctaggtgccattgtatcgagcagcatagttgtgtggattcaagactatgcaggatggggccttggatttggcattcctactttgttcatggtattatcctgtgataacttctttatag

SEQ ID NO: 28689 - DNA, 271 bp, Glycine max
atcgatcactcgtcagcacatacagttgctgtcatggtcccggagtcaattcacaacaccaaatcgccatcatgattgacgaagtcttgaagaagacctcggagatgttcccgctgcccacggcaacggcctcatctctgccttggttgctcccgttcccactgtcatccccggcagcgagcccgtctacgaggttgctggcgatgctggacagaagacgctttgggtcgtctttgtccttatgctgatcgcctctgctggattcactgtc

SEQ ID NO: 28690 - DNA, 778 bp, Glycine max
  unsure (1)..(778): unsure at all n locations
acgagttgctgtttgccactcttttttccttttattcttctcttcactcactcttcattttttactattattcacaaacacaacactttctcctccttctaattccatcgtcactaagttacttattaagtttggtagcatagctctgcctctgatttagatccgcataaggttgttacttacatgtgcctttcgtctcttatatcttaatcattgctctctattgccttagcctatgcttattcttttcaccttctaagttctaaatattcattgcccagaaccaaatcactttctttttttccttctctgtccccaaagttcgttgctttacattacagggtgtccaaccaaagctatcctcaaatctcaatgctttctaccaacaacagcacaacaagtgcaatgattctggagggttgcaggaggatataaagtttctgatatttttatttttttgggtattgatttggatgatcctctcctttgagttgctgcttcaaggagagagagaattatttgggatgaaagatgctagtgttgatctgggtttttgctggaaggaagaaaagaaggttctgaattctgatatatagtaatcaagagtcaaaactgaggattcgttaggttggtgttgaatccagttccaatggacacaccaaatgcacagccgcaagctgcatcagcaagcacgccaaggaaaaacatgacaaagcaattgacaggtaaaagggatgatacacctttgcactctgcagcangagcagggaatatgact

SEQ ID NO: 28691 - DNA, 540 bp, Glycine max
cttaagttgatctcatcctgtcccaaacagtttcctttcaactccacaaagtaaaaacacagacaaaaaaaacataaaaccaaagcaacaacgttgttaagatgcagtcaagactagcagaagcaacaaggagaacatcttgtgcattatcctcaaccactcgcttcactctaaaacgacaactttgctctggcactcgtatccgaaccgcagaccccgaaattcattcgggagagctagaagctggtcccaaagttcacagaggacaaccccaaggtataagtacacaagataaagcgaaggaagccaggtattctgaaacagaacgcaatgcgagcaaagcgcacgagatgttgaaatctccaaaatctccttgtgaaccttcacggaaactgaagagcgcgggggtgaaccagagattggacccaagcattcagcaaaagcgggagaaagggtcgaaggtgggtattgaagaggtgagctgtgctggtcttgatggaacgccgtggccagaggacacaaacaaagggaaagagaaag

SEQ ID NO: 28692 - DNA, 290 bp, Glycine max
caaaagtcatcatagttgtagaagatgggaagaatttcaaggaccaagagttatgcaattgcctcttcaatagtacaagacaaccaacaacaaacaccaccttccattacctgcacaacttttaacattcttgcacccatatacaagcgtctcaaccatgaggatcagagttgccgcgaaagcgattacaaagcgtgttggttgaccacgaatcataggatattggattggttgttgtatgagagatcttccataatctgtcttcaggaattttggattggaaacgacga

SEQ ID NO: 28693 - DNA, 362 bp, Glycine max
cttaaccgcaacaatccccaactcgctctctccattttctacgccatgcgcgccatatttcatcaagttggcgagagtggtcctttggctgagagatggaagtggtcgaggccaaatgcaaatgtttatacattgttgattcaaggtttagcggcggtgttaagggtttctgacgctctcagggttattagatatatttgtgaaatcggcgtttctcctggtgaggaggttccgtttgggaagatagtcaaatgccctagctgtcggatagctgttggtgttgcacaaccacaacaaggtattcagatagtgtcttgtgcaaagtgtcgctaccaatacgaacttgtttcaggagacatagt

SEQ ID NO: 28694 - DNA, 439 bp, Glycine max
  unsure (1)..(439): unsure at all n locations
gaccattcctcttccatcacttgccactcccacctcntaatttactctaacaatctccttcaacaatatccgcagctagactgcttccttgtttctcgacatagaggttggtcaatccttgatcatcgatgatcccgccgccggggcattcaccgtctccgctttcgacgccaatcactgccctggtaatattcacttctctaatttatttggcatatttgtattttgattcaactatgtgtgcgtgtgtcttgattcacgttgagtcattcataatcatgttgagataacagctactgtaattctagataaatgttcacatgtttggtttcaccgtaaagaattaattccagatctaaatttgattttgaattgaggtaaatctatatagcttctgcgtttgttaaatttttttataacgagttttactactaccttg

SEQ ID NO: 28695 - DNA, 653 bp, Glycine max
cggaactatggacttgattggagcatttcatactcatccaaactgttccctgaaaaattccacagttaattgcacaggcaactttgaccattctcctcaattggatctttctttgagaagatcttgtcccggaagctttgagaataaactcactgaagaaaggcacaccctgatgcattctaatgcttcagctttcaagcggtatactaccaggcaattgcaaatatcaatgcctgcagtgttaattaacttctctgatcaacaaagagaacagataacaaattgtgagaaaaacatctcacacatcgctactggcagcaactcagatagttcaacacctatgcaaagatgtattgtgtctccaactacagtccaatcaaaagaacctgaacttgcaacctcacaccccccgccagggcattctctcccaattcctgtaaagggtgtaaggttcaatgatctatgcacagcctatggttctgtacttccttcagtgtttcatacacagtcaggtccaccagcaatgccaagtccaaattcagttgtgctccttgaaccaaactttcaagtaaatgcattttatcagtcaaatatgaaagagagtagttcagagcagctttatgaacctggtggtccaaatggaaacaccaccc

SEQ ID NO: 28696 - DNA, 291 bp, Glycine max
gtttttcacatacaaactggcaacttggtgactggtgcatgctcccagttgtggaccaaaaggaacagatgattcaagatgcatctacctgtgatccttataatgagcagggtatggctagaggatataagagaagaaatcttaacgttggggaattatttctaattgagaagataaagaccaaagttgatgttgtttggcaaaatggtgaacatactttgggattggatccacacaacttagtcttcttgaatgtcataaacactcatgaattttggccccagcagtttg

SEQ ID NO: 28697 - DNA, 275 bp, Glycine max
tgcaaagccatagccatacggcagtacccacccttgcagtgttgactatgctgctagctcaacccattttcctctctcgcaactttcccactctcaacaaccgaaactcgagaacttctcttcaacttcacaaccctcctgcactcataagagtttcaccgcaaagaacgccaataatagcctcttctggttgttttggttgcttcgtaaaaccgcttgatgtcagaaccaaaacctcgctgggtgcgttttttaagaaaagaaagggttgtgca

SEQ ID NO: 28698 - DNA, 454 bp, Glycine max
tcactttcatctctcaccatccaaccacaccctcaggctcagaatagtttctaggtctcagcaaaatgcgaaagaaacccagagagtgtccatggccaaggcaaaggccaaggttctcacggaccttcaagtggaagagatggagaagcagcatgagaccttgtcttggaactggccaccttggaagtatcttccccaaagatacaagctcctcggcaccacttcattggcctttgttatttgtaacatggataaggtgaacttgagtattgccataattccaatgtctcatcaatttgggtggaactcaacaacggcaggattggttcagtcctccttcttctggggctatgcattgagtcaattgcctgggggttggctagccaaaatatttggtggcggaactgttcttgaggttggagtattgatatggtcagtggctacagcttttgtt

SEQ ID NO: 28699 - DNA, 322 bp, Glycine max
accaacaaccactttcagttttgactgttttgcttccatggtgtctcgccccaatctagataatgcgaatatgaagatgccgtcatattttaattttccagcacttgatgtttctgttgcatttccacaggccactccagcctctacttttcctccttgtgcttcagattattttcatttcaatgacttgttgaaaccggaggagcaggccgtgaggaacagagtgagagagtgtatgggaaaagaaattgctcctataatgactgagtactgggagaaggctgaattcccatttcatgttatcccaaagtttgctgccctg

SEQ ID NO: 28700 - DNA, 480 bp, Glycine max
ggaatgacaggagcaggaggcaatgtgggtgcagttgtgacccaactaattttcttcaaaggatccaggttttcaaaagaaagaggaatcactctaatgggagccatgatcataatatgcagcctgccaatatgcttaatctactttccccaatggggtggcatgttctctggtccttcatctaaaaaggtcacagaggaagattactacttggctgagtggaactcaaaggagaaggagaaaggctcccatcatgcaagcttgaaatttgctgataatagcagaagtgaaagaggcagaaagctgaatgcttcaaccgagcttaccgaggaaatcacacccccacatgtttgattgctcctcttgaacttgttaatgttaacccttgtaccttcacttaagcctgcccctgaagtttgtgatatcaaatcaatgtgtgttcatatgtttgctatataatgaagctttccttgggaagtg

SEQ ID NO: 28701 - DNA, 333 bp, Glycine max
cggctcgagcggctcgagcggctcgagcggctcgaggtggagtctggatttaatgctccccaagagaacccgccaccataacgaagatgacacttctaatgctgaaagctcaacccaacattctgaatctatttctcaattagttaacttaaaccaaactgcatatgaaaatccaaatctgggaaccttgagtcatgaagaatatttcagagtcttggatgagatgacaaccaagagctactcgtatgacactgataaggacacaaacatctatgatggaaacacctcatgtcttgcaacatgcacaaccagcgacatagatgatgatctttg

SEQ ID NO: 28702 - DNA, 293 bp, Glycine max
acaaggccgtctccaaatgggtcggaatcgtcgtcctcgctagcaaccaagccagcggcggcaagctctacgaggctgcatgctcgttgaagtccctgcttcaagaccgcgcctatttgcttgtcgccgagcgcgtcgatatcgccgccgactgccgccgctagcggagttttgctctctgcccaaggccttcctactgttgttgctagaactatgatgttggattcaaagtccgaatcggtggttcttcccttggttgctaggattgctcgaactgtggatgctgcggtgaa

SEQ ID NO: 28703 - DNA, 486 bp, Glycine max
ggaccacgtggaaagagtctctccactgggaccccagatgaacaaagagctcttaatcagttactgagaatgagtgatgttcttcttctaacttctgacgaggctgaggaattaactggcatagacgatccaatattagcagggcaggagtttctcaaaagagggatccgcacaaaatgggtgattgtaaaaatgggttctaagggttcaattcttataacagcatcgagtgtagcttgtgcacctgcattcaaggtgaatgttattgacactgttggatgtggagacagttttgttgctgctattgtctatggttttatacataatatgccactggttaatacattggcaattgcaaatgcagtgggtgctgcaacagccatgggctgtggtgctggtaggaatgtagcaacactggagaatgtagtacatatattatagatcatcaaacctcaacgaagatgatgaattttggattgaaatatt

SEQ ID NO: 28704 - DNA, 559 bp, Glycine max
ctgggagctctcaagtcaattgtcaatgttatcggtatgacaaagatgactccacctattaaggatttacttcccaggttgactccgattttgaagaataggcacgagaaagttcaggagaattgtattgaccttgttggtaggattgctgaccgtggagctgagtttgtaccagcaagagagtggatgaggatttgttttgagttgcttgagatgctcaaagcacacaagaagggaatccgtagagctacagtgaacacttttggatatattgcaaaagccattggaccacaagatgtcttggcaaccctattgaataatctcaaggtgcaggagaggcagaaccgtgtttgcacaaccgtagccattgcaattgttgcagaaacatgttcacccttcacagttttaccagcattgatgaacgagtatcgcgtgccggagcttaatgtgcaaaatggtgtgctcaagtccctctctttcctatttgagtacattggtgaaatgggaaaggattacatctatgctgtgactcctttgcttgaagatgcactcatggaca

SEQ ID NO: 28705 - DNA, 288 bp, Glycine max
cttgaagcttgctgctatttcaacacctcctagcaaacgcatcagtcccaatgcttgatgaggaagtgcgttcagttatgcagtcatacggtataatgaatgataagcactatgttgacccgctgcaggttttggagagtttggtgaccatttttattgaaggcagtgggcgtgggctgtgtaagagaataatagcagttataaaagctgcaaacaccttgggcctctcattttttgaggggttcaacaagcaaccaattgaactactacagctgctttcgcttaaag

SEQ ID NO: 28706 - DNA, 1034 bp, Glycine max
ggaagaagtccattcaaaattgcctgctgtaactgtacaaggtgaatctgatcaaaacttacagcaacaaacacttgatgatgatgaatcagaagcaatcaataatgccaagagatgcataccagaaaaagaacttgatagaatgtccactgttgttgaggaacctgaaaccaatgccaatgttggcatagtaaaagaagaacaagcagacaaccaatcgcaagtatcaagcatgcagagtgtgattacaaactatataacagcagaaggacatctggcatcagaaagcagtacaaaattaagttttatgaatgaacagaagacagtagacgcgtcagtagagaatttagaaatcaaggatgcaagtgaaatcacagcagaggaagcaacagatgccaaacaattgactgatgaggagatacaaaaatcagaaaccgaaagtgtgtatgaagataaggccctgcaaacattacccagtacagcatctgtccgtattgaagttgagaaaagcattcaagagatacatacagaaacagaattagcagtgacagataccaaagaggggcagatatcagaaaatgagtctgaggcaaaaagggaagtttctgagtatatgttaaaaaagggcttttgatctgcacaaagtggcatgccagaccggtgcagaaaatgaactgaaagctgaattcctaatttaaagagcggagccaggaaactatagttacaaagcatccaaatttggaaggagagagcatagagataaacccaacaagtgaaactgaagaacatgaacaggtaccagcatcacacaccggagagaaattagagatcaacgatgatgggaatttcatacaagaggaagaaaaagagatggaaaaagaaactgaaaggcagttgcttaaaactgcaacagaaagtgtaccataagatgaagtccagacaaccctgccaacatcaacaattgttaaaggtgagacagttgaaggaattgttcaggaacaaacactcgaggaagagaaatcagcagcaataga

SEQ ID NO: 28707 - DNA, 395 bp, Glycine max
ggaagaagtccattcaaaattgcctgctgtaactgtacaaggtgaatctgatcaaaacttacagcaacaagcacttgatgatgatggatcagaagcaatcaataatgccaagagatgcataccacaaaaagaacttgatagaatgtccactgttgttgaggaacctgaaaccaatgccaatgttggcatagtaaaagaagaacaatcagacaaccaatcgcaaggatcaagcatgcaaaatatgattgcaaattatataacagcagaaggacatctggcatcagaaagcaatacaaaattaaattatgaaactgaagaacatgaacaggtaccagcatcacacaccggagagaaattagagatcaacgatgatgggaatttcatacaagaggaag

SEQ ID NO: 28708 - DNA, 240 bp, Glycine max
caagattggataattagccgaataatatcatggcttctatcttccctatttctcgtatgtccttcactgatttctctgcaccccttcccatttccataagttcctcatcttccacattcccactttctcaaacaccatgcaaacccactaaacatagcaaaccaagacgccatcatgtttccaaagtgtcatgccatagtaaccaaaacaactcagcaccaaacccagaagaaggaaaac

SEQ ID NO: 28709 - DNA, 647 bp, Glycine max
ctgaaatataacatggtgattgtaagtccaattcttgaaagggatattaaccatggagaggttatatggaacactgccgttgtaattggaaatcatggcaatataattgggaaacacaggaagaaccatataccaagagttggagacttcaatgagagcacatattatatggaaggaaacaccggccaccctgtatttgaaacagcatttggaaaaattgccattaatatatgttatggtaggcaccatcctttaaattggttagcctttggcttgaatggtgcagagattgttttcaacccttctgccactgttggtgaactaagtgaaccaatgtggccaatagaggcacgtaatgctgcaatagctaatagttactttgttgcttcaatcaaccgtgttggaactgagacattccccaatcaatttacttctggcgatggaaagccggcacatgcagatttcgggcacttctatggatccagttatgtttcagcacctgatgcatcgtgcacgccatctctatcccgcaatagggacggcttgttagtaacagacatggatcttaacctgtgcaggcaggtgaaagacaagtggggtttcagaatgacttcacggtacgagttatatgccgacacactcggccg

SEQ ID NO: 28710 - DNA, 602 bp, Glycine max
caggaagttcattaaaagctcccaaatcattcttttcactatcaactttccgaagcaagggtagtgactcgaaacccagatgaaatttcactgagttggcctggcaagtaatttggatcatcctcaatggtaggggggtgatattaaatatgatacagaaaagagaggtaggctcgatacaatgatctatatgaaagatacatgagatgggggttatgtatattttcttggactcatgaggttttcccctatgattttagtttagtcatggttgtgttgatatatgctgcatactgtagtcaatgaagtgtcgcctattggtgcagtgtcattgtaattttggcagtagtggcattcttttgctcgtttattttgatttacttgtgtgatgtatatcagagttgaactcatgttagaatgaatcagtacagtcagagttaagaagagtaatgtgattgttgcggagtaaaatagtagctttcaaaagattatttccccctccccttgaaaaagagcaaataagaatgattggctacttatacttatcctttgccactttattgttacatttttgctgtatgaactttcaagtttcaactatt

SEQ ID NO: 28711 - DNA, 254 bp, Glycine max
tggttttgaagaattttgaagggttggatcttggaaagctgaacaagactagtgactcttttgctgcctcttatgctgctgaactatacgatcggtcactcaactggaaggatatcaaatggattcaaacaatcacttctttgcctattttattaaagggtgtacttactcctgaagatacaatgatagccatacaagctggagctgctggaatcattgtttccaatcacggagctcgccaacttgactatgtc

SEQ ID NO: 28712 - DNA, 345 bp, Glycine max
tttcttaagaattgacttagtgaaatcccatatttcatatataagacaaaggaataatccgcccggttcaagatttatcttggataatgagtcggaccgcaccaccatcaatccatttttttctattgatttgagggaaaaaattcaacaatcacttagtaaaaatcatggaactattcgtatgttgttgaatagaaatgaaaaatgccgatctttgataattttgtcatcatcgaattgttttcaaatacgatcattcaaccatggaacatattacaatgggataaaagagggaattaatcaaattcaaagagatgctatgattccaattaaaaattcgttagg

SEQ ID NO: 28713 - DNA, 388 bp, Glycine max
cagcggaacaagtagtgctcctgatctttccctgaggaagctttacattggaagcttatcaccagaagtcacaagtgcaattctccttaactattttgcgaggcatggtgaaatagaggaaggttcagttgcatatgacagggatacaaatgaatcacgtggttttggctttgtcacatacaagacagcggaggctgcgaagaaggccatagatgacctagaaaagacgctcgggggaaggaatatagttgtaaaatatgctgattcccacaaaggtaaaactggccagccgccatttcctgctggagtggttccgatggcacccttacctatgaacccaggatacatgcaacctggaaaaggtcatgttggttcagggcccccaatc

SEQ ID NO: 28714 - DNA, 298 bp, Glycine max
caaaactttatcctttctctttctctttttttctttggggggagggggtgaatgaaaatttctggttactgtgcttttttctggttttaggatatgcattacttttgagggaatttggatctggaagagcttttagtgcatgaagattcttttctctctctcactctctcttcaattcatataattacttggggaccaacttccttgaatcgggcactggtagcttagctcgtgtaaatgtgtctctggcgctggaaattcatgagtaaaattaatttgtgagatcgagagctttgag

SEQ ID NO: 28715 - DNA, 759 bp, Glycine max
gtgcccttttgaatgaatgttatagcatatggttggcttcaggacttgaagaagcccttttgagtatagcaaatcagaataattttgagctagatggcatttcaagggaattagttgaatccattaagtatattcatgagcttgatgaacatgcacttcagagctttgtcatctctggagaacaaactacttgccagttgtcagccttgccagctggtttcataccagggttaaatttggtgaaatggaatgggaagcattacattgtcaaacttgcaaacttgtggatcaatctaataagttcagatccacccaagaagtgacacctgcaaattcaattgtctctcacaacaagtggagttttcagtctgttgttgagttgttttctccccaagaaaaaccagtgtgagattgtggcgggatccattgtttagttagtggggtgaggcctttggcgcactggcagcagttgtagtgataggagattgtgtatgggatgaaaatcattctattgagtcgggtcaggcaaagtcaccaattgagttcattctttcttcaataggttaccattctttcgggggaagctttagaacaataaccggatgttacaggtgtctggattcgatccagttctctgcagagggagtgatattgcgtagttatcaactgattctggtgttgtaaagtaactgggattcttcccttaacaattttacagagttttttttggcatgatttaaattatgaatatttttattt

SEQ ID NO: 28716 - DNA, 285 bp, Glycine max
ctcaaactctacatacaaatcaatcggatatgaacacacccaaaatgcattacaagactttgatccttgaccatggacttaatatcactcgcttacgttaccttaagtacgttaactccactgtgcacagtgtcaacgacaccaaataccgcaggatgagttacaagaacagctcaactctgaaaaaggacttttatagtcttaaaaaggtcaacaagcttgacgtgaatgacgtccactcctaccacgtcacgtcatttgagcatgttcctagattgaccaagg

SEQ ID NO: 28717 - DNA, 627 bp, Glycine max
tccctttctaactcaagtataaatttttccccttacccattattttttgtcgatcaatttaatgattcattgtcttcaagtggtaggatcaccatcaccctctttttttgaatgttgacaatttattggggtggtgttagtggagggtttcttaattgcgtctttgattggaatcgctgactctgtaattgggtcagtttgaaagtttcaaaagagggcagaggaagcgtggattttcttattcttttgttttgaagggttcaaggaggagaaattcccagctttgttattggagggagacgaaaaattgatgcatggatattagctggtcagttgcatgatggagttgtaggtggaggatagtgattcgtggttattgattgaaggataataatatattgcatagtagttgaatttgtataatagctttgtgctgcaacatggggtgcatcgcttccaagagtgcagctgttgaagacagcagggaaggtgtggcaagggaattcacttcatccagcaaaagggcggcctcgaagatgaaggcttccgtattgaattcggagaaaaggatcgatggggtttgggggacagataagattttggatggtgctgatatgaaagtttcat

SEQ ID NO: 28718 - DNA, 437 bp, Glycine max
gaattttcttggatggttgatggtgctggattgccaccgaatgcgtcagaattgcttcccaagttggtaaatatgattaagaacggtactgaacaagtaagactacttgccacggatgaagatgagaaacttgcagaaaagagcttatatgatgtaattcctccttatgaccaagcgaaagcacttgggaagacaaatatcgatgttgatcgtatagctgccggattaccttgtggtagtgaagggtttctattaatgtatgctcggtggaaaaagctggaaagggacctgtataacgaacgcaaggagcgctttgacatcacccaaattcctgatgtctatgattcatgcaaatatgatctcttgcataatgcccatcttaatctagaaggattggatgagcttttcaaggttgctcaggcacttgctgatggtgt

SEQ ID NO: 28719 - DNA, 566 bp, Glycine max
tatcagcaaagataatatatattaataatgaagtaccagaggtactaaggatacaaatagcatgatatatcagtgaactggttccaaagtcagactttactcagtcttgatgggaaccagaaactaagaaaatacagtaaatgattgctgccattgcaactatttatattcccccccactgttatacaaaagctgatgataaatttgacgaccagtgactgaaggggatagcaaaattctcctcaaagttcctcagccaggtccacagtagaaatatggcttcctccaataatttggtgccatcaaaagtctcattagaaaaaataatcttgttcctctgctgccacactgatccttttgcttaacatctgtgagtttatttaatttggtgatcatattatatttgaccgataccccctgcaaatatgaattatcagatcaagagttgctggcaaagcacacgttgatggtgcaaagaagcatcgtactcgtgatcgcgctgtaaaagctgctcctgctcgtgaaggcaatgctgagcttcaatccaacattgatagaaggcgttt

SEQ ID NO: 28720 - DNA, 388 bp, Glycine max
ctggagggttccattccaaccggtttcaaatggagatctagaagagaggtggtggattggctgacatcgacgctatcaaagcagaacctgcagggagatagaagtgtatcagctggtcataacttggtaccatctcatgaggccacaaatgacagtgtcaatgaaattattggtctgtctgctcaaataacagatgacaaggactttccaacgagtaactccaacttgtccaattcagacattgtttggtcaggagttgcgtggagatgtggcaaacaacttaagcattatcctgcttttttcaggaatggcatcaaaatagcgattcaatcctttgtttttgttatgggcaagggagagaaccattatattgcttatgtagaggata

SEQ ID NO: 28721 - DNA, 541 bp, Glycine max
cagaatgggttgacacgtgtgggtaatatatgacgagagcgtgtgaagagaaaagcctgaaaagaaagagcgagacaaagaagaaaatgagggtgcagtaccactactaccctttcccttctctggcgtatggttgcagctactgttatgcttatgcgactactaaattaaaacctactcactcactctctctaacactctccaaccaccgtcgcatttctgcgtcacaacctcactcttccaccttctccatcatcaccaacctcttcttcttccaaaaccctaatttcatcacggggaacactctcttcctcaggatgcagagattttgctcagtaagtggcttaagtaagaacaaagcactggtggagaggttgcagcgctatggagtgatcacatcaagtaaggtggctgaagtgatggagacagttgatagagccttgtttgtaccagatggagctgcaccttatgatgacagccccatggccatagggtacaatgccactatctctgcgccgcatatgcatgccatgtgtcttca

SEQ ID NO: 28722 - DNA, 318 bp, Glycine max
gttgatagagcagctgttgcttatgacgggtgatcttgataaggctgcagagtctattgagagagttgaagctgatatcgaccatctggtccaccaaagccagaggaacattggtgatcttccgtccctcaccagtaagcagtcaggagctgtgaatcagaatgctaggccacagacaaaacccatactttctccaaatcaacccaggctagatgtccacgatcttaactatgcaaagcaagcagttattctaggaggatctatggaatccagcaacagacttgtgcagcctcttaagagaatcttacccaagcccga

SEQ ID NO: 28723 - DNA, 684 bp, Glycine max
tgtatgagaacaaagccagactattatgtactgctgaagggagccctcaagatctctttgaaaaaatattaacaatatctgaggctaaaaatatggcaccccgaacctcttcaagatcgaggaaaaatgatgattctaacctttgcgtggacaatgaattggggtttgccaaagaccgcaccattagtagactgacagacattaacagcaaggaatacttacagcaccatgctgccatgttagcagaaaagaaagacagagtggatcagaatgccgttgaagcttgaagaaaggatccaaaacctcttatcacagttcggttgctattgttgtagcacagagtgaaagtggggtaaaatgagtaattattgtgaacaaccaaaaatttcaaataaaaaaccatccatcggcagagcattagatttggctcaatttggctcctattgttgtaccatagagtgaaagtggggcaaaatgaataatattgtgaacaaccaaaatttcaaacaaaaaaacatccatcttcagagcattagatttgacaccagctcagggagagatgtgttagatagcatcaaatatttattagtgtttgcaaaaatattgtataattgatttgatgtaatgcaaaaattcaaacaatttaaatagaatgtaggtcttttaactgcatttattgttgat

SEQ ID NO: 28724 - DNA, 271 bp, Glycine max
tctttctgtctctctccattgcaccttcccttcttccccttcttcttcttttctgtcatttgtgagattccttcacttgttttatctattccattggattgtacagattcctagctaaaacacccagatgtcaatctctgtaattctatttgatttgtgggtgtttctgtgaaaaaaagaattttttttaaggactgtcaaacccaaaactttttttttgggtcttttggtttctgcttcttttatttttgcaaactggcttctgggtttg

SEQ ID NO: 28725 - DNA, 555 bp, Glycine max
gaagaacttagagacatgtggtgttcttgcaggatccctggtaagagatgttgtacttttgtgtgcttacaaattctagaaaatctcttggatggtgattttaacagttatttgtgcttgcaatttgggtgctctagaaaaaaagggattccatatcacaacacttataatcccaaagcaggaatcaacttcagactcgtgtcaaacattgaacgaagaagaaatatttgaagttcaagacagcttatcactttttcctttaggttggatacatacacacccgtcacagacttgtttcatgtcttctgtagatctacacactcattactcataccagatcatgttaccagaggcaattgctattgtcatggcccctacagatactacaagtccacatggcatattccatctgtctgatccgggtggtgtgtctgtcattcgtaactgtcaacaacgtggatttcatccccatgaggagcctgaggatgggactccaatatatgagcactgttcccatgtctatatgaatgctaacttgaagttcgatgttgttga

SEQ ID NO: 28726 - DNA, 904 bp, Glycine max
ccctcttttccgcccacgcgttcggtcaagtttatacctagtgctagctccaatggcagcagggaagaaggggcacatcgtgatgatacctttcatggcacaaggccacatcatcccattcctcgcattagcaaggcaaatccaacagagaacaacaagcttcaccatcaccatagccaacacacccctcaacattcaatacctacgatcttcactttcttctcccaatgaaatccatcttgctgagttacccttcaactccacccaacacggtttgccacccaacatagagaacaccgagaagctccctctcactcacatagcaaaactctttctttcaacactcagcctcgaagctcctcttcgctccttgatatcacagatcacagaacaagagggtcaccctccactttgcattatatctgacgtgttccttggctgggttaacaacgttgcaaagactttaggtattaggaacctaagcttcaccacttgtggtgcttatggaactttggcctatatttctatctggtccaacctacctcataggaaaacagactctgatgagttccatgttccggggttccctcaaaactacaaattccaccgcacccaattgcataaatttctaagagcagctgatggcactgatgactggtcacagtttttcattccacagattgcactttctatcaagtctgatgggtggatttgcaacacggttgaggagattgagcctttggggttgcatcttctgaggaactatcttcaacttcccgtttggaatgtggggcctctcttgccacctgtttcactcagtggctctaaacatcgtgcaggaaaggaacctggcatagcccttgaagcatgtatggagtggctggatttgaaagatgagaattct

SEQ ID NO: 28727 - DNA, 476 bp, Glycine max
cgaaaccggccaggtggtgagccaggaagctcttcacctggtccgtctcgggttaccccaccatgaccctagaggacatggtgggagtacttgaggttcccctcaagagcaccgaattcaaccgctccatcactaaacgcggtgtcaatttagcagacctggcatgcttgccaatctcttcagggtggtatgggacacaagtggaggagaatacaaggttgattaaggtgcagtgctattccaaagaaggcactgtgaacttctacatgaaaccaattgagggtgtgactgccttggttgacatgaataaaaaagaggtgctgtcaatttcagataatggccaaaacatccctgtggctaatggaattaacactgactaccgttactccattcagaagctgaatggaggagagttgaggatgctgaatccaatatccttggagcaaccaaaaggtccaagcttcacaattaatggg

SEQ ID NO: 28728 - DNA, 453 bp, Glycine max
gtcgcgccggcattaaagggtcaacggtgtgtacattgcaggctaattgtaggggatggttatgttacaattacaaaaggggaaagtatcagaagattctttgagcatgcggaagaggcagaagaagaagaggatgatggtttgatggatgcagagggaaatgagcttgatggagaatgctcccgtcctcaaaagcatgcaaagagtcctgaacttgctcgtgagttatcttctagatgctgctaccgttatatttaaagaacaggttgaaaaggctttcagagaaggaacagcacgccaaaatgcgcacagcatatttgtttgtcttgcactgaaactactggaagaacgagttcatgtagcatgcaaagaaatcattacattagaaaagcagatgaaacttcttgaagaagaagaaaaggaaaaacgtgaagaagaagaacggaaggagag

SEQ ID NO: 28729 - DNA, 624 bp, Glycine max
ggaagttagcttttaaagttgtcatccagctggcacttgatcttgcaagagggctgagttatcttcactcccagaagattgtccatagagatgtaaagacagagaacatgctattggataagacacgcacagttaaaattgctgattttggggttgcacgtgttgaggcatcaaatcctaatgatatgactggggagactggtactcttggttatatggctccagaggttttaaatggcaacccctataacaggaaatgtgatgtgtacagttttggcatctgcttatgggaaatatattgttgtgacatgccatatcctgacctaagtttctcagaaatcacttcagctgtcgttcgccagaacttaagaccagaagtaccaagatgttgcccgagttccctggcaaatgtactgaagacgtgctgggatgccagtcccgataagcggccggagatggttgaggtagtttccatgctggaggccattgacacatccaaaggtggaggtatgatccctcttgatcagcagcagggttgtttctgcttccgcaagcatagagggccttgatgttttatttgttagcccagcaaacaatttggttataatggattttcactatttg

SEQ ID NO: 28730 - DNA, 519 bp, Glycine max
atccatatggaggcttcccaccgagtcgtccggctataagccggcgattcatgccagaaaaaggaactccagaatacgatgaacttgtggcgaatcctgataaggcttatctgaaaacagttacttcacagtttctggctgttcttggcatttcacttgtagagatcttgtccaaacattctagtgatgaggtctaccttgggcagagagacactccagattggacatctgatgctgagccattgcaagcctttgagaagtttggcaaaaaacttgctgatattgaggaaaggatcttgagaatgaatagtgatgagaaattcagaaaccggtatggtccagttaagatgccatacaccttgctttatccttctagtaaaggtggactaactggcatgggggttcctaacagtatctcaatttaatttaaagggggctgtaaccagagtcttgtctttagttgtatcaaataataatggccttaaaggaccttggttattttgaattatgattttataa

SEQ ID NO: 28731 - DNA, 534 bp, Glycine max
cttttctaaccgccacttcatcacggcaagcatatgccttctaatattctaggaaaccttcgctaataaattcccctcttaaccccctccccccctttttttgtaccttcatcatcatcatatttcatatcacaccaacccattttaatttgcatttgatcttcttcatagacatatatacactatcataatattagtttcttccttaaattttggttgtttttaacgttatgaagtttgggaagagactcaagcaacaaattcaggaatcgttgccggagtggagggacaagtatttgtcgtacaaggaattgaagaaacttgtacggctcatatcggcggcgcgcctaccttgttgaatgggtcgttggaatttggcaagacggaggctgagtacgtgtacttgttgaacaatgaaatagacaagttcaatgggttcttcatggagaaagaggaggacttcattattcgccacatggaagtacaacagagaatccagagagtagttgatttgtggggaccaatggaagtcaa

SEQ ID NO: 28732 - DNA, 502 bp, Glycine max
tgtgaagctttaatgctgcttcagaagaatggtttacgaaagaagaatccttctatttctgttgttgctacactgtttggagatggggaagatgttgcatggcttgagaaaaatcatttggctgactgggcagaagaaaatttggatgcaagattaggaaatgaaacctttgatgattctcagctgagagcaattgcaatgggtttgaataaaaagaggcctgtattggttatccaaggccctcctggtacaggcaagactggtttgctcaagcaacttatagcatgtgctgttcagcaaggtgaaagggttcttgttacagcacctactaatgcagctgttgataacatggtagaaaagctttcaaatgttggattaaatatagtgcgggttggaaatccagctcgtatatcaaaaacagtgggatcaaagtctttggaagaaattgtaaatgctaagcttgcaagttttcgagaagagtatgagaggaagaagtcagatc

SEQ ID NO: 28733 - DNA, 597 bp, Glycine max
gccaagggacaattagatttgaattgtcaacctgatcgagaagatgtgcaagcttggccgaacaatttgagcatgacgagtcttcttgaagaagcaaatctcccgctggaaacctacctaaagcgaaatggccttagtagcttgatatcagagcagcaaacaaattcagcttcaaatgtgcaggcacagacaaccaatgatagtgaggggaaacacaatgaggattgcggaaccgcttcggttattcatgcgcaggaaagcagccctgaagagaacagtgggcaagataaagagcaaaacaattaactcatgaaatcttgccagttacattataattcttttttcctttttttttttactccgaaatcattttacaagaatccttgcttaagttataaaattataggaggttcatttgtatgtgtatatatattttctgttgttgtctgtgtcttgtggttgtgaaatttccccccaaaactcaataacatatatacgccaaagcttgtgttttagggttgtaaactagtgaggcaaggagttgaaggaaagcccccccttgctgtgttataatacatctggttttgtttctctggt

SEQ ID NO: 28734 - DNA, 686 bp, Glycine max
aaatatcaaccctcttctctcttctccaacatcacacagaaaaatggagaagaaaagcatggctaggagagcacattgtcttgtgttaccatatccacttcaaggacacatcaatcccatgcttcaattctccaagctattggaacatcaaggggtgagaataacacttgttacaactcgtttcttctataataacttgcaaaaagtgccaccttctattgtacttgaaacaatctctgatggttttgacctaggggggcctaaagaggctggagggtccaaggcatatttagatcgcttttggcaagttgggccagaaacatttgctgagcttcttgagaaacttggtaaatcaaatgaccatgttgattgtgttgtttatgatgcattcttaccttgggcactagatgtggctaagagatttgggatagttggtgctgcttatctcactcaaaatatgactgtgaatagtatatattatcatgtccaattgggaaagcttcaagctccactcatagaacatgatatttcccttcctgctttgcccaagcttcatcttaaggacatgcctactttcttctttgatgaagatccttctttgcttgattttgttgtggctcagttctccaatatcgacaaagccgattggatcctatgcaacacgttcaatgagctagataaagaga

SEQ ID NO: 28735 - DNA, 765 bp, Glycine max
gttgaaaatggttatcttgatatactcaaggaattgattagataccatgatattgggttggccagcttcaaagctagaaatggatttgatgcattccacattgctgctaaaaatggacacttggagatattgaaagtcctcatggaggcctttcctgaaatttcaatgactgttgatctgtcgaacactactgtgttgcatactgctgcagcacaaggacacattgaggtagtaaattttctcttggaaaaaggtaatagcctggtaactattgcaaaaagcaatgggaaaactgtgttgcattcttctgcaagaaatggctacttggaggttgtcaaggcccttgtgagcaaagaaccagaaattgcaatgagaattgataaaaaggggcagacagcactccatatggcagttaaaggacagaatcttgagttggtggatgagctcgtgaaattgaatccatctttggccaatatggtggatgccaaggggaacactgcactgcatatagcaacccggaaaggtcgtctacaggttgttcagaagttactagattgcagagaaatagacacagatgttattaacaaatctggagaaactgctttggatactgctgagaaaaatggtcgcctggaaattgccaactttctgcaacatcgtggagctcaaagtgccaagtccatcaagtcaccgactacaaacacggcccttgagctcaaacgaacagtgagtgacataaaaagtggggttcataaccactggaac

SEQ ID NO: 28736 - DNA, 526 bp, Glycine max
gagaagaggtatgagatttttgataggtggtggaaggatgcaatgggcaacaccgaagaaaataatgagaggaggagcaagtttgcaagtttgacccaagattcatgcttttgggcaagggtggaggaagcaagggactggctgaatagtgttagaagtgagagtgacacaacaaagttggctgtgctgtgggataacattgagaaatttgagaagtatgctatggaacttattgataataaggaggtgtctgaagatgttcttgctaagaactcaagttacagtatatggatggaagatttaagaggactgagggaactcaaagcaaaggtgaagacgttttcacaccactttaacccgtttctggatggagaagtaattccttagtaattttaaatgaaatcaataaataagcttgactctgtaatctgtaatatgcctatgaactacttgtttgcaaaataactagtgtgcttatggcttgatctaatcagtattttacttaaatgcttacaagaagtgtgac

SEQ ID NO: 28737 - DNA, 268 bp, Glycine max
gttagaacaacattagcattggttagggactgaaaatgggtccgaaattggcgaaaacggggtcgttccgtcatggattggcggagaagaaggagaggcttctgtcggcgaagatgcggcaggaggaagaggaagaggaagaggaagaacgcaggtggtggtggtcgaagtggaacagtgtgaaacgcgtggctgagaaggcttgggagatgggtcggtctgatccaaggtagataatcttctctgcaaaaatgggacttgctttgac

SEQ ID NO: 28738 - DNA, 294 bp, Glycine max
ctcgagccgcgtcaagcctattacggtgtcgtttttaagaaaaccggcagtattgccgttagcgacgcagccaaaaccctaatcagtgccaaacgatggaatcaccgtcaccaccttccccgttccgagaccttcttctccgtctatcgaccggaatcgcggagtctctggccaccgttccctacactccacaccactcctccaacgtctccgtcaaagcctttctcgaacccctcctcgttcccaccgccaccgtcagagacttcgctctcgcgtgcgctctcatttcctctt

SEQ ID NO: 28739 - DNA, 602 bp, Glycine max
cttcctctctagctagggtttccttctttatacaaaacacaacctaacaagtaacaaccttctttatatgtacttattccttaaccctcctgttaccctttttagctatgttttctctttgtcttgctttctcagaattgctagttacgtgggagaattaagcaccaagaagatgggaaggggtagggttcagctgaagcggatcgagaacaaaacaagccagcaagtgacgtttttcaagcgtagatcgggacttctcaagaaagccagcgaaatctctgtgctatgtgatgctcaagttgctttgattatattttctaccaaaggcaaactttttgagtattcctctgaacgcagcatggaagacctcctggaacgttacgagagatgtacccatacagcacttgctggagctaacaacgtcgaatcaccgggattttggtctttcgaacatatcaagctcaccgccaaagttgaagtcttggacaggaacgtaaggaatttcttgggaaatgatctggatcccttgagtttgaaagagcttcagagtttggagcagcagcttgacacagctctgaagcgcatccgaacaagaaagaatc

SEQ ID NO: 28740 - DNA, 841 bp, Glycine max
accagggattggataaaagcatgcatgcaagagataaatcctgtagaggaagaaccgtatgaaattaatcttgacaatcaagggtgtcaaggtggcccaaaagctggcagacttagggcattggccaatgagcccaagctattcagtggcttaaagttttatttttctggagattacgtgtcaacttataaggaagatcttgaagaattaattgaagtgcggggaggtactgttttgagaatcaaggaagaattggaagcacacagacatgaatgcaaaggggattcttcaaagttgctagttgtttacaaccttgatcccccacaaggatgcaagttgggggaggaagtttcaattctttggcaaaggctaaacgacgcagaggatttagctgcgaacactttacaagtcattggtcacacatggattcttgaatcaatcgctgcatgtaaattgcagccttttgtttactaaaatgcattaggtagctgatattttgtcgatcacttgatagggcgttctctgcaaaagttgatcaatcgtgtacaggatttagcttgaatttatttgaagtcttgttcgagtcactggatgttagggtgtaatgcttatgtaacattaagtagttatttacttagttttgtctgctcttgcctcgtcttaatgacttcacgctgaatgtacttatgttttaaaattaaccggatcctcagagttgagattgaccatgatgcctcgtacatgctaaggcaaattctaccacgcaacaagctagatgaggtgcatcggtgtactaaactatttatcattaattaaatgagtaatgctatgttttcgtatt

SEQ ID NO: 28741 - DNA, 479 bp, Glycine max
agtcatcaacgaaacccccgtgatcttcgcgcctcactgcttcttaacattcattattcacacgtaacagcctcaacctcaacctccaaactcacttcatttttggccgcaaaaaacccaaatcaccctctcaacgatgcaagtttcatcctcatggttcggaacaatagtactttccaaccgctactcacgcaaccgctccctccctctggaaccgtgttccaccacaaccacatcatcggtttctgctacctcgtaccctcctctattcacgcgcccctatagttctctttcgtttctcgtctctcaaagaaaaggcttcaccctcacctcgctgtcaccgatcagaacaaataagaagagaagaagagcgtcgttgagggtttccgcggtgttcgagaggttcaccgagagagctataaaggccatagttttgtcgcagagggaagccaaagcgctcggaagcgaattagtttaca

SEQ ID NO: 28742 - DNA, 422 bp, Glycine max
  unsure (1)..(422): unsure at all n locations
gaaaatttttacaggggagctgctgaggcaatcaccaatcctggacttgtaggtgtttggcaatgggcaaccttgagtcatttctcttttattatctttgttagattgaatgggaatatcgagcttgcattatgttatataatggggatctataatgaataatcatgacaattttgcataatttttatgggcacttctttatgacaaagatgctaatagttctgctttgaattttcagatgcctttccattgtgcttaatgctcgggctgaattcgtcttatcttcaattttttatgattgatattacttatcccaattacatagtgtatgtccacataaagtacttatatctcatcaattntttttttggcagggtaaacgaggtatagagaaaccagcctttcagcttcctgatttcatt

SEQ ID NO: 28743 - DNA, 269 bp, Glycine max
tgagtttggaaaattggaagaagaatgtaggctggagaagtcttcaagtaaaaactctgaagatagcaatagcatcaattccaaacatgaacaatctgtgaagcctaattcacaggctttagcaactattgatcttgaggattccaaccggtttgacacactgtgggaacatcaagatttgatagaacaattgaagatggagctgaagaaggtcagagccactggcctacctaccatccttgaggattctgagtctccaaggataatgg

SEQ ID NO: 28744 - DNA, 256 bp, Glycine max
cagtggcactagcaacggcatccgaaacagtgattgtgctaaaagcaatagcaatgtcaatggccataacaacagcagctgcaagagtgatggtgctaaaagcaataacaattacactcgcaacagttagggtgccagtagcaattacagccaaaccagtgaggacgctaaaagcaatgccaatggcaataacaatagcagctgcaagagtgatggtgctagtggcaatggaaagagcaattacaaccgcaacagt

SEQ ID NO: 28745 - DNA, 511 bp, Glycine max
tctatctcattgtctctacctctcttttctcccctttaatacctttttctctcactttctcttccttgcatctctaccttcctcttaccacaaggtaaacaaagatggcagggtatgataaggaagactatttctctgccccgaatgccgagacaacatgcgcgggaaagtacggtaggcttgccccaaagaagaagcctctgatatcgaaatctcaacagcaaggtgctggagtgaatcaacaatctacagcagctgtggagacattgcgaccaaaactacagagaactccacatcagcagcttcctccaagacgacctgcatgcacatctggttgagataatttcgtgaattactctaatgtggagagtagacttaataagtggaacaaggatttgctcagtcaattttactattacaaaactcatgatgttcctgatctgatgtatatatctatttccttcacgctttctattattagcacttcaatgaaaatttcatttcatttcac

SEQ ID NO: 28746 - DNA, 520 bp, Glycine max
  unsure (1)..(520): unsure at all n locations
ctactttcttctcttttttccccttttaacactttctcttccttgcatctctacgttcctcttaccacaaggtaaacaaagatggcagggtgcgataaggaagactatttctctgccccgaatgctgagacaacatccgagggaaagtacggtaggcttgccccaaagaagaagcctttgatatcgaaagataatgaaagagcattctttgattcggcagactgggcattatgcaagcaaggtgctggagtgaatcaacaatctacagcaacagtggagacactgcgaccaaaactacagagaactccacatcagcagcttcctccaagacgacctgcatgcacatctggttgagataatttcgtgaattactataatgtggagagtagacttaataaacggaacaaggatttgctcagccaaatttactattacaaaactcatgatgttcctgatctgatgtatattacaatttacttcatgctntgtgttattagcagttcaataaaaattccatttc

SEQ ID NO: 28747 - DNA, 433 bp, Glycine max
atctgctcaaggtgcagtgcaaacagtgggaaaatcagtgatgctctgaaaattggctagcacttggttctttgaatttgtttggttcctgtcttacgtcagactgaagttgcagctggtatcatcatccgccatggttagggatgtggctttgtaatgctattgcagctttccttctagatttaatctttctaatttgcttgttctctcttagatatgtataaatttacgtactatatatgttgtgtgcaagtactatggcttgtgcaggtaactaatggatcaatcatgtttttcatcttatttcttctattgcaactctcattgtggacctgcagcatgccaacatcggcagatattgaacacaaatgttttgttgatgtatcctaatattgcatttagttaaattcatttctgaatacaatgtagttat

SEQ ID NO: 28748 - DNA, 252 bp, Glycine max
gttccgcagtctccctctcttcttcctcttctctgtaactgcaacgcttcttcttccaagtataagtgctgtcaactttaacacttcgtctgtgcttgagggtaaaaatcactcaaacaggggctcagcaacggcaacacttaaaattgtcaacaagcgcagtaaggggcgccactttaaagtcgattatgttttcatggcatgcgatgataggaaaaattgcagcagtagcgtgatcacacgctcactggg

SEQ ID NO: 28749 - DNA, 583 bp, Glycine max
ctcaacaaccctttccctgatacccctaagcagcctagtgatgagaaaaggcctaccagtggtggtggtcaacaacaacaacaacaaggctttgatgatgcagatggagacacaaattaccaacaaaaccaaagccagaatctttctctctccaagtctgcttgtagcagcacttccgagacaagcaagggctcaggcttgtccctctcaaggtctgagatccgtgtgaaccgtgtgaaggcaagggagagggcaagggagagagcagcataagagaaggagaaggagaaagagaaagagagtgattttaacattgcacaccaccatcaccaccacaatgtgaacaacatgtctcacactgcttccttcactgagcttctcactggtgggattgggagcacggtaacagttaaccccaacacaacaacaacaacaacaacaacagcaacaagtcctaatggatcatcggttcatcagatccatgagggtcatgatcatgaggctaatctattcaacaagggaagtcaacaacagcaacagcaacaacatcaccattggtctcaaacagtgacacctatggact

SEQ ID NO: 28750 - DNA, 537 bp, Glycine max
agggaataatcaaggagaacattccgttatgtatgtgctggcctacactctaaatatatagctatgtggttttgagttccaccacaaatgctttgtccttgagagattctaaagcaggccaatccatgaaggcaacacttcggtacttagcaggccttgctgggccaagtggtttcggctcaaattcaacagctgagcaagtcactcaagattgctgttccttgctcccttcaaatctaaccgctctcatcactggtgcgacttctggtattggagctgaaacagctagagtgttagcaaagagaggagtgagggttgtgattggtgccagggacttgagaaaggccaaggaagtgagagagaaaatccaaaaggagagtcctcatgctgaggttattctgttggagattgatcttagctcttttgcttctgtacagagattttgttcagagtttttagctttggaactgccccttaatattctcataaacaatgcaggaatgtactctcaaaacttggagttctccgaagagaaaa

SEQ ID NO: 28751 - DNA, 343 bp, Glycine max
cggggttgtctctcttcatgaaacaaacagaacagagcactctgcttctctttctctccacttaccccatcatgccccgcccaggtcccaaaccttacgattgcgtcaaaagagcttggcacagtgaaatacaccaacccatcagaggaactctcattcaagaaattttcagggttgtcaacgagatacatgggtcttctactaagaagaacaaagagtaccaagagaagctacccgttgttgtgctcagggcagaggaaattatttactctaaagccaattccgaggctgaatacatggatcttaaaacacttttggagagaacaaatgatgctattgatac

SEQ ID NO: 28752 - DNA, 886 bp, Glycine max
cccacgcgtccgcccacgcgtccgcccacgcgtccgtcttccttctcaatttctctccctccctctcaacacattttctcgggtcgggtcgtgcattctcggagcatcgccggaatcctttccgaccgaaaaagaaaaataatgacgggatccctcgcggcaaggctcgtccttcgtcgttgccgatcgccggcaagtcaattcttcttccgcagggaagcctcctggccggcgacggagcgaacgacaaaggacgtcgttacgtcgccgccgaaggaattgccggcgttcgactactctccgccggcgtactccggtccctcccgcgacgagatcatcgcgaagcgccgggagtacctcagcccttcgatcttccacaactacaaatctccgctgaacgtggtggaggggaagaggcagtacctgttcgacgataagggaaggaggtatctcgacgcgttcggagggattgctacggtgtgctgcgggcactgccaccccgatgtggtggaggccatcgtggaacaaacgaagcggttgcagcactccacagttctgtacctgaaccatgccataacggattttgctgaggctttggctgctaagcttcccggtaatcttaaggtggcattttttacaaattctggaacggaagcaaacgaattggcaatactgatagcaaaattgtacactggctcccatgacatgatatctctaaggaattcttaccatgggaatggtggtggaacgatggggaccacagctcaaagcatttggaaatataatgttgtgcagagtggtgttcatcatgcggtgaatccagacccttatcgaggccttttcggttctgatggagagaagtatgtaagagatgttcaagaaatca

SEQ ID NO: 28753 - DNA, 246 bp, Glycine max
ccgcgatgcaagtcttcacatgaggagtggcatatgctttcttttgttaggtccctaaagggcatggcccggtcttcaaacgctgttattgttgtaacctttccaccttcacttcttcctccatcttgttcaaaaagattgcagcatatggcagacaccttgctttctgatcaagccattccagaggaggataaggaccttgcaaaactcctcactggttaccaggatatgattgggcttctaaat

SEQ ID NO: 28754 - DNA, 265 bp, Glycine max
tgaactaccacatcaaatggattcggttgccttagatggacaaattactgagatagtttacaaaggcactcataaccatcccaagcctcaagctgcgaagaggaactcattgtctgcctcatcacttgcaattcctcattcaaatcatggcggcattaatgaactaccacatcaaatggattcggattgcactcctgaaaactcatcaatatcaatggaagatgatgattttgatcatactaaatcaggaggagatgagtttgat

SEQ ID NO: 28755 - DNA, 705 bp, Glycine max
ctgttctagaaatgcaaatgggaaatatcaggagagcaagagagttgtttgatgctgccacagttgctgacaagaggcatgttgctgcttggcatggatgggcaaatctagaattaaagcagggaaatctaaagaaggcaaggattctacttggtaaaggtcttcaatattgtggacagaatgagtacatataccaaacacttgcacggcttgaagctagagcaaatagatatctgcaggctcgatatttattcaatcaggccactaagtgtaatcctaatagttgtgctagttggcttagttgggcgcaaatggaggtggagcaggaaaactaccgtgctgctaggaaattgtttgagaaagcagtacaggctagtcctaaaaataggtatgcttggcatgtatggggcgtttttgaagctaacatgggcaacattgacatgggaagaaaacttttaaagataggtcataatctaaacccaagggatgctgttctacttcaatctcttgctttattagaataccaatactcaactgcaaacgttgctcgggttttgttcaggagagcatctgaattgaatccaaggcaccaacctgtttggtttgcttggggttggatggaatggaaggaacggaacttgaataaagccagaaaattataccaaaaaactttatcgattgatcaaaacagtgaaactgctgcca

SEQ ID NO: 28756 - DNA, 380 bp, Glycine max
tgacatagtaacaatagcaaagagcattggaaacggcattcctcttggtgctgttgtgacaactcctgagattgcgaaggcattgactcgccggagttacttcaacacctttggtgggaatcctgtttgcactgctgcaggattggctgttttgagagtgatagagaaagagaagcttcaagaaaatgcttttgtagtgggttcctatttgaaagagagactcaatgcactcaaggacaaatatgaatgtattcctgatgttagaggaagaggcatgatgcttggagttgaacttgtcagtgatggcaaacttaaaacaccagcacaaagtgaaacactgcatgtgatggaccaaatgaaagaattaggagtgctgattg

SEQ ID NO: 28757 - DNA, 293 bp, Glycine max
agacgacagaagggggtctttcttttgtcgtctcgggcccagaccaatccgaagtattattcctctctctctctcttcctttgtagctttcactttcatttttctggttccgatttagggctcccgaactcggtctttgactcagaactagctctgatctgcttctcaggttgttatttggtagcaaggaaacacttctcagattgttctgaggactttgagtacaaaggaggaccattttcagcaagggatgatttttgggttgaccttttgacattcatgtgatgtcgggg

SEQ ID NO: 28758 - DNA, 265 bp, Glycine max
ctttcactttcatttttctggttccgatttagggcatccgaactcggtctttgactcagaactagctctgatctgctcctcagatcctcgttacacttccctcactccttcgcaactctgcacgcttttgttcttccgcttctccagcttcgaatttcggtgttgttatttggtaacaaggaaacacttctcagattgttctgaggactttgagtacaaaggcggaccattttcagcaagggatgatttttgggttgaccttttg

SEQ ID NO: 28759 - DNA, 237 bp, Glycine max
attcaaaaagtgatgaaggtatagctaaggattccaagaaagctgaagatgggaaaactaagcagtcagagttcaaatctgatgaggcagaggataaagctactgaaggtaaggatgctgcagaagaaagcaatgcaaacaaagagcatactgaagaaaaggaaagttctgatgacaaatctgaggtcagataaagaacaaaaaaaggatgtcactgaaagtggaaatgaggctaag

SEQ ID NO: 28760 - DNA, 510 bp, Glycine max
ttgtgaagttgattgatgttcgcaagcgtcaaggtattcaaagtagatcatctgtgagaattctggaggccaagcacgacctttactctgcagtaatcggagagaaggtgtgcatgaagattggaaatggttcatggtgcccaactgggagggaatggacactatcaacttctggtcacaattatgctgtgtggcacaagtagtgttctgttggcatgtcatgacccttctccactggaatcacagagaagagaaaggaattacgtgcttatatgcttctggagtcttaagcttgataaaattgaagctatttccttaatctcgcaggctttggaaagctctttaatttcctttcaacttacgtgctacccagttaaataaacagtatgtaactataactaatttacagtagctgctttgtttatgtaatacataacaataaaaataagcagctttgtctatgtcatatatgtaaaataaattaataataaaatttctattagtacctat

SEQ ID NO: 28761 - DNA, 624 bp, Glycine max
gaattgaattccagagagagtcatgataacaagcactactacaactacaaccatattagccatagccacctcttacttgtttcttctgatcacgccaacccaaaaatccacgtaccactctctcttcatatccgattccctatcagacaatgcctccatatataaccaccttaaaactctcacccgcagaccccatgtcgcaggttccaaagccaacgctgaagctgcctcatacgttgtctcagtcttcacctcctcatacataccatcacacatagtttcctacgaggtttctctcacgtaccctttgtcacgttcgttggttctaataacgaacccttctacaaccttcactctccaccaagaaacctacgagggtgatccttatgctgacgtggcagatgaggttgtccccactttccacgcgtatgccaagtcaggcactgtggctgctcctgtgtgttatgtgaactatggaagagtggaggactatttgactctgaaggataaaaatggtgtgaatgtttcaggcactgttgtgttggcaaggcatgggaagatatatagaggggacattgtgaagaatgcttatgaagaaggtgctgttggggtggtgatatattc

SEQ ID NO: 28762 - DNA, 518 bp, Glycine max
ctgtcgcgtgggtttcgcagctcaacacaaagccccatcgtctgttctctctccgtacttcattcaggcacatcatcttcttctataacattaacccagggtcgtctccaaaaatgctacctctgcgtccacaagcacaagttggaggactacaaacatcgctgtctctggtttcctcagaccctctcctgtctcctgatgaacctagatcaaactccaacaatctccatgaatctccggctgaaagtgcaagttctcaggaaacttggcctactgctgatgcagctgcagcaaagaagatggagaatggaaaagcggaggttaattgccttgagcagaaagtgattcatcgtgtttctagttcagacaaagttactcttcaggatgttgctagagaaagtgtttgtatgatatgtgaaaaaatgcatcatctacctgaggaatatctagaagagctaaagaatggactgcgaagtatccttgagggagggaatggttcgcagcacagagaggatttt

SEQ ID NO: 28763 - DNA, 319 bp, Glycine max
ggccccggtctgaaaaacctcctcaacctgagggaaaagcttgtgctccttcaaccctaagtaactactcgcgagaatcttaaaggtggagaaatcacataaggggaagtgtatgtgcacgtcaatcctcccaggcctcagaaccgcttgatcaacctcctctttagtttcgttcatcgtgaacaccatcacgcgctcttctccgcagcacgatacgattccgtccatgaagttcaacacgctcgataagctcgttgtgtttgactttgacttctccgtcagcaagcgatctaggtcttcgatcacgatcagagacttc

SEQ ID NO: 28764 - DNA, 361 bp, Glycine max
taaagaaggttaaatgcaagaatagaatatgccaagtttcttcaagatactgtaaaagaaatggcaaaggagattcagaactcacaaagtggagaaatgaagaagacagcagaagatcttgatgaatttatgaacaaggtcagaacaggtgctcgagtttctaatgatgaaatcttaggatttgccaaattatttaatgatgagctcaccctgcgataacattagcaggcctcgcttggtaaatatgtgtaaatatatgggcatcagcccatatggaactgatgcatatttgcgttacatgctccgcaaaagattacaggagatcaagaatgatgataaactgattcaagttgagggtgtc

SEQ ID NO: 28765 - DNA, 270 bp, Glycine max
ttaaaacgttggaagagaaaagtggcggtgaaaaatgaaagtgacttggaagaacaagaagaagaaacgttgtttacccacgttgtcacacttcactgaccttccctttgagcataatcatcaacaacactccaacaccgacgctgaagatggcgcgcatgttcccgacgccacacaattggctaacgaatttcaagctcaaggagacaagcttgctatggatgggaagtaccgggaagcactaggtaaatgggaagctgctcttgcgtt

SEQ ID NO: 28766 - DNA, 393 bp, Glycine max
atttatatatgttggtgcattttctggttcaaatgttggttttggacgtagggaccattgctgagggtgcagcactcttgcatgaagagggggctagggaagtgtatgcatgctgcactcatgctattttcagtcctccagcaattgagaggttgtccagtggcttgtttcacgaggtgattatcacaaacaccattccagttgcggagaagaactattttccccagttaacgattattactgtagcaaaccttttgggtgaaactatttggcgtgttcatgatgatagttctgttagtagtatttttcagtgaacaatcagttactttcggagttaatttaatgaataaatgctaatttgaccatcttatatgataaaaaaaatttatttat

SEQ ID NO: 28767 - DNA, 272 bp, Glycine max
gtctcaaacaactgccagacattccttcaatctcaaagcaagaatgtcattatttcatttttggcagctttatcaataatcattcatgtgtccctctcctggctcttcacaatgcaattcaagtatgggattcctggggcaatgatttcaacaattttggcatactggattccgaacattggtcaactgatatttattacatgtggttggtgccctgaaacatggaaaggtttctctgttttagcattcaaagatctttggccggttgccaa

SEQ ID NO: 28768 - DNA, 257 bp, Glycine max
aaagatctgaaaaaccatgaacttgaaggcaggccggttgcttcattgcataattgaagttgttacttttaccctagtattatttgggtaccaataccaagataatgtattttcttcttaaaaaaaaaaaaaacttatagccaaactgccaaagtcatattctctcgtctctttctctatgggggtatctttggtgttagtagcttaattaggtgcaacaaaagaaacgaagtgttggtccccaatgaatgttaact

SEQ ID NO: 28769 - DNA, 781 bp, Glycine max
agcctattccaggactctacgcgagcggagaagtcgccggtggtgttcacggagcaaaccgattaggaggatcctcccttctcggatgcgtcgtctacggtcgtgttgccggtgacgaggctgcctcttaccttctcaagcagctctcttccggtcagatcgcaggagagcgtttgggtcaggtcgccaaccatctcgagactaagattcggattgacccctctaccaacaaggctgtcattgagttcagctgggatggtcagaatcagcaggcttcctcctcttcttcctctgcctcaagcagcggtgtacaggaacgacccgccgctcagactgccccgccgcagcagaccgacagtctggctcaggtgccttacaacgatcaccaagtcaaggagaagaagagctacacgatcgatgaggttgcaaagcacaacaccgatgatgacccatgggtcgttgtcgctggacaggtgctcgccgttaaggacttcttggaggaccacccaggaggcgcaaaggcaatcctgttgtacaagggcaaggactgcacagaggcctttgacatgctccacgagcgcgacgtcattcagaagtatgccaaggataccatcatcggaactctccaagagtagggtgctgtaaactcagggaaacccccatctttctcttatgtcatgtaacgggaaatagtgtgcatattcagctgtagtcttgtcaattttcagcttggtgtactaggtagtcttccttcatatcgctacgacgctatcacattcgt

SEQ ID NO: 28770 - DNA, 253 bp, Glycine max
aggttttcggaattggatctcggaattttgaaagcattgaggaaaatggaaagataaggtagtagtttttggaattattattgactaaaaatgaaatatttagccaaccactcatgtttcatgtgtgcagaaattgaaatgaatctacatgtgaaaaattagttgttgagtgtttgggtctgacaacttgggagtatcctgtcccatggtttatgatgcatttatccttcagtgttgtactacttgtaattca

SEQ ID NO: 28771 - DNA, 248 bp, Glycine max
gtgacattcattgtccaatcagaacgtgacatggggtagtgaatgttccttcgtaacagtcaacgtctaaatctggacttggggatcacatttacgggattgtccataattgaaggactaaattcgtgaataaatttaaagagggactaaaatcaaaattggagacaactagagggaccaaaaatgcaattttgccaattatatattatgcttatgtactcctggccccaaaaacatgatgctgaagt

SEQ ID NO: 28772 - DNA, 244 bp, Glycine max
gggcctggctatggtgcatctacaggtgccacttatgatgcacaaaggggtgctacttatgacactcagaggttgactggttccaatgcatttagaggatctgcttatgattccaagagaggttcggggtatgatatgcagagagcacctgcttatgatgcacctagagctgctggctatgatgcacagtcaagaggggttgctggtcctcatggacatgctcggccaatgaacaatatgcctt

SEQ ID NO: 28773 - DNA, 464 bp, Glycine max
cacgtacttccaatgtgagactcgagttacgtaccttacaaatgaatcctaacatcccaccacactccacagctccaatgtgcacgtgggttggctctgcactaaccctttgattagtcttggactcgcaggcgaatactgcaatctctgcgtcaccacctgcaccactcatttgtagcggagaatcatgtaggaaagctctgataccaattaataagaaccttgggagaatcacatcacataaactagcctttgtagttagagagaccaaggccttacaaatcccacactggaatcccataattcccgcatgggactcaagtcctataccctgcaattagatcataagttacctctaagtttagaaatggtgatgtgctacgtagatacattcataaagaaattttgcaactgttatcattttataagtgactttcaaacttagttacctctaaggcagtttt

SEQ ID NO: 28774 - DNA, 232 bp, Glycine max
ctcgagccgtccaacttaatacatattctgatgcagcttcaagaaattccttttaagtgtaatgttcagtagctgtttacaggggaatgctgttttttactgttatgctgctaattacaatacacgatcattgatgttactggttgcaaatgttgaataggaatatagaaacatattgctacagtttgtctatgacgattagatgaatggaaattctaggaccttgaatttg

SEQ ID NO: 28775 - DNA, 454 bp, Glycine max
gagggttgtctttatagatccagaacggcaaagttctgttttggaaaaactgagaagacaattggctgaagctgatgccgcagttgaagctcggaagacgcctcccgtggaggcaggtcctcgggttgctgccgaagggcttgtaattgatgaatggaaagagagaagggagaagtacttggcccggcaacaagttcaagcagtagattcagtgtaaaacgcaatttgttcttccagctaattcttttcttcagggaaacccaatcaagatatcattgctatgccactgttgccgtcaaccttgggtgcgcttcaaaagacctgttgggggaattggttggtacccaattggtagtttgagaacgcaatctgatggaaagattcgttgtataatttgtcaaaattcttgttctttggaggaacagtccgatttgtacatagtagagtttgcttg

SEQ ID NO: 28776 - DNA, 1314 bp, Glycine max
cagccgactactctgagacaatgaaggctctggcgtggtacggcaagaacgacgtccgaatgattgacacaccgaagcccaagattctagaggatcgtgacgttatcgttaaggtcactggttccacagtctgcggttctgacctgcacttgcttcacggcgctgtcgtggagatgcaaaagggcgacattctcggacacgagttctgtggtgtcgtagacgagtgcggccccggtgtcacaaagttcaagaagggtcaacgagtcgttgcctccttccagatcgcctgcggtgactgctactactgcaaacagaagctgtcttcacagtgcgagaagaccaactcaaacacaattgagaacgcaatgtacggcggccggacagcaggcatgttcggttactctcatttcactggtggatatgctggtggtcaagcagagtacactcgcgtggcatacggcgacgtcaacctactaccgcttcccgatgatgttcctgacgaggcgggtctcttcctttctgacgttctgtgcacctcatggcacgccgttgtcgacactggtgtcaacaagggtgatgtggtcgccatttggggagccggcccgattggacaaatggctgcggatttctctttgatgcaaggcgcatccagggtcatcatgatcgactctaactggcgtctcgacttcgtcaaggccagataccccaatgtcgatactctcgacttctctgcactggccaagggcgagtcggtcacaagcaaactcaaggagatgtgcaacaaccgcggtccagacgtcagtattgagtgtgctgccggtgagtacgccaagggctgggcacattacttcgagatgatgctcggtctcgagaccgacaccagcgagctcatcaacgagatgattaccagcacacggaatatgggtcgctgtggtattactggtgtatacgtcggcttcaccaaccacttcaacatcggttctcttatggagcgtggtatccgtcttattggtaacggccaagcacctgttcacatgtactgggagtctctcctcaagatgatccaggagaaacgcatcgacccgatgaagatggtctcccaccgtgttcgccttgaagacttggacaaggtctactacaagttcgagaagaaggaggatggtatgcagaaggtctttgttgagaccaagtggagtttcccagcgtccaaggatagccctgagttgaccaggtactaagcctgctttcattatacgagaacatgtagcatagtttaatgataccaacaagaatgaagtaaataattaatacatg

SEQ ID NO: 28777 - DNA, 263 bp, Glycine max
cggctcgagcaacacacgaccgcttcaacaactactccatcatcatccatccacaacaccacatcacacacaagccaccacacaccactgccaacatgcagatctttgtcaagaccctgacgggcaagaccattaccctcgaggttgagtcctcggacacgatcgacaacgtgaagagcaagatccaggacaaggagggcatccctccggaccagcagcgcctcatcttcgcaggcaagcagctggaggatggtcgcactctc

SEQ ID NO: 28778 - DNA, 286 bp, Glycine max
cggggggacaagacgacttgtcggagagtgagtcgggtgtggtcggcgaggcaccaccaccaccaacaagcaaatggctgctaccattggcgttggcgccgcaaaagccatatcaatcgcaatagcagttaggcacctccgaacaaaaccttacgcagcagcaacaacaacagcacttgctcttctttgcactccacaaacctctcttcccccctcattcctctcccttctcctctagcagcgctttttgcgccgcgacgcttcgcacctccgacaacagagtgca

SEQ ID NO: 28779 - DNA, 259 bp, Glycine max
caaagacaagaggaaaggaattggcaggcaggattcattttcctcagagtctccaatgcaggatataccactacttttgcctcaagaagctgatggactagatacttcaaatggagatcatacaaatttaagtgaaaattttccattgttgtcccaaaagctggagcatgaaactttagtttcagacacccagatgaaagggtttcaagatgaagttgttcctttaaacttgggggcacaacctgttgccaatgctcta

SEQ ID NO: 28780 - DNA, 574 bp, Glycine max
ttagaaaatcgtcttataatccttaaaatattttattttttttaaaaaaataaaatacattcaaagacagttttttagagaaccgtcttagaatgtctatattttaagacgtttttttggaaaacctgtcttagaatcctcaatttactggaaattcttttaaaaaataaatacattctaagatggttctctgaaaaatcgtcatagaaggtctactcttctaagatgatttttaactaaaaaccatcttagaaagatattcttctaaaacggtttttagcaaagaattgtcgtagaaaagtaccttttttctaagacagttttttatgaaactatcatataaagtaaagactttctacgacgttgcctacgatgatggcggttgataatcgccatcaaatgtgtcttttaaccgacataaaaagcgctctgtgtagtagtgtattaaggagtgttaaaattgatttctgaaaaatacagaacaatggatttagacaaacaaaattgttagaattgagtgctctgtgctttgcatttctaaattctatcagtgatgtgtgacatttatatatat

SEQ ID NO: 28781 - DNA, 265 bp, Glycine max
aagcaatttggcattttaaaggctggggcagttgggttggtatttcaagcgttacttctcagcatggctgttgctgtatattggagtggaacaatttctcatcagagccctcttcttactttcctatttctgattattctgtcacggttaggacacatgtcatatgatgttgtaggggctcagattctccagacaggaatcccatcatccaaagcaaatctcattgggacgacagagattgctgttgctagtttggcggagtcta

SEQ ID NO: 28782 - DNA, 263 bp, Glycine max
taaaccactatcataacatcggaaatatttttctctgatgttcttcaaagtaaagactatgttttggggctgttgtgggacagatgctaaaactgatattcgtgatgttgataatgttattaacgtagacttatatcataaagccagagttgatactcatctcaaaacagaacatgataccgaaatgcaaaacaattatctgactacttcagcgcgtcatgatgaaactaacactaaacctcctaaacttcgattagtagtct

SEQ ID NO: 28783 - DNA, 404 bp, Glycine max
cctcggcgtgctctcaacccttttaccctcaaaacgccccagtccaaccactcctacatccaaaatgagcgccggtttcgacccagcaaaactagccaagcttcaagctaacaatgcaaagctcgccggtgcccctcgaaagaaggtcgtccgaaaacctggtgccgctcagggagatgaccgtaaactacaaacggcgctgaagaagctgaacgtccagccgatcaccggcgtggaggaggttaacatgttcaaggaggatggaaacgtactgcacttcaacgcaccgaaggtccacgccgctctcccttccaacaccctcgccatctacggcgccggcgccgacaaagacctaaccgagctcatccccggcatcctgaaccaactcggtcccgacaatctcg

SEQ ID NO: 28784 - DNA, 396 bp, Glycine max
ccgctggctcaaccccgacagcgcgcaccaccgcgtcttcctccgcgacggaagcctccacatcgtgccgcgtcaccgcctccgcaacccctccctcattgactccctcaacttcatcgttaattcccctcacgaatccctcgcctccgacggaatccagcgcgccgtcagaaaacgcataagtaattaccccggccaagctaggaagaacatgcatagggttagggttagggttccggtgtccgtggcgcaggttctgaagcacgagccgcggctaatttcccttgcagtggaagggttctacgatagagatatagacacgatgaagttcgcgtcgaggatggagaggtttgtggagagagggaaagcggaggagttggtgtgcgtttcggtgaa

SEQ ID NO: 28785 - DNA, 263 bp, Glycine max
atttaaatttccttcctgctgtgttgcaaaaataaaatatctaggagactacaagctaaaagtataattaaatgttaactgtttgatcaaattagtttgtttatatagttttgaaaagtattacagtgggttgagcagagcagatatttctacattgtgagatttttatagtatatgatggaattgtatgaatagaggctggtgtatgtcctgccatgttttcttctttcaggcagagatacttggagttgatccaagagagg

SEQ ID NO: 28786 - DNA, 259 bp, Glycine max
ctgattcatctactgttactgttgcgtgggaagctttgtcaagggtcattatttcagtacccaaggtggtgctgccttcttatataatgcctgtccgtgatgccgtgtcaacatcccgcgatatggaacggaggaagaagaagggaggaccaattctcatacctggattttgtcttccaaaagcacttcagcctatattgccaatttttctccaaggtctcataagtgggtctgctgaattgatgctaaggctgctctg

SEQ ID NO: 28787 - DNA, 451 bp, Glycine max
ctttctcagatcctgatcatataccactttgcttggatctgtaacactgcaacgtcactcatcaaaccttactcatattaattttcgccatcctcttctctttgttacaagaatttcatcaagaatgcgaaatatcaactcggtgaaggaagaatttctgaagaaatggatatggggtctgagaaaatatagctctcagaagaagaacatgagtctgatggagagaaagaaagccataaagctgtcagcagatttagctatggcttccaccagaaacaaaaccactcgctggagcagggcccttattgccaatgcttcaagagatggcaacaacaacaaagtcctcgcagaacacgtgacatcatcaccacagaggccggttgcagggaaaagcttcacagcaaggatcagaagctgcagaaacatgttgagaagaaaccgtgcagtgcac

SEQ ID NO: 28788 - DNA, 428 bp, Glycine max
ggtactccatgtgccagcatgtgctgtgtctttctctcaaagccccaccactctcctctttcgagcacataaattcgttaccttcacattcttcctcttctcaagtacccctctctctctctctcacagatcctgatcatatgccactttgcttggatctgtaacacagcaacgtcactcatcaaaccttactcatattaattttctctttctccaacttcaacactcaacaatttcacaaagaatgcgaaacatcaactcagttaagcaagaattcctgaagaaatggatatggggtctcagaaaatacagctctcagaagaaaaacatgagtctgatggagagaaagaaagccataaagctgtcagcagatttagccatggcttccaccagaaacaaatccactcgctggagcagggcccttattt

SEQ ID NO: 28789 - DNA, 331 bp, Glycine max
tgcttagtacacttaagctgttgaaattttttatcttcccttttcttgttagtgttagttggattttttcattcctgattttttaagtgtaatttggtctgttttcatatttattctgcatcatgtgttgtagtcattgttagtgatttctatcatctgtcatgtttaattagttgttactctgtagtagatataagtagtttgtccattctttaataaatatctacaacattcatcgttgtcacgatcaattctcattgattgaaacctttcctagagtggagtactctttagtaatcaagcgtggaagattatgtaatgttttgatttt

SEQ ID NO: 28790 - DNA, 254 bp, Glycine max
cttgtgatcatcacttgcaaaatttaaaataggttaaatatattctttaataaacataaaacaataaattagtctctaaaattggcataattatttattttgattcctttgtaacaaaatagagtaaatttagtttgtaattttgacaaccatccattagccaatttggtcttaaatgcactttaatgttaaaggaaaaatttacttatacatagcaacgtcaacaaccaaattgattaatatttgtttaaatt

SEQ ID NO: 28791 - DNA, 712 bp, Glycine max
ctcctttgacatgaaaggaatatgggaggctatggaagagtgttacagattgggcttagccaagtctattggtgttagcaacttcgcatcaaaaagctaagccagctcctggaaaatgcaaccatccctcctgctgtcaatcaggtggaaatgagcccagcatggcagcaggggaaactcgaagaattctgcaagcagaaaggaattcatgtgagtgcatggtcaccactaggagcttacaaaagtgctcaaggtacaaatgcagttatggagagcccaatccttaaggaaattgcttgtgaacgacagaagagcatggctcagattgcactaagatggatatatgagcaaggggcaattgcaattgtgaaaagcttcaacaaggagaggatgaaacaaaaccttgacatatttgactgggaactgagccaagaggaatcacagaaattcagccagattccgcagcgtaggatgtatcgcggaataacttttgtatcagaaaatgggccttacaagaccttggaagagctttgggattgagattcctgaaatcattcctaatagcagcaaaatgtcatataaggctgtgtttggtttaagatgggaggagggaactaggagagaaattttgtacttttcatgtggaactcacatcttttacactttaataaaacaaaaaaaatcttctatttctatcctctaaaaaaaaaaa

SEQ ID NO: 28792 - DNA, 1362 bp, Glycine max
catgcacgagagatcggagctccggctcgagcaccatgaatactaatacgagtgtcaggggttgtaagtgctgtaatgggaggattcatgatatgcatcataatttgttgttttagatacaagttattaatccaaccaatcaaactttgttcgaccacaaagagtgatcaagacattgaagcattcttaaaaaataaaggagctgtagcacaaaaaagatacaaattttcagaagtcaagaaaatgaccaattcctttaaagttaaactgggtcaagggggttttggtgccgtatacaaaggacagctacccactggttgtcctgtggctgttaaattattgaactcatccaaaggaaatggtgaagaatttaccaatgaggttgctagcatcagtagaacctctcatgttaacattgtgacccttcttggattttgtttgaaaggccgcaaaaaagctcttatctatgagtttatggccaatggttcgttggacaagtttatctacaacagaggaccagaaaccattgcatctttgagatggcagaatttgtatcaaatctcaatagggatagcgcgaggattggagtacttgcataggggatgcaacactcgaattctacattttgacataaaaccacataatattcttttggatgagaatttttgccccaagatatcagattttgggctagcaaagctctgtcccagaaaagagagcattatttccatgtcagatactagagggacactggggtatgtagctccagaaatgtggaatagacatttcggtggagtttcacataagtctgatgtttatagctatgggatgatgttgctagaaatggtaggagggaggaagaacattgatgctgaagccagtcgcacaagtgagatatacttcccgcatttggcatacaagaggctagagttggacaatgatttaagaccagatgaggttatgaccacagaagaaaatgagattgcaaagagaatgaccatagtgggtttatggtgcattcaaacatttccaaatgatcgacctataatgagtagagtgatagaaatgttggaaggcagcatgaattccttggaaatgccaccaaaacctatgctttcttctcctactagatcggcaacagagtcttcctcttgaaattagttacattgcattttgagcaaatctgaatggatcactgtacatatttgttttgtactttttaatcgtcctgaaaatcaaatggatctcacatatgtgataaattgccgctacattgattgcaaaaatcagaccaatttcttgtaacaagccaaatcaaagtagataatactgaaaatagatttacattctagtcttattagg

SEQ ID NO: 28793 - DNA, 690 bp, Glycine max
actcgagccgaatcggctcgaggttggtcataggagaacaccttggctggttagattccatcaattgcatccacatatacttactagtgggagcttggatcaagaagttcgtttatgggatgctaacacatcagagtgcataatatctcatcatttctaccgtcccattgcatctattgcttttcatgccaaaggtgaaataattgctgttgcatctggccacaagttgtacatatggcaccacaacaagaaaggtgaagcatcctctccaatatttgtgttgaagacaaagcgctcccttcgtgctgtgcattttcaccctcatgccgcaccatatcttttaactgcagaggtcaatgatcttgattcttcagattcctcaatgacagaggcttcatctcttggttatttacaatatcctccgcctgctgtttttgtcacaaatattcatcctacagaacatattaatttgtccagcgaactaccttatctgtcattacctttctatgtaatgcctgcatataatgttgatgagtcaagagcagaactacagcatgctagtcatgatgttgtctcaggtagcatgcaaattgagtcttctgccatggtacagttgcaagcagacccaagtgcagcagagcattacgagactacagtggctcccatgggtacattctctgagatgccctc

SEQ ID NO: 28794 - DNA, 241 bp, Glycine max
caagagctgatctttctgctattgaaacccaggttcggaatttggttgacggcttgaagagctctgatgttgatactcagagagaggcaacagcagaactccgccttcttgctaagcacaatatggataatcgaattgcgattgcaaactgtggagccattaatgtattagttgatttacttcaatcaactgatacaacaatccaagaaaatgctgttactgcacttctaaacttatcaat

SEQ ID NO: 28795 - DNA, 478 bp, Glycine max
tcggttagttaccacaaccctgctaaattttatacgattgtttcggaaagcacatgaagagaatatcaaacaagcagagttagagaagaagaaagctgagaaagaggctgaaatggagaaggcaaagggcattaacttgacaaagaagggggcaaaagatagttgacgactgtgttttctgctcctttgcatcaacatgaagctcttgccaaagagcaggaatgtaccccgcgtaaggggaatgcttctgagaccagttaagaagcctccccttccatgatgatgatgacgatgacgacgatgatgtggcaattagcctttcaagctgatatattggcggggaatagcgaattcctgcgtcctgtggagttttgaacatacaacaggcttaggagataggagttgattctttgatggcatggtgctgaattggatttatgcggccaactgatcttttttatcagaatactctggaaat

SEQ ID NO: 28796 - DNA, 252 bp, Glycine max
gaagttgtcagtatcttattgtcctctatccttggtatccctgatggtttcaactctattcaactcctttgggtcaacctcgtaactgatggtttcccagccactgctctctctttcaaccctcctgacccacaaatcatgaagaagcctcccaggaaacatgatgagcctattattacttcatgggtgttcgtccgttatcttataattggaacatacgttggtctcgccaccgtcggaatattcacatac

SEQ ID NO: 28797 - DNA, 487 bp, Glycine max
ttgtcgcgtgggtgcggatctgtttctatgaattattttctttcaaagtacttcaatcggcgagactagaagcgaaagagcaagtttagataacaaagtgtgcatagtgcatagtaggagatgatgtcctcaccagctaatttgaacacggggggagaagagaagaaattagaaatagagaaagtggtagagagtcaggtagaggtagcagataccgagtcaaagagaattcacccatggaaagagcaaataacagtgagaggattggtggtgagcacggtgcttggaatcatatacagcataatagccatgaagctcaatctctcagctggaatcgttcctaactttaatgtctctgctgcccttcttgctttcttgtttgtccgaagctggaacaaagtgctccacaaggctggttttatctccaaacccttcacccgccaagaaaacaccatcatacagacttgtgttgtctcatgctatagca

SEQ ID NO: 28798 - DNA, 365 bp, Glycine max
caagagtggtctattttgatgcaaggatgcctgacaatgctcttgtcatcgctcaagaggcatttcaccagaatatatctatcttaattgatgcggaaaggcctagggaaggattgaatgacctcctgagtttggctgattatgttgtatgttcagaaaattttccacgggcctggacagaggcatcatctattccaagagcactagtttcaattattttaagattgccaagacttaaatttgctattgtaactttgggaaaagatggctgcataatgcttgagcgatgtgtggatgatgaaggttctcacatagaagaaatggacgttgaaagctgtttgacaacattaaaagagagaaaggac

SEQ ID NO: 28799 - DNA, 434 bp, Glycine max
ccaaaatcccttgatttccttccttcaccgcacccacttatatctcttaaattagttttccaatgcagaaagcagggtacggtggcgatggaatatacaggtctctaaggccttgtttggttctcccaaatgaccccaacctctccctcgtctcattcctcttccaaagcgtttcctctttcccatccaaaatcgccctcgtcgattcccactcttcccaaacacttaccttggcgcacctcaaatcacaggtcgccaaacttgcccacggtttcctcaaactaggcataaacaaaaacgacgtcgtcctactgctcgctcccaacagcatccactaccctatatgcttcctcgctgccaccgccatcggcgccgtcgtctccaccgccaatcccatttacacagtcaacgaaatctcgaagcaagtcgacgac

SEQ ID NO: 28800 - DNA, 481 bp, Glycine max
gcacgagaagattacttggtcgtctcatggctgtggttcaagctgagaaggttccctatgtccctgaaggacttgaagccatcattttcacagctgacggtgatatgagacaggcattgaataacttgcaagcaacatacagtgggttccaatttgttaaccaagcaaatgttttcaaggtttgtgaccagccacatccactgcatgtgaagaatatggtgcgtaatgtgattgaagggaattttgatgaagcttgttcaggcctcaagcaactgtatgacttgggatattcccccacagatatcatcacgacactctttcgtataataaaaaattatgatatggccgagtacctgaaattggaattcatgaaggaaactgggtttgctcatatgagaatctgtgatggagttggttcttatcttcagttgtgtggtctattggctaagctttctcttgttcgtgagacagctaaagctgt

SEQ ID NO: 28801 - DNA, 203 bp, Glycine max
gctgaccacggtttatgttacattgccagtgctatctcatctcatgtactagtgtagtagtacattgattcttttataaaatgtcacgtatgttaactgttcttgttctataaatatttcgatcttgtgcctgatccgctatgaactatgggaatcacaaaattatgaactgactgtctcaataaaaacattctttagggggt

SEQ ID NO: 28802 - DNA, 372 bp, Glycine max
gtgaagtcttttttcaatttgggagtgccatttgcttcattcttttgcccatcactgcatcccttgagaagggggagaagaatctgaatcaaactaaggtttgggaacttgtggacgactaatctatacttcgggaagttttgctaatacaagttgacatgcaaacagtttctggggaatcagacgagaaaggatggccatggctttaatgtattcaaacatcaaacttctaatgatctagtttgtatgttcgcccattgcatttgatgaatctcatgcatatccttgtaaaatgtaactgttaacaagcactgtattttgatagctaattcatcgtggacagaaaatttaaatctaccaattcatttcatt

SEQ ID NO: 28803 - DNA, 243 bp, Glycine max
cttctttcttctggagggaggtgctgattttttagatgtctttgtcttttttaacacaaatagaattatatggtttcgttatgaacttttgtttgtttctcttataatgtgacaggcgtagaatggcttgggctaaatggattcaccattgccatcagtgcatcggtcctgacatttggttctttttttgtaagggtatgatattgccgttttagccttttaggttgtaggtatagcttttat

SEQ ID NO: 28804 - DNA, 265 bp, Glycine max
tggaaacatgactaaccttgtagtccactggaccagccgtaccagacattttagggacacagtccaagcacacttctgaatttgcttcaagaaatcatttgccccatcgcattcaggatcaaatgttgtcacatctatgtttaaggttcataacagaaggactgaagcagcaagaaacattgaatgatcttccaaaggcaattcgttcaagcattgcacaccatctgttttcccctgtcgtgcaaaaggtctaccttttccaagg

SEQ ID NO: 28805 - DNA, 161 bp, Glycine max
gttttcttggtgccgggtgatttatgattcatagttcatccagttaattgattttgtgttattttttattactcaaaaagggtttttagtagattgtatgaatctgttctgttttggctactaaatcattaattagagagagttgtataagttggtatctt

SEQ ID NO: 28806 - DNA, 238 bp, Glycine max
tctcccattacattatatactcttccaactgctgactactaactgctatagcaagaacattccgattctccctgttgcaaatatgttgggcaccgtcgagtcaaacggtgccgtttgttattattcagagcttgggattgtcaaacattgcaccgacgacgaaattcgatgcgcttatcgtaagatggctctgaagtggcatcctgataggtggatcaaggaccctaagcttgcacta

SEQ ID NO: 28807 - DNA, 514 bp, Glycine max
actggagttgctatattttaccccttctaccactctttctacgtgtactataaagagttggctatagcagccacagttctaggaacagtgattatggcagctactttaggaacactctgttattgggtgattgctcatcgccttgaggcctcaagattgcgaagtcttaggacaacaatgagcagtaggcagtcaatgtctatgtcaatgatgtcaggatcagagaatgagtataagacagtgtatgcaatataactttgatttctaccatttcagagttctccctccttttttggccagttacactaacattgtaggtgtttgttgcttagtaaaacaaacattaactactgcaacaaaagcatgcctttgcagaacataggcaaaagatgtaatcatagtccacttgataagtgaatgttattctaaattgaaagtattggatcatcatgcctattttaggtattttcacattagcttcatcagaatttgaatattatacaaatttactgtt

SEQ ID NO: 28808 - DNA, 350 bp, Glycine max
agataaccccagcattaaatcttcctaaagatctcccatgttttggtacaaacaacaaacaaattatgttgaactataaaaaagattgcagggattgtgaaagattattccaaggcatcctccatttccatgaggtgagtgaatcgaaattgtgcttgaaacacaggaaagccacatccttgaggtgcactttcagaatttgattagtagagtgctttgctggaatgccatctggataccagtagcatttatgttgaagaagggtgccaatgtttgcggccagagctaaatgttgttcaaatgcaatttatattctgaaatgcatattgaaatgtatggttaaagatctt

SEQ ID NO: 28809 - DNA, 831 bp, Glycine max
gctttagttgccttcaagatatttgcagcagagcaggtcgatgttgctataatggaggtaggattaggtggaaaatacgatgcaacaaatgtggttcagtcacctcttgtatgtggaataacttctcttgggtatgaccacatggagattctggggaatactctgggagacattgctggtgagaaggctggcatcttcaagaatcggattccagcttttacagtgcctcaacctgatgaagcaatgcatgtacttgaagagaaggcttctctattaaatgtacctcttcaagtggtaactccattagatgcctaattgctaaatggtttgagacttggtcttgaaggtgagcaccaatatttaaatgctggtcttgccatcgcactgtgctttacatggctgaaaaggactggacatgttggagatatctatatggaacaaactgacactttgccagagcagttcgtaaaagggttaacaagtgcaagtttgcaaggaagggctcagattgttccagaccaacacatcaagagtgaaaggtcaaatgaacttgttttttttttagatggggctcatagtcctgaaagcatggaagtgtgtgcgaggtggttttctctagccattaaagaatacaacccggaccaaaccttgtttcatcagcaacttaataattctaaattgtcacatgaagtagtgaagagtacataccacggcgaaagaggatcccagagaaaatccactccgatattgctgttcaattgtttgactgtacgagatccacagttgcttcttcctcggctgatgaaaacgtgtgctgatcatggtgtctac

SEQ ID NO: 28810 - DNA, 251 bp, Glycine max
acacaatatgccaaatttcactcgccttcatacattgtaaattcttgtcatttggcatattgtgttgagtaaaaacatacaaaaataaaataaaaagacgagaatttacaatgtatgaaggccagtgatatttgaccttttttaaatttctgtgtcctcttgtgtataataatagatggaaattcattggtcttagagatgtttgtctgtctcattaatcaaagggatgacagagacatgttcttcattga

SEQ ID NO: 28811 - DNA, 254 bp, Glycine max
atttggaagacattgtcaatttaatatatgaaacgctgtcaaatccatcttacaaaggtgttatcaatggaactgcaccaaatcctgtgcgattggcagaattgtgtgatcagctgggacacgccttgggtcgtccctcatggctaccagtaccagactttgcgctcaaggctgtccttggagaaggtgctactgtggttttagaagggcagaaagtgcttcctactcaagctaagaagttgggtttcccattc

SEQ ID NO: 28812 - DNA, 389 bp, Glycine max
ataaagacaaaaaacaaaaacacaccaaacaaacaaacaactaaacaaggcagagtcacagacacacacagaaagagagatctttggtttcgataaattagaagttgaagggcttgttaattagaaggagactacagtgggtcagaaaacacacgtcgtgttcaggcaaaatccatgtgcccacatggatgattgagagagagagagtattatatttatgacctcaacatcaccacaagcagcagcagcagcacctgcagtggcagcaaaaacatagtagtagtagaagatgagagacacaagagacccaccaaggaaaatttgctcaaaaccagaacttgctacaaaagttagcatcttttgatgattccaagtgacttgagctttca

SEQ ID NO: 28813 - DNA, 261 bp, Glycine max
  unsure (1)..(261): unsure at all n locations
gtcggtgtaggcgtccgaggagccttcaatttcaaaaagtctcaaccaaacaaagcagcagcaacaanacacaacaacaaaagttggtgttactgtttattgttgttagtgtttgtgttgagtctctcaactctcataagaggtccctctttggagtcccatggttgctctctcttccgcggagttcaaccactgctccaacggcctctttctctctcttcccttcctctctcctcagacccacccttttccacttgttaa

SEQ ID NO: 28814 - DNA, 631 bp, Glycine max
  unsure (1)..(631): unsure at all n locations
tgacaattctgactttcccattttacttgcattgatgaagtcagaattgtcacttgacgaggttccatcctcaaatttggacaacaacatagatgttgacaacaccgaaagaagtgattatgaaagcacatcacagcttactgtgccacagatactttcagctgaggtggctagtcatggggaaaaaacttcaaaaacggagcttttcctaatttctggtgctgcatgcttgcctcatccctctaaggcattgacaggtcgagaggatgcttatttcatttctcaccaaaactggctagctgtggctgatggagttggtcagtggtcacttgaagggagcaacgctggactgtatatcagggaactcattgaaaaatgtgaaaatattgtgtcaaattatgaaaacaattcaacgatagaacctgcagaagttatcaccagaggtgctgctgaaacacaatctccaggatcatgttctattttggttactaattntgatggacaggtccttcatgcagccaatgtggggaacactggatttatcattataagagatggttccatctttaaaaaatcaactccaatgtttcatgaattcaactttccattacagatagttaaaggagatgat

SEQ ID NO: 28815 - DNA, 252 bp, Glycine max
tgcaaatacggagtcccggaaggcaacagcagctgtgccaactgccgttgatccaacgagaaagcgagaatcaaagtccgtaggcgactgagcggcatggcgtgtcggactttcgacaaggttgttcgtggactatgcatctttgcttatgcttccgaagcttctctcaatcaatttgcctccgtagtctgtagtctgtatgtccctcgataagctgaatttgctgcgcttcagccttggctcctcctctct

SEQ ID NO: 28816 - DNA, 475 bp, Glycine max
atcgaaccagcagaatcagtccattaaggctcttaaggagcatgttgatgatgcccctaccattgcggatccatggtttcagagttacaactctaatgacttagaggtggaaagctctgaaatgggttattctgtggaggctcttcttttgctgcagaagtcaatgctggaaaagcaatggaacctttcctttgaaagagaagtgcttactgaaaattcgagtaagggaaaaaaatgtaggaaagtggcggtgacttgttctggggtgtctgcaaggcaaagaagaatgaataccaagaggaagaccgcgattaaaacttgtggtgctatgcagctgaagtccaaaatcagtccagagctgcttcaacaccgtttgaagggctacgtgaaaggcctagtgagtgaggaattgctctctcatgcagaagttgtaaacctatcagagagaataaaagttgggctttccttagaggag

SEQ ID NO: 28817 - DNA, 244 bp, Glycine max
aaaacaataaatgtggatgatctgttatctaagatatggtctatggtgttcaactaatcaacagattgtttaaatagaaattaggtgctcttcttttatctatctaatagagatacaggcacctcactaacttggtgaaaatggtatataaacaatctgttcattagttgaactccatagaccatatcttagattgcataacacaataaatgtggatgatctgaaatctttattgaaagatggt

SEQ ID NO: 28818 - DNA, 461 bp, Glycine max
ggccattttcggccgtcacttgaaaggccgccagtaagcactgtaggttttcagcgaccaatttcaggcaacctacctgttgctccaatagcaggacatggtgtacctcagatgatgccctgtaggccagacattcctgctgttaatagttggagacccacttgaagttgatttgagtcttcttattagtagtagtggtgttgctggtggatcaacatgcaaggttaaattgtgtctcaaagttagattcgcctgtgtagttcatacaacttacccatgaagaaaattttgaaaacttgtggaggcttttgacaggaatgtgtatattgtaatttttcctgacaatgtatcccaggaacatttgcttccaagtttaggcccatgtttttgacttggttttggcaaagccaaagaagatgatgatcattttctcatgttttgaatgtgataactgaacacaa

SEQ ID NO: 28819 - DNA, 227 bp, Glycine max
ttaagatacggttaatgttgttgctgattgctggagtcgtcgtaggtctctccgtcgtgtcgtttgtagtgacaaaattccgtgctccaggctttaacgtcgagggcaaacacgtgttcattacaggcgggagctccggtttggggctggcattagccaaaaagtatgcgcaacagggagctaaggtgtcgattgtggcccgtagtctcgacaagctggaggaatcc

SEQ ID NO: 28820 - DNA, 235 bp, Glycine max
ggccatacgattgcactatcactccaattttgcggataatagagggcacatcgatcactctgcacgggtcatgcgagttattacatggaaccgatcctttaagggaatacctaatttagatgatgggaaggatgattttgactcggatgagcatgagacgcatgccaccatcttggacaagttgttagcgtgggagaagaaactctacgatgaagttaaggctggtgaactaatg

SEQ ID NO: 28821 - DNA, 541 bp, Glycine max
tatgcgcgacaatattcttcgtgagcatgtggctgcacaacgtggcgacggcggtgatgatgatgccggtggcgacggggatcgtgcagcggctgccgccggcgcacgagcagtcggaggcggtgaacaaattctgccgcgcggtgattctcacggtggtttacgccacgcccatcggtggaataagcactctaacgggaacgggtgtgaacttgataataatcggaatgtggaagagcctcttccctgaggcaaagccaataagcttcaacacgtggttcttctacgggttccctgtggctgttctcatcctcatttgtttttggtgcatcatttgcctcctctatgtgcccaaaggttcggctcgggctttgtctgcttacttggatagagctcacttgaagagagacctcgaagctctcggtcccatggcttttgccgagaagatggtgttgtctgtgtttgggttgctgatcatactttggatgacaagaagaataacagatgacattcctggatggggatctttattccatgacct

SEQ ID NO: 28822 - DNA, 269 bp, Glycine max
tcggctcgagccaactatcccaactccaacgatctgcctttcctagtattcacattaatcaatcctgcatatgctgcacgaagttaactccatgggagtcatcacctgtcacatatgctcctactgataatcaaagtgatacttttttgccgcaaaatgccaatatatttgaaactcttgaatctagtaaaacagctgattcatcaataacagatgctgaaggggttgtagagacagaatctcagccaggcctgcagcttcaggttttc

SEQ ID NO: 28823 - DNA, 469 bp, Glycine max
gtggaatttgagtacaatgctatagctaaaaaatgggaaacaattcaacttgaggaactcaagattgatagggacgagtacctcgttgttacctgtttttatcgtggtaaaaaatgtgctggatgaatctgtggttgtggacagtccaaggaataaattcctcagtttgataaggaagatcaacccgaatatattcattcatggcattactaacggggccttcaatgcgcctttttttgttactcgattcagggaggcactgtttcactactcttcactctttgacatgcttgaagccattgtttctcgcgaggaatgggagaggatgctcattgagaaagaaatatttggtagggaagcattgaatgtcatagcatgtgaaggctgtgagagagtagagaggccagagacatatgaggcagtggcaagcccgaattctaagggctggatttttgcaacaaccttttga

SEQ ID NO: 28824 - DNA, 344 bp, Glycine max
gttaaaataaaaataaaaagtcatcaaactaagcttctaacttctaagtcacagcaaagcagtggcgtgaattcccaggggcaaacacaaaaaaaacaggtttgttattaagatttatcgaaaattgggaactgcatcagaattcagaacgaggagatgggatctgaagggccatgggccattactattcatgtaacaggatttaaaaagtttcaaggggttcctgaaaaccctacagaagccattgtgaataatctgaaggagtatgttgaaaggagaggccttcctgctggtgttactcttgggagttgcactgtgcttgatgtggctggggatggtgcact

SEQ ID NO: 28825 - DNA, 615 bp, Glycine max
ctttgtatgttgctgtgcaatattgagccatgggaggcgcattcaactgcgatgtggggtgagtgtcagagagtcttaccacctaaattacgagcagaaaatccaaaggtagctggacttttgtacttggcttgagcatactgaaccttcttctcgtcccaatggcagaatgattttagagtctgaagttatgcgtgaatcagaggaatcagattctgtagatgatgttggaatatctgatgacgaggctgaaacagagcaattactagattttctaattttaatcaaagaagcaaagaaaaaacgggaagcgaagctggaagaagagctaaatttattgaatgaagatattaaggaggtagaaaaaagttattcatttgtgacagattcagtatttcctttggtgcaaatgaacaatcctgaagtgagaggagacaatttatattttcaagatccttccggttcagacattagtagatccattcgaaggtcatttggtgatgaagaaagatttatgagtaatctaaatcagctagagaattcttacttttccatgagattccgagtgctgccaaaagaggcttcatctgtttcaagcaatgaaacaaatgtgat

SEQ ID NO: 28826 - DNA, 401 bp, Glycine max
cagagacagaaaaagaaccccttccgttgtttctaacccgctactttcccgagaaaattccccgagaaaggggaagaaaaacaccaagagaaaccctagaaagcaccaaaatccaaaacaaactcaatcccgatcccgatccgatccaacgaaatggatcattacaaggttctcggcctgcaccgaaccgcgaccaaggaagagatcaaagcggcgttcaagaagctagcgttccagttccacccggacaagcattcgcaatcgccgaaggccgttcgggaaaatgccacacttcgattcagcaggtctccgaggcctacgaggttctgatggacgatcgcaagcgcgccgattacaatttccggcggactccggcgccggcaccggaaacaactactatt

SEQ ID NO: 28827 - DNA, 245 bp, Glycine max
gaaaagtgtattttacattataaggaacaggaaaagaatctggaagatcagatcacagagaatctatcattattgactgctgctgaaagcaaactttcagaggctaaaaagcaatatgatcaaatggtagagaataaacagttagaactatcaaggcatttgaaagaaatatctcagcgaaatgatcaggctattaatgatattaagaggaagtatgagttggagaagatggaaattgtgaacaa

SEQ ID NO: 28828 - DNA, 535 bp, Glycine max
ggaattagtggtattcttaaagatattttatctttttctggagtttcttctaaggcctgtgtttgtcctgcattaagtaggccgccagaacagatatttgagattgtaaacctcacgaatgagcttctgcctccattgccacatggaacaatttctctccctatcatctccaacatgtttttgaaagggcccattgtaaagaagtctcctgctggtagctctggaaaacaagaagacacaaatggaaatgttcctgagatatcggctcgtgagaaactattaaatgatcagcctgaactacttaagcaatttgcgatggatctcctcccagttttaatgcagatatatggtgctagcgtcaatggtcctgttcggcacaaatgcctttctgtcattggaaaattgatgtatttcagcacagctgagatgatccagtctttgttgagtgtgacaaatatatcaagtttcttagctggtgtgttagcatggaaagatccacatgttttggttcctgccttgcaaatttcagaaattc

SEQ ID NO: 28829 - DNA, 750 bp, Glycine max
gcaagaaactccatagcgaaaaagaaaattcacgttatattgttagtttattcgtcatttctttctttgagtagtaatggcaagcctcaaggttgcatttgtggttgctgtgctatacatggttgtggtgagtgcacacatggcacatgctaggatcaactgcggccgtgtcgcggtcgcggtgtctccgtgccttggctaccttcgtcgcggtggaaggccacaggcgaggtgctgcaacggagtgagaaacctccacgccctggccaagaccaccgtggaccgccggacggcgtgcaattgcctgaaaacctttgccagaggtcttggtaggggtgtcaatgccaacaacgcagctgcacttccaagaaaatgtagagtcaacatcccctacaagatcaggcatctccaccaactgcaacacgatcaggtaaggatggatctggtataaggaagaaacaacagggcaatttttcagtcacagggcactatatatacgataataatagtgctgctgaattaactaatgaaaaataatgggagggcgatgagggctctacttgtgcgagtctcttcttggtctcggtgtgtcccttagttgtttcaggctttggtccagtaattatgttattattgtaagtacgtgttggctgaaatttctctcatttggttgttgcatgtaataatggcatatatattgtgctgtaattccttgctacttgctactttacatatgaaaaacaagtgcac

SEQ ID NO: 28830 - DNA, 536 bp, Glycine max
cgaccctttctttaatccatggttaagttggcacaagattcttagcttctccgagtgtctctgtctgtctgcggaatccaaaccctccaaggtttctttcctgtgctcctcctcgtgtggtgcacctacgcacgaggtttttgtagctaccaccgtgcccaattcacatcgcatgtttcgaacgctttgtgctgcaactgaaatcgaaaatcagagaaagcggagaagagagagagagcatggctgatctctttgcgtggctcatctccttcttcattcttattgccttaattgtactcgtcatttaccagttaatgtgcctggcagacctagaatttgattatataaatccatatgattcctcatctcgaataaacaaagtgatattgcctgaatatattatagtaggtgtcctatgcggcttctaccttgtaacagggcattggataatgtcattgatctgtgctccttacctctactacaatgtgagattgtacagacaaggaaaacatctggttgatgtcacagagatattc

SEQ ID NO: 28831 - DNA, 247 bp, Glycine max
atgactacaactctgaggcatgcttcaggcttttttgtttcattactttttggtcttggccctttacttggaggcattattttggttgtatttgctcttgctttgcgtcttcagcatgctctcctcatgggcaccgcatgcggtattgcctttgttctcggtgcctggcgaccggtgcagcttattttgtcttcaaaattgggacttttccctgttttgttactccttgcaatgggggctgctttca

SEQ ID NO: 28832 - DNA, 583 bp, Glycine max
  unsure (1)..(583): unsure at all n locations
ctcgagccgattcggctcgagaatagatgcagtttcaaagaaaattgttaaatttggggctgttgccactatctgcggtggactgaaaccaaactacagcaatgttgccccaaaggttatgtattactctgccagaggaccagatccagaggacagtcttcctcacgaagctgacattttgaaacctaacctgttagctccgggaaattttatatgggctgcttggagttctgttggcactgattcagttgaattcctaggtgagaattttgcattgatgtctggcacaagcatggctgcaccacatgttgctggtcttgctgcactaattaggcaaaagttccccaatttcagtcctgcagctattggatctgctctttctactacagcctctctgtatgacaagagtggtgggccaataatggctcagcgatcatatgcctctccagatcaaaaccagcctccggcaactccttttgacatgggaagtggttntgtgaatgcaagtggagcactgaatccgggtttggttnttgattctggntatgatgattacatgtcatttctatgtggaatcaacggt

SEQ ID NO: 28833 - DNA, 241 bp, Glycine max
cagagagattccgaggcggagactgcagttgctcaggtggaggagccgaccgaagttgagaggcttactcagatgctcaggaatgccgagtaccagcaagctactattgagtggctgcagtctgacaatcaggctgagctcttcgacaatctcttcagattcttgaacccgctctacctgcagcaggttacgtctctggttgcgctctcggtttcagctgccatcacgtcgagcttcgaga

SEQ ID NO: 28834 - DNA, 268 bp, Glycine max
caagatacctgttgatattttccacttaactttcagatctacggagattagcttccctcaagctaggaaggttttcttaaccaacgttcataaatatataaaagacaacctgttacatgccaaatatgcatgtgcccttatatttaacatatctggaaccaaggattccaagccagaggagtttgcagaggacaagcaaaacctggatgacattattcatatgcattaccaagcaagggcttggctgctttctggacaatcagatgca

SEQ ID NO: 28835 - DNA, 287 bp, Glycine max
tcttggtggtggattcactgggccttccatgaaccctgccaatgcctttggatgggcctttgtcaacaacaagcacaacacttgggagcagttttatgtctattggatttgtcccttcattggggcttcctcagctgctttgattttcaggtctatgtttatgccaccaatcaagcagaagaaagcttgaattagttaagcttttacattttgatttactagttgagtaataaataaaccattgcccttagtttcttcttcttccaatgtcactagttttaagttgg

SEQ ID NO: 28836 - DNA, 244 bp, Glycine max
caaactctctccttctgattttcaagattttcagagctatgctaggccttcacatctcttgccagcctctgaagtgaaagtgtatacatatacatcagtagaaaacatttcgtcatctttgaaggaggatggatccaaatctttatttaggctcaagttagttacaagcaacgcttatggctcagctattagtgacttaagtgctggacttctaactatgcttgatagatgaaaacggagattc

SEQ ID NO: 28837 - DNA, 459 bp, Glycine max
gaactttgaagctgaccagatgagaaggtgtttggatggaagctctggaagcacatattctgccatggattcctccacgactcaagttaggcattcccaattcaaggatgttgcgaatggtcaaaagtcatctgttgctacactctttgagcaagttggattgcaaaagattttgtcattgctggagtcagatgatgccaatgtacgaattcatgccgtgaaagtggtggccaacttagcggctgaagaggctaatcaaaagagaattgttgaagctggtggtcttacttccttgttgatgcttcttcgaagatatgaggatgaaactgttcgcagagtagctgctggggcaattgccaatcttgctatgaatgaagcaaatcaagaacttattatggctgaaggaggaattacactgttatcaatgactgcatctgatgctgaagatccacaaactct

SEQ ID NO: 28838 - DNA, 619 bp, Glycine max
ccttttcttagcttccgacgggttcaggctcggtggcgctccggcgatcgccttcggaaaggttcggaagaaccgcaaaatgggaatattccccgtttgcagagctggttctgccgtcgtcttccgcgacctcgacgccgacgactttcgccaccctcttgatcaacagaatacgctgctactgagagcaattccgggattgaacgaactgggaaaagctcttctaggaactgtatctgagcaggttatgctccttgaaaacattgggacatccgtccttgtttctaaaaatcagcttcctgatctttaccacctaatggtcgaagctgccgaaatattaaatgttgatgcccctgatctatatgttcgtcaaaggcctgtgccaaatgcatatacattagctataagtggcaaacgacctttcgttgtcattcatactagccttgtggagctcctgacaaaagcagagttgcaggctgttttggctcatgagctgggtcacctaaaatgtgatcatggtgtgtggcttacatatgcaaatattctaacccttggagcctattctgtacctggtattggcggtatgatagctcagactttggaagagcagctgttccgc

SEQ ID NO: 28839 - DNA, 617 bp, Glycine max
tttggactctgggatgtcagtacaatggccttcacttgtgttgtaataactgtcaacttgcgactgcttatgatatgtaattcgatcactagatggcattatattagtgttggtggaagtatattagcctggtttctttttattttcatatattcagggattagcactccttatgatcgtcaggagaatatttattttgtcatatatgtcttgatgagtacattctacttctacgtcatgctacttcttgttcctgttgctgcacttttctgcgactttgtttaccaaggggttcaaagatggttcttcccctatgattatcagattattcaagaaatgcatagagatgaggtagatagcactggtagagcacagctgctggagatagggaaccagcttacaccagatgaggcaaggagttatgctatatctcaactcccacgcgaattgtcgaagcacaccggatttgcttttgattcacctggatacgaatccttctttgccgcacagctcggtgtatatgctgcacccattgcatgggatgtggcaagaagagctagcatgagatcacggtcaaagactgggcagcaaaaataatctggagtaggacattgtac

SEQ ID NO: 28840 - DNA, 267 bp, Glycine max
gggagaagagggtggtggagaagtgagaagggttagggttgtttttgatgatgatgatgagaaggtgcagaggatgaggaagggggtgttgcagaagctgcacatgacttttgggggttctgatgaggacaattatgcttttgggttggaccgcgtgaccgacacagagatgttctttcttgcttccatgtacttctcttttccccgggggcttgggggtccaggtaagtgttttgcttctgggaagcatttgtgggtttcggatgt

SEQ ID NO: 28841 - DNA, 365 bp, Glycine max
gcaagaggaaatcatgatgcctattgttcctggagaaggtccatttggtttgattatttgtccatcaagggaactggcaaggcagacgtttgaagtgattgaacagttcttgatacctttgaaggaagctggatatccagagctcaggcctttgctctgtattggtggagtggatatgagatcgcagcttgatattgtgaagaagggtgttcatattgttgttgccactcctgggaggctgaaggatatgttggccaagaagaaaatgaatcttgataattgcaggtatttaacattagatgaggctgatcgattggtagatttgggatttgaagatgacattagagaagtttttgatcacttca

SEQ ID NO: 28842 - DNA, 471 bp, Glycine max
gcagaagatatgaagaacaggacagcagaattaaagaaggaagttgaagttaccatgcttgcattagaagaagcagaaaaaaatcttaaaggggcgctggaagaagcagaagcagcaaaagcagctgagaaaagtgctcttgaccagattacggttttaactgaaaggactactgctgcacgtgcatcaacatctgaatctggtgctgtgattacgatctcaaaggaggagtttgactcgctaagccataaagttgaggagtctgataaattagcagatatgaaagtggctgctgccaaggcacaggttgaagctgtgaaggctagtgaaaatgaggctctcaaaaggttggagacaactcaaaaggagattgaggatataaagactgcaacacaggaggctttgaaaaaggctgaaatggctgaagcagcgaaaagggcagtggagagtgagcttcgaagatggcgcgag

SEQ ID NO: 28843 - DNA, 270 bp, Glycine max
attttcatggaactgatggatcgaaagcctttgtttcctggcagagatcacgtgcatcagttgcgtctacttatggagctgattggcaccccatcagaggctgatttggggttcctgaatgaaaatgctaagagatacattaggcaactgcccctttaccgccgtcaatctttccaggaaaagtttccacatgtccatcctctagctatagatcttgttgaaaaaatgttaacttttgatcctagaaaaaggattactgttgaagatgca

SEQ ID NO: 28844 - DNA, 265 bp, Glycine max
acattaaatacaatggtggcctcgacacagaagaagcatatccctacaccggaaaagatggtgtctgcaaatttacagctaaaaacgttgctgttcgagtcattgactctatcaatatcactttgggtgctgaggatgaattgaaacaagcggttgcttttgttcggccagttagtgtggcatttgaggtagcgaaggacttccgattctacaataatggagtttacactagtaccatttgtggtagcacgcccatggatgtaaa

SEQ ID NO: 28845 - DNA, 251 bp, Glycine max
attcttattcttcccctctaagggtatctttctctctagctttttgttatgctttgctattctgtctttgggagctgaagctcgtagatcaccatcacccatctcttctctcattagcaaagagctttttgattccattttcatccacaaagataacaatgcatgccctgccagaaacttctacacctacgactccttcatcaatgcatccaaacgcttcccaagatttggcaccactggtagtccagcca

SEQ ID NO: 28846 - DNA, 319 bp, Glycine max
cggctcgaggacagtctggaaatgaattgcttgattccttttactgtatttattggttgacttggaatattggacttggagtaaacttttttcccaatccgggcatgaagatcattattagcagctatatttgaagttatccacaatcatcacgcgcggaaagatgttggatattactggtccagttttagtgataatccctatctgattttcgatgttttatgcttttaggggagcgactgttatacttcaaaaagggggtaaaagtagcgaaagtattgtacagctattatgtattgcttgcagaaattcgccacga

SEQ ID NO: 28847 - DNA, 206 bp, Glycine max
taaacttgaattatgtatatcactttcccattaagacattagcaatggggaaaataattataagatggtatgaaatttattttccccattgctaatgtcttaatgggaaagtgataaacttgaattatgtatatcttgtaaaaatgtaatttatgcacaaaaaaaaaaaaaaaaaaaaaaggggggccgaccgctaggggacctcg

SEQ ID NO: 28848 - DNA, 250 bp, Glycine max
actgaatctactagcccccacaggttctaatgataacactagggaaaatccgggggagggagggtaaagaaaaaaacttcatacaaatgcggtgtaaactttcttcctgttccgttatatgagagagagagactatcacccactcacccagagtattcttattggcttattcagaaaatatcggcctgctcttccaccacagtaaaggcatcatcacaattcacaggtaagaaactcgttatttcgtcgc

SEQ ID NO: 28849 - DNA, 628 bp, Glycine max
gggagagggtgtgccttgttgacattggagagcaagctgtcattcccgaaggcatcagcaagcacgcgaaccggagcaaatattttcttgctggtggaatagcaggaggtatttctcgtacagcaactgctcctcttgatcgtctgaaggtggtcttacaagttcaaagcgaacctgcttccatcatgccagcagtaacgaagatatggaagcaagatggtctgttaggatttttccgaggtaatggattgaatgttgtgaaggtatcaccagaaagtgccatcaaattttatgcttttgaaatgctgaaaaaagttattggagaggcccacggcaacaagtcagatattggtacagctgggaggcttgttgcaggtggtacggctggtgcaattgcacaggctgctatctatccaatggatctcattaaaactaggttacagacttgtccctctgaaggtggaaaggttcctaagctgggaacacttacaatgaatatatgggttcaagagggacctcgagctttctacagagggcttgttccatctctgcttggcatgattccttatgctgccattgatctcactgcttatgataccatgaaagatatatccaagagatatattct

SEQ ID NO: 28850 - DNA, 248 bp, Glycine max
atcgattattgaaataatctaatcttctaaacttgatgtttttatttgtaataacagcttcgactttttcttcttttttttttatactatagattgactcttaaatttttggtccttggagtgagaccttttactcttttttctccttcatagaacctggtcctctagtacaactaggatgtgggacaatttctggggctgttggagctacttgtgtctatccattgcaggttattcgaacaaggtac

SEQ ID NO: 28851 - DNA, 256 bp, Glycine max
atagcaggaggtatttctcgtacagcaactgctcctcttgatcgtctgaaggtggtcttacaagttcaaagcgaacctgcttccatcatgccagcagtaacgaagatatggaagcaagatggtctgttaggatttttccgagaacctggtcctctagtacaactaggatgtgggacaatttctggggctgttggtgctacttgtgtctatccattgcaggttattcgaacaaggtacaatgctgtcagtattactg

SEQ ID NO: 28852 - DNA, 350 bp, Glycine max
cacgagactagaaggaaaggacttaacatgtgtgggagtcctttggccttcaatagtttcaaagcctctttatcatacaaaacaccagccactttcacgttcagaatgtaagacccaagaggctttgaaactattgaaggccaaaggactcacgagacaagaaggaaaggacttaacatgtgtgggagtgcaatgctacaaaatggcttttatcataatcacggcttcaacgttggttggttgtttagcttcggtcattttggcgctgaggactagaaagttttacaaaggggatatctatagagaatttagaatggaacatgaagcaatggagattaccaagactgcta

SEQ ID NO: 28853 - DNA, 664 bp, Glycine max
tttcgatcacgcgtccgcagattcacagttggagagtgtgggaggatgaggctcatatggatcggcataattcattaactgaaattacaaaagagttgaccatgcgaaggcaatcaacctttgtcaagtctcatgcatcaaacccattgaacaaaaatagttccctcatttgggtgacatgctttttccgtcaatttgggcattctgtggttcttgcggattatcttacgcttcgcaaaggcttcatcatgaatcacaacctttcattcaaatatgattttcacagctacatgattcgatcaatggaagaggaattccaaaggatagttggtgtgagtggtccactctggggatttgttattgccttcatgcttttcaacattaaaggatctaatctatatttctggatagctatcattcctgtatctcttgtgctcttggtgggaacaaaactacagcatgttattgcaaccttggcattggagaatgctggaattacaaggttcttcccagaagcaaagttgaggcctcgtgatgaacttttctggtttaataagcctgaactattgctatcgttgatccatttcattctcttccagaatgcatttgagctggcttcattcttttggttctggtggcagttcggatattattcctgctttat

SEQ ID NO: 28854 - DNA, 436 bp, Glycine max
  unsure (1)..(436): unsure at all n locations
tttgttcattggaaagagtgaaaaatgataataacctcaaaacaaacatactctaaacaacaaaagcattggcagggaattatatatggctaagctcacgccatgtatccatctgtctacctagtgacaaaaaatgtgttagctatgaccacagttgagatgacaccaatagagacttttaactctgtctctctctagcttctatttcggttttagaatttgtttatttaattttttttattcttgggttaactgaggaacattttattaaccctatttgtctttagtttttttttttttttttttggaaagaccattcagtcaattcttcattgtaagtagagtacaaaatttctaattaaacatgagatcaatttttgtttgtgtaataaaaattcagctattaataacaatctggtannnnnnnnnnnnnnnn

SEQ ID NO: 28855 - DNA, 430 bp, Glycine max
cggctaccccaccatattctacgacgccatttatagttcttctatggtctcaaacagaatccaaatccctctcttatccaaccacctcagcgacgcttccatcaaagacaagcccagcgtcacccccgatggacaatatttactatacgtgtccagccacgagaacccgggcgttccacgggccagttggaccgcggtttactccactcagctcgagtcaggcctcacccaaagactcaccccttacggtgtcgctgatttcagcccatccctctctccctctggtctctggaccgctgtcgcttcctacgggcctcacggttgggccggtgaagtagaagatctcaccactgacatctacgtcttcctcactcacgacggaactcaccgattcaaaatcgttgagcacggtggctggcccacctgggtc

SEQ ID NO: 28856 - DNA, 466 bp, Glycine max
cttacgcgtttgtggacgcgtgggcggacgcgtggggaaaccatttgatttagctgttggcaacacttcaaaagatcattcacatgaccattgggggaatgttgtactaaagcatttatatcattcattaggcaatgacaatggtggcatgaagtggtgtataagggaagcactcatgagctgtcctaaaattagttgcgcccctacaatgaaggaaactcttaaaattgtcaaggatggtcaggagtgctctccgcaattagaaagtttgttttatagattacagagtgaagctaatggacatgaaaatgttgtgaacaatggattttctagtgagtcaaatggccatggtgcaactggcaggtgtcagcgtgtgttccgtgatatcttagcctctgagaagttcagttcattatgtaaagtgctacttgaaaatttccgaggaatgaaacctgaaactgtattt

SEQ ID NO: 28857 - DNA, 272 bp, Glycine max
ctagggttttgtaaaagagggtttgacgatggtgggtggttgctggtttgagtttgatagtggtgggtggctactttttcgagtttggcggttgtgtgtgggtgctgattcaagttcgatggtggcgtgtgggtcgccccttcaccgtcggcgctgacgtggaccactacaagaccaccctgaccaccgccctcgccgtgttgcctgtcgcctcctcgctaaacaacgaggaagagaaggtgtggtgcatcgcgactggaacgaggtgatgt

SEQ ID NO: 28858 - DNA, 262 bp, Glycine max
cagcaaggctcaaagcatggcgccaccacctcctcttcctactctcctcctcaccacccttctctccctattctcctcttctacatcggccccacccacaaccacagcatgccgcgacacgtgcggctcaacgcaggtgaagtaccccttcggcaccggccacggttgcggctcccctctgttcagcccctacgtaacctgcggctccaacggcaccggcgaccaactgttcctgaaaagccacaccggctcctacccggtg

SEQ ID NO: 28859 - DNA, 271 bp, Glycine max
taagctcggaattctgctcgagcgatgaggagccacacattccttaggataacttcacttttggtgtttattgggtggctcacggtttggatcttgttgcctacaaaggtttacaagaacacctggacccccaaactcaaaaccaagttaaactctacatactttagagagcaaggaacaaatctcttgcttttcacattccccgttatgctcataggggccctgagctgcatctatctccatcttcacgaaaaaggaacggaaaagctac

SEQ ID NO: 28860 - DNA, 248 bp, Glycine max
tggtggatctttacactgctaggcaactgaattcagtgccatcagactgtaggagccgcgagttatttcctactgatcctgaaattcttgcaaccggcggtgcccctaacagtttgtcttctgcatatgatgatgctaacctcggggaaggaaagagagaattggagaagaggaggaggggtgttaatgacgatggaggggtggagatgtatgatggagctggttctcttaatttgaaccttgggggt

SEQ ID NO: 28861 - DNA, 269 bp, Glycine max
gaggaaagggactaagaagaagagagataaactacagggctgctcatggtggctacactggcctccctcctccacctgatgcttctaaacatgacgctttgccctccaaacttcgtcaaatcatctctttcacacaaaacccaactggggcgattgggttttcaaatgacaagaaaaacgttggtgggcatgcccaaaataagactgccttaaaggacacaggtgatgttgaaactgtagatgtcaaacaggggatctctaatggacaa

SEQ ID NO: 28862 - DNA, 514 bp, Glycine max
tcaagcctagcgtctctcaactcaacaatgggtcttcttgacatcgtgcagccaggcgtcctcaacggtggggacgtcatgaaggtgtacaaatatgctcaggagcacaagtttgccatcccggccgtgaacgtgacatcgtcgtcgacgacgaatgccgctctgcaggccgcccgcgacatcaagtcgcccatcatcatccagacatcaaatggcggcgccgccttctacgctggcaaaggtattgacaacaagaaccagaacgcctccgtgctgggtgccatcgctgctgcgtatcacgtgcgtgccatggccaaacactacgggatcccagtgatcttgcactccgaccactgtgccaagaagctgctaccgtggtttgacggcatgctggaggcagacgagaagtactttgcagagcatggtgtccctttgtggagctcacacatgctggacttgtctgaagagccgatggaagagaatgtggctatcagcaaaaagtactttgaacgca

SEQ ID NO: 28863 - DNA, 281 bp, Glycine max
tgttgagaagcgtcagatgaccaaggctgtagcaatattggatgaaatgaatgtggcaggtgttggaccaaatgagcacacatatacaactcttatgcaaggttatgcttcactgggtgacactgaaaaggcctttcagtacttttcagtgttgaggaatgagggcctggagattgatgtctatacttacgaagcgttattgaagtcatgttgcaagtcaggcagaatgcagagtgcccttgcagtcacaaaagaaatgagtgcaaaaaatattccaagaa

SEQ ID NO: 28864 - DNA, 358 bp, Glycine max
atcggcaaattctgccagcagaagtaatattgttgattgggctgagaagctctatggacagtcaattagtgcagtgacggctggtgtaaaaaatcttctatctaatgaccggcagctagcgttggcgaggacagttgaggccttgattgaagggaggccaaaccctgaaacagattcatacctctcgtttgatccccgtagctccaaagtctggttcgggagcaagtagcagccatatgaaaggaccactttaaggaagcaattgtgttcatgattggtggtgggaattacgttgaatattgtagtctgctagagccttgacaacatcagcaacctgccttacatattatatatggca

SEQ ID NO: 28865 - DNA, 273 bp, Glycine max
ccctcgagcgaatcggctcgagcatactcatactgtgtgtgaaattgtcaaggcccgttggggcgacttctgcgcacattgtttctcctcattttctgcttcttgacgaatataattgtgacggctatgttgctcctcggtggttctgcggttgtaaatgcattaactggagtgaacctttatgctgctagctttctaataccacttggagtaattgtctatacactagcgggtggactgaaggccacattcttagcaactatatccattctg

SEQ ID NO: 28866 - DNA, 332 bp, Glycine max
gggtgtcattgatgatgtgatcagtctgcttggtttgggaactcctgcattggtgtgtgccctttgtgatatgcatcggttgattcaagaaggggaaaaggaggccaaatcagaaagaccgagaaagttgcggacagatgggactagaagtgctattaagctggcagaaaggaggatatatttcatcacgtgttgggttcatgagcagccagaggaagcatggttttctttagcggccattgtaagagcagaaaagacatcagccatggaatttcaacagagcaataaatctgaaaatttgaacaataaggcagaggcaaaggcaaaagttt

SEQ ID NO: 28867 - DNA, 250 bp, Glycine max
cggaatatccataggttctattacgctatgtctgctaagtggtcaagttcacatctacatacttatggttcttttctctgagagcactactccttttgtaaatcttagatggtaaatctgttgttcagaattccatttaccttcatgtacttttcttaccattacttatgacattaattacatatataggtacttggatgttgctggccttaagagctccaaactttacatttggatggcattgcattgt

SEQ ID NO: 28868 - DNA, 609 bp, Glycine max
catatcataaaaattaagcgccaaatctgattcacagtcacatgcagaagaatgagcaccactcaagcttcctccaacaacaagaagaccaaacgcaatcacaagaaatccctctccctccccgcccgtaacggaatcacccctccggatgatggcggagaaagaaccgttaaaaagcttcggttgtcgaaggcgctcaccatccccgacggaaccaccgtctctgaggcctgcaggcgcatggctgctcgccgcatcgacgccgttttgctaactgattccaacgccctgctttccggaattctcactgacaaggatgtggctactagagtcgtcgccgaggggctgaagccggaggagacgacggtgtcgaaagtaatgacgcggaatcccatctttgtcacgtcggatacgctcgccattgatgcgcttcagaaaatgattcagggtagatttagacacctccctgttgtggaaaatggtgaagtcattgccatgctggatatcaccaaatgtctttatgatgccatatctagaatggagagcgctactcaacaggggagtgccgttgctgcagcagttgagggagtggaacttcagcgaactact

SEQ ID NO: 28869 - DNA, 405 bp, Glycine max
tttaacattttattcaatgtgatagctactcaactactagtatgtttgtattgtcatcctcctactttttttcaatgcaatttgttgtgaaaggaaaaaaattgttggatctatgttcaaagctgtttaggattgcttagaaagtgaaacggattgaaaagcggcaaaggggattgaattgaaaggttttggaacaagctttatcttctgggatggccatggttaggtgcttctctcttttgcctgtgaggaaggacaaacacaaggggaatgaaaggtcttcaaaagaggactttaacactctacttgccaaactacaatctacaaaaaaaataacatcatagccagccacttttgatgccctgttcaatgcgaggattacaacccgtgagagtcctgtgaagg

SEQ ID NO: 28870 - DNA, 353 bp, Glycine max
aagagtttccttggtactgtgtggcatggatttatatatattctgcagcactcttgtgtgtcactagcgggagctatactattactaattgcggcatattcttttgttccacccaaattgtcacggaagaaacgagccataattggagttcttcatgtttctgctcaccttgctgcagcactgattcttatgttgcttcttgaaataggcgttgaaatatgcatccagcataagttgctagcaacttcagggttgctctctctatatgttgaacaatttgtattgatacaacgttttgtaacttggtttgcttcaagttgataaataatatatcttagcttaattttaaatta

SEQ ID NO: 28871 - DNA, 541 bp, Glycine max
tgaagttatttaaaatgatgctggaacgaattataacattccttcaggtttccatgagcaacatctcatctaattgcaaggagaaattgaattcatatgagaagcagattagaaattttataaatacaaatagacctaggaaaaacatgcctggacatcttcccccacctcatatgcattccatgccacaatcacgcccccaagttactcaagtgcagtctcatgaaaatcaaatgaaccctcatgcaaacaacaaatatgctaggctctgtagcaacaatgcagcagaataatatggcaggcatgcagcataattctctgtctggtgtatctacagtacaacagagtaagatgaattcaatgcaaccaagtaccaatttagattcaggaccaggaatgctgtgaactccctgcaacaggttccagtgagctcacttcaacaaaaccctgttagtgctcctcaacaaactaatgttaactccttatcttcacaagctggggttaatgtagtccaaccaaatcttaatccccttcagccagg

SEQ ID NO: 28872 - DNA, 665 bp, Glycine max
ttaatcagcgatctcattctctagctgtcccagataacatggcctcctcttctccctctctaatgttcacagtgcgaaggtgccaacctgagctggtggctcctgctacacccactcctcaccaacttaaaccactatccgacatagatgatcaagacggctttcgtttccaggttccaattattcagatttatcataaccaaccatcaatggcagggaaagaccctgttgaagtcattcggcaggcactggcaaaaacacttgttttctattaccccatttgcccggtaggcttagggagggccctgaccgcaaattaatggtggattgtactggggagggcgtcatgttcattgaggctgatgcagacgtaacactttaatcagttttggtggtgaagctctccaacctccattcccatgcttccaagaacttctatataatgttccagagactgaagaaattactaacactccccttctactcatacaggtccaatacacattgtttataatttattaatttatccacttctttgtacaaagaaaaaaaaaaacgttcaaaagccacatgaaaattctaaaaacgacataggcaaattgcataagtaagagtgaatctatttttggaattaataacactccccttctactcgtacagcttca

SEQ ID NO: 28873 - DNA, 379 bp, Glycine max
aaatgtgtgacgagagaggactccaaactaatgttgatgattatgcagccattgataaccataatattaatttaatttatctaagacgtaacttggtggaagatcttcttgaagatactgagaagttccatgataaagttgttggttcttttgtgagaataagaatttctggtagtggtcagaaacaggatttgtataggctggttcaggttgtaggtacatgcaaagcagcagagccatataaagttggtaaaaggatgacagatatcttgctagaaatcttaaatttaaacaagacagagattgtttcaattgatattatctcaaatcaggagttcacagaggatgaatgcaagcgtctccgccaaagcataaagtg

SEQ ID NO: 28874 - DNA, 252 bp, Glycine max
aggaaacacacgtgctatacgtatcgtgcgcggccacgattacttaaagcgacagggaaggaggcactcaaagacagcaaaagaaggacacgacggcgctcgagattgcagctaacgaggtgctcttcggccagaccggaagcggcgctgacgagccgtgggttgtggggttgtcatcaaccagcaacgccccgtggggtgcgccagacccagcagctttcaactggttgaacaacaccggagattttactc

SEQ ID NO: 28875 - DNA, 248 bp, Glycine max
aaagaagccatgctggggattagatatcatatgcgcctaatgggcgaggctgcaggtgttccaattgaaccagaaccacaaacacaacttttagatgctacaatgaacttggaaggagtattgttccctggagttccaggggcaggaggatttgatgcagtctttgctgttactttgggagattcgagcagcaatgtgacaaaagtatggagttcactcaagtgtccttgccttgttggttaaagaag

SEQ ID NO: 28876 - DNA, 739 bp, Glycine max
agcaactaatcttaacattggaatggacttgtggaatgcatcttctggtggcgctgaagctgcaaaaatgagacataatcaatctggtgccccgggagttgcccttggtgatcaatgggtacaagatgaacgtgagctgaaaagacagaagaggaaacagtcaaaccgagagtcagccaggaggtcaagattacgcaagcaggctgagtgtgaagagttacaaaagagggtggaatcgctgggaggtgagaatcaaactctcagagatgagcttcagagactttctgaagaatgcgagaagcttacatcagaaaataattctatcaaggaagagttggagcggttgtgtggtccagaagcagttgctaaccttggatgagaaagcaacgcatttcagttcctcagtttagtgtttgatggtaacggcaaaatttgatagattcttaattaagacgaatctgcagctagaattttcttatcaatggccaggtctcttaattgagaataggatataaagtttttttctttgttatactaactctatgtcattaaccctcaattgtaattgcccttgtgattttacatgtcatttgtttgtaatattaaccagtaccttagaatagaaaacgtaggctacttgagcacttttgttcagaacttagttttgcaagtgatgttaagaatcctgcttcaacttttcaaatctttcactagttgactatggaatcatttttgttct

SEQ ID NO: 28877 - DNA, 248 bp, Glycine max
agcgcctagggttttccaaggcggcggcggcggcgaggccggtgcagtggttcatcggagaccccgccgcagcaacaacgaccaggcaggcggcggcggcggcgaagatagtgagggaaggggtggagttttacagcaatggggatttctacgagggggagtttcacaagggaagaagcaacgggagtggggtctaccattacttcgtgaatgggaggtacgaaggggattgggttgatggaaggtac

SEQ ID NO: 28878 - DNA, 382 bp, Glycine max
ctccagccgctcgagccgtgctttttgatatttggagcattgggtgcatatttgcggaaatgctcactgcgaagccattgtttcctgggaaaaatgttgtgcaccaattggatctcatgactgatttgcttggagactcctcctcctgagtccattgcaaggattcgaattcaaaaggcttaatggtctcttaatagcatgaggaaaaaacaaccaattccattctcccaaaaatttccatatgcagatccattggctcttcgtttgctggagcgcctacttgcatttgatccaaaagatcgtccatcagctgacgaggctttatctgatccttacttcactggcttggcgaacatggaccgcgaaccatccactcaaccca

SEQ ID NO: 28879 - DNA, 562 bp, Glycine max
ccaaaagaagatatggaagcaaagaaaatcccagaagtgatactaaactcagggaaaaagatgccagtgataggcctaggaaccgcatcaattcctcttccatcacatgaagctctcacctccatccttattgatgcctttgaggttggctacagacactttgatactgcttctctgtatgaaagtgaggagtctctaggcaaagctgtggcaaaggccttagagctaggcctcataaatagcagagaggaattattcatcacatcaaaactatggtccactgatgctcatcctgaccttgttgttccagctcttaagacctccctgcagaagttgggattggagtatgtagatctctatttgattcattggccagtgaggctgaaacctgaagccaaagggtaccataatatattaaaggagaatgtgcttccctcctttgacatgaaaggaatatgggaaggctatggaagagtgttacagattgggcttagccaagtccattggtgttagcaacttcggcatcaaaaagctcacccagctcgtggaaaatgcaaccatc

SEQ ID NO: 28880 - DNA, 411 bp, Glycine max
catttcttgatcggcacggaaagtatgtacaaactttcctgactgcacataagagggttaacatggagggtcagatcataggagctttttgctttttgcaaatcatgagtccggaagcttcagcaggctcttaaggcacagagacaacaagaaaagaattcctttggtgggatgatagagttagcttatattcgtacaaggagttaagacatcctttgagtggcatacgctttacaaactctcttttggaggctacatgcttgtccaatgagcaaaaacagtttcttgagactagtgctgcttgtgagaagcagatgttaaagataatacacgatgttgatattgaaagcattgaggatgggtccctggagcttgaaaagggggattcttgcttggaaatgtcataaatgc

SEQ ID NO: 28881 - DNA, 424 bp, Glycine max
gtccaaatctgagatttgatctgcttaaggagctgcatgctttgagcctgaagaaaggaatttttctggtgcttcatggtgcatctggtttgagcaaagaacttgttaagacgtgcatacatcttggtgttagaaagttcaatgtcaacaccgaggtaagaaaagcatacatggactcccttgttacccccaagaacgatctagttcatgttatggcctctgcaaaggaagccatgaaagttgtggttgcagaaaagatgcatctctttggttcagcaggaagggcataattcctacaaatttactagctaggattattggtgactatcaacttcttattattttgctattatgttgtcttgtagtaaggaatatcactgcctcatgaattcattatttccttcagttcaatagatggtttctg

SEQ ID NO: 28882 - DNA, 260 bp, Glycine max
aaacgatctaaacatgcaaatttttgttaagactttaaccggtaagaccattaccctcgatgtcgagccttctgactccatcgagaatgtcaaggccaagatccaagacaaggaaggtatccctcccgatcaacaaagacttatcttcgctggtaagcaactcgaggatggcagaactctttctgactacaacattcagaaggaatctaccctccacttggtcctcagactgagaggtggtatgcaaatcttcgtcaaga

SEQ ID NO: 28883 - DNA, 463 bp, Glycine max
tagggatgattatgagtggtgatttccaagggatggcacatgaggctaccactttcaaaggtggtagaagtgcttattatcttgttatcatttggggtgcaatcacttttcagctgggggttctggggggcactgctgtaattttcttgggctctactgtgctagcaggtgtgcttaatgcagtaagaacacccataccaagcattgcagctgttatactgctaaaggaccctatgagtggtttcaagatcctctccctagtgatcaccttttggggatttggctcatatatttatggaagttctaaaatatggccatagactccagttcttaagatgctctctttagaaattctaaggaggtgattgttgtaagatgtatgattaaatatccgtacataaatattggtaatgttgttgtttggtaaatcacaaatatgattctttatatttaatgctttaaa

SEQ ID NO: 28884 - DNA, 259 bp, Glycine max
agagaccctaaggcttggaaagaccctgaagagttttcacccgagaggttcttggacatcactatagattgtcgaggccaagattttgagttaattccatctggtgctggtcgtagaatttgccctggcatgcctatggcaattgcctcattggatcttattcttgctaatcttcttaattcgttcgattgggaattgcctgaaagaatgagagaagaagacattgacactgagatgttaccaggaatcactcagcata

SEQ ID NO: 28885 - DNA, 253 bp, Glycine max
gtcagcaagttgaatggtattaatgtggatcttaatgggcaacctgcttccactgattatgatgaggctgatgaagaagaggaagacaatcctggagcaagagattcctctcctgaggatgcttgagaatcttaaattgttcctttgaccaaagggtgaatggccaatgaattccttcctgcactaaaactgtcgtgttgaggacttgacactgttcctggttttgatggaaaattcatgcgacacattaatc

SEQ ID NO: 28886 - DNA, 299 bp, Glycine max
attgtagctgcattctagcagcaacaaacaatttctcggacgaaaataagcttggacaagggggatttggtcctgtctacaacgcggaacctcctcggggagaggaagtagctgtcaagaggctttcaagaaagtctagccaaggtttagaggagttcaagaatgaaatggtgctcatagccaaactgcaacatagaaatctggttagactattggggtgttgcattcaaggggaagaaaagatactggtatatgagtacttgccaaacaaaagcttggactgctttttatttgatccg

SEQ ID NO: 28887 - DNA, 263 bp, Glycine max
agaaaatgggtctgttggtggtgaaattgttagtagagatgatccattaatggataaaggacagaaaaatgtagaatgcaatgataaagcctctggatttagcaaacaatttgcctctggtgaagaaggagctaaaaacaatgtatcgattgcaattagaggagaaaacagcctgaacagaactaacttagatgcgtcttcaggctgtgctcttactccatcgcaacctactgatgttgatgactctgtatccaagtctcagg

SEQ ID NO: 28888 - DNA, 242 bp, Glycine max
caagtggtgggcgaggaacgggctcaatcttggtgtcggcacaagcgagtggatgaagacgaagaccctgaacaattcttagatcacctagcgttttttgtgtgttttgtttcattggagcgatgcatggcgtctgggtttgttatcaacggacggacggatggacggacgggtttaggaacagctggaaacgagcattgatgtttttctcatttggcactttgaaacagcatattgggtag

SEQ ID NO: 28889 - DNA, 690 bp, Glycine max
ttgatcttactcttagcttgccgaatgttctgttacctattggtgctcatgagactggtgctcatgagacagcatcgcaaatccctggatcctgcagtcaagcacggagtgtgcagtctttaagtaatacattttgtactaactcagatggttttactgcatcgatgtccttttcaggttcccaatcattctatcataatccaagctgttctctgacaaaaaattcagcggactatgaacaatctgttggcagtcgccccttattcgggggaatagatcaagtttcccagggatgttggcaaggtcagtctcagagcgatcccaaacagaaagaagttccttttggtcaaagaacctcggcaaacggaaatggctcccttttccagcctcaggcatcatcgggtgttttagacagtcaagctgtaaagggtcaacattccagggttctagaaggaagttcaaaaatgggcagtggacttgacaggcaattgagttttcataaacagttttcaggccagtcaagacgccatgacgatgttagatctccgtcacagagtgttgggtctcatgatattggatcaaattatagctttgagaaaaagagagaggtaagagagaggggtagtggtagtctgtatcgaactacaagccagaaggaacaagaacaacttctggtgggtggagttgatt

SEQ ID NO: 28890 - DNA, 251 bp, Glycine max
gatcggtatctttcagggaatgctatgaataggcaaaggttacaactacttggtgtttcatgcatgatgattgcctctaaatatgaggagatttgtgctcctcaggtggaagaattttgttatataaccgacaatacttacttaaaagaagaggttttgcaaatggaatctgctgtcttgaattatcttagagttcgaaatgacagctccaacagttaaatgtttcttaagacgatttgttcgtgcagctg

SEQ ID NO: 28891 - DNA, 247 bp, Glycine max
ggtatccattctcatccactatcttagagactccaatggaggatccgtttagcaatttgccagatgaaattctaagctgcatagtttcttttctgccactagaaaccagcctcatatctactaggtggagagacctgtggaaccaagcccttgttagacatggaagcacacaagacgacgtagctagtgttgttgctggttttctgtctcgttttgaagagcttgatccattaagacatcctcgcaa

SEQ ID NO: 28892 - DNA, 529 bp, Glycine max
tctgaagactgcaccgtgggaagttatgacgtgccacgtaacacaatgttaatggtgaatgcatcggccattcatagggacccaaaagtatgggctgatccaacgagctttaagcccgagcggtttgagaatggccccgtagatgctcacaagctaatctcttttggattgcgcgaggagagcgtgtcctggtgcacgcatggcccaaagaactctgggcttgactttaggttcgttgattcaatgttttgagtggaaaaggttcggtgcggaaacagtagatatgcccgaacgcgcgggaactatacgtgcccaaggccattccattggatgcccaatgtaaagcacgtccgatcattagcaagattttctaaatttcttgcaagtttgaactttggtcgacgttcaaattatcacattaaattagtagccttacagcgatttttatctgttataattcttaaatttacaatgtgattctttagtgagtatatgctttaataaaagatattcctgtagatttctctat

SEQ ID NO: 28893 - DNA, 245 bp, Glycine max
tcttgcacgatctggttgctgcctgcacatcgtatttcacgtcagctatcagcaggagtcagcgacttgcatcatgattgtcgagcccaacgccgtcatggatagcgtcatggccgctgccacctcggttgcgcctattcccagcgtcgtcccgactctgcccgatttcgagaccgcaggcgagtactggtcaccgcacgctaatgggccgtctccgtcatgatggcaatctcgatggcaatttc

SEQ ID NO: 28894 - DNA, 260 bp, Glycine max
tttggagctagcaacttgcattgatacaaggtgcataacatcttatgatgataaatcttcagacttcaagcttcaagcagtctgtctgtactctgtagtcttgtaatcatgccccaggctcagatgaggaaggattcctaatgggaactgctgcttatttgaacattttttcttgttcatacccaattcttgaatatgtctattcaattttcaggacaatgtttgtaatgtaatgtactactttgttggtggtaaaagat

SEQ ID NO: 28895 - DNA, 261 bp, Glycine max
atggacttcttcgcccagggtcaccaccacaccaccgcctaccccaccatctccgccacgggcaccatctcggtcaacccgcccggtgggacgcacaccgcccatgaccccaagcacacgggcgggcttccgccccctcacactggcttcccggtcccggtcaacaagttcatccaacactcacacgtgggtcagacggccctctgggtcgtcttcggtctgttcactgccggtctcgtcggcatcttcaccctctcccag

SEQ ID NO: 28896 - DNA, 466 bp, Glycine max
ctcgagccgctcgagccgcgggtttaaaagaaaacctggacagggagcatcagaaatggcgggcagctcaaaccaattatgaaagacaggttgttctccagtccgaaactattcaggagttgacaaaaacatctgaagcactagccttgctgcaggaggaggcatctgaattacggaaactagccaatactcagaaaattgaaaataatgaactaaagactaagtgggaagatgagaaggcacaactagaaaagtctaggaatgatgctgagaagaaatacaatgaaatcaatgaacagaataaaatactacatagccaacttgaggcttttcatattcaatgggccgagaaggagcgtaacgctgctggtatttcatctggaagtagtagtgcagatgcctttggtgatgctggtcttcaaaacgtgattaattatctcagacgttccaaagaaattgcagaaac

SEQ ID NO: 28897 - DNA, 251 bp, Glycine max
gtcgagtggacggaggacgagatggccgcgctcgaggagggcatgcgagagacgagccgcgtgctcccgaaccgctgggcaacgatcctgcgcatgttccggccgcgcttccacgagaagcgcacctcggtgcacatcaaggacaaggtgcgcaacgagacgaaccgccgccgcaaggtgggcgagccgctcggcgtctttgccgaccagtagtcgatggcacgcttgctaatataccgagtagtgtgctc

SEQ ID NO: 28898 - DNA, 444 bp, Glycine max
aggtcgcagtcatggtttatgtgggtgtagtagtttaatagtttttccaggtatggaaataaaattgttgcaatcaaagttctgcatcgtgggagcacttccgaataaagggcttccctagaaaatcgttttgctcgagaagttaatatgatgtctcgcgtccaccatgacaatcttgttaagtttattggagcatgtaaggatcctcttatggtaatagttacagagctattaccagggatgtcactgcgtaaatatttaacgagtatccgtcctaaactattagaccttgatgtggctataaactttgcccttgatattgctcgagccatggattggctacatgccaatgggatcatacacagagatctgaaacctgacaatctattgcttacggcggaccagaagtctgttaaacttgcagatttgggtcttgcaagagaa

SEQ ID NO: 28899 - DNA, 448 bp, Glycine max
cgggtgcgtacgtcgttccaagtaaatcactttgtcgagccctaattttgaatttgtgcgccattcctaaaacagtgcagtgaaaatcacgtatttgcgatggagattctgtattcgaagctctacgacaagtacaccaaactcaagtctaaaaaactctccgatttggatcacataaacaaagaacaagaagttaaattcgtgaattacttgacggctgcggaagagttgatagagcacttgaagagcgaaaaggaaggacttcttgaacaagtcaatgagttgagaactgaattggcttcacttagggctgccaaagagaaagaggttgcggattatcagaagctttttatggaggaaaaagagaaaaatgaaactctttctgaagaagttgagaaattgctaaagcttcaccaggaaagaacatgtcatgatttatataataaca

SEQ ID NO: 28900 - DNA, 246 bp, Glycine max
cgaggacgaaaaaggtacaaggaaccgattctagagagagaaagcgtgttgaatttctagagagagagagcggagggcgcgcgggatggttcagatcgcaaggaggaggaagaagggacggccgtcgaaggcggatctggcgcgccgctcaggccagtctccggccgccgcatcgcagcctgattctcggcggagctccggcgccgaagcgtgaggtacaacatcatcgactacgacggcgattac

SEQ ID NO: 28901 - DNA, 489 bp, Glycine max
gcccttttgatgttctaaaagccatttgagtgcatctcacagttccagttctgtatacagtggttaattttaaatttgctccattgaattctgtttttctctcgaactcaagcgtctaaagcatcaaagcagaagtgtcgcactcatggaataatattgtcttcaatcttcatctcagctatgtctttcagctaccaaagtccatgatgctgtacccttattgaagtattaatctgagaggaaagagagttgctgccattattatcagttcagtgatatttctttcttgagtatggttggctacggtaaaaagttgagagaattacagattcaagaatggaaaggatattacatcaactataagttaatgaagaagaaagtcaagagatatgtagaacaaatggaggttggagctcaaaatcgccacaatgttctcagagacttctcaatgctgctagacaatcagatagaaaaaattgttttatttct

SEQ ID NO: 28902 - DNA, 362 bp, Glycine max
agatgatattacagccatgtatgtccctgacaatgacaaggacaaagtgttgcagctaccaaagtccatgatgttgtacccttacaagtattccttttcttcggggtctgccaatagaagtattgatctctgagaggaaagagagttgctgctattatcaatcagttcactgatatttctttcttcagtatgggtggctactgtaaaaagttgagagaattacaaattcaagaatggaaaggatattacatcaactataagtgaatgaagaagaaagtcaagagatatggagaacaaatggaggttggagctcaaaatcgccataatgttctaagagacttctcaatgctgctagacaatca

SEQ ID NO: 28903 - DNA, 256 bp, Glycine max
cctcactagctcaattcctcgccgagtttttattgttccgacgtggcaatcggactgctgccgcctccgattcaacgcgccgccgccggtgatctccgtcgctgattctccgacaccgcttttggccatatattgaaatagttttctggtgcgccgatgagccggcctgatgttattgacagtagaagggggaggattcttctcttcttcagcatcagggtatactaagggtctggcccttctcctcttgggtcag

SEQ ID NO: 28904 - DNA, 416 bp, Glycine max
gctttatctagatccctcaattttcatgaaaactcctgaattagtggcactggtgaaaagtccttacagcaaagttagtcacttcttgagttatttgtctagctagcaagagacggtgaccatctttgagtgacattgaccttgtatagaagaagcgaaagggtggtagtctctgatttcctcggcacaagtgagacgacgaggactaattctgtctttaatttcattcgacaatattaaaatagagtatataggttttttttcatgtgcttagtttgatgagtgagttcatgtatatgtacatatataaaaatatgtgaaatactgatctttagcctagagagacggaaaagatcttttactttcttgtagtataaaataaaaatcctgactgtccaaaagtaaataattttctt

SEQ ID NO: 28905 - DNA, 248 bp, Glycine max
ctcgagccgttttcttagatatggaaacttgcagcgtactggaaattggaaattaggatctcggtgggatttggttcaattgtctgcaactcattttgttgtggaggtatgatattttttagaatgggcgaatttggataccttcacagtacatctgttctaatacttttagcatgtaaatgtccatgggtgctagattgggaaccaaggaggtcatggattgctattttagagctggattgtgtata

SEQ ID NO: 28906 - DNA, 309 bp, Glycine max
gagatgctagaatgaggctcatgaaacatgatgtcaatcttggaaggagtgtcttttgggatatgaagaatcgtcttcctcgaagcatcacaactttggagtgggagaactgttttgtttctgtttacagcaaggataatccttacttgctttttagcatgtgtggatttgaagtaaggatacttcctaaaattagaatgactcaagaagcattcagtaacacaagagatggtgtctggaatctccagaatgaacagacgaaagatcggacagctgttgctttgatcacgagttgatgatgtacacatg

SEQ ID NO: 28907 - DNA, 445 bp, Glycine max
cgaaaaatgggtaaaagcaaccccaaaattcttgcgtgtccgaaacctctgaaagaaattgcaatctaatcaaagccagagtgaatgctgttgaacgctgtctgaattttttgagctaaataaaagaagaaaaacagggtgagagagaaacagagtgagagagaaacagaggatcttcatatgaagagtgaagtgagttggagaataaagattcaacaacctgggaaagccgggagagtttttcttggagggaattttggactgcatccatgaaatcacaacagctcttgcttttgctgataggatgagcgattctgcatacagagtccaaaccacaccgcgccttgctcaatggagaatcgaaaacttggcttcttgcacttaccgcaaatcagatcctttcaagatcggaaactggaattggcatttgtcggtggagaaaaac

SEQ ID NO: 28908 - DNA, 535 bp, Glycine max
caactggagagtggcaatggatgtgatctacccagctctggtgaggtctttacaatacctgttgccccaggagatgttgtcgttgctggaacagatggattgtttgacaatctgtacaatgatgaggtcactgaagttgttttacattcagttagagctggactagaaccccaagtaactgctcagaagatagcagtactggctcgtcaacgagcactggacaggaataggccgacaccattttctacggctgctcaagaggctgggttccgttattatggtggcaaacttgatgacataacagttgttgtgtcatacataaccggctcaacatgtgtgagtttttcgccatcttagctttgctacattttgtatattcatatttgtctacagggactgggttgccagccttgtctgtcatttttgacctgaatgcactactgcttcaaaattttatctcaaacttgaggtgcttacttgctatagtgatatatttgtatacaaaatcctgggccacgaagatgccttcatcttc

SEQ ID NO: 28909 - DNA, 261 bp, Glycine max
gttgcaagtgttgtttctgtaggccaagaagtgaaggtgaagctgattgaagtgaatacggaaactcagcgtatttctctctctatgcgtgaaaatgctgacactggtaagcagcgtaaagatgcacccaccaagacagagaaagctggacctgggaagaggaacaattcaaaacccagtccaaagaaagataatgtgacgaaaagcacaaaatttgccattgggcagcaactggttggttcagtgaagaatttggctagg

SEQ ID NO: 28910 - DNA, 272 bp, Glycine max
ctaaaccttcttcaataagaataataatattctctctttgttcctctctctaaaattaatggctgaagcacaaagtggccaagctagtgaagggattaaactgtttggaacaacgattacgttgcatggaagagaaagaaaagaagatagaaatgatagtgaagatgggacagaggagataaagagacctgataagatcataccatgcccaagatgcaagagcatggaaaccaagttttgctacttcaataactacaacgttaatcagccca

SEQ ID NO: 28911 - DNA, 665 bp, Glycine max
gctaaaaatatggcaatgcgctacaattgctatcgtgttctttttcgccccgctcgtctcgttcaaagccgcgcttgtgattatgcttgctctcctttgcttctcattctgcattttcctattgcttgctctgaaggtcgggaagacatcatcaccctccaccagtcagcgaatttaaaactgcttaaactgtagattttttgtatacaatctcagtctgtctttctcgcgtgtagcacgtccactctggactatgtctttatttttgtggtgaaatttcggtcagttgaatgagcttgtacaaattgtgacaaatcagtgtgtttggtaacacatttgttaccgctctggttggacgtggttccgccaagcaattaatagttgcttttgcattgttttttttacgtgaatttctcataaacatgaattcccaatggccaatactaaagcaaatacgcattataagttataagctcatttgtcacgtggctatatatagttattcactgaagaatattcctagaaatatgtcatatgagccaaattcagacacatttttgtaggttctaaaatctgtttcggatcaatatatgtaacctggagaggatgtctcgggtatgatgtgaaaaatccttttgacctttgttaacaaaaaaaaaaaagga

SEQ ID NO: 28912 - DNA, 503 bp, Glycine max
  unsure (1)..(503): unsure at all n locations
atttctcacttcaactttgaacttcttttctctattattattatctttctctttttcttcatctcttatcttccttcacctttttattgaaagaaaaaaaaaatgagcaacataagcatggtagaggcaaagctgccaccaggattcaggtttcatccaagagatgaagagcttgtgtgtgattacttgatgaagaaggtgcaacacaatgattcccttctcttgatagatgttgaccttaacaagtgtgagccatgggatattcctgaaacagcatgtgtgggagggaaggagtggtatttctacacacaaagagaccgtaagtatgcaacagggctacgcacaaatcgtgccactgcctcagggtattggaaggccacagggaaggacaggcctatcctccgcaagggcacccatgtagggatgaggaagactttggtgttctatcaaggaagggcacccaaagggagaanaactgagtgggtcatgcatgagtttcgtat

SEQ ID NO: 28913 - DNA, 339 bp, Glycine max
cctttttcatcttcttcctcctctcataccaccttcacttccatgaagccacaacatcaatatcaatgacaacaacagtttccaccgatttcctcccccagttcaacccccaccccaaccgcaccaattcccattctaattcccgtacactcccaattctcaatgaaaccaccaacatcaaccgcactctctcttccgtttccaagccccaaacccataccctcgatttcaaagacacccatctcctcaaatccctctcccgatcctgcaaagccggcaacttcaacgagtccctctacttgctgcgccacctcgtcaacaagggccacaaacccgacg

SEQ ID NO: 28914 - DNA, 278 bp, Glycine max
aaaaaattacataatagttgtttatgatataagcaaatttatatatgaacatgtcaacaatgaacgactgttctttacatgggaaaaacactaaatcatactgattggggaatggatattttgtgtcaaaaccgtattatacagatagatactaaccacatgtatccaaaatattcacgcataaaaaactttagtatgccctttttatcaattgtgttaataaaggttctctgcccctttgctacaataaatgtatgttcaggtaaggatgtgtttta

SEQ ID NO: 28915 - DNA, 322 bp, Glycine max
gtttactcatttctgtctacttctcatccatcatatgacatatgttccttcgatccccttctctattttcctttatcccattgtccgaattcacgttctttttcgtcccaatccttaagctttaagctctaaactggatccaccccacccacatacccagtcttcccttttttgaggtaaacgctatgctatattactcaatataaaatattcattcattcttgcgtgtgcgtgtgtgttgcgataatgacgactcaaattcgataattcccaattgttttttatttcaaatgtaaacgcaaaatgaatacccattttcccc

SEQ ID NO: 28916 - DNA, 406 bp, Glycine max
cagaactgaatattaatcttatatattcctcaacaatttcagcatcagaattttatcaaaatggaaggacaaacaagtgattcattaagtaaacaacaatgtttggagacaacattaaccaacgagcttcaaaatgtggaacctccagaaatgtatggattccatatgcactgcgtttatagagtaccaccagccattcgtgaaaataatcccaaagcctacacacctcaaatggtttcaattggcccttttcacaaagcacgtgacgctggaaaggaagacagcatttttgagtcaatggaagatcttaaagtgaactatctcaaggcatttctaaatcgaacccaagtacctgtgggaacctttgttgacacacttcaaaagttggaagacgaaattcgaaggt

SEQ ID NO: 28917 - DNA, 250 bp, Glycine max
aaaataaccaattttttcatttaagcttattttggtaaaaaaaaagccaaactgccaaactagagtgatgcagaggtagaaaaaaaggtgccaaccatttccaaatctcctacaccaaagttgagtgcttgtgttcactcacacccacaaccccaacaacaacaacaacaacacaagagtctcaaaattcagcctatataaagcccaattccccccatggagcctccccaaacttgattccacacaacat

SEQ ID NO: 28918 - DNA, 280 bp, Glycine max
attttattattgtcctaaactccaaagtctttcacaatgggagttgtcaaaggcatctgtgaagatcatcataggagaaagcgtgtggtgggaagcattgaaatggaatgcagcagagtggggagatgctggtcgacccaatgtttttgaacgaattttttcaccaatcagtgaggaggctgacatcatgactcaactggctgcacatcaagagactcaattaagtacagatcacgatgagtttctgggaaccaaacaaaggcatgatgatagtaagtta

SEQ ID NO: 28919 - DNA, 259 bp, Glycine max
ttcttgatcagatttttcgttgctgagatacgcgcgttttagggatgtaaagttaagaaggagcgaaattattcagttcttaacaaattgtcgctcacacccgcgtttcactcctctaaaaaaatttgatttcagtctacccggtgattccagcaaaaagttggaaccatggagtagaagtagttggaacaaatcttatggatgaacttccagtggcaagtcacgctacgactaccttaacactaccttagcctagcgc

SEQ ID NO: 28920 - DNA, 231 bp, Glycine max
cgtttctatgaataaataaataatcctactatggaccaactagaccgagcgcacgattttcatgaattctatgggtgatttactctggaggaagctaatgctgcatcccaccctactgtaccagctgacacggacatcatctcacgcgtgcttgctgtatatccaattcttcatactattccttcattgtccaaacacagcttgtggacgtaaccctccaactatgcccat

SEQ ID NO: 28921 - DNA, 444 bp, Glycine max
ggggtttcttcgctgactgaatccgaaaggcggagttttaaggatgagatagagaagcttaaacatgaaaaagaacgacttcttcgggagttagagaggcatgaacaggagtggaaaatgtacgaggtacaattacaacactccaatgatcgtttggaaaagttggaaaagaagcaagaaagtttggtttcttctgtctctcaagtgttgcagaaacctgggattgccttgaatctcttactgctgacagaaaacatggatagaaaaaggaggttgccaagaagtggtctctttagtgatgacgctggcattgaagatcatatggaaacttccccagtattaccaagggaaaatgcagatggttcctctattttctcatcgagcacagagcgattggatctgctcgagtcatccatgacgttttgggaggatattacacatgat

SEQ ID NO: 28922 - DNA, 251 bp, Glycine max
atctcgagccgattcggctcaggttttatacttctcaaccttctccctcacacgctcaccccccttactcgaaacgctcgcaacggtgtcgtttagcgaatcttcctcgaaaccgggatctaattcccccaccttgaaatcctccgtcatcacgccgttaccgtccaacacccccatcctccccaccggcggtaacggcggcacgcggaatattttcactcccggcggcggaggagacggtggaggcggcg

SEQ ID NO: 28923 - DNA, 399 bp, Glycine max
ggctaccagagtcttcagaccactgtgattccatttttgtatgagagcatgtttaggctagaagtccagattagaacagaagaaatggatttgatagctgagaggggcattgctgctcattatagtgggagagaatttgtcacaggcttggttggaagtgcaacaccaagtagtaaaagctcaagagggaagacagtttgtctgaacaacgccaatattgccctcagaattggctggctcaatgcaattagagagtggcaagaagagtttgttggcaacatgagttctagggaatttgtcgacactattacaagagatctgctgggcagacgtgtctttgtgttcacaccaaggggagagattaagaatctttctcagggtgctactgtcattgactac

SEQ ID NO: 28924 - DNA, 534 bp, Glycine max
gatctttgtcctctacttgctctttctattattctcaacggcattcaacctgtctaatctggggtggctgttggatgtggatggcaaacttttgttgcgtatgtgaacgttggttgttattatggaattggcataccattgggttcggttctcggtttctatttcaaactcagtgctaagggaatatggttgggaatgctaggtggcacggttttgcaaacaattattttagtgtgggtcacatttggaacggattggaataaagaggttgaagaagcagcaaagaggttgaacaagtgggaggacaaaacggagccacctgtcaataactgaggctctttgtttctcaatgtagcctagcccacaattatacaataacacaaatcgggctttagatctcatagctttttgttgtaaataaattgtaagatgaggccaaattcataatttcactaccagcttgttggtctaacccgactcgtttgcgtagtgttagctacgttgtgttcacatgttgggagaacaaacatgtta

SEQ ID NO: 28925 - DNA, 550 bp, Glycine max
ctttattcaaagggcctttacagtattcttattgtgggattggttgagcctatccagggaaatgcatatgcaaggttgtgtaaaagacctgattgtggagctgctcttggtatggatgacggcctgtcttccctcttactggatcttccatcagtaacaggggcatttatgatagcgcatgccattggtgacataattactggcgacacagtagaacctgaagtgattgtaagtgcagctccctctgttggagggctgtttgattcactcactggtagtataggcatctcttccagggcaaaacctgtggccccacctgttgcttcttcctccccttctagtgcagctgtaccaggatcagttacagcagatgctccaaaaatggggtctaggttattggataaagatgcactcagaacatttatcagtagttcaatgccctttggcacaccctcggaccttaattattccaatattattaccataaagaccaacggcttttcggcaacagatttgcctcctgcggaccagaagcagccagcttggaaac

SEQ ID NO: 28926 - DNA, 416 bp, Glycine max
gtcaagataccagtgatctacatgagaaagtcgattttgtggcatgcttgggtggagatggcgttatactgcatgcgtcaaatctattcagagatgctgttccccctattgtgtcatttaaccttggctcccttggttttctgacttctcatgattttgaagattacaagcaagacctacgacaagtcatccatggaaataatacacgagatggtgtgtatattactcttagaatgcgcctccgatgtgaaatttttcgtaaaggtaaagcaatgccagggaaagtatttgacatcccaatgaggttgttgttgatcggggttctaatccatacctttcaaagattgaatgctatgaacatgatcgacttataaccaaagtacaaggtgatggagtcattgtggccacccctacag

SEQ ID NO: 28927 - DNA, 485 bp, Glycine max
gcaagtggaaccattgagtccaacacatcaagtgctgggactcaattggtgtttgataggtcaggagatgtgtatattttgagagacaacaaagaaaagtataacttgtcagatgggggttctatttccaccactcaattttaccttagagcaactcttgattttgatggggtgttcacactctatcaacatccaaagggttcttctgggagtgtaggttggaccccagtgtggtctcatccagataatatatgtaaggattatctttctgctacaagtagtggcgtttgtggatataatagcatttgcagtttgggagattataagaggccaatttgtaagtgtccaaaatggtactcactggttgatcctaatgatcctaatggtagctgcaaaccggattttgtacaatcatgttcagaagatgaacttagtcatatagatcctctctttgactaagttcatcttctgaacatgattgtaca

SEQ ID NO: 28928 - DNA, 276 bp, Glycine max
tgtttctttctttctccctccctctctcaaatctcatcaatttcacatatattattataggcacattcacgattaatattggcatagacaatattaattacttacacaccaccatgctaaggtgtttttaaatttggtagaagggcttatttatcattactttaaacacatgcactacttaaggaatcagtaataaaataacattttttaaaaacattcattaggaatgtattaaaaatcacaatgacaatgcattaataacattttcaatgaaac

SEQ ID NO: 28929 - DNA, 498 bp, Glycine max
cttcagtccaaagctgaatagcagttatgccccagatgctggagcagagaagttagcggactcaaagtcagctccagccagcccagctccaagtgatcaaattgctaaaccagctccttctaacagtggcatcagtgttcagtcagcaggtaaactttattcctacaaagaagtagccttagccccacctgggacaattgtgaaggtagtggctgaacagtcgccgaaaggaaatcctattcaactaaattctgaggtgagtgccatgatagttgcaacaaaggagactcaaaatatcatcatggcaacaacaaatgatgtggaagattattctcagaaatcaattgatgtgaaacagcaaagccctgtccatcaagaacaagaagaaaaggaaaccactgtggtgaaagataatacagaaacagtaaatagtaaggccaaagatgaggcttttgaagttaaactccaggaagctaacaatgttgccatactagagaa

SEQ ID NO: 28930 - DNA, 255 bp, Glycine max
gagaggcttatggagagggagagattgcaaatccaggtcattcgccagctcgatctcgaggacctcgaagtcgaagaagtcgatcactccgacgaagacgacaccgacgacgaacccgacgaggagtatgcgcttttcccttcgcaatacaattcggatacttctcctcctcctccctcatccgccgaattcaatttcgatacctatattgcgccttcgcacacctatctcggtgatgtcgaagaacgcgccaca

SEQ ID NO: 28931 - DNA, 802 bp, Glycine max
ccctttcgtccggaattgtttactttgcggatgatgataatgtgtattctctcgagttgtttgacgccttgagagatatcagccgctttggcacttggcctgttgccatgcttgcgccaagcaaaaacaaggccattttggagggtcctgtatgcaatgcaagccaagtgattggatggcatacaaatgagaaaagtaaaagacttcgtagattccatgttgatatgtctggatttgcattcaacagcacaatcttgtgggatccaaaacgatggcgacgcccttcttcaaatcccgtacgacagttagacacagtgaaggagggttttcaagagaccacctttatagaacaattggtggaagatgaaagtcaaatggaaggttcacctcctggttgttcaaaaatattgaattggcatctccatttggctgctaataatatagtttacccaaaaggttgggtgcttcagaaaaacctagatgctgtcatacctgtcaagtaatcctccaccaattttattgtgtgtgatagtttgcccatatttggtattggttcatcactgaatagatggatgcatgagttagccaccattggcactaatgcattgtgttggcggacaagacaggaacaggttattgattttgttcccaaagtctcttgcacaaaaatatttgcaagggaaaatttttgctgttgtatagtatgctgccttatttctttgagagaaatagatccttctagaagaacaaaaaaccgggttaatcaacttgtttgattttcaacattatatacagttatgta

SEQ ID NO: 28932 - DNA, 275 bp, Glycine max
tccaattctctacacttcactattccttatttttggcgaagtcgtattgactattgaagatggccattgacgacctctgcggcgattctcaagctgaaactccgctgctatcggagacgctatacggcgtcgtcaacttcaagggcctccccgtcctacgatctacctctggtggttggaaagctgctgccttcattataactgtggaagtggctgagagatttgcttactatggaatcaactcgaacctgataaattatttgacggggccactt

SEQ ID NO: 28933 - DNA, 315 bp, Glycine max
tctctcttcacctttcagtgttttttttctctctctctcctctgtctccccgccggagcccactttcgtcgccggtgtttcctttctgaagctgctcttccgttgcgagccaccgcgacccttttgagagccctgttcaacaagctcgaaagtccggtttttttcccgattcgggaaaactggtttggtctttgacttggaaccgtgagtggagttgaagggattttttttgggttctgcgaagaggtgcggatccaggaaggttctagagagagaatacgaagtgggctttgttggttttttagagagagagag

SEQ ID NO: 28934 - DNA, 259 bp, Glycine max
ggaccgcacaatattattaaaacttaaacttcatatttatttaaacactgcacaccaaattagagcaagctagaatcagttacaagtatcctatagttaaaattgaacttgttttgcagagccatggacccgaaatagtaaagaagctaggaagctctcttctggtgccttctgtgcaggaattagcaaagcaaggcatcaccaaagtcccagaacgatatgttcgacccaatgaagacccatgtgttgaatatgacac

SEQ ID NO: 28935 - DNA, 676 bp, Glycine max
  unsure (1)..(676): unsure at all n locations
cttggagttggagttgtaagcgttttatcaatttttgcaattttctgtatcattcggagaagaagacgtcgtgatgatgataaagagcttctaggaattgatactaagccctacactttcagctattctgagttaaagaatgctacaaatgattttaatcttgaaaataagctcggagaggcaggttttggacctgtttataagggcacacttaatgatggaagagtcattgctgtgaaacaactatctgtgggatcccatcaaggaaagagccaattcataactgagattgctactatatcagctgtgcaacatcgtaatctggtcaaattatatggatgttgcattgaggggagtaaaagactgcttgtctatgaatatctagaaaataagagtcttgatcaagcattgtttggaaaatgtttaaccctcaattggtccacacgctatgatatatgcttgggtgttgctagaggtttaacttatttacatgaagagtcacgtcttcgcattgtacaccgtgatgtgaaagccagtaatattttgcttgattacgagcttattccgaaaatatctgactttggtttggccaaattatatgatgataaaaagacccatataagtaccggtgtggcggngacaattggatatcttgcaccggagtatgccatgcgtg

SEQ ID NO: 28936 - DNA, 381 bp, Glycine max
gtggttttaaatatgctcctagtgtggtagtgctcaaagtgttggccaccgccagaaagccaacacggttgcgcttgttaataccttattgcagtgtgagggggcaacacgaccatgggaaaggatatttttctgccactaattcacaaataccacggcaacatatattgaaattcgccgcggatcgaatgcttgcgtttctcaaagattggagtaatttacgcatcacggcagtagctggcatattggtatccgtttaatgatcattccaccagctgatgctgttgacgctctcaaaacttgtgcttgcttgttgaaggattgcaggatagaactggctaagtgtctttcaaacccatcttgtgcggccaatattgcttg

SEQ ID NO: 28937 - DNA, 422 bp, Glycine max
ccccatctagccctattgctggaactgggccagtagcacaaccaccacgaaatgcacagactaaggtcgctgtctgcttctttatgtccactctgtctctgcttgtagcttctcttctactttgagtggtgcaggtctcccatttcccactaaatagaaagaagaaaaattgataagaaaaagggttggttatgctggctttagctctctagttccccatttctttctgggttaagtagaacaaagcttctggcttcagactgcttgaataatccttatttcttacttgcagaagtaaattgtttccattcactgttgtagcttgctacgtatattcccccttctccaatctctttctgttgctgctgtaactattacgggtacatatcttatatctgaaatgttttatagatgagtttttt

SEQ ID NO: 28938 - DNA, 394 bp, Glycine max
actcgaagtaaatgagataaggctgaaagatgcttccaagctgagggaaaatgaggcatatggaagcgatcaaaatagaaagaaatttaaagatgtttatggagaaggaaatagacttcaagaagcaggtgacaacaaagggattcagaaagttatgaatcaaaccccaatgcaagaacagattaatgggatgttgaatgaggctcaaaggaaaaaagtcactgagggaacatcaagccaaacattagcaatggaaggaagtgtagatgtatcaaatgagaatagtcacctggagcaatctgagaatatggagcaagatgtaggtggaatggaaaaagataagggattgaacaaagcttttgtcatggagaggaatgaagaagagggatacatg

SEQ ID NO: 28939 - DNA, 500 bp, Glycine max
gattcaggtactgcgtttcggaagcaggtaccaaagtagtccttcgaggtttagtgatctgttttgcgcttttgaaaatttgaatatatgattctgcttctagttcgaaacttgtcttaagcatggtttagggtttgagcatagtttagggtttgagcatgattaaatcgattttcacttatcttctatagtttctgctgatttccaaatcttgtatcttagataggccagttgaatttttattcttccctagtcataacgctctgatttccaaatcgatgttttgttatggagaattagtcgatagtttcatctggccaacgtatcatatgtctttaatttattaattaaactcagattatgcataaatataaatatataaagttttgaagattaggttatgcaatagaaaggggcaaggaaggttctattgttgtttgtttggaattgatggttctgaaattactttttgggcgtagacacagatggctcgtacgaag

SEQ ID NO: 28940 - DNA, 412 bp, Glycine max
ggctcgagactgactaggccttgatcatgatctacatgcttacatgattacccacatgtggagaaagaggagatcctttgttattattttcttattcttttgggatttgcgttggtctcttaatggttattttagttgtatagaaacaaagtaaaactattaattactaagttgcagtataaaatatgttggttttgtagagattcgtatttcaggtttgttttctggtggacttggccaagtgaataaaaaatgtgtcaaatatgtcctatttcttattcccttttaccatttcaagttgcttagagatatgtgtttttctttttttagttttttagtgaaagaaattggaaccaacgacttctccttcactccttctgccttcaaccactgaaccaaccttataacttag

SEQ ID NO: 28941 - DNA, 438 bp, Glycine max
caagcgtgaatagtgaagatcaggatcttggtaggccaatgagaagaagcagcatggaaataaaaacatcctacactcattcattgggcctcacaagctgcactgagtcaaaggcaagcggttgggctagtgaaagtcttaaccaataccttgaaagaatatgctggaaaaggagtttaggaaacaagcatctttcccccttctgtgtgcacaagagggaactttacttcccatttgatgaagcgagtatgtatcaagagtatcatcaaaggaaacatcatttagttgcaactaacagaataaaattctgcttggatgcttctccaaaacgcaagcttacttctaaagagttcaagagagggacattttctccctgcagttgggattcaaatcagatgtgggagttgaaccctaatgggaccctggtgaatagttatt

SEQ ID NO: 28942 - DNA, 368 bp, Glycine max
attcaatccaactccaactcactcagatcatcaatcatgctatattgtcatcagtcatcttaattaccattaaggtgtggttagatcattcacattcaccctttgttcttttggtctaccctgtaaatggaggaggagaaacagagaggcaaagggcacagactattgctgatgccatcaccattacaaggccacataacaccatttctccacctcggtgacatcctcttctcaaagggcttctccatcaccattctccacaccatcttcaactccccaaacccttcttcctaccctcacttcaccttccacgccatccccgacggcttatcagacacagaagcttcaacactcgacgccgtgctcct

SEQ ID NO: 28943 - DNA, 370 bp, Glycine max
ttcgtccttcaccataatttgcatgaaatcaaacagtgattcctgctaatagtgacaagcagtaaattcatactgaaactaggaggttcattgttgaaggtggaagatgagatgttttccacgaagaaaaaccaacatcaacaatgaaagaaattatacaatgatcaacagcacaaaagaagctgattttccactaaaacaagaaggtcttttatcaggtgatcatgaaaaggctaaggctccattgacctcatcatcatcatcacaatggctaaaactgaaggatccaaggattgttcgtgtgtctcgagccttccgaggaaaagacaggcacagcaaggtgtgcacaataagagggctaagagataga

SEQ ID NO: 28944 - DNA, 253 bp, Glycine max
tggaatccctgagccaaatgcagactctagtaagagagaattcgattaacaaggattggattttcagagcagagcttactgacattgtgatctctatccttgggagctctgatgacagagtagtgaagatgaagattttgataactttgaaggatgctgtagaggggattacaggaaactaggagaaagtggctgaatctcaaggaggggataacattatttcctgcttagggagtgactctagcacttcaaa

SEQ ID NO: 28945 - DNA, 588 bp, Glycine max
cgcatagttaaggaagctctggatgttgtccacattagcaaaggagaccaggagaatgtatttgcaatgcttgctgcagtattatggttaggaaacatatcatttactgtggtagataatgaaaatcatgttcaagctgttgaggatgaggggctgttcactgttgccaagttaattggctgtgaaattgaagacctgaagttgactttatcaactcgcaaaatgaaagttggtaatgatattattgtccagaagttgactctatctcaggctattgatgcgagagatgctttggcgaagtcaatatatgcttgtctgtttgattggttggttgaacaaataaaccaatccctcgcggttggcaaaagacgaactggcagatcaatcagcattctagatatttatggctttgagtcattcaataggaacagtcttgagcagttctgcataaattatgctaatgagagattacaacaacacttcaatcgtcagttattcaagttagaccaggaggaatatatccaagatggaattgattgggctaaagttgaatttgatgacaatcacgattgccttaatctttttgga

SEQ ID NO: 28946 - DNA, 431 bp, Glycine max
ctctccccgtaaatcaacacccttttactaagagcactgcattcctactcggcaacgaggtacgcctctttctcttactcttttgcttcaatttctaattccactctttactcttctactctcactttttaatttctctgtagggcactggtctttctcctaaggaaattgagatatgcgactttttcgtctatatccctcaatatggcggtggcactgcttccttgaatgttactgtagctgcttccattgttctccatcatttcggagtttgggcaggttttactgagagatctcgtgatggaaataatttgttgtggctgagagacccgtaaaacagggtggacgtaattactgcactgaaacagaggattctatcattgaagagcggaaagctagaagagaaaatgctgccaatggtttctttgatg

SEQ ID NO: 28947 - DNA, 487 bp, Glycine max
ctgaaaaggatgtttctgtagtaatggaacggattcggagaactgttgatgccacaaatggacatggttgatgtgggtggggtcaattagttatgcaaatttagttggtttattgattctttattcttttggagaagccagcatcatcctaggaggaataatcaatcaccaaggggtagttggatgacatggacatggtgttatgcaatggagtggcttcaaaatgattggtggtgaattttaattttaaaacctacgcatcaagacttaaaattttcaatgtgtagtcggaacctggtagatgatttctactttcttcaaattagtactgaaatggcttcaggtgcaatcatttgaaaaacagtgaaatactaatgacctgaagaagaggtggcaccactgatgctatcaagttaagccgcttacaatgagaaaagtgtatgaaaagaaaggaaatataaaaagaaaaaactccttgcaagaactc

SEQ ID NO: 28948 - DNA, 696 bp, Glycine max
gggtggtgtagtatgtatgagtttgaggaagaagaatgagaagaaagagcaggggcaaacgtaggcgtgcggcatctgcaacaactctgagtccttcttccctctccgccattcccattctttgggatgcgtatgataccatctgcattcactgcaatatctcaggcgaggaggccaaggaggatggactttcgatttgcaacggaaggggctgacccgtcgctgtccatgccacctgccttgtcaccggacctaaatttgacggttccggtaacttctgctgcccctactgctggtacaagcgcgccgttgacacgtgtcgacgcctcagggagaaggccctggaagccaagggagacttgtcacgctttctggacaatcacgaccacgcacgtgcggctgcacatgtggatctggttgttcaggatagtgaagaactcatggaggaaacaggaacacaagcacagtctaaagataataaagatgaggagggagaggcacgtgtgaatcaggttcatgatagggaagaaactgagacagaaccagaagggaataaagaaaaggagggaaaggttcgggataatgaagaactcgtggaagaaagagaaagaaaaacagtgacagaagcacaatctcaagagaataaagctgaggaggataagtttcaagatgatagtgaagaactcgtggtggaaa

SEQ ID NO: 28949 - DNA, 426 bp, Glycine max
cttccaacctcttcaacactccagacccctccttcaacctcacactccaaacccacctctcattccctagagtaagaccctcccctccatttctcattattcattaacgccgataaagcaaaaaatacacccttcacaagttcacataaacacacccgaagagaaaaagaaataaagagagagagagagtcgggtagggttttgttctttgttactcgtttccttccaaattagggtttccctttttgattcaccaaacttctcccgattcgaattcgccgagtagggttttgttgttccgcgtctcgctttcgtgatgccacacagttcaaagcacaaatcgagcaagcacagttcacgtgacgcgagggagcactccgactccgagcgagattccggcgccaaggatcggaggagcaaggagga

SEQ ID NO: 28950 - DNA, 373 bp, Glycine max
atgacattgtagcagctgctgtgttgtctgggaatcgtaattttgagggccgagtacatgcattgacaagagctaactaccttgcctctcctcctctagttgttgcttatgctcttgctggcacggttgacattgactttgagaaggagccaattgggacagggaaggatggaaagaatgtctacttgagggatatttggccatctactgaagaaattgctaaggttgtccaatccagtgtgttgcctgagatgtttcgaagtacatatgaggctattaccaaagggaacccaatgtggaatcaactacaagttcctgctgacactctatactcatgggaccctgactcaacatatatccatgaaccccctta

SEQ ID NO: 28951 - DNA, 166 bp, Glycine max
ctaaactttggaacccagatgatgtcttcggattctgttcttcctctccccgaaaatcccatcattgtggggtttggtggggttggagtggattttctggcagtagtgccatcttttcctaaacctgattccaagattcgaaccactgaattcacgttccaaggtg

SEQ ID NO: 28952 - DNA, 244 bp, Glycine max
gcccaggtcatcgtcctcaaccaccctggtcaggtcggtgccggttacgcaccagtcctcgattgccacactgcccacattgcttgcaagttctccgagctcctcgagaagatcgaccgccgtaccgtgaaagtctgttgagctctctcccaagttcatcaagtctggtgacgctgccatcgtcaagatggttccctccaagcccatgtgcgttgaggctttcactgactacccccctcttggt

SEQ ID NO: 28953 - DNA, 275 bp, Glycine max
gggtttgggctcgaggttgtaagtcatgtcaacattttcgatcgttttgatcaattttgattgagtcatacaatgatgagtaagaattcgaagcggagatgttaaattttcaagttgagctgacatgtgacagtttggcagtgatatattgtttctagaatttatgcccaaatattgccctacagaagccttagttatggataccctccactctcagagatacgaattgttggagatgagcactcttctttttcgatctcacattcatcgatcgc

SEQ ID NO: 28954 - DNA, 558 bp, Glycine max
cctgcctgccatttttatttttatttcttaaccatttatttatttaattagtgcttccccctcctccattctcattctccctgcatcacatacacacatcaccctctctctccttttgacctaaatcatcttctgctgattccgcgcatttttctgtgccgaattgctcccaaattgtactcacctttcgagactcaatggtgctttgaattacttttttttttaattgttattgacgtcagtctaattcgttgattttctggcggtgaattgttgtcgatcaagaggtttcggttaacagtgctcgtgattttggtactattgcaattaggagtgattgcgattgcgaaggtgcactgcatgttcgattgttgaggagtgggggtcctctgttccgaggattcccgtcgctggttgttcagattcgaagttggctctaaattttcgttggggaaatgtttgcttcggttgcggatggggcatttgaggggagtggagtttcaggaccctttttgattccacagcgctttgtttggccttatgggggaacaacggtgt

SEQ ID NO: 28955 - DNA, 598 bp, Glycine max
  unsure (1)..(598): unsure at all n locations
cctattcacaaactagaaagaggagaaaaggcataacaagagagagatggattctctgaagatgttgaaaggttatggtaaagtagaacaccacctcgaagatcatcgtaaccccaaacccaaacctaaattctcaaaacccttcatcgccgcaatttccgtcttcgcaatcctcttccttactctcaccttcgcattcgccctagcatccatgctccaccacagtcaccacaccgagtcacaacaacaacttctcaactcggccgagtcgatccgagtcgtctgcaacgtcactcgcttccctggcgcgtgcctcgccgccatcccgccctccgccaacgccacaaacccccaagcgatcctctccctctccctccgcgcgtcgctccacgcgctccagagcctcaattcctcgctaggaacgaagaattcacgcgcgctcgccgactgcagggaccagctggacgacgcgctgggtcgactcaacgacgcgctgtcggccgcggcggcgctgacggaggcgaagatctncgacgttcagacgtgggtgagcgcggcgatcaccgaccaacanacgtgcctcgactgattgtaagag

SEQ ID NO: 28956 - DNA, 476 bp, Glycine max
ggttccaaatcctctggcacacttctatctattcttccatcaataggttccattgttggatctactgacttaaggaattattccaaaaactccaccatgcctactcagcttacgattttctatgctggttctgtgtgtgtttatgatgacatttctcctgagaaggccaaggctatcatgtgaatggccggaaacggttatactccaactgagaatacggaacttcccacggtgaaattacagccagcaatttctattccctccaaagatgatggtttcatgataagccaatcctatccaccctcaacctttcccacccctctcccattgacctctcatgtcaattctcagccaggaggaggatcttctagcaacaaagaaatttcaataataagacaagtaggaccttcaactgctcctactaaccatttgggatcacccattattggttctataggatctgcatctaaagaaaa

SEQ ID NO: 28957 - DNA, 530 bp, Glycine max
atcgattgtagtagtatttaaaaagaaagcaagagagagaagagattgttgaagctgggatgctttcggctaagcttgctgaaactggcctcgtctatgctgtattgggcagttaggcgaattcaaagatctttgaacacctccttctttattacctttttccaacacctacctcttctttctctttctccctctcacacactcgtcctaggcttgattttcccttccttctcccaatactcctccattattttattcgaaacaccaaaccaacactctagcttcgttacttgcccttttctctgcccagctacatgcttgtgtaagaactaataagccagctgaagaatgtgggatctgaatgactcccccgatcagagaaaggactacgagtctgaaggctgttcttcttctctgtatgatgataaaggcaagagggtggcatctgtttccaattcaagctcctctgcggtggtcgttgaagatggatcggaagaagaagacagtgaaagaggtggaagcagaacatt

SEQ ID NO: 28958 - DNA, 252 bp, Glycine max
caaaagggggaaatagttatgaaaggcgaagtgcgttattttgagttgacgcagcttattttgctagtcctattgccaagctataacgttcttccttctcctcaagtctgaagggcagccagtccatgatcatcccataatagctcgccttgaagagatcaagaaattattggatcagatagaacaacttgacacaaaacttccatttgaacttgaggacattcttaaaggaaataatgggttagaaacagt

SEQ ID NO: 28959 - DNA, 452 bp, Glycine max
gttctaagaaaaaatagcttcaggtctggtattcctgctgaattgagttcatactatcagcttgagcgattggatatttcatcaaattcatttgtggggccttttcagccaggattgttgtcacttccttctattacttatctgaatatttctgggaacaaattaaccgggatgcttttcgagaatctttcttgcaattctgagcttgatgtagtggatttatcctcaaatcttttgactgggagcttacctagatgtttagtgtcaaattccagcgatagcactgtcctgtatgctagaaattgtctagacaccgtgaatcaaaatcagcagccgcagcccttttgccacactgaagctttacctgtgggaatattacctgagagaaagaagcacaaacaagtatctacggtagttctttcccttggcatagtaggggggactcttggagg

SEQ ID NO: 28960 - DNA, 378 bp, Glycine max
gcaaaatggagaccctgtcgagagactcaagacagaatctgttgaaatggcttcaaaccaagattgcagtgctaatattcatggttcttcctctgtatgcattgataatctggatgcatcagagacctcaacatcttttgtggttcagcttggaagaaatgaagctgataacaaagatgcttgtatgagatattgggactttgagaaatggatgcgaaaggaatgtctaaatttctcagtactttctgcaatgaagtttgggaagaagtggtgccaccaactgcagtccatatgtgatttgtgccttcatgcctatttctctgggggagctccatgctcttcctgctgtagaaccttcagtgcttgtaagagcaaccc

SEQ ID NO: 28961 - DNA, 243 bp, Glycine max
ggaggcagcagaagaggcaagttgaaggagtaatggttgagtgcgatgaaaacgttaacgaagcagcaatgtcaatgtccatggaccctcgcgcgaggcacgcacaagccataacatcacacatcaaagaccgcgcagtgtggaacaacctcataacccactactccaaatccgacctttcttcctacgccgtttctctcttccagcgactcccttttcctcccaacgttgtctcctggaccg

SEQ ID NO: 28962 - DNA, 469 bp, Glycine max
tgaagaccttcaatctcagtcgtggaatactatattgcaagataaaggtttgagtattaaggattcgattccagaggcaaatgttgtcggttctcgtgtgtccatctcatgagttggccacaccctttcagtgccttcacttcccaaacacagattatagcctgaaatgttcaccgaaactgcaattgggaagcactccctcccaacgcaaccctttcaagtgcttttgcaataggaaagaacacgtcacacccttttctcagggattctcagagttgcaagaggatgatagtccatgggagagtgggaacgtgtggagcaatcttgcactctatttattcactctgcatatcccttttagctttggaggcttatccgtggttgctctatttaatggacaacctgttcttgacccacaaactgaggccttatcactttttaccattcaaattctcgagtttggtggggc

SEQ ID NO: 28963 - DNA, 373 bp, Glycine max
acaaaattgaacaggagctggaaaagttatcacaaaagtttggggaaaatgttctggatgcaacaaagaagtttgaaaagctaatcactgataagacggaaattgaaggattacctgctactgctcttgggttggctgcacagagtgcagtatccaaggggcatgaaaatgccaccgctgagaatgggccatggataattacattagatgctcctagttttattgctgttatgcaacatgctcgcaaccgttctttgcgtgaagaaatctaccgtgcatatgtatcacgtgcatctagtggagatttggataatacaggaataattgatcaaattttaaagctaaggttggaaaaggccaagcttctaaacta

SEQ ID NO: 28964 - DNA, 1425 bp, Glycine max
acgggattgttcaggaacaaacactcgaggaagagaaatcagcagcaatagataacaatagtggcagaccagaaaataaacttgagggaatggctaatgttgttgagacaattgatcaacatgaatccatggccaaggtcagcactgaaaatgaagaacatgccaaccgccattctgaacagtctagcatggagaatgtaattacaaagcatatcaattcagaaggaatggtaacaacagaaaacagtacaaaatcaagttataatgtggaagaactggaaaaggttctagactcaaactccatagaaaattcagaaatgaaggatggtagaaaaatcttgtcagaggaagcatctaatatgaaagaagccactgatgcacctgaggataaagccatctcaactttgcctgagatagttgaggaaagcattcaagaagtaatacaaaaggaagctgaatcagaagtgatcgataccaaagaggagcagagaccaggaaatgattttgtaaagaacatggaagttctcgagggatttgatttacacaaagcgcaaggcaacaccactctggaaaatgaaatgaaagcagaagtccagtctgaagcaaagagccgggagatcattatcgagcatcaaaatttgctggagactgcagaaataagtccaagaaatgatactaaagaacctgaaaaggaacataaagtcaccacaggtatctctgaatcagtatctgcagataccacagagcaaacagacacaggaaaaccggaaactccagaggccgaaatcactcaaccaggcatcacaaaagaagacgaagcaggagacgaattcgaaaaaataagcccatcatctagtgtgagtgtgatatccagagactctcaagacaccgacacgaaagtttcacacaaaaaatctcatggcatcctatcaggtgtagggtcaaaggtgaagcattcaatttccaaagtgaagaaggccattacaggcaagtcttcacaccccaagacaccaccatcatcaaaataaaaaaaaagtgacccattagacaactacatacatgctgcttttgtaaatagatagaatacacagatgcttgagctttttggagggcttgtttcttttgttgaggaattggattgatttgtttcattgatgtattgcttggtttgttatgaaaatttatcttaaggggggtctattattctcctaactcagtgtaatgtattcatattctctttgttttaatgaaattgttatagacataaaaaaaaaaaaaaaaaaaactcgagaccgagtttgaacgggtgaagacccgaattgcatccggatctcgcagaggcacccgtccgaaaagattggcctggcgctgaggactgaggtgatgctgaattgctgcccatcctgtaactcaacaaataatatt

SEQ ID NO: 28965 - DNA, 256 bp, Glycine max
gtgtaacttcgtctcagcatattgagaaaatagatgtgaattgtttttgtgcgtaagtgttagttttgtttttgtgaagcattttatatactgtggtatttgatagataaaaaccgtagatacatacaattttgcggatatagtacagatactgctggtggctaataggattctgttgttgaatattgctggaaacttttcatttgtttaatattgctgctacatgatgatgctgacagttagaagcatattctgt

SEQ ID NO: 28966 - DNA, 253 bp, Glycine max
gccactgaaacatttaattaattagaagagtatttgcaaacgccaaataagaaatgggagagttatgtttactcatagttataggtttccaccggcacacagttatcttaattatttgaaaaacatgacaaagaaataaggagaacggatttccctagccaatacctctagagggagtaaaatcctccaaagccttggcattccataaaactttcatggacccaaatattctctggaatgcccacatcatgca

SEQ ID NO: 28967 - DNA, 472 bp, Glycine max
tctcgagccgaatcggctcgagacagaagggggtttttaactgaaacgtgaatgggtagttactctcgttacggttggagagaaatgaaggcgctaggcgttgttggtggtagtggtgccccagtgccagtggtatgttctagtgttcggaaccaccggtttcgcgtttccttctcttcttcttctccgtcgccgggacccaaaacggtggaacaagtgggaattgctgctccgaaatctgactacaagcccggtgtgtttgatgacttgtttctcaaattgttccgtaacaaattggtacaggaggtggggtgggactcgaagaaagctggatatgatggactaattgaagttgccaatcgtataatgatgaagggcactaccaattctgataccgtagaagcagcggtacgaatattgaggtctctgttcccttcatatcttttggagctctataaaatgctcatagctt

SEQ ID NO: 28968 - DNA, 613 bp, Glycine max
aattctattacataattattggttcaaattgctcaagtaatgtgtttcttgacatcgtcattgcacttgatgagatgggagaccgtataaatgagttggagcaaagcatcaatgatttaagatcagagatgggagtggagagcactccatcacctgtggcccctgctaagccaaaggaagaagagtcaaacaaagaagagggttctgcttgagtaatgttacgtgttcaactgccttgtcttttatttttgggtctcgtgtgattcattcaggattttgttactgtatatctagtgaactctctttgctagctaaaacatactgttcaaactatgtaaaaatcacagcactgttggtttattgtgtttttccaattgaagatgggctagattgggtgctatatatttgtggatagttcctatattttaaattgtgattactttatttaaaaaaaaaaaaaaaaaaaaaaaaaaaaaaaaaaaaaagggggggccccccaacagggggcccccccccccggggaataattccgggccgggcccccggggggcaccccgctcccccaaggggggcccaataagggcctgggggaaaccggggccaagggtttccc

SEQ ID NO: 28969 - DNA, 277 bp, Glycine max
cgcattttaggcattgaaaactaattgaaggcgttgcagtccagcgttgatcagaatcagagcatggacgggcatgattcagaagacccaaagcaaagcactgctgatatgacagcttttgtgcaaaatcttcttcagcagatgcaacttaggttccagacaatgtctgactccatcatttctaagattgctgagatgggagaccgtataaatgcagttggcgcaaagcatcaatgatttaagatcagagatgggcgtggagagcactccatcacct

SEQ ID NO: 28970 - DNA, 494 bp, Glycine max
  unsure (1)..(494): unsure at all n locations
aaaaattaagagatgatttttttgagaaatgagtgtctcttaaacattgaaaaataatagatgtgatgcatgcatagccttctgtgttatatttggccactaagataggaaaatatacactgtttggagttaggttcagatgaaggtgattatgtgtatagattatggagtgtgctgaacaaaaaatgattttaggcgatggagaacttttcccaagatgctggaccaacaagctctactatttctgtagatgcatggaaatgaaaggagatgcagctggtcgacaagctaggattaagattcactatgccagtggtttgttttactagttgctttctcatttttggaacatacactgatttgtatgttgttaaagatgattgtatgtgagccctttgcttttgctatcagttataaaattcaaagagccatgtggcaaaacttttttctaacnnnnnnnnnnnnnnnnnnnnnnnnnnnnnnnnnnnnnnnnn

SEQ ID NO: 28971 - DNA, 260 bp, Glycine max
aggcagaggatgttattgaagacatcaaagcctggggattttccccaaacatagttacttataacactttgattgatgggcattgcaagaagggcagtgcccgaaaaatgtacagagctgatgccattttgaaggaaatgcttgctaataaaatttgtccgaatgagattacctttaacactcttattgatggtttttgtaaggatgagaatgtgttggctgcaaagaatgcttttgaagagatgcaaaggcagggactg

SEQ ID NO: 28972 - DNA, 295 bp, Glycine max
gcacttacacctcttgtttctgtttgagtcgagtcgagtctcttctcttctaatctcctccatagcatattttgacccgatccaaccctcgctttgctagatctcttgatgatgggttccgttctagaggacaagatagaccgtcatagttttcacgaccaccacgacgccgacgatactcccttagcatcttcctcttctaaagtcctccaacaattacacagcttcgattttgaggacacaagcgttgtagatttgcggagctcatccatctttaacacaacacgtatcagca

SEQ ID NO: 28973 - DNA, 509 bp, Glycine max
atgaaagcttcaacggcatctgatactcagaaaaataaagaatttgaggaccctgaatttgatgaggaggattctttgcagattgccatggacgaacatgatgacattgaaactatggctatcgaagatgttgcttataataataatggaaagggaaagtctgagccaggaatctggtaagtctggtaattctggatctgaaattggtgattctgcaaggtctcttgctcaggtagaccctatttcagggggtgaaatggctactgggtttccatcaacattcaatggtgtaagatctctgcaggactctcctgttggaagtcctgtgtcatggaattcgcgtgtgcctcatcctttttcgtacccgcacgagtcatctgacattgatgcttctatagattctccaattggaagccccgcatcttggaatgctcattctcttaaccagggtgacaatgatgctgcccgaatgaggaaaaaatggggaagtgctcaaaaaccatttcttg

SEQ ID NO: 28974 - DNA, 433 bp, Glycine max
aaaaagaaagagaagtcgagccccagtgacaatcagttgcgtgatgcgatatgtgaaattcttaaagaagttaacttcaatacggccacatttaccgacattctgaagaaacttgctaaacaatttgatatggatctcactccgagaaaggcatctataaaatccatgattcaggaagagctgacaaaactagctgatgaagcgatgacgacgacggagaagaggatgctgagaaagatgaagccccatctacaggccaagaggttgaagcctgattgaagagtagacttgactgcttggagataggtttagctatgtatactataaccctagttatgcatgcttcatctgtacacttgttaagtggaagtggctataacttactcttagcatccatccaatctggagagaacaaacttgtatttatcaattt

SEQ ID NO: 28975 - DNA, 450 bp, Glycine max
ctgtctttggaaagaggagtatattcgtagttcgatcaactgggtaagatgagtattgtacattagagttttcttctttttatttcttgtgtcaagttttccctctcttaccatcctcttattttctatttaaccttatgaattcttttacaagttatagcaatgcataaatttatatattttgattatttcaatttggagtgcgatgggatctcaggctcgctgagcagtggatgcacgtgtgatcgttgctcaaaatggcggatgttgcctgttgatgcacttattcccccaaagtggacatgtgtggagaatttatgggatcagagcaggtgttcatgtgctgctcccaatgaattgaacccaagggaactggataatcttctgaggctgaataaagaagtcaagaaacaaagactggcagcaagccagagaccggccctggaacgg

SEQ ID NO: 28976 - DNA, 453 bp, Glycine max
  unsure (1)..(453): unsure at all n locations
ctgatgctagtgatttgacaggtcctgctcagtcagtggtctgggatgccatggtgccttccaagaagaggacatgtgcaggtcgtccgaagccctcatctgttaagaagctcacaagagacctgtgcgatattcttcatgaacaacagtcttatatgtctgcatcttctgaagaggatcttctttttgaaagtgatacaccaatggtctctgttgagataggccatggaagcattctcatcaggcatcctagctctatagctcgtgatgaagagtctgaggctagctctctctcagttgataataaacaatgcctaatgaatgaagcatattcatcttctagtaccattcctatatatagtgatcgcagtagcatgaacttctcatctcacggagttgaaaatatcanaaactcagctggccaaatcatgcaacaagagaagcttgaaaggg

SEQ ID NO: 28977 - DNA, 260 bp, Glycine max
catttactgacggacgacgtattcagcgaggcttacctatagacttgaggaacgtgcgagctgcccaagggtttggttcccaaatcccgtctgacgtgtcgtcccaagtaaattatgatattgtcctgacggtgggaggaaagtcaaaaatactacatgtaacaggcaacaaatttttagttttctcccgaagcgatgaaaaagttgtaaaacgagtgtgaacaggtgtttgtataaagataaaataacaataaagttaa

SEQ ID NO: 28978 - DNA, 663 bp, Glycine max
gggaaggaattagaatatctgtgattggagattcatcaaggtgcctgagtctttaaaaagaatgatagctagtgcagaagaggatacaaaacaaaattcgagattccaacttattgtggcagtgggatacagtggaaaatatgatgttgtgcaagcatgtaaaagtgtagccaagaaagtcaaagatggtcacattcacttggatgacataaacgaaaacattattgaacaagaattggaaactaattgtactgagtttccttatcctgatctactaatacgaactagtggcgagcttagagtgagtaacttcttgttgtggcaattagcctacacagaactttattttaatcgggaactctggccagattttgggaaggatgagtttgtagatgcattaagttcatttcaacaaagacaaagacgctatggtggtcgacattcataaacatttgtttgcaatatatagtgatataccttgataaacatatacattaattagatactaagcaacataaatattagtagtttgctagttatcaatgccatgatttaggcataagaaagcaacatggaaagatatttatatatatattgatctacagacttgttaacaggtatttggaaaaaagataaatgatattgtagacttattatattctt

SEQ ID NO: 28979 - DNA, 321 bp, Glycine max
tcgctgctggttttccctcgcattatttcaatgggctcggttttcaatggccctccagcgccttctttctcccaaaggcatcttatactcggaagatacagaacagtataagctgctaaagctaaggactgcctagcctgatgaagtcatcacaccagttacaaggatagaagtatgttttaataaaaaaaaaaagaggatagtagtatgttggaccatctcagcttatgggttaagcgagttaagaccaggacaaccggctaaaaagtgagccatcttttataatttgtttagtccgcgagctgggttggctcataggtt

SEQ ID NO: 28980 - DNA, 403 bp, Glycine max
gcccgaaccggatatcagcaagctcagagacgcggttgcaaggaagaaagtaagagataggacaaggaccaaacgtcaaaccccattaaatttcattcatcctgaggagtattggactccatcaactcatgctcttccatcttcaactagaagtactactactccaaccccacttgaaaagccttcagttacgaccacaggacagaaaaaaacaaatgcaagtgatcatgaaacatatgagaatcgaaatagccctatcagatggggattaccaataattactgcattgactgcagtggttacagttcaaatacacacagttgagtcaacaagtaaactgcaacaacatgtggctggttctctagctctgcaaattgttaacagctcttggttgcagtgtacc

SEQ ID NO: 28981 - DNA, 297 bp, Glycine max
gataagtttatccagaagcaattccactagaagaaaataagaagaaaaaaaatgaaatgattttagctttcggagaagtccatttcatgtttttcttctcccagaaatgcttctagaaaagtttgtccaaacagcctaagaaattttcatccttagaattgtgagttgtttgaatgatcctaataggtgataagcattgtagctctgctatgttttcttgcctgtgtttcgtgatggaaatgaaaggaacccgactcagatttgttgctttcatgcaatagtgaaacagcactgttg

SEQ ID NO: 28982 - DNA, 383 bp, Glycine max
cttttgcgtttgactctcttcatactctctctgttgtgtttctctctccaccactccttcttatcactctcttcctcataatatagtaaacaatctcagttagttccctttgtgaaagcagatatatataacgtcttctcctttgtttggccgacaaatctatccaaagggagagataccccattacccaccctattctctcaagataagagctttttccccccctttctgtctctattttccatgtattatgaggcgtcataaagggtcgtttatcgtgatgtgaagatcactttttgagcgtgttgctgtggattcgggttttcctatttgctatcgagaataagagaggaagaacaaacatgactggaagtaatgaagtc

SEQ ID NO: 28983 - DNA, 487 bp, Glycine max
  unsure (1)..(487): unsure at all n locations
agttgtccactctgaaggtttggatgaaatgagtcctcttggacctggtatagtgcttgatgttatggctgacagggttgataagtttgcatttgatcccttggagtttggcattccacggtgcaatattgaaagcttaaaaggtggtggtccagaatacaatgcagaggttttgaagcgtgttctaggtggagagagagggccaattgcagatgctttgattctcaatgccgcagcagctctcttagtcagtggctgtgtaagtaacctagctgaaggggtttctgtggcacgtgaaacacaacaatcaggaaaggctctgaaaacactcaacctgttgaaggatgtctcaaataacatcaaagatgagttgggcatggatgcctgaattgttttgtggcccaggttgtgagttttgtaaacttgattcanacaagaggagcttggaaggcctcatatagtacatgtattattaaagagatgtaca

SEQ ID NO: 28984 - DNA, 435 bp, Glycine max
gaaccccaacacaaaattcactatctttaaagccatggcggttgtgggagacgaaaaggagcaggaggagcttattcctggcttaccctacgaaattgcagagctgtgtcttcttcacgttccgtacccttaccaagctttgtcgcgctctgtttcgtcgacgtggaacagagcaataacgcacccttcttttattttctccaagaagaccctctcccgtcctcacctcttcgttctcgcgtttcattcacaaactgggaaaatccagtggcaggcgctcgacccttcctcggggcgctggttcgttttaccgcagatgcccttgccggaaaactcctcccccacggcgttcgcgtgcgcggcgctgccgcgccaggggaagctcttcgtcatggccggcggcggcggcggttcagacaccctcgtctaccgcgc

SEQ ID NO: 28985 - DNA, 247 bp, Glycine max
aaaagaatatgttggaaggagatgggcagattgggttggaattgagaagtttttcaaggagaaaaaatggcaattcagtataactggaacgtcagagagagcaatggtcattggcctgggtggcctcaatctgtttggagttattattcttggaaccatgttgaaagatacggctgttgcacccagtagcttcattaaatttgtagccgacatatttcctcttcttcagatttatgctggttccttc

SEQ ID NO: 28986 - DNA, 145 bp, Glycine max
gtgcgattgaagttattaaatttttcaggcaagaacacgaccgaaatttggatattgtactttgttggttaggataaatttctgtttagggtgcttttagtttctaatcaatttcacttccaaaacaaatcttacacgtattcca

SEQ ID NO: 28987 - DNA, 257 bp, Glycine max
gttcaatacccttccaagatgcttttagcctcgggcaaagtttctggttcatttgaaatatggctatgtgacatatcttctggggaatttgataagcttggctcatataatgcacatgatttggttgtaagtttttttccctctttttatttttatttttttgggtgatagttggaaaaaaaggccatattcctatgctgatttctgcatttttttaaatttctcaaggttacaggtttgacctgggcattcggtgg

SEQ ID NO: 28988 - DNA, 273 bp, Glycine max
cagcgttgcgtccaaagtcccacagccattgtttggtcctcatcagtgtgctgcaaccgaagagaacttggcctctcgagcttctaatgaagcagcactcaagatgggtgactatcgtgacattttgagccttacaagagttctcatacgtggtccccaaagcaaagcagatgctgatattgtcattgaaagatgtgcaggtgcagggcatctacgagatgatattctttattatcataaagaatttgagaagtttacagatggtgatgacga

SEQ ID NO: 28989 - DNA, 268 bp, Glycine max
aggcagatgatgaaaaatctcagtgtaagtatgctggtaactgccaaggtttgctgaatctgtattcgctcaagttatcgacgcaacaggtgacttcatctcatcttagacgacagaaacaatggcaatgcagggttgttattgtcacgtctatacgaagttggcaactcaaagaagaacactggacaatctcagtttttcaggctcaatttcggttaacaaattgtcaaagaatgaaaggaccacagggaacaatcaatttcatagg

SEQ ID NO: 28990 - DNA, 441 bp, Glycine max
atagtcaccaaacgttatcctttttatgatccttggttgtcatgataaagaataatgtggtgacaaataatgtgaatagtaatttctatttgcttccctagcttgtctatgaggatactatcaggtgactaatatcaatacgagatgcagggatattgctgctggagaaaatggaatggatgtgatgttcaacttgcttacttctacatcctataagtggatccattcaccagaacttctgtcagcattaaaatcccctttgatgcgtttatgtgccaggtaccttctgcaagagaagaaaagaggaaaggctttggactctgtagcaaattttcacttcaaaatggagcgatggttgaaagaataaactggatggcagatcgttcagataaaggtctttctcaaagtggagggatcatggtgaactacgtgtataggttg

SEQ ID NO: 28991 - DNA, 338 bp, Glycine max
gttccctctgcagcaaaggtgtatggtgcagttccaagtgcagcagcatcggtgagtcccagcatcggaggagcaattgaatcgttgccggttttggatgtcgtgcctatatcgcaacaagccgaggctgctaggaaagctttgcttgagaatgtgaggaggcttaaggaatctcatggaagaactatgtcatcattgagtaaaactgatgaaaatttatctgcctcccttttgaacatcactgctcttgaaaactctttagtagtagctgatgagaagtaccggtttatgcaaaagctccgaaattatgtcacaaatatatgtgactttttacagca

SEQ ID NO: 28992 - DNA, 264 bp, Glycine max
gccttgattggactaatgtgggccgtttgcattgtttcttgccttggtgggatgatgctactgtggattttatgacaagtggtggttacaatgtttctccattgataggaaaggtaaaacagaaaacactgataatatggggtgaaaatgaccgcatcatcagcaataagtttgcagtgcgactccactgtgaattacctgatgcaattatacgccaaataccagattgtggacatcttcctcatctggaaagaccagattcta

SEQ ID NO: 28993 - DNA, 576 bp, Glycine max
gaaatgatgaggagagtggggtgggaggccatggcttaaagtatgagtatagccagctagaaaaggttaacaaatcatgccctaaacacaagcctaatgacaaggggaaaagatatcctgaggcctattctgatgacatgagatttgatatgtcaattagagagtccaataaaagggtagcatggggttattcagcacccttagctgttgatgatgaattttatgagtctggcatgtatgcatcttcttattgctttctcaagtttctcaactgaagttcctgatggaaccctcaacatcaacgacaacaatggtagcttatttaacatgagctacaagattagcctctcagtgatatcatattcaaagataggggacaatacttctgtgtttaatttgtcctctgagagagtgaagatctctgcagaaggagtttatgatgccggagcaggaacgttgtgtatggtaggttgccgtgaccttctctcaaacacaaacactgagataccaatagctcattctgtggactgtgagattctactgaagtttcagtttccatcattggacacatatgat

SEQ ID NO: 28994 - DNA, 260 bp, Glycine max
cccgtttgaaaataatttgtgtttttttccattgtagattgaatggagagcctgagaaagatgatgcggtatggtgttctgtgctccgggaaccctcggcgtttgtacgccacgaaagtggacctgaaaaagctccggccgatgattctgaagagaatcgagaaacgggcacatacttacccggttcgcggcatggttccggttgccaatgaggtcctccaagtcaggaatgatctcatccatggcgtttacaccttctt

SEQ ID NO: 28995 - DNA, 394 bp, Glycine max
tggagcatcaaatcttgaaaaggaatcttcttggggcaataactttgtcccagatactcatccactacctaatgcagataaaggagcatcagatataggtggtgaaaataattttaccagagaaactcagcctctgcctaatgcagataaagaagtgttgcatattggtggtgaggagaactctgccagagaaactcagtctcttgctattgcagataatcaagcattacaacatgttggaaaaaatgttcctggtcacctaaaaaggcatcaacctaagatgcccccaaccttgaatgagtctaagaaggcaagagagcatatagctgttgcagtaacatcactaagccagaaagcaaagaaagaagataatttttctgtagataatgttatc

SEQ ID NO: 28996 - DNA, 286 bp, Glycine max
gcaaacagtttggaaccccccaaaaatgggtgcaacgacggccattgccgcactctctcttcactgcttctccaaatcccacacacacttttcacccgttcgcactctccctcgcctcacatgctccttctcttcctccatcaaattcaacatctccttcgctccccctaagcccaagcccaagcccgaacccgacgcctcaaacgagcccgacgggccgctcctcatcccgtggatcgtccggcgcgaggacggcaacctcaggcttcaatcagaacctcccccg

SEQ ID NO: 28997 - DNA, 256 bp, Glycine max
tgttactcaacgccaattgcgatctcaaggtgtgcgatttcggtctcgcacggtcagccgcctcgacagaagataatcagggcttcatgaccgaatacgtcgcaacgcgatggtatcgcgcgcccgagatcatgcttacgttcaaggagtacacaaaagccatcgacgtctggtctgtcgggtgcattctcgccgagatgttgagcggcaagccattgtttcccggcaaggactaccaccaccagctcacgctcat

SEQ ID NO: 28998 - DNA, 503 bp, Glycine max
ggtcagatcaaacaggaattccatctcaagatcacttgattaatatatatgttgagagaaattatcttatatggaggcttcctgatctgcaaaaactgcttagtggtgctgcaaaactagtgattgaaacacttgaaagtaataaaagtgaacttaaggattgggcttgtgtcagaaaagaagcattttcatctgagaaaaatgagtatggacatttgttggtatctgatttctctgattcactttcatcgattccacgagaaaatctgcaacaatttatgggtgttccaaggatgatggagggtatgcaggatgagaaccaatttgctaatctacctggcaatggccatgctcctcgccgtgttgcaaataggaatgcattagctgtcttgtttgagtcaatgctaccgcgggttacttatgacgatggggtgagttggtggacctgatgatgaccaacatgatgaccacaggcaagacaatcaatgattctggatgcaact

SEQ ID NO: 28999 - DNA, 563 bp, Glycine max
tcaatattgagggaggtaatcactttccctggacaacaggagaagtgttttcagtgtggccaacttggccattttgcagctgaatgtcgtggtaagccaggtgagaaagctgaggactggaatccagttgatgataccccaattcacaagaagaaatatcagtttcttaacatctgggtgctgcgtgaatatttgcaatttgaattggagattcccaaccctccttttgagattgactttgaacgcgtagtggactgattttgtatttctatgcttctttgttggcaatgactttcttccgcatatgccaacatatagagatccgggagggggctttaaatttattgatgcatatttacagaaaggaattcaccgccatgggtggttatcttactgatgcgggcgaggttttcttagagagagtagaacattttattcagtctgttgctgttcatgaagatcaaatatttcagaaacgagttcggattcaacaggctacagaaattaatgaagagatgaaagctagggcaagaggagacatgcctggagaacacgtgcttagt

SEQ ID NO: 29000 - DNA, 250 bp, Glycine max
cagcgtacccgcttcaaggctatcgtcgtcatcggtgactccgagggccacattggtcttggtatcaagacctccatggaagtcgctaccgccatccgcgccgccatcatcatcgccatgctctccgttgtccccatccgaagaggttgctggggtaccaaccttggtgagcctcactcgctccccaccaaggagagcggaaagtgcggttccgtcactgtccgtctcattcccgctccccgtggtaccg

SEQ ID NO: 29001 - DNA, 559 bp, Glycine max
acgaggaactccttcgtcttctgaattctcttgttgcagggtaacacatggctctgttattcaaggatccgtcgaagatttcggcgtatcgagatagaaggttccccgggacgcaagaggagtttgagcacgcgcttctgacctcaaccaccgtttacgtggggaacatgtcgttttacacgacggaggagcaagtttacgagctcttctcgcgtgctggggaaatcaaaaagatcatcatgggcttggacaagaacacaaaaacgccttgcggcttctgtttcgttttatattattctcgtgaagatactgaggatgtttgcaaatacataagtgggacgatactggatgatcgtcccattcgagttgattttgattggggatttcaggaaggtagacaatggggtcgtgggaggagcggtggccaggtgcgggacgagtaccgcactgattatgatcctggtagaggtggctacgggaagctggttcagaaagagttagaagtacaaaggcagcttgtagattatggtgctggttctttgggttcttttccaccagt

SEQ ID NO: 29002 - DNA, 434 bp, Glycine max
aaatcttattaattaccctcacctagcaaccagttcgtagctcctccctctcccctccacaaaaactcaccacacactctcttcaatccttcaaatttttcatattatatatatatattgcacaagaaaaaggaaacttaaactgaacgagagggaaaaggaaatctacacgactaagtacacaaagagagaagaagaagccaaagcagcataaagaggtaaagataaaggcttgtttggatggagttattcccagcacaaccagacttgtccttacaaatcagccctccaaacgcgaaacccacatcaagttggaggagaagcacagaagaagacatggatttggggttttggaagagagccttggactcaagaaactccattcaatcaatggccaaacaagactcttgcttcgacctctccctctccaatcc

SEQ ID NO: 29003 - DNA, 240 bp, Glycine max
cgacgccgccggaaagtgggtagcccgttgaggttgagagatcctgagcgtccattacagaaagttgaagcctgaattgaattcaaggtggaaggaacgcagcttttcatttgagaatcagccctgtctctgtacgcgtccgactcgatcactgatttagtccatatcacctaacaccgctaacggactatctaactatgaaaaaaagagagctgcggaatgacaattttgctcgatgcc

SEQ ID NO: 29004 - DNA, 274 bp, Glycine max
agacaaatcacttttaccaagaaaaactcaaaagtcacttcatcgccaaaatgactaccgagcagaccttcatcgctgtcaagcctgatggtgttcagcgtggcctcatcggtcccatcatcacccgcttcgagaaccgtggcttcaagcttgcgggtatcaagatggtcactccctccaaggagcacctcgagaagcactacgccgacttgagcgacaagcccttcttccccggtctaattgcctacatgggctctggccccgtctgcgccat

SEQ ID NO: 29005 - DNA, 259 bp, Glycine max
atccttcgttaaatgacctatcagagttagctaccaactaattttggttagtttgaaaatatttatctgaatggggttgcattttgctgtgttggcgaaaataatcaattttctttattttaaaaaaatctttgcacaattcataagagtgtgcttcttggcaattatgaagtaattgcaacgttcataatatttaaataattattatgttttagtatattaattactctgtcgggtataattcaactggactttggtg

SEQ ID NO: 29006 - DNA, 581 bp, Glycine max
cttttgttctcaaactccttgatttgtttgactctgaggaccctcgtgagcgtgagtatttgaaaaccatattgcatcgtgtgtacgggaaattcatggtgcatcgtcccttcattaggaaggccattaacaacatattttttcggtttatatatgagacggagcggcatagtggtattggggagcttctcgagattctggggagtattattaatgggtttcccttgcccatgaaggaggagcataagttgtttcttgctagggcgcttctgcctctgcataagcccaagccggttggggtgtaccaccagcagttgtcgtattgcattgcgcagtttgtggagaaggattacaaactcgcggacacggttattaggggtttgttgaagtattggccagtcactaattgccagaaggaggtgctcttccttggggaactacaggaggtgctggaggccacgcagaccgcggagttccaacgctgcatggtccctctttttagacaggttgcccgctgcctcaatagttctcactttcaggttgcagaacgagctctctttttgtggaataatgagcatatt

SEQ ID NO: 29007 - DNA, 276 bp, Glycine max
ctctcaatgccggttaatgtatagccggaggcggaaaactgctgcatggctatgggagtgtgtatttcagcttacgtccgactctcattatacttggacagcgatcaccaacaaggtcggatctatgtccccgtgaatttgtacagctgcttgcaaaattgcaggacagggtccccgcattttctccccagtgagcaagaggctttattgagagtgaattaggagctcccattaatatattgtttaaagagtttgaagatcggcccattgctgctg

SEQ ID NO: 29008 - DNA, 640 bp, Glycine max
atctgctcagcatgcttataaacaatttcgagacaaggcagcttcatccagatcaatgactgtagaaaagatggaggagtttgcacagggaagggtttggactggtaaggatgcagctttgcgtggtttagttgatgctattggtggcctttctcgagctattgccatagcaaaaatgaaggctgatatacctcaagacagacaggttacacttgtggagatctctagagccagcccttctctacccgagattttgttaggcgtagggagttccctcgttggagctgacagaacggcaaaggaactgcttcagggcttgacattttctgatggagttcaagcccggatggatggaataaagtttcagacattggaagaatatccttttggcaaccctattttgtcaataataaaagacatcctcagttccctatagctgtccatagttcattttaatcattttgtctcactatattcatatagtttttcctatatgttgtgtcaaggggcaatagacgagaaaggtttcctctgtatcttgttctgtttcttcaaatgtctccctcaaaacccttgtaaatgcatgatgtaaagatggaaagttcaaagcgttgttttacgtatcaactcagacggaatt

SEQ ID NO: 29009 - DNA, 355 bp, Glycine max
tgttatagagggggaaagtgactgacgtgtggctgaattgtttacatggattgtttctgctgcttcaacaatcaggtggttggaggacgcacttcatgtggctctggcaagggcaagagccatcagggctcagttaagtatggctttagcctagttaaagggaaagcaaaccacccaatggaggactatcatgtagcaaaaattcgtcaagcttggagggcaagagttaggactttttgctatatatgacggacacttgggagacagtgtgcctgcctatttacaaaagcatctcttttctaatatcttgaaggaggaggacttctggactgatccagccagttccatcattaaa

SEQ ID NO: 29010 - DNA, 402 bp, Glycine max
tattgcctcatgcactcatccaaataatcatgtcaatgaattggtccccatcaagaaattgtaccaagatatggaaagccgaatagaaaatgcatctaaggtgggtcaagtacccgaagaagtacgcccaaagtataaaggattttctcagtgggattcatatacttctcgacgtgaccatgacacaattcttcaaatattacttcatggaaaggactcgagtgccaaagatgtagatggaaatgttatgcccatattggtgtatttggctcgcgagaagagaccccaagttgcacataacttcaaagcgggagcaatgaattcattgttaagggtgtcatcaatgattagcaatggggaaattatccttaatgtagattgtgacatgtactcaaacaattc

SEQ ID NO: 29011 - DNA, 319 bp, Glycine max
aatggaagttctatgttgccttttctatcatccgggcagctccaattcctgcaggagtgtataatagatgggttaagggtaatgcatcgggcggtgaacgtgctcgacacacagaagtacttacaaatggccttatagatactgcgtggaaatttattgaacacaaatctgtgcttcctcagcatccaccctcagatgcaaacgctcaagactattccaaagagttaccgaatgggaatgatatcacaggaactctcaaatcaggggaagtttgttcctaatcaaaaggttttggtgctgaggaacaaattaattaagt

SEQ ID NO: 29012 - DNA, 270 bp, Glycine max
gggcacgtgtgcaaacagacaatgcaatgtctatttcccaggatatcattgcccgagggattttgtctttggcactgaaggcagcccatggacctcatctaatggtaacagtgaacgtgagaatgactgttaccgacttggttccttgccattgtcatcaccttgtcatatttcaggacacaacaaggaacttctgaatcaaacaatactcaagcatgaagcgatatttagggaccaaattcaagagcttcaccgcatttaccagaaaca

SEQ ID NO: 29013 - DNA, 278 bp, Glycine max
atttcatggagtcaaatacaaaaaacgtgcatgcaactaaagtattgtgggtttaccgatttggaacattttctttgcaaatgtcctatcagggtcagctctctatcgagtaaatgtctttcttgagccaaaagagattcccagaatactagcgggagctgtaccatcccaggcattcctcctccatagcttaggtggtgactcctggatggaccgctatagcatcagaactcttcggattgactacccttctttccaatttaataggaggacctttt

SEQ ID NO: 29014 - DNA, 422 bp, Glycine max
caacagtctctgatgagctgaaggtagtttgcagccatttaagatattgaagcatgcactgtataagggcagatacaggtagacaattcacaagagtccagcttttttaattctgaagcaaaatcaccattgaaattttacatacctcagtgtgttttgggatttaattggtattgaactctgttcttcttcctggcaatttctgtctctgttggctctacttcaggactggaccatagtccaacatatctgctccaatagtttagtatatcatcaaagttaatattaaggtactcatcatataagtaatctagatccataatttccatgaaacaaaccagagtttgacctacattgttgaactgtcttatacaaacctttcctctccatcctgtaacaaacctacatagttgattcaaata

SEQ ID NO: 29015 - DNA, 115 bp, Glycine max
aagcaatacataactttctccagtatcaacagtgcagttataaagttctacgacagggaaacaaatttgacatcaactttgacaaaattgattatgaatagaattgattttggtt

SEQ ID NO: 29016 - DNA, 346 bp, Glycine max
ctcaaaaccgctatcagaaatgctgatatgaatgtagttaccaagactgtgccacagcaaccgtctgccttgcacattgcaagccaatctgttcgcagtgttaatgccaaagttgatactccaaagacatctgggaagtttactgatctcaaatcagtagtgtgggaaaatggtgcttcccctacctctaaggatgtatcaaatccaacaaattattctaacagcaaaccaggaaatcaacatgctgttgcttcaggagctgcctctgcaccattgaggaacccaaataacctaaaatcccctacggagcggaagccatcttctatggatttgaaattaggttcca

SEQ ID NO: 29017 - DNA, 284 bp, Glycine max
ctcgagccgtgacattatagatcgtgtgcctaaaattgatcctgatgatacctcagcattgaagccacccaatgtatatggaagcctcgagttaaaaaatgttgatttttgttacccatctcgtcctgaagtgttggtattgagcaattttagcctcaaagtcactgggggccaaacagttgctattgtgggagtttctgggtcaggaaagagcactataatatctttgattgagaggttttatgacccagttgcaggccaagttttcctggatggtagggact

SEQ ID NO: 29018 - DNA, 264 bp, Glycine max
gagatgattgatgcaacccatggtgctgacaacatcagaaatgatatcagtgcacttgctcaaagatgcactattattgatcgagatgaggagtgtggggtattgcccttcctgatatatgtttgacaaaactgcacctgcaattctttttttggtcttaaccctttagtttcatcaggggaaagggaccttgactaatccgaagtttggccaggaggtaagtaaagcctggtcaagaattgtttccgtcaagggtcgaactcg

SEQ ID NO: 29019 - DNA, 493 bp, Glycine max
ccctagcgtccgcccacgcgtccgaatttagtctctaatttctaaaactcgtcagtgcaatagtataatggacaacttcgaagatgctacagagccagtgagtcctagtggacgattcttcaacaccacggtgctatgtgcgtatgtttttggcttcttagaatcagaagttccaattgaattctctcaagccaagtatttgttcgaagatgtctttctacccgtcaatccacacttttcttccataatggtgagagatgaagaaggagaaatgaaatggaaaagggtagaggtgaagttcgaagatcacgtaaagattccaacgttccccgaaaacgagtcactagaattgtatgaccaatattttgatgactatgtgacaaagatattaatggaaaggacaccacaagataaaccactttgggaaattcatgtgatcaaataccctacaagcaatgctgctggcaccttaatattcaaacttcaccatgca

SEQ ID NO: 29020 - DNA, 498 bp, Glycine max
tcgtgcagttttagcaggttctatagctggtttctcgattatggcattgaatgattcaaataggagacgtacactggctttatacctgttggctaggctagcccagtgtgcttataattctgcaaaatctaaaaacaagtttcacctttgggggagtcattggagacatggagattcattgctgtttgcccttgcttgtgcacaggttatgtatgcctttgtaatgcgtcctgagagcttgccaaaatcctatcaagacttcattcaaaagaccgggccagttgcagagcctgtatacaaggctgtaagggatagctgtagaggtcattcagttgatgttgcttcactacatgcttatttatctcgtgtaggaaagatcgactatgcaaagttggaagaatttccctccataattccatgttccattattcatccagcaacaaattcatgcttagctcatcaaggaaatgcaacatcattaacgtttaagaaaacatt

SEQ ID NO: 29021 - DNA, 461 bp, Glycine max
gcagtcactaatttctcaattcagaaagatctgctattctctctctctccttttagagcgttataataatataagctgcataagttgaagactcaactgattcttcttcgtctgctgcaaattcagaagtagagatggcaagtcgactgaaggaagatgagaaaaatgaacgaataattcgaggtcttctcaaactcacaccaaatcgaagatgcattaactgtaacagcttgggaccacaatatgtttgctcaaatttctggacgtttgtttgcattaactgtagcggaatacaccgagaatttacacatcgggtaaaatcagtttcaatggctaaatttagtgcacaggaagttagtgcacttcaagaaggaggaaatcagcgtgcacaggaaatctatcttaaagaatgggatccacaacgtcattctttgcctgatagcagcaatattgacaggctc

SEQ ID NO: 29022 - DNA, 538 bp, Glycine max
gtcgacccactcgtccggttcttggggagtcatctgggtggcttttgcagtatggccagagcaataatttgggcctggagatatggatacttgagaaggaatcaggagccaactcatctatttactgcaactgcactcatctgaagtacaagtggattctgaggtggagattaaactttaaagtattatggaagcagatgccgtctttaagcacacattctaaagaaacccagatattgtcattccttcctcagaattctacttctatcttcattaggtcggggtggaatattttgctgtgtgatttggagaccaaaacggtggaaattgtcaattatcagggtcgtggaggaaccatttcatgggaatctagcaaagtagttccttactttctaccagcttggccacacacttcctcggtgtcggtgtcatgacaacatggaacaagggaaaacttgtcgtttttcaatctagaggcacttggtcttttccattctgtttttgatctggatatgatgaaaattaagggtctgtttta

SEQ ID NO: 29023 - DNA, 306 bp, Glycine max
cagtggtggttacaagcgtcgtcttgccttagcaatacaattagtgcaaacccctgatctattgatattggatgaacctcttgcaggacttgattggaaagcacgtgcagatgttgtgaagcttctgaagcatctaaaaaaggaattaactgtgttagttgtcagccatgatttgagagagttcgcaagtcttgttgatcgatcatggagaatggaaatgggtggcaaccttagagaggaatttctaccattatgatttatgttcattgccttgttaatcagcatgagatgccatgaggtttaaac

SEQ ID NO: 29024 - DNA, 363 bp, Glycine max
  unsure (1)..(363): unsure at all n locations
gaaataataataagtattatcttagtttgggtgcttatatatataattgcatattaataattaatggtgagggagcaccagaactactgagagatgctatgcatagtttaattacttgttttggtactcacgttgtgtgcagatccaagtgctgaagttattgctttatcaccgaccacactaatggctacgtacaggttcatatgtgaaatctgcaacaaaggatttcaaagagaccaaaaccttcagttgcaccggcgaggccacaacttgccatggaagctcaagcagagaaccagcacagaaattcgaggagggnntaacgtgtgtccagacncttggtgcgtccaccacaacccagca

SEQ ID NO: 29025 - DNA, 396 bp, Glycine max
tgctctggacctttggcagcccttgttgggaatgtaatatgttgtcctcagtttagtagcttgatccacatcttccagggtttcttcagcatgaaatctgatcatttggttttgccaaatgcagttgctgatcattgtttttctgatatcattagtattctagccagtagaggggcaaatagtacaatccccacactttgttccataaaatcatctaattttacaggcgggtcatgtcctgtgaaggatgattctacttttgaaaaaacagtaacacaagtaagttacttgagcgtgaccagcactgttgatccacttaaagagtgttgtaggcctgtttgccaacctgcgataatggatgcagcactacagatttctggaagacaaatgatgatt

SEQ ID NO: 29026 - DNA, 662 bp, Glycine max
catgagcattccaactgtgctagctttaccatattcagctcaagggcatgtcaatcccttgatgaccctctcagaaaagttggttgagcatggttgcaaagtcatttttgtgaacacggacttcgaccacaagcgagtggtaggttccatgggcgagcaacaagatagccttgacgaatcacttctaaagttggtttctatccccgatggtttaggacctggtgatgaccgaaacgatgcgggcaagttatgtgatgctatgcaaaacaccatgccaactatgcttgagaagctcatagaggatgttcatttgaatggtgacaacagaatcagcttaattgttgcagatttctgcatgggatgggctttggatgttgggagtaaactgggaatcaaaggagccctgttgtgggcttcaccagcagctttatttggccttctatacaacatccccaagcttatcgatgatgggatcatagattctgatggtggtaagaatatcatatattttcctatatattcgaacttgcttgattttatttgggctctatgggcacaaattttgttatgaataaaatatgtttgtgattgttaacaattatttttgtatttatttattattaatcaatttgaaaaagattaataacaaaaaaaaaaaaaca

SEQ ID NO: 29027 - DNA, 318 bp, Glycine max
acctcacacacccactcgaataatattaacaacaacaacaacaacaaccctttgttccttacacaccacacactctctactcatctatcaaatggcgacccccccaaacgacgccgcatcgacgaagaagccacaacccatcccttggacccaccaggagaccgtgcacctcatccgcgcctaccaggagaagtggtacgccctcaagcggggcccactgcgccacaaccagtgggaggaggtcgccgtcgtcgtcgccgcacgctgcggctacgaccttgcccaccccgccaagtccgcccttcagtgccgccacaa

SEQ ID NO: 29028 - DNA, 330 bp, Glycine max
atctcaatttcaagattttgagagcaaagtctaaattagaagctgtgtctgctgctgaggaaaaggccagatccatagtcatgagcctgtctcatactcttgaaaagctgaagacagaaacagcagatgcaaaaaaaggaaaatgaggatgtaagccaagaggttgcagccagcaaggaagagattcaaaaagttgagtttgagatagacatgacagaggaaagattgcaaggcatcatgcaagagctggaagtagccaaagcatcagaagctctagcttagagaagctgaaaactcttactgagaccaccatgagagaaagagctttaa

SEQ ID NO: 29029 - DNA, 344 bp, Glycine max
tgacaaaatgcaaggaggttcagaaaattgtatgctgacaaggaagatatctttgttcctgatattttctgggactatacaagtgctaaagtactaacaatggagtgggttgatggagtcaaactaaatgagcaacaagcaattgagagacaaggattaaaagtcttggatctggtaaacgcaggcatacagtgcagtctcagacagttactcgagtacggatattttcatgcggaccctcatcctgggaatcttttggcaacacctgaaggaaagcttgcttttcttgattttggcatgatgagtgagactccagaagaagcaagatatgccataattggtca

SEQ ID NO: 29030 - DNA, 438 bp, Glycine max
aaaaagcctccaaagttgtggttcacactaaagatccatcttatccagaaaagatgattaaatttgcagttatggatagcaccaccggaagcttatcaacaaagacagggataagttctctgaccaacattagtggtgaaactgaaagctctcatgtaattgaggatagaaacattgccatctccattcaagatctacgcaaggtcaccaataactttgcttcagaaaatgagctaggccatggtgggtttggaactgtttacaagggtgagctagaaaatggtaaaaaaatagcagtgaagagaatggaatgtggagctgttagcagtagagcactggaggagtttcaagctgaaatagctgttctttccaaggtccggcaccggcatttggtatccctgctaggctattccattgaaggaaatgaaagacttttgg

SEQ ID NO: 29031 - DNA, 506 bp, Glycine max
gaggaagcaacataattgagtagtggtgactagtctgttctctgtggaaaagttgttgtgtgaagagaagcgaatggtaggattgaatgtgtctcagccatttttgtcaccgatttgcaagacggcaccttacccacttgatctcatagccaccgccgcgtgcctccacttcggccaccttctccgccgccgcgccacccaccatccccgccttggggttcttcttcactcctgtttcaagattgaaggattagtggtgtcagagatgccttcaactcaatgggttgaactatcttcaactatcaactggcgatttgacttcctcatgttcaactagtttctccttctttaatgggggaggagatggaggccgctttggaaaggctgggatttccaactccaagatgtctggtaaagatccatttaatggaaggaaatggacagaaattctccttgctgccaatgttttataaatagtctaattgaaaaaggacaactttggagac

SEQ ID NO: 29032 - DNA, 412 bp, Glycine max
aatcatgaagtttctggctgttcagggtctcttcactgcatcacttggctctgaggtgacttcggttgagttacaggaggaattcaaggtggccaaaatctcccacatcgaatgctctttgtaagatgtgtatagaccagctgcaattgttgttagcaaatgctcagaaaggggagggcagttgtcctttggccaacagcgttgagccaaatgatcttggttcatacttcatgaaattctttggcaccttatgcaacattccttcagtttccctcttccggtctttagatgatgtggatcacaaggcagtaaaaaaattgcaggcaatggaaactagattatcgagagaggaaaggagccgtgactgtagcactgatgctaatagattgcatgcactgagatacttgcttat

SEQ ID NO: 29033 - DNA, 406 bp, Glycine max
ggagcaaaatcttatgctggccgcagaagcagagctcgaaaaaaccgaagccatgtctgattccgacgagaggatgaaggaaaccctagccctgtccgcagaagcagagcgtgacagagacaactccatgtctgatttcgacgactctgattctgaggacgaagctcagcagaacctccaactcgaatctctccagaccgagcttgttactaacccctctaactacgatgctcatttgcaatatataccgcttctgaggagaatgggtgatgttgataaactgtcaagagccagggaagctatgagtgaactctttccgttgagccctgcaatgtggcgccaatggatcaaagatgagctttctctcaacactgctactcgacccgaggctttctctagaattctg

SEQ ID NO: 29034 - DNA, 352 bp, Glycine max
cacacctgccgccagtcacatcatccggatacgaaaggcgaccggtggcatcctcctcactgccagccacaaccctggtggccccgatgaggactttggcatgaagtacaacctcgccaacggtgccccggctcccgagagcgtcaccaacaagatctacgaaacctccaagaccctctcgtcgtacaagatcgccgatatccccgacatcgacttgagcacaattggcacacaaaagtatggcagcctcgaggttgagatcgtccactcaacagaggactacctgaagatgctcaaggacatcttcgactttgacctcatcaagtcgttcctcaagcagcattcggacttc

SEQ ID NO: 29035 - DNA, 434 bp, Glycine max
  unsure (1)..(434): unsure at all n locations
aaaaaactggtggaagtgatgaaacatataggaaaggtccaacattctttggctggatcagaagctggtggcaattttggaaaggcaatgcaaaatctggtgattcaactgctcatcagaacaaggtggttaatcattttgaggattctaactcatctgaactggtagaccagacagtccagactgttagtgattttgaagataagtcatcagaactggaccagaatgctatttgttctggaaagcctgagttgttttctagcagttccgtttgggatgacatggaatcttttattttcacccgcagaggatcagttattgtttacgagtcaaaaaacagggaggatatggcacgtaaattacggaagataggacccccagtttttagatctctgtctanaaaagatatccttcaattgttggagttattaata

SEQ ID NO: 29036 - DNA, 765 bp, Glycine max
gctcaagtacttgctgtccaggggagttaatcctgatctagagagtgactcgggaacacctttggtttgggctgctggccatgcccaaccagcttctgtcagtgtactattggaacatggtgcaaatccaaatgctgaaactgatgatggtattactccactcctttcagctgtggcagccagttctctggcatgcttagagctgttaattcaggcaggtgctaaagtaaatataagtgctggtggagcaactcctttgcacatcgcagctgataatggaagtcttgaactattaaattgcttattgaaagcgggagctgatcctaatgtctctgatgaggatggtgtcaagccaatacaagttggtgctgcaaggggctatctaaaagctgttgagatattgttccccttgacgtccaaagtagatactattcctacttggactgttgatgggatactcgagtatatgcaatctgaaactagaaagcagctggatgaatcgataaatgccaaagaaactaatcagcccaaggaagctgattttccaaagcaaaatgtccccgaggtggcacctgaagccaaaaagagagcagcagaagcaaagtcaagaggggatggggcttttaaaaggaatgaccatcatatggctatagatttttatacccaagcaattgatctgaaccccattgatgctactttgctatccaatagaagtctctgttggattaagttgggccaagctgagcatgctttagctgatgcaaa

SEQ ID NO: 29037 - DNA, 532 bp, Glycine max
gaagataaaggtgagggaagagatggtaagcagaggctcgtacagctctagcagcctcttgactggtagatttcatgctagaaagctatctcctagcattatcactttctacaccatgttcatatttgctttctccatcttcatgttctttttctacgtgagacacatcagtgttgatgaagatccaccactccctctgctttctcaacaatctaaatctcatcaggtgccagagttacctgtacactataaacaactttgggataccccgttcaatcatggcttacaccaatgtgtcaagccgactactaaatataaagctgcccaaggatttgatcgctatctaaccgtgagaagtaatggtggactaaatcaaatgcgaactggtatatcagacatggtggctgtggcacatataatgatgcaactttagtcatacctcaattggataagcgttcattctggaacgactctagtgtgttttcagatgtatttgatgagcttcatttcatcgaatccctgaaaggagata

SEQ ID NO: 29038 - DNA, 446 bp, Glycine max
tgaacattgataaaaccgtttgttcctcccattcccactcccaagccaaacgaactaaaatcaccggcgatgttgccgggagattccaccggctccaccaccgcaacagtaaccgatccttcgccggaaccatcacattaaccacaatgtcgtcgacaccgcagagcttaaagcagagagtcttcagatgcctaaccaaactctccgaccgcgacacgcagtctctcgccgctgcggagctcgagtcaatcgctcgaaacctcgacggagccaccgtgccgatgttcctctcgtgcatgtactccaccgacgactccgacaagccaccggtgcgcaagcaatgcgttcagctcctagggttcctcgcggagacgcacggcaacatgctcgcgccgtacctgccaaagatcctcggcagcgtcgtgcgaaggctccgcgatgcggac

SEQ ID NO: 29039 - DNA, 286 bp, Glycine max
gcagtgctcttatgatgaaagggggaacagtgtcccaacgattctgctgctcgctcgcaaagcgattgtattcagagggaggccttaaagcggaaggaatattccgaattaatgctgataacagccaagaagaatttgtgcgtgatcagctaaacagcggtctggtaccacgtggaatcgacgttcattgtttatctggtttaataaaggcttagtttagagagcttccaacgggggtacttgattccctcacccccgaacaggtgatgcattgcaacacagaaga

SEQ ID NO: 29040 - DNA, 310 bp, Glycine max
taggcaccatcaagattcaagcacatagttatcatcaattccccagctagttttggccacgcctgcatcttcttctgctttaagctatggcctctaacttcagcttgagaactttgatgatatttgcccttgcattttctctcgccctgcaaggcactcttggagggatagaatgtgagagtctgagccatgacacatgctcattcgccgtgacatctgctggcaaacgatgtgtgcttgagaagcaggtgaagaggactggtgaggaagcatacacatgcaggacatcagagattgaagctgataaact

SEQ ID NO: 29041 - DNA, 539 bp, Glycine max
caataatttccacctgaagccggacaatatattccgtagaaacaaaataaattaaccataaccatatctccatataccttagagtgaaattgataccaatcaagcatgtctaaagacacagatggtgaggagccacttggtataggccttcaggtgatgctagcagcagctttctcattatttggtatgatcttattaatcatcatcttccatttttgtgtaaaatatttcattagacgccaacaaaggagacgccaaaacgaccttctttatcaaatcagcactcaaattgcaccaattgatgtgagttctgtggagccacgcaactctggccttgaccctttgatcatagcttccctgcctaagctcttgtacaagcaaacggaccaattcaagcaaggtgaagaagttgtagagtgctcggtttgcttaggcactattgtggaagatacaatcagtagggtgttaccaaattgtaagcacatttttcatgttgattgtgttgataaatggtttaattctaacaccacatgcccaat

SEQ ID NO: 29042 - DNA, 595 bp, Glycine max
  unsure (1)..(595): unsure at all n locations
ctcgagcctataaacttncttggtaactttgaaacatgatgataagttacaggatggatcagaatgtgctattcagtgtgcccttctttacacaactgtgtatggccaaaggagaatacgtgtcataaccttgtctctgcccgtcactagtatgctcagtaatctgttccgtgcagctgacttggatactcaattttgctgtttcttgaagcaagctgctagtgagattccgtcaaagccactcccacttgttcgggaacaagtgacaaacctttgcatcaatgcactattttcataccgtaaattttgtgctactgtatcctcatctggacaacttattcttccggaggcattaaagcttttgcccctgtacacacttgcattaactaagagtacagggttgcgaactgaaggaaagatagatgaacggtcattttggataaactatgtatcctctatctctgctccattagcaataccacttgtgtatcctaggatgatggctatccatgatcttgactcaaaggaagatgaagactctgttattcctccctttcttcctctttctagtgaacacgtcagttatgatggaata

SEQ ID NO: 29043 - DNA, 705 bp, Glycine max
tatgtctagccgattcggctcagccagaatttaggaaagaatatacaagaagccaattaacatgttttcttttaattacctattcaccaccattttcttagtgctaacattctttctttatccatcaaatgctcaactgagttcaaccttctactccagcacatgccccaacgtgtcttccattgtgcgcagtgttgttcagcaggctctgcaatctgatcctcgaattgctgcgagcctaactcgtcttcattttcatgattgctttgttaatggatgtgatggatccattttgttagacgtgggtggcaacataacactgagcgagaaaactgcaggtcccaacaataattcggctcgtggctttgatgtggtcgacaacataaagacatctattgacaattcatgccccggtgttgtatcttgtgctgatattcttgcccttgctgctgaagtttcggtgtctttgggaggaggtccttcatggaacgtactactaggaagaagggacggtttgattgcaaaccaatctggtgcgaacacatccattcccaatccaacagaaagcctggccaatgtcactgccaaattcgctgccgttggcctaaacataactgatctcgttgcattatctggtgcacatagttttggtcatgcgcagtgtagatttttcaaccagagactgttcaacttcagcggcacagg

SEQ ID NO: 29044 - DNA, 335 bp, Glycine max
gactatgcctatgatgtctagcaaagttgatcccttccagcatctcaaactcgtccccaattccgacggcacgatcactcgccagcgtgatgacccacccatctcaccctcactcaatcccacccttcccgtcctcacccaagacgcaaccatcaaccgatcaaacaacaccttcgcccgcatattcctaccccgcgaagcactcgattcctccccctccaacaacctccctctcgtcgtttacttccacggcggcggcttcgtcctcttcagcgacgcctctgacttcttccacgacgcatgcgtaaacctcgcagacgacaccactccatcgt

SEQ ID NO: 29045 - DNA, 425 bp, Glycine max
gccagcccttcctccatttcctcctcatataaactcttctcaataaccagatatttcattgcaccaatattcaagagcaatggccatgctcaatatcatcgccattgtctccctcttactcttaatgactccatcccacgccaaaattcccggcgtctattccggtgggccatggcaaagcgctcacgccactttctacggtggcagcgacgcctcaggaactatgggaggggcgtgtgggtacgggaacctatattcccaaggctacggcgtgaacactgcggcactaagcactgctctattcaacaatggtttcagctgtggagcgtgcttcgaaatcaaatgcaccgatgacccgaaatggtgtcatccaggtaacccttccatctttgtcaccgccacaaacttctgcgctccaaactacg

SEQ ID NO: 29046 - DNA, 264 bp, Glycine max
tgatgagttgaagaaatgacatttgcatccgagggaaaaggaaaatgagagagttctttcaagcatcaggccttccacgacaacaaagagacaacaatgatgggcatgatgctcctttcttgctttgaaaatttcttttttaactctttcgtcaattgagattctcacattcttttgctcttcaatccatgttgtaagtatgagtatttgtagatcatataccaatactctatgttaggacaacacctttttttcttttttggg

SEQ ID NO: 29047 - DNA, 320 bp, Glycine max
tacgtttctttcatatttttcaggaataataccatccaagaaaatggtagttcttagagaacacaaacttgtagaaaaatttcaggttggtccagcagtgagaacaatcaccactcttcccctcacattccttaatttgcctttagcaggtcctatttatgtgagacgccaattcttctatcacttcccccactccacactccatttctgccaaaccatacttccttgtctcaaaacctctctctctcaaacccttcaacacttcttccctctcgctggaaatctcatctgtccaccaacgacccacaaacccttcattc

SEQ ID NO: 29048 - DNA, 524 bp, Glycine max
gcagagttccaacgatgcatggtacccttgttccgccaaataagtcgttgcttgagcagttcacatttccaggtagctgagagggctttgttcttatggaataatgatcacattgagaccttaatcaagcagaactacaaaattatacttcccgttgtcttacctgctctggagtataacgcccgaaaccactggaaccaggctgtccagagcttgacaataaacgttcgcaagatattcgtggacactgaccctgaattctatgaagagtgcatgatcaaagttcgggaaaatgaagcgcaagacaaggatatgaagtcaaagcgcgaggccagatggaagcgtttggaagaaatgggaggcatgaaagctacaaccaacgaagcagttctagtttctcccagaactgcttctcataccccttctggcaaggcaagtagagctcagttggagtgataattgatttttggcattgcagagttgaaaagccataacttatgctgcattgcattatgctgcataag

SEQ ID NO: 29049 - DNA, 299 bp, Glycine max
agaatgttttgtggagtgcctctttctaggaggcaacaagtgacgttggagttcttcctaactcaggaagattaatactaaaggcaacgagtcaagcctgcaagattttctatttttttttctttttctatagttttgtgcagtgtagagaaaaaaatgtcattttacacgagaaaagcaggagtgagagagaaatatgatgcttgccccatggaccttcaacattttaagaggagattgaccatggtagcagctagtaagaggacgtgcgcacgagatatatagtccacatcatattc

SEQ ID NO: 29050 - DNA, 346 bp, Glycine max
aattctgatacagcaatttccattgctgaggagatggtggaacatctggaactcacaaatgaggatgtatctgtcattgcagagctaataaatgacatgattgctaagcttgtccccaacttgaaacccttaagtgagaaactctcatccggaacagatcaattgtacaggccttcttcggaagttcagaatggtgaacaattcaactgccactggccattacaatcaagtgattatgatatgaagcctgtgtttaaggatctagttcactcacggcctgtggacggggatgatctggagaaacaagaatctgttatgtcagatatatcagcagcgtgtgggatta

SEQ ID NO: 29051 - DNA, 271 bp, Glycine max
gtttgtttcccttctttctttccacgcacactcacactacaatggcaatttctgttgctttaattttgggtctatgtttagcaatgaacatggccctgccgacaggtgcagctacccacacggtgggagacacctcaggttgggcactcggtgttgattacagcacatgggctagtggcttgaaatttaaagttggtgatagtcttgttttcaattatgggactggtcacacggtggacgaagtaaaagaaagcgattacaagagttgcac

SEQ ID NO: 29052 - DNA, 261 bp, Glycine max
gctcgagctctcaacaaaacccaccgttttctgcgaaaatcaaacccacactcaccactctccaatctcccattctcccctctttctccaactcagcgcaaccgtcacgattgcgcccaaaatctcgatcttcactgcgaggcgtgttttgtgagcacggaatacgaatatggatcaccaagaggatgaaagtaacagcaaacaagacgatgaggaagctgttgctcgccttgaggaaataaaaaaatccattgaggcgga

SEQ ID NO: 29053 - DNA, 277 bp, Glycine max
tctcgagcgaatcggctcacggctcgagttccatcatatcttctcgaacttcaatctattctcaacacaaaagctcttaataacagcttcttcgtcatgggcatccttggaacaatggcaagaaatttggacacaatagtggggcctggagtgttgcttctttatcctttatacgcatcaatgagggcaattgagagtccttcaaccttagatgatcagcagtggctaacatattgggttttatactccttcaccgccctctttgactttcatgtta

SEQ ID NO: 29054 - DNA, 272 bp, Glycine max
ctttgattgctttatatgaaggagatgccacatcagaaactactcatattgagattgagccttttaccatcttgggagttattgcagggttaattccatatcctcatcataatcagtcacctagaaacacgtatcagtgtgccatgggtaagcaagctatgggaaatatagcatttaaccagctgcgccggatggacagtttgctttacctactggtttatcctcaacgacctttgcttacaactaagacaattgagctggttggatatgat

SEQ ID NO: 29055 - DNA, 559 bp, Glycine max
ctgggagatgccgttgctttaatcaaaggggtgggaaagaatttgcggaggaaagaaaggagggtacggatagagcagattagagctagtcttggcttgtcagattcacagagaacaccctcgccaggagaatccttgaaggatttctacaggcgtacaaatatgtattggcaaatggcagcccatgaacatactcaacacactggaaaagaactccgcaaggatggttttgatcttgctgaagctcggtacagggagctaaaacctattcttgatgagctggctctattagaagctgagcagaaagcagaggaggccgaaggaccagaaactagtgcaaagaaaagaggaaagaagaaaactagaaattgatatatttagcacatgacgtttgggtgccgtcgagaatgtaatatgcaattttggtttagtttgatgtcattatctgcgaagattgtgccaagaattttgtgcacataatttatgtcgcatggtcacgttacatgtaatcagtaacaagcacacacccaaaattcagttacatatactacacgaattc

SEQ ID NO: 29056 - DNA, 484 bp, Glycine max
agttgcaggtattctcttgttgattctgttagtactgtgctgcttcttgctgtgttgtttgatcagaagaagagctgcttcaagcagaaagagtagcaagactgctaaggctgcagcatctgccaggggtgttgagaaaggtgcctcagctggtggtgaagttgaatcaggaggtgaagctggtgggaaactagttcactttgatggcccttttgcgtctactgctgatgatcttttgtgtgcaactgcggagataatgggaaaaagcgcatttgggacagcatacaaagcgacactggaagatggtaaccaagttgctgtgaagaggttgagggaaaagaccactaaagggcagaaggagtttgaaactgaggttgctgcacttggcaaaatcagacacccaaatctcttggcacttagagcctactatttaggaccaaaaggagagaagcttcttgtgtttgattacatgaccaaaggaagc

SEQ ID NO: 29057 - DNA, 464 bp, Glycine max
  unsure (1)..(464): unsure at all n locations
gttttgttttgtttgagttgtgtgactttgcgcatagcatctgtaaaacccaaaagaaatttggtttctatttgcaaacacaaagcaagcttatgagtttctctcttccctttttctttatgggatccgatcggcggtgatcggatcatcgatttgacgcttgttggggagaggggcattttcattgccaatgggaatgcccaatcccaacaacaacaacaacaacaacagcaacaataacattcaccccgcaccatgagcaaagccctgggagcaactacagaagaagacgaagaagacgaccaacaacatccacaacaagattgtttctacgactcacacgaccgnttactttcactctcttcttcatgctcttgatccaactccaactccgacaacgaaaacgacacccaagaccaccaaaacgacaccagcctccccaatttcaccaactacgacatatg

SEQ ID NO: 29058 - DNA, 215 bp, Glycine max
gcggcacgttctatcctaaagaagacaccaacaatgggaatctgcagacatatgggtacccaaccaagggtacaaagaaggtctaggaggtcacagagcttcactttttgtatatgctatggaacggctagagaacatggcttttgttgccaatgctgtgagcctagtaacttacttctttgggtacatgaacttcagcttaacaaaatctgcca

SEQ ID NO: 29059 - DNA, 232 bp, Glycine max
gcactaatgaaaagccagttactatgtctattgagtctgttaacgatcctcagaccttgattaacaatatccaggtggtgcgttctgttgctcccgtcttaaatgaagagttgaagccaaaactgttgacacttcttccatgtatttttaaatgtgttcagcattctcatgttgcagttagattagctgcttcgcgctgcatcacttccatggcacagtcaatgactgtgaa

SEQ ID NO: 29060 - DNA, 391 bp, Glycine max
ctggtacgcttgaaccctcaggccagcgatcttctccttccccttcttcattcattccaattctcaacaattcaccgctccgaaatgggcataaccgcctccaccaccgccgtcgccaccctcctcctcctcctcttcttcttcatttccccttcagccgcagagatcaaaaccctcaccataacctccgacacccgccccatgatcctcttggagaaattcggcttcacccacaccggccacgtgtcgatctctgtctcctccgtcttcgtggtggcctcaggtgggtcccaacccgatccctcccgattagggttctttctcctgagcgaagagtccctcctgcaagtcctgatcgagatccagcaaaaccctagctctgcgtcctcga

SEQ ID NO: 29061 - DNA, 254 bp, Glycine max
gttggatcaaaatgtttaactttattccgggaatttcaagattccatcacaaaggtacactggaaagcaccttgtttcagtggtgatggtgagtgggtagttggtggttctgctagcaaaggtgagcacaagatttacatatgggatagagctggacatcttgtgaaaatccttgaaggacctaaggaagctctgatagatttagcatggcatcctgtgcatcctattgttgtatctgtttcgctgaatggttt

SEQ ID NO: 29062 - DNA, 341 bp, Glycine max
ggaactgttgctttgtgctaataaacggctcaagaaaggttcgcctgctagctgtcctatccataggatatgtctgatcgacccttatgattagcatttccttttcttttttgtgcacgtgtccttttgggatttcctaggtgattggtttttggtttgtctgaaatagtaacaccacacattgaaatccaatgatttcttccaaatgaggacagagcatagtccttctgtccacactttatgaaatgatttgtaatggagatccaataatttggggatgtctttagatagcattaccaatacaagagactatgtatccaaaaagagaaaaaaagaaaaga

SEQ ID NO: 29063 - DNA, 373 bp, Glycine max
aatgcatgtaaagggtgattgtacaaactatgagattgacccttctttcggggtggaagcttctaccctttatcctgaggtgaaatacactactgtcgacaactatttgaatgcgtttgtctgaagtccagagaatgcgttatcatcaataaactgctctacctaagctgatcaataaaatcagagcatcttgtttattgctcaagaatttgtcccttgtcccttattgtcgttcgctacttcgcttagcttggcgctgcttgaaagttcttctaatattaaagttcaattactatttgtttgtggtgtgaatgtaatatttctaaggtccttatcaggttgtttacggttcaatttcaatcaaatgttagcc

SEQ ID NO: 29064 - DNA, 266 bp, Glycine max
ccaataatgctgaggaagatttgtctgatgatggatcacaagcaggggagaagaagaggaggctcaacatggagcaggtgaagacacttgagaagagctttgagttggggaacaagcttgagccagagagaaaaatgcagcttgcaagagcacttggcttgcaaccaagacaaattgctatatggttccagaatagaagggccaggtggaagaccaagcagttggagaaagactatgatgttctcaaaagacagtatgaagctgtc

SEQ ID NO: 29065 - DNA, 349 bp, Glycine max
cctgaatgtgccacgccaatacggcaccccagtacttcaacccttccctccccctaatcctcctctttctcttacccctatttcaagctccactccaaatagacctgtaatcagcagggataatgtccgtgatgcacttttatcattggttcaggaggatcatttcattgacatgatgttccaggcattactgaaggtgagtcattcatgagtaatcaaactctgaaggttggatggaaactgcatataaagttagttctgtatattgtagttacacaccgtcacatctaacaggaggtgtaacctagtatagacatccgtccgtctttagctttagccacaactttgc

SEQ ID NO: 29066 - DNA, 277 bp, Glycine max
gcgatactttctctctttctctgagtgaaactgaaaagtggaaacaaaacgtgtgactgttgcatgaattgtccaagttaagaagattgtgaaatcctcagaaatggagaggttacctttggaaatctgtatgaagatattctatctcttggactatcagcatcttgctgttgctcaacaagtatgtaggaagtggaagctcgtggcctcagagaatgctctatggtctgatctttttaaggagagatggggagaagatcatgctgctttttatgct

SEQ ID NO: 29067 - DNA, 689 bp, Glycine max
cttgccgctcatgaagccaagaaatcccgtcttcagggtcgcatgccaagagtcattttgttctactgtagatcatcagagcgaccaaagcatcagtggcctgtgaaccagaagctcttcactttggatgttatgtaccttcatgataaacctggaccagataactgcccccaggaggtttacgatacactggtggaggcacttgaacatgttagtgaatatgagggttatatcttggagagtggacaggggttggcacgtgttctattccgtcatgtgctgatactattgtcacatcctcagcagcgttgcatccaagagtatgttgacataccaaagtcaattgcaaagaagcctccccaggtggagcctatggctactgaagatagtgctcccatatcaagccaataatactatgagttgggaagtggatggcagttgcatgtggtcaacctctttaggggaatggaatatgatcataattcagcaatgttcaagttggaggttagtgtcactaggttgacaagggaatgattgttactagcgtaacagtttctgaaattggattcgattcctacaaccctctttcgttctcaagttgataccatttactattttgaatcaaatgtatgaaaagtgtactttcaaacatatccatattcattagtaatcaagcgtttaggtctgat

SEQ ID NO: 29068 - DNA, 749 bp, Glycine max
ctcaaagaaggaagccattgagaacataggagctgactcatttgtggttagccgtgaacaagatcagatgcaggctgtaatgggaaccatggatggtatcattgacacagtttctgctgtccatcctcttgtgcctttgattggcctgttgaagcctcatggtaaactagtcatggttggtgcaccagagaagcctttggagttgccagtattttctttacttatggggaggaaaatggttggtggcagtagcatcggagggatgaaagagacgcgagaaatgattgattttgctgctaagcatggagtgaagcctgatattgaggttattcccatagattatgtgaacactgcaatagagcgcctcgccaaagcagatgtgaaatatcgatttgtaattgacattggaaacacgttgaagccaagctcttgagtaaataaagacatatgcatgcgtgattcagacttcagatactgaacgtacatggggcaacagataaagattgagaattgataataatttctttaagcattatatgtgttttccgtaatgagtttttgtttcaaggatttagctacgctattccttgataaataagcaattaagtgtggggtgtgcaattgcttaagcttggttataatccctttgggacgaaaattgttttgtactatatatacattttaaagagtgaaattgtgtgagattatgaacatgttaaatgtttttaattattttgattgttggcaag

SEQ ID NO: 29069 - DNA, 284 bp, Glycine max
ctttttctctagtgttcttgtgctaaatccagcataggcaacatgatcttcaggacactcctattcctcctggcctttatggtgacaaattcagttgctgtgatggacaagaagacatacataatacacatggacaagaccaagatcaaagcctcaatccattcccaagacaacacaaaaccttggttcaaatcagtcgttgatttcatctctgaagcgtcattagaagaagacatagcccctcagcttctttatgtttatgaaaccagcatgtttggttttgc

SEQ ID NO: 29070 - DNA, 471 bp, Glycine max
ctcgagccgaatcggctcgagctcattcgcatccaaacctagctacgaagctgatcgattaccgacatgtcgatctccaacactcaactaaagcctctgcttcccaacccatttaatttgagtaatactgagatcgttgaaaaagtttatgtatcccacacttacgacgacgcgatgttcgataatgagcccctcttcaacgtcgtgtccaacattatcaagctatcaactcgaattgttggggctcttcttcagatagatgagcccaatggatttttaggaaatcccataaccataagcagtttcaaaccagaattctccactctgaagctgatgtcgtgccagatgatgaccctaccttgggggccagaaaacgcacaccaaacaacccttcggattcttcaacaactgagaaagtactcttgggacgcaaaagcgctgatagctctagcggctttcgctttggagtat

SEQ ID NO: 29071 - DNA, 591 bp, Glycine max
gttgcaaatagatgcaaggctgcaatatatgtaagtaaagaaattgttttcacagatgctatcagaattggttatggaatgggcggagtgtgtaataaaaagactatttatgatgtattgcttgacagtgctgtagatggtccagatttggtagctcatgaactaagtatgatgcataatatgcgtatagctatcaaacaggaaagatttaaagatgcagctatatggagagacaaacttgctaatcttcgtaaatcagcccatgagctctaattagcttgttagggtcagttctgaagaatataggggtattatgggtatcttattcctgataatttttcatcaggagtatattggggaataagttacagaaatgaaggaaactagcaaaattaagtgttgtacagctgtgtattatagtcgtcgaccccactttgtgtacaccaaatgaatttgaatgtcttaaaccttgtagaagattgtcgtgcttctaccaatactcagaaacgacgacgatgatcttgtatgtatgcaatcctggaaatgatcatcaatgagaattagctcatgtttgttttaaagtcacataat

SEQ ID NO: 29072 - DNA, 505 bp, Glycine max
ctcgagccgaatcggctcgagtcccaatatacttttactctctattgctgagaagtgagaagaagaagaagcagtgacaccaacacacacaaatagggaagtgataatacccaacacattaaaatcaaaatcacatgcaacctcgaactccaaggttgtctctgcgctagggttttgggttcgcgaccaaatcgaagtgagcttgagggccctgcaaatggtcgtgttgctgttcgagacttcgattccgagatcgaatattcgtggtgcgataatgctagaccatacctactcttagaccaacaccaacacgaacaacaacgcgcgaatcctaggttcgaatcaaaatgcaattcgctaagctcgatgactctcctatgttccgcaagcagatacaatgcatggaggaaagtgctgaatctttaagagagagaagtttaaaactttacaaaggatgtagaaaatacactgaaggacttggggaggcctatgatggagatattgc

SEQ ID NO: 29073 - DNA, 716 bp, Glycine max
tctgtggtggccacagtttaccaattgtattgggattttgtcaaggactgggggtttttcaatcccaaatccagaaacccattgtctcagagatgatctaattctaaagaataaatgcatatactacatgtctatggcattgaatgttgtcctaagggtggcttgggtggagactatcgtgcacctcaaagtggggcctgttcaaacaaggctactagactttttgttggcttcactagaggttattcgacgaggacattggaatttctacaggttggagaatgagcatctaaacaacgtgggtcgttatcgggcagtgaaggcagttccactaccatttcgtgacatagactcagacagctgaggtgattttctcacacttgtacagatttgtcctgtaaaagggataggcaatatagccccaagggaataaaattttgaacgtgacatccctcaccatgcattggataccaattgaagtatcaatcgacaccaaatgtaatgcaaaagacaaatgcataaatagatggcattttgtcttgtgaattggctatcataagttttggatttcatgttctagatcaacatacttagtaacaaaagaaaaaaaaaagatgtattcttttctttttgtcttctatttctgttttgttaaatcggttttaagaaaacatatttgaagatcgtgtatcgaatattttgtaaattgcaattag

SEQ ID NO: 29074 - DNA, 479 bp, Glycine max
ctttctctcagttccggtacgacattacataactctcagtttctcgcgcttttctggaaacaaatacctgatgtccctgatcccatcctttaccctttaccctttacccaggaatcattccatttcccaccaattaccactctcacactccgagccaacattaaccaaaccttattcccttcctttcctctctctctctctctcttgaaaaataatggaaaccactcaccattctagctttcatctgtcactgcccaggttgctgctgtcttctcggtcttccctttccagccacaccctagtcatcatctcaggcaatctttctttctctgcatgatattaatattatattcttttttctaataaatatcactactacacatcaatatcaatattcatcaatattattatgaaaagaaaaccctagtccttggaagaacgagaagaagttttcgttagcatagctatccaagtagcat

SEQ ID NO: 29075 - DNA, 351 bp, Glycine max
  unsure (1)..(351): unsure at all n locations
ggccgttcctctgagggtgaccttgtttccttgattgagaaaggaccaaagcatcatcaaagaggctcctcagcgcctgatcttgcggaaataaaagaagaaatccagctacaagagaaaaaggtggggtcaaagaagaagcggaacagaatatacatgaaggagcttgctttggcctttctacttctaacagcttcagcaaggagtctcctttctgctcagggaatccacttctacttcttgttattccagggcatatcattccttttagttggtctagacttgattggtgaacaggttgattgaatctgaaaggtgnnnnnnnnnnnnnnnnnnnnnnnnnnnnnnnnn

SEQ ID NO: 29076 - DNA, 549 bp, Glycine max
cttacaggtttactctgtcgggtctgcttaacaacatggatggtttatggtcaagtggtggagaggagcgaattataatattcactactaaccacagagagagaattgaccctgcattgctgcgccctggtcgtatggacatgcacattcacttgtccttcctcaaaggcaaggcctttcgagtcttggcttccaattatttaggaattgaagatcattcactttttgaagaaattgatggactattggagaaattagaagtcacccctgcagtagtagcagagcaactgatgagaaatgaggatcctgatgttgctttggaagcacttgttgcatttctcaaagaaatggacaaggatagtaattgccacttagagttaagagggactagtgagtagggacttttgctgtattcaactttcctgttaaagtaataagatgattcattgaaatgctgtttcctgtttctgttgataaggaacctgaattgtaaggaaaagttatttcaaggtgtctttaacatcggaatcttttgaattggtttttcag

SEQ ID NO: 29077 - DNA, 1005 bp, Glycine max
  unsure (1)..(1005): unsure at all n locations
gccttgtcacattttccactgcccatgtcccttagaacatggaggtgattatggcatttcccaatcttaaactcactctctctttctccctctcacctctcacaccataagggccctcatggaacaacaacaagcacttactacttcctagtccttcaagcaacaatcccaagtgagcaaactcagcatgctacactcaagtaaataaacaagaccacctcaatcattgtggtcgaatccaaccaaatcaaagccaaatactttgcccttcttgctcactcaccacgacccttttgcatgttttaaggagaaagattctcatctttagaaagaaaagacaacaagaagcttgacagagtttataaagagatatggagattgactcagtcaaatgcgagtgttgtcgcttgatggaggattgcacccaagactacataagcgaagtgaagtccaagtttgatgggaaatggttatgtgggttgtgctcagaagcggtgagagatgaagtgagccatggagggaagaaggcatcatcagctatggatgaagctgtgaaggctcacatgtcattctgccgcaagttcaaatccaaccctgcagttagagttgctgaagggatgagacagatgctaaggagaaggtctgacttgtcatcatcatcatcatcatcatctccatcttcatcaaagaagtacacaaggtcaaccagcacttctcaagtcggggattcttcaagtttccatttgtagtagcaatgagagaaacagaggatggaaacagggcagaggcagaggagactctgctttggttggaataaaaaaagttgataggtttagacttttgggtttagtttttttcttcttcttgttatgnacaggaagtcttatttcagttttttttctttctgttttctttttctccaactgatctctagtttggtatctctaatcctctttgttatctctttgtttactttcttggctaaatagagacctagttttcaag

SEQ ID NO: 29078 - DNA, 279 bp, Glycine max
cgtttcttttacaatgaagtaaagcaagcgtctgcatgttctttctttgaaactcgttaaagaatccaaaatatattccgtagacaagatggcgataagatttcttacatggttcctctttgtttcatgtattcaagccatttcaagttcagaacagacacttgcaaatgcaaacccctccaactccaagaccaacattgtgcatcccgtggacaagtatggaatcataactgaggacaagcacgatctatcttatggctcaagaacacggagaggaca

SEQ ID NO: 29079 - DNA, 313 bp, Glycine max
ctcgagccgattcggctcgagacttaagttcactgtcgacaagtttcgccccaacactcaactcagctcgctcttgttcttcttctccattatcaaacgaagtatagatatcatatcattgcagcttcattttcatccaccaattaactaacaatggcgcacacatcccttttcactccctcttcctctcttaggttcaaccctcttcttcttacctccaccccctcttcttcttcttcttctcgctccaacaacctttctttccccgctctctccaggaacctaaggtaatcggtagaagatagaaagatta

SEQ ID NO: 29080 - DNA, 250 bp, Glycine max
tctcgagccgaatcggctcgagcagaaacacacttctttttgcttcttgtgcaaaagaggtgaccactaaagcgcaggttactgtcgtgatgtctgataaggcgttggttcaagcatttgcaaaaagaggtggctagattggagagtgagttgaaaactcctggtcctgctacctccaattgtgattatgcagcattattgagaaagaaagatcttcagatagaaaagatggagaaggagattagggagc

SEQ ID NO: 29081 - DNA, 598 bp, Glycine max
  unsure (1)..(598): unsure at all n locations
tcgagcataccactttcctttccccattaattaagcacttagtaacagtctaattccacccgcaacaacatgcctnattttgtttgtttgttttatccaccctcactctcactctcactctcactcacacacagccacacagggacgaaacgatacgatccatggcgatgatgatgcacactgcgcaccctcacctcactaattaacactaatcgttacttaaatcagttaaaacgaggcatcagaataagtgcaagtgccagatctcgatctcgatgcggtggcggttgctgcttttgttgcttttggtaacggctcgcgcaatgccggttccgatcacgttttccgcccgcctcgttcaccgcttcgccgacgaaatgaaaccggttcggcctccgaccggatactggccggaccggtggagcatgggctactaccggatgcttctcaccggcgacattctccggcgcaagatcaaagtcggaggcgcacgctaccagctactgtttccttctcacggtagcaaaacgatgtcgctcggcaacgaacttcgctggttgcattacacgtggattgatataggaacaccgagcacttc

SEQ ID NO: 29082 - DNA, 321 bp, Glycine max
atttaattagaaccgcgtaaaataatattctgtcgtgacaataatagatttgagttctgttggaacaagaaaaatggaagttgcggcggcgaaagcgctgaaaccaagcttgcggacagagtttattttccctcaagcaatctacgacgagattttatgttttaacgcgaacaacgttgtcgccgatgaagatgtctccatggacgacttacttgactttgccaacggggaattccaagttggaaaagacttcggtgattacgaggaagaggaagaccaggaaaaaaacagcacctacggatccttgcaggcgcaggacag

SEQ ID NO: 29083 - DNA, 256 bp, Glycine max
agataaaagataacaccaatacctcaactcaaacgcttgtttcgcctaaccaaaggaaactccactgcggtttccctttcttctctgtcttcactactctcttttctcaatacgaacaagaaaaatggaagttgcggcggcgaaagcgctgaaaccaagcttgcggacagagtctattttccctcaagcaatttacgacgagattttatgtcttaacgcgaaccacgttgttgccggtgaagattctccctggacg

SEQ ID NO: 29084 - DNA, 486 bp, Glycine max
cccacgcgtccgcccacgcgtccgccagtttatcccggtcgcggcccgaatccaagggtcatcatcctctttaaaacgacgtcgttgactgcacttctttgctgaaaaagcgagcggcgagtaacaatgtgcggcgacgccacgaactgggacgaagacgcatacagagaaaccgtactcagggagagggaaatccaaacccgaaccgttttccgaaccgcttgggccccaccctacacctctaacctcgacactctccttgtcgcctctagcgacggttccgtcgcatcctactccatctcttcctccgtcgtcgcctctaagctcaaaaatccattcggttttgtcaatgccgatacagatgagttattggctgaaccaaattgcttcgttcaagcgcacgctggacctgcttacgatgtcaagttttatggtgacggcgaagatgctctgttgctgagctgtggtgatgatggtcagattcga

SEQ ID NO: 29085 - DNA, 412 bp, Glycine max
ttttaatctgagaaaatggtgttgtctgatctggagatctgcaagccaacttcaagttctcacaataaagttggtatttctagatctgggagagatctgccaccagctcattacttgttcaaaattgaatcatattccgaattgatgaacacaggagtggagaagtatgagactaatgttttccaggctgggggatacaaatggaggctgatactctatccaagtggtaatatcaaaagcaatggcaatggttacgtgtccttatacttggcaatagcagataccgagaagctttctagcggctgggaggttgacgtaaacttcaagctgttcgtctttaatcagaaaaataacaattatttaaccatccaagatgcggatggcaccgtaagaaaatctcacgaaatgaaaa

SEQ ID NO: 29086 - DNA, 276 bp, Glycine max
gcgaccccttctccaagcttctcttctcttttcttctctccatcttcttctctgctcagtctcgcaatcttcaccttcatttggatcatgtgcaacccttgctccatcctctgacactgcaactgcagatttactgcagaatttgtccttggattccgagtccaagacagttcctgagcctgcaaagaagaatggacatggtccagccaagggggtgaccaagccatttaacccgaatgcaagcttcactccaaatagacacctgtctgcttctgc

SEQ ID NO: 29087 - DNA, 226 bp, Glycine max
ctgaaccagagagatcctcaaacccagcttctgttcctccatttgctagtgcgtctagggcatgttcttacaatgatggttttggtggttttggcgattcttatggaagttttggtggtagcgggtatggtcctggttcttataggtcacttggaggttttgggggtaggcttggtgattatggtgggtatggggctggagatgaatttggtggtagttttggggg

SEQ ID NO: 29088 - DNA, 470 bp, Glycine max
tgcttgattcaggaatcatgaccaagataaagcaggcttctatgactctggtcaagatgtatatgaaaagagtgacaatggagcttggatcagctcggaactcagacagacagtctagccaagaatcccttcttctccagggcatgcattttgcatatagagctcatcagtttgctggtggtctagatgcagaaactttgtgtgcttttgaagagataaggcaacatgtaccagcacacttggcaggttctcgggaacttttggctggcatagcatcatcatgagaggcctttaatatgttatactttcttttccttatgtccaatgttcaacaatattaaccattcggaagaaataagaaggaacatgaagagattctgaaaatagtacattacatatatagtggttgagcaagtcaagtggttagtctgctattgttcaatggttacaaactagcagcttccctcatc

SEQ ID NO: 29089 - DNA, 382 bp, Glycine max
ggacccaacacaacactactagtgtggttttttcccttcatcgtcttcctcttgaaggtattgaagttgttttgttatgtgtttgccagagggagagagagagccatggcactagaggcagtggtatttccacaatcacaagacccttttggtggtagtggttacggatcagtgaataataaggacttctacaactgcaccttgttggctgctacttcacccaactcatggggggactatgagcaacacatcaacatcaacaaagaagaagaacaaggtggtgcttctatctccacttttcaaccagagagtaattacccttatggaaattggaccagctcctcctcatctatgttaccccacttcaacaatgaactttaag

SEQ ID NO: 29090 - DNA, 344 bp, Glycine max
tactcgagccgattcggctcgagatccatcgaacctagtaaaacaaagaaatggcttctcatcatctccaatatcttgtgcttgccatagccacacttctcacaatctcttcacatgcacaactcactcctgatttttacaacaatgtttgccctcaggcactgcctatcattaagtcagttgttcaacgagcaatatttcgtgaacggcgcattggagcatctttacttcgtttgcacttccatgactgttttgtcaatggctgtgatggatcaattctgctggatgacacccccaacttcactggggagaagactgcccttccaaatattaactcaataaga

SEQ ID NO: 29091 - DNA, 336 bp, Glycine max
gtgggagtgggacaaacaacacatccagtcgtggcggtggtagggctggcacagatcgtaatggtggacgtggtggtgccaaccaattcggcagcagtgattatggtctgcaggggaagcctgtatacaagaaggaaaatggggcacccacttatggagggtctacatcctctgcacctagtgtgctgggaaacaatgcgaacatgagaccggcatcctacagtgattctgtggttactgaaaaaacatacgcattcagcatcggtgatggaccatcttcatcatcacaacgtgctggagtgcaatctgcatgggcagggaatacgggtcaagtat

SEQ ID NO: 29092 - DNA, 577 bp, Glycine max
ccacaatacaaccacaaaagctttcattgctcctagcaattcacaacaacccttcttttttagctttcacgaaactttccaacaatgaattcctcaaaggcatgcacccttttgaatttggtagcggttgttatgttcgttgccattttgattagccaaagtagggtggaggctagggttttatctcattcggaggaatttgcatttgcaagagctaataatctccaaacatacacctcatcagcctatgagcaagccaagaaaaccatggggttttggatgcagcgtttggcttctggacctagtcctaaaggccctggtcattgatacttcaccctaatacacacgttcacatgtagctagaatagctcaattattttatcactttcgtcaatttattaaaagattctttaggtcaagatatattcaatatgatctatcggtgagcacagacctatctatccacataaataatggatgtatgtagaaaaaatgaacatggatctaacaagtgcaaagatccatgtgtattgaaataggattctttaatttatatatatacgtcattttttaattt

SEQ ID NO: 29093 - DNA, 473 bp, Glycine max
aacacacacatttctagtccccaaaccctaaactagaagagaaaaagagaaagtgcaacatcataacatcaaattcgtatgtgcttttgcttaccctaaaatctccatccctacaaaaagaagaagaaaaacaagaagaagtttaacatgtcagctgccgtggccgcttccgctgccgccgctaccatgtcgggttaccaccacaactcctcctcgagacaacaacaacacatagaccatgaattggccttaacaccacaacgagtgtgtgtctctccacctctgagcaggtacgagtcacagaagcggcgcgattggaacaccttcgggcaatacctgaaaaaccaccgaccacctttgactctctcacgctgcagcggcgcgcacgttctggaattcctccgctacctcgaccagttcggaaaaaccaaggttcacgccgaaacctgcggatactttggaaactcccaccc

SEQ ID NO: 29094 - DNA, 295 bp, Glycine max
gctggtgctctgtggggattatcagtctcggaaactaacagtgttgccattggacgagaaggaggtgttgcacctctgattgcacttgcacggtctgaagcagaggatgttcatgaaactgccgcaggagcactatggaatctggctttcaatgctagcaatgctctaagaatagtagaggaaggtggagtatccgcacttgttgatctctgctcttcatcagtttcaaaaatggcacgattcatggctgcgttggcattggcttacatgtttgacgggagaatggatgaatatg

SEQ ID NO: 29095 - DNA, 256 bp, Glycine max
aaatggaggctgtggttgctgccctgtgtatgaatatttatattgttggtttgaatcaattgtctgatgttgaaattgacaagataaacaagccgtatcttccattagcatctggggaatattcctttgaaactggtgtcactattgttgcatctttttcaattctgggtttttggcttggctgggttgtaggttcatggccattattctgggccctttttgtaagctttgtgctaggaagtgcttattcaatcaa

SEQ ID NO: 29096 - DNA, 319 bp, Glycine max
ccctgtcccaggaaaatctgggttttgacaaactacttgaaattgatcaagggaatgaggatcgttggactgacgggtggaatagcgtctggaaagagcacacgtttccaatctgttcaagtcccatgatgtgcccattgtagatgctgacgttgtcgctcgcgaggtgttaatgaaagggagtggtggttggaagaaagtcgttgcagcttttgtggacgaaattcttcttgaaaatggagaagtcaatagacccaggcttggccaaattgtcttctccgatccggataagcgtcaatttctcaaccgattgctagct

SEQ ID NO: 29097 - DNA, 392 bp, Glycine max
cccatgcgtccgtcctaattctgaatcgagtttcaaaattagggggaaaagaaaacttcgggttcaataactgttgaggtgttgatttttcatagtgtgcaattagttttttgggaagttagatgctgttgagtttattcgtctgccacagaaggcaaacttgaggacatatataaaacatgtcaagcaagaaggaagagaaatctcaggctgcagctgaaagaatcaaggctgcagccctgagtgctgctaaaggccttattcgtgcccaggctgaaagggcggctgctgcggctgcccgaaatgtcaatgcctatgggcagaaggaagaagggcctatcagatggcaggagaaaagagaagcaaagaggcagatgtatttgatgagtacc

SEQ ID NO: 29098 - DNA, 505 bp, Glycine max
aagccccttcttctcgctcggtacactcttattgctatccgctgttcacaccctccctctcacatgtcaaacctcaagctacccatctccctctgaaacactttttctcccctttcctttttttacacctttcactggtaggtcatattgccagaggattttggctataatgactgcatctgggttgagtggttgtcccacaagatgtccacagctaccttttcatcccatgggatcacgccatgcccgggttatggccttctctgtggctgggagaaataaacaagggatagcatttcgtcaagtggaaagaacgagttttttgtctcctatattaaaatgcaatagacaacttcagttggtcaaaagtgccatggatgcttcatatggtgatatgtcaaatgattctgctgctgtttttccaagaattaatgtgagggacccatataaacgacttggaataagcaaggaagcttctgaagatgaaattcaaggagcaaggaac

SEQ ID NO: 29099 - DNA, 252 bp, Glycine max
ccgctcgagctcgagccgaatcggctcgagcggctcgagctcaatcaggaacccattagttacaggttcgcgagaagtatttggatgataatggaagtgccttttgtggagaaccctgcatgattgctggaagtcattcgtgcacccttgacagattgtatgcatgggagagcaaactttatgatgaagtaaaggctggtgagttcatcaagaaggattttgatcgaaaatgtgacctgctaaggcatcaat

SEQ ID NO: 29100 - DNA, 276 bp, Glycine max
gattcagactctggaagcttcctttggccggagaagaagacggtgtcgtttgagacttgggggagaggagaatgacagagttgagcagcagagaggtggaatacataaggagacaccacagcaaggcagcagaggacaatcagtgtgcctctgctctcgttaagcacataagggccccacttcctctcgtaattccctttgcatcattaagtaattaagtaattattatattattaattactttatgatttgtaggtgtggtcgttggtgaggaga

SEQ ID NO: 29101 - DNA, 534 bp, Glycine max
gtactctcgcagtctagctagcctgcacttcctaagtacttttgtgcccttaagctttgtctttgtaagttggttgtcatcgtgaagcacaccagcagtgtcgtcgtgaagcacgccagcagtttcatcattgtcatcaaccattctccatcattgtcgtgggtcattttccatcattgtcgtcgaccattctccatcactgtcgtgggtcagcttccaggtcatgttcctttctccctttctttcttatacatagtctctaaggtaaaagggctttgtggtgcccttctttgaatttggttgtatctgcacccctgttctttgcgcaaccatatagcttactgcatttcaaagaaactagcactcgattagggttagaagtatgatggaactgtgtaaatgcaacgaggcatccgttctgtctacgaaatatttaatctttattggagactaaaagtctagattcccttttgatgagattcaaccaacaatctgcgcaaacatatatgactcttggagaacttgttaaaatac

SEQ ID NO: 29102 - DNA, 287 bp, Glycine max
ggaaccatggattcctctttgcaattaactatcatagccatatgggtgtccttgttagtgtttctctggcacactaagagaaatagaggaggtagcaagaacaagagtaaagaggctcctatcccagctggtgcatggccactaattggtcacctccaccttctgggtggcgatgatcaacttctctaccgaacacttggaacaatggctgaccaatatggaccagcattcaacatctggctcggcactcgccgcgcatttgtggtgagtagctgggaagtggcaaa

SEQ ID NO: 29103 - DNA, 317 bp, Glycine max
ctcgagccgtttggtttctagttctagaacacatgtacgaatactctttgcctccccttctcacttcgcttattcttctctcgtgttctatgtctcttctttcttgatgctatgttgatgactggataatatgctgagacagaagggtagtttctagaaacttgacagagctaattaagagaatcttggtatttataggaagtagattactttattaactgggtaataagtcgttgtttggaggctatagatggcgatgcaaaccgtttatctgaaagaacatgaaggacttgtccacagttctgttgggcagttgt

SEQ ID NO: 29104 - DNA, 401 bp, Glycine max
gccgctcggaacgagtttcgactcgcccgaccggagttccgagtttgtgttcctggacatggacgacgggtgcccctattctcacccgtggtaccacagcatttatgatggtgggtacttcattagcgacatgaacaacatggtttcgatgcaagagtcagagagcatggttctttccctgtggccttgaagttaagccaatgctactcattgcagtatggttatattttggttctttttttttttttttgcgtgagacagataatcatgtttctgttcttaagtatgcgattagggattggattttcatgtccgtatatatgaaataacatttatttgccgatatcaatctcttgaatgaacatcaatacattgagaaattagtctctcattatcgactc

SEQ ID NO: 29105 - DNA, 437 bp, Glycine max
gtggttatgaagtgtttgggaggagagagagagagagggggtgtggtgacaagaacctgtactgttgttgctagagagtttccattaaagagaggaagcctccgacaaggatagtttgggcattacggtaaatataaaaccggtcggttagaaggtcccttcaccacccttcaacgtcccttcaccaaacctccaaagtcactcacatagaaatctaaattacaccgaagcatacctcaaacctcaacacattcataacatataagcaaaccaacaacaacttcaaataaaacagagcatctctctgttctctgttctgttctgattctctctctttctgactttctctttctctcccccctcatatattcttcttttcttcagaaggaccacttcactttcagaaacccagtttcgcatctgggtttttgtttgtt

SEQ ID NO: 29106 - DNA, 536 bp, Glycine max
gtcgataggttctgcaagccgattatgacaacacagaagccaacaaaggcagttactccagcaggaccagcaaccccatcttctcagagtgatgagcaacagcaaccccagggggattctgatgtcaacagtaatgagaatgctgggaatagcagtagtcaggctgcaccagcatctaccgaaccaatggagactgaaaagtctgagaacacaggctctgcctaatttttttgttgttggtttgctctcaagtctctactatttgtataagcaaaagagaattttgctgggttgacagtgagtgtggctccttggatatttggtgtaagtagaaccctctcggttggttggtaccctaagttttatttaatcttagggtggtgctttggaatcctcatttttttcacgaaggagtttagaaaaacagacggcaatgtggttggaattggccagagtaactttctttaggtttatatatagattatgtgtataagatttttagacgatgaatgaattataatgttcatttcccgttt

SEQ ID NO: 29107 - DNA, 279 bp, Glycine max
aaagtccattcccaactagtcaatagtcatataaagacatacacataagagaaatagttaatggtagtgaggtagagagggaaacagaaacaaataaaacaaagcaactttggcaagtaaagagagcttgttatcatggtagttgccaccatggcatggcgtcacaaggcggtgccaagggctgaagtcctcggcatcctcgcctttgacgccggaaaaaccatgtgccacctaatctccctctaccactccctctccgacaaagaaataaccaagctt

SEQ ID NO: 29108 - DNA, 267 bp, Glycine max
ctcgagccgctcgagccggaaatttaatctgttctggatcttgccatggctctttccattcttcaatcccttctgttctcaatcagcctctgcttcctcgcttcttcttttcaagatcttcttcttctctccgttaatgcgcaatcacacaatctcactcaaccttcagttccgccaatcaactacgatctctaccattccagtgacaatttgatggaggagatcagggccttggtccatcgtcacccggataaactcactacggag

SEQ ID NO: 29109 - DNA, 466 bp, Glycine max
aaatgccattgtgtgcagtgccagtaaaggttggttgaatccacctttgcatttcagtgatgaaccatgtcgtcacaagatcttagaccttattggtgatctgtcactgtttgcccagtttgggaatcaaggactcccagtggctcatatcgttgcgtacaagggtggccatgcattgcatactgatttggcacgccgcctgataggaatgatttgagaggctatcatgttgcccgtggtttactaagaagttattggtattttaggtggcctcgttggagtagttgttcaacctgatgcttctgagctcttatttatgtgcagccaaggtggaagaagaaatgctgaaattcctaaacatcttgtattattattctgtctcttccttgtttctatcgtcatcaattttgtaatgaaagcatccaagcaacccattttgtaaaagaaagccattcaattttccatc

SEQ ID NO: 29110 - DNA, 293 bp, Glycine max
cgttccagaagctcagattgtcttcatgattgcaattttataataagataaaataaataaataaacatattggcctctttagactataacaccatatgttcataaattcatattatctttttatttgggtttctcaattgctcctaacttacctccattcttaattctttggaagcttcaaacttaaaagtcttgtttgttatctttttcttcccttgtctacatctatatttattagaatttattcgttgtgcatatcaattccaaagtgaccctattgttcatttgttttt

SEQ ID NO: 29111 - DNA, 367 bp, Glycine max
tgaactggactatctgcttttcattgtccgggatgttaatgtgaaccccaatcctgatgaactggctgatatcaaatatgtgaaccgtgatcagttgaaggagctgttgaggaaagctgatgcaggtgaggaaggtctgaagctatcaccttggttcagactagttgtggacaatttcctattcaaatggtgggaccatcttgagcaaggaactcttggggaggccagagacatgaagaacattcacaagttgacataagtaagttcagaggagcttcctgcatcccagtaatgaagggtggctgcattccgaccaaattagaacgaaattgggaccgattttcgagaagaattttcggagcagtga

SEQ ID NO: 29112 - DNA, 542 bp, Glycine max
aacagcatagcataaaatgcgaaatctttgttcccagttgcaaaacccttaaaccccttccacgccatgaagtcccttctcaacccaaagttctcagctttatctcccaaagcttctccttttgctctgttctcacttccttcttctcgattctccttccgcagcaacccgcgtcgaatccccaatcgtcttcttcgcctcaacccatcaccctgttcgtccaataatttctgttgcaccattcaaaatcgaagtttgcaaacggagccctcgccgcctccctccggcgagattcacgtcattgtggggcccatgttcgccggaaaaaccacatcgctccttcgtcggattcagtcggaaaccaccaacggcagaaatgtagcaataattaaatcaagcaaggatacaagatatggattagactcaattgttacacacgatggtgcagaattaccatgttgggcactggaaaacttatcttcattcaagcagaagtttggaattgatgcttatgagaagctggatgtgattggtattgatga

SEQ ID NO: 29113 - DNA, 379 bp, Glycine max
caccaatctcttcttgctaaagcaacttcctttcatctcttcttgttagctttcaacacaatatatgaaataaaaacattagtctctctctttctctttctctctctatatctctttagtggcgttagtagagtggtgagcttcataatggagaccatgaactatgaacttgtctcaaaccatcactcacactcataccttcaaccccttcaaggttcaaagtttgtgggtgatgagctcctcatagacaaagactaacaagctggggcagagagaagaagagatggtgggaactccaattaacggaagaacaaggctatcttttggtgctgtaatggtggccatgatcttggccccagtagtgctccaccaagcaatg

SEQ ID NO: 29114 - DNA, 322 bp, Glycine max
ggaagtgggtgttgatgttgatgttgatggtgatggtgatggtgatggtgatgatgatgttgatggtgatgttgatggtgatgatgaagtggagaagaaggaagggagaaacagtggtggaactcaccactaccctttgaggcctgaagctgaggattgtgcattttatatgaaaactgggaattgcaagtttgggtttaattgcaagttcaatcaccccattaagaggaaaagtcaggctgttaaagagaaggcaggagaaagagaagaaaccacagacagatcaggcatgacagaatgcaagtattatcataggtctggg

SEQ ID NO: 29115 - DNA, 261 bp, Glycine max
aatgcagctcgagggccttctcttcctccttctttctaagcatcatacttcttctctccattgtttcatttttatttccaattcttcaagtgaaaggaatataggaacttgaagtgatgaaaacaacagaatgttaaaggaagctttgatgtgaggtgaggtgaggaaatcacaagaggaatttgaaaatgagtacagcaagattcatcaagtgtgttactgtgggagatggagccgtgggaaagacatgtatgctcatct

SEQ ID NO: 29116 - DNA, 906 bp, Glycine max
cctcgagccgaatcggctcgagttattacattacaggaatgtaacattcgaagaggttgcggatagccgaggatcctccatccaaaagctcaaaggacaaaaagtccaatggacctgattctggcaaagtcaacctgttatttaaaattaccagtagagttccttataaaactgttttgaaagcacacagtgctgttgttttgaaggctgaaagtgcagctgataaggttgaatggattaaaaagataagccaagttatacaagcaaagggaggacagattaggacatctgatggtggccctacaatgaggcatagcctctctgatggttccttggacacaatggctcgaagacctgctgatcctgaggaagaactccgatggatgtcacaagaagttcgtggatatgttgaagcagttttaaatagtttagctgctaatgttccgaaggcagttgtcctttgtcaagttgaaaaggctaaggaagacatgctgaatcaattatatagctctgtcagtgctcaaagcacggctaagattgaggaactgcttctagaagatcaaaatgttaagcgcagaagggatcgaatccagaaacaatcctcccttctctcgaaattgacacgccaattgagtattcatgacacccgagcagctgctgcctctggctggtcaaatggtagtgcagagagtagcccaagaagcagcagcggacctggtgatgactggagatctgcctttgatgcagctgccaatggccctgttagtcgaagtggttcatcaagatcgggatccaatggtcacagtcgacattctagtgatgctgcccaaaatggtgatgtgaactctgggtcaaactccagcagccgtcgaacgcctaatcggttgcctcctgctcctccgggtt

SEQ ID NO: 29117 - DNA, 304 bp, Glycine max
tgatcttccacgacggccgtttcgtgcagaggccagacccactgaacgctctcatcaccttcacgtggctccccttcggcttcatcctctccatcataagggtctacttcaacctccctctcccagaacgcattgtccgctacacctacgagatgctcggcatcaacctcgtcatccgcggccaccgccctcctccgccttcccccggcacccccggcaacctctacgtctgcaaccaccgcaccgctctcgaccccatcgtcatcgccattgccctcggccgcaaggtctcctgcgtcaccta

SEQ ID NO: 29118 - DNA, 682 bp, Glycine max
  unsure (1)..(682): unsure at all n locations
ggtagttccaaccgaatatagatatatctcaaaagaagttctaccaaccaatcagttctcagtatcagaatattattcccccattaatcagtttgatcggacctggccagctgtctactttttgtatgatctatcacctattactgtcactatcaaggaagagcgccgcagttttcttcattttattactcggctttcgcctgtgctaggtggaacctttgctgtgacaggaatgcttgaccgttggatgtacagacttctggaaactttgactaaatcaaagtccaaacggtagatcatgaagtcattgcaatttctagtaacaactctgcgtctccaaccaaaggggtttcaggcactatggaatttactgccaccaaagattaaaaatatagtggttgcatagttgaatcaagcattaaattttaagcacgtgttcatacagttccttgtaatgtctgacatcaatgattaacagatcttaatctcttttcttttggaatgagtgttttgggttcggttttgactgtggacagcattgtcttatgaaccacacctgtggaatttactttgtagaactcaaattttgattatagtgactaagatagctgtctgtttctggtcnaaaaaaaaaaaaaaaaaaaaaaaaaaaaaaaaaaaaaaaaaaagggcggccgccgac

SEQ ID NO: 29119 - DNA, 401 bp, Glycine max
ctcgctctccatgtgcagtgtcgagcaaaacgtctcgttggaggactacttgagaggccggtggagccgctcatcaagctttgattaagcaaactactagcaaattgctagaagaataagaaggattgtgttttttgaaatctaaatccttttgtagataattttgccgtgttgcatgtgctgtgaatgtttttatagatgggtttaggatgagaggttgtttgtgtgtgccctcctccttcccttgattgtcaaggaaactatgccttgtaatttgtaaggctagatatcctttgtcgttttactttaattacttggtgctagtttcaatccttaatctcaatttgattgagtgtaatatgttctggtgcgaagaataaaagatgaaaaagttgtatctt

SEQ ID NO: 29120 - DNA, 431 bp, Glycine max
  unsure (1)..(431): unsure at all n locations
atgagcagcaaaggatcactgatgttgcttcttcctctaactcttcatctttgtcatcttctacacaatatgatgtataccntgagtttcgaggtgaagacagtcgaaggagcttcacaagccatctatatgaatctttgaatgaagtgaaagtccaaacctatatagatgatcgacttgaaaagggagaagaaatctcacctacactcaccaaagccatcgaaaattctcgtgtatctattgtcattttctcagagaactatgcttcctcaaagtggtgcttgggtgaactcatcaagattatggaatgcaagaatgaaaaaggacagatggtaataccagttttctacaacgtagattcatcccatgtgaggaagcagacagggagctgtgagcaagcctttgaaaaacatgagggagaacctaggtgc

SEQ ID NO: 29121 - DNA, 444 bp, Glycine max
ctttctttcaagtttcatctcttttcctcatttcattcttctaaccttctctccgtttacttcacttcatgacggattcttctcctcttatccctccctcaccggtcacagtcaccgagatcgacctcgaagagggaccctccgaacaaattcaatgccggatttgtcttgaaactgatggtagaaatttcatagttccttgtaagtgcaaaggtacgtcaaagtacgtacatagagagtgtttagatcattggcgagccgtgaaggaagggtttgcatttgcccattgcactacttgcaaggctccataccatttgcgtgttcatggtgcttatagacaatggcgtactttcaaatttcgggtttttgtaacccgagacattgtgcttatatttctggctgtgcagcttgtcattgcttcacttgcttatttgggttaccaaa

SEQ ID NO: 29122 - DNA, 454 bp, Glycine max
gtatgggttacttcttaggagaggtgttatttccctaccatgctgagtctgaagttgaattgaatctatccgtcggggattatattgtcgttcgaaaggtgacaaacaatggatgggctgagggtgaatgcaaagggaaagcaggttggtttccatttggttacattgaaagaagggagcgagtcctcgcaagcaaggtggctgaagtgttttgaatgtttctgtttggttgagttggtggtttcctgcctcagggattatgtatgtgcgtatgttttggttttgtgcttaatggataacgtgtgcttactgcttagcatacaacaatcgatttgtgatatatagatgacatgttttttcttttcttgtgattatcgatcgctttaagattctcttttgtattagaatgataataggtatggtttagttaaaagtattacatatttataaaaaa

SEQ ID NO: 29123 - DNA, 418 bp, Glycine max
gtaaattgcttttgaggggaaaaaagaaaagaaaaaggagaattattgtatgcgtgagagagtgttactcaaattacgagactataaagaagcatcacagtctgtaaaggaactaggtttcttggatcttcttcttctattctggagtaaataagggaggttgcaatggacactagtattagtattagttaaagaaaaccccattgcattccatttggcaactattcctatccaattttaaatgctcttccacctcacgagatctccgtggccctagcctaccactactcacttcttcaatgtcctactcctcttcgatatgagtcaactcggcgccgtgttgcggactcagagggagcccaggaggagtaccattctgggtttgttgacggagcaaatggacggcgttgatagtggg

SEQ ID NO: 29124 - DNA, 363 bp, Glycine max
ttcttatctcgtgctttatccgtccattctctctctcaatctcatttctctgtctctgcttcctcttcttcgatctcaccctgaattccctggacaatcatcatggctgacaaaggaggaaaatcatgtcccatatgcactgaggagatggacctgactgatcagcagctgaagccatgcaaatgtggttatgagatttgtgtctggtgttggcatcacataatggaaatggcacagaaggatgaaactgagggccgttgtccagcctgtcgttccccttatgacaaagaacgtattgtagcaatggcagcaaactgtcaaagattggctgctgaaatgaatccacagcataaaaagaaaatg

SEQ ID NO: 29125 - DNA, 443 bp, Glycine max
cttatcatattaaccagcgagatcctgacactgtggatcagcttggttgccggcgaccaatggttgaggttggcaccatacaacagcttcagagtaataccacagtgaggcacaaaactcagagcttcgatttcgatgagatatcagctaattcaccaccatggcccccagtgaacaatagtcttgcgcaaaactatggggaggatgacaaagaaagtggttctggtgaatgggttgacaaggtcatggtcaacaagcaagatgtaaactaaactgagaacctgttggggttatggcaagcagcaaacaatgggaacttatctgaggccttttatcagaaatatatgaaagagtctgccaaaatgtactcggaacactcctatactatgttcatgggagccaaccagtttaacattgcgggttcaaatgacatcatggatgag

SEQ ID NO: 29126 - DNA, 492 bp, Glycine max
cgtatcgcgtgggcggacgcgtgggcgcggaattgaaaccaacctttgtttaagtctcacaccttactggcctaccttctttcttgttcaccttcgcacccattattcattgcatcatctttcactcgcatcagaatcacagggttcagttgctgtggatagttgttaaaatttgccttcaggttgaaacttatagtgctgggtcaggatattatgattaatggaaatggtactcagactgagtattggggcgaaagttcgggttcaacttcccatagcagtcagcaggatgtggaggatgacaggatgattgctcttgtgctgtctgaagagtatgccaaattagatggagcagttggccggcgccttaccaacttggaacctgttcgtcatgtaccccggataaattcctttatccccactgtaagtgatgccaggatggatcaccagcgcctgcttcaaaggttgaatgtctatggtttatgtgaggtc

SEQ ID NO: 29127 - DNA, 436 bp, Glycine max
gatcacagggtttttttctcttttcttttttcttcttaaatataataattttaaataaaattgttatcttcgtttcttaggattggattttgctgattatatccaccgaacccttttgtgattgctttctggttcagttgctgtggatagttgttaaaatttgccttcaggttgaaacttggagtgccggctcaggatattatgatgaatggaaatggtactcagactgagtattggggcgaaagttcgggttcaacttcccatagcagtcagcaggatgtggaggatgacaggatgattgctcttgtgctgtcagaagagtatgccaaattagatggagcagttggtcggcgccttaccaacttggaacctgttcctgttgaatgtgtatggtttatgtgaggtcaagggtatctggagatggaattgtcagttc

SEQ ID NO: 29128 - DNA, 320 bp, Glycine max
gaagtgatgtgccgattaaataggttgaacaattatttgaatattataacataaaagaagaaaaaatagcatttgctggaaaagtttgttgtgtattggtggcctccctctatcgtctctgtgatcgtcgtttgaagagtgtgttgatgatttatagcccaagacgctgatttccacgtttcattcattccctccctcagcctcttgtgtcctccgcccccttcccattttttgctgctcttctcaaactcaataagaataactaaccttttctcattcattcacaaacaaatctcaatgtctctctccgtacccaagtt

SEQ ID NO: 29129 - DNA, 262 bp, Glycine max
cacaactcgacgatggtggaactggatttccgcctcgtgatgatgatgatggtggtggtggaggaggtggaggcggaggcaactggtctggtggattcttcttttttggctttctcgcttttcttggcttcttaaaggataaggaaactgaagacacatacagggatgaccgaagaaggtgaagaattgaccaccacaaatgcatgctttgcttggagtattttgctgcattatccttgatatcctctctcatatatgcata

SEQ ID NO: 29130 - DNA, 367 bp, Glycine max
ccaatttatcaaagcactcaggaaccaacggaagagggaaaaagattgattattgagataaatcaaaataaacctcgttggtggcttggggagaagtcaacactgcttaagcaccaacaggccactgcccaaacattgtctatattaactgatgaaaattgcacttcagattggccccaaatgcaactagctgaagttgaggttctgatttttaatattcgaactaaacagtatttctttccggatttcatagaagaaatgaacaaactcaaagttcttatagtcacaaattacagtttctatccttctgtaatgaacaactttgagctgattggctctttatctaataacctgaaaagaatcagat

SEQ ID NO: 29131 - DNA, 646 bp, Glycine max
ctcgagccgatcaaacttcaaaaacaaaaaagagatgatctaattcgtgcaataaaccggccttagctttgagtcctttctcttgcattgttttgtagccaattaaaagaaccaccgctccctcttgatgatgtgttgtgccttcattcgctcatacaccaagaataattaatgctttggtgactaacttctccatctactccctttgtgcgtgtccttatacatatactactacttcctcttgaaaccaaaataaatttcgagcaacaaaaagcttctggtcaattcctcatgaattatgatcatttttttccatctcttcattctacctatagtgcttcctcacctttacccctactagccacccgtttataaatctacatgctagggttagggttattcaccaactattcgttaattgtatagacatagctagtgtgcgctattttatttactatatatctccacaaagctacctatctatctttcccgttttctgggtatgttttcggtgaaatgaagaactgaaaaaggatccatccaacgatccatcccaggttcagtgctaatcaacaatagaaatcgaaggaattgattagggtttgcggaagatgaaaaagaggcaggtggtggtgaaacgagatta

SEQ ID NO: 29132 - DNA, 318 bp, Glycine max
acctggagtctttgaatggctttggagtccatttactttctttctcggttatactgacccgaatcctgccaaatcacatctttctcgcttgcatgaatggcattttcgttcagggcttgaccgctacatatggataattggaatgatttatgcttattatcatccaactgttgaacgatggatggaaaaattggaggaagcagaaatcaagcgcagaatatcaatcaaggcaactgttgttctgatatgttcattggtgggttatttatggtttgagcatatatacaagctggacaaggtcacatacaataaatacca

SEQ ID NO: 29133 - DNA, 257 bp, Glycine max
gatttcttgcttcttttttttctcctttctgatcactaccatggctagaaagaagttgaatcttacatacatacccaatgactcaaagaggaagacaacattgaagaaaagaaagaatggtttgatgaagaagatgaatgaaattagcactctttgtgggattgaaacatgtgctataatctatagtccaaatgatcctcagccagaggtttggccatctgactctggagtccaaagggtgctttccaggttcatgg

SEQ ID NO: 29134 - DNA, 223 bp, Glycine max
tctttctctccttctggtgagcacacatgatttttgccaacaaagattgagccaattgataagaaacgaactcatatcccttaaggatgtggatttgattctcgttgtcgatatgaagaccttgttggtaggtaatctatacgtaccttataagcgttctttgagtcttgagccctgtcttgacctcggtgaatccaggatccagctcacctaaattttccac

SEQ ID NO: 29135 - DNA, 346 bp, Glycine max
atcatttccattatttatatgctatattatctgcagccaaatataaattccattacccttttctcagtttcttcccctgaactccataaataactcactcttgtattatttttatgtttttcacttccatgatgccagtttcaaccatgtgaagttgttgtgtgtgtgctgtgtttgttgttgtgtactgttttggatcttcagaaccaaccatgaatctcagccacggcaagggatccacttcgagttctcctctgaaagccggagacaccgtctccgaccagttcccggcgggtctccgggtactggttgtggatgatgaccccacttgccttatgatccttga

SEQ ID NO: 29136 - DNA, 597 bp, Glycine max
cctaatcccaagcttagtagcttctgcagtctctccctgttacgtagtcaccagtcactcagtcactctccacaacttccgatcgccggcgtcaactctccggctactttcttatctctcaatgcacgaatgaatgacaacgccttcactctgtaaatcaacttcacagtcactgtgtcgatcaccatgctctctcgtttaattcccaaaccctctcatctccgtcgctttctctcttttccgttgaagccttcccacgcgcctgcgaatccctacttcaccgtcgtcgttcccaaacacttctccaccaaccgcggcggccgcaacaacgacggcgatggcaaggacccgttttcctcccgcgtgtggaaggatttccgggagaccgaggagaagctcgacgcgttcttcgaggaggaggaggaggaggagagcggaagcctcgtcagaatgaacgacgccggcggaagcagtggtgggaggagaagggatgaacgggggtggctgcaagaggaggaacaagggtggttgcaacagaagggtttggacgatgcagatgaagatgctatatttaaatggatcgacgaggaaagcgga

SEQ ID NO: 29137 - DNA, 459 bp, Glycine max
  unsure (1)..(459): unsure at all n locations
accagaaaatattgagtggctggttagaacttgagactaataatggatggtatagttcagctgcagaggcaacttgttgattatactgcttccctatttcatgagggctttctagatgaccaatttaaccagcttcagcaacttcaagatgaaagcaacccagattttgtggttgaagtggtgactctcttttttgaagatgcggagaggcttcttaatgagctcacaaaaacactaggccagccaagcattgattttaaaaggttggatgctcatgttcaccagttgaagggtagcagctccagcattggagcacagagaattcacagagtctgcatttccttccgaaactcttgtgaggagcanaacgttggaaggtgtcttaaaaacttgcaacaggtgaaaccagagtattccctggtgaaaagcaagcttgaaactctcttcaggatggagcaa

SEQ ID NO: 29138 - DNA, 337 bp, Glycine max
atcagcatcaggaggactgggagcaagcacaatatgcagcagcttttgagtgggaaggtttcaggtaattaaagccttcgtcactataccctccaacaacactctcgcgcgccgccgtagctagcctcgaacaagcttctcgcgcgccgccatagctagcctcgaacaagcctctcgcgcgccgccgtagctagcctcgaacaacacctctgaagaccttcctcagttactgaggtctcccttcctgagttcgcatcatcactcagctcccaccgtacgcggcggtgcacccgtagcctgtcgtgactcaccactctctcgcgcgaccaaattaggc

SEQ ID NO: 29139 - DNA, 315 bp, Glycine max
ggattaagtcgagccaagttagcaaattaacttcaccagatacatctgctgttaggaatgctaaaaggagtgcattaagtggcgatcggatgagttcaggtgttctgcagaaactgaaccataaccattgggatgttcgaattgctgtgtcaaatgtttctgattgtggtgaacgtcagcagaaggatgaagatgttttggaaagaagaaaaaaggatagaagcagattttttaagccggaaacaaaacgggctctattcgataaaaattctgatgacaagatgcataaatttggtgggtccaaagctggatctc

SEQ ID NO: 29140 - DNA, 258 bp, Glycine max
tacatgttgggcacaacttttatgaaagatatttcctttgctggcttgtctactagttcacgctctgaaagtttaaattcattgtttgacaactatatccaaattgatacttcattgagagcatttatagaacagtatagaatgattcttgaagataggcatgaagaggaagccacagcaaattttgatgcttggcatgacacacctgacctgaagtctccttccccttttgaaaagcaaatgttgtcagtttacaca

SEQ ID NO: 29141 - DNA, 289 bp, Glycine max
ggacgaatgaacaagattgaaatggcagctactattaacttgtccctgccccttttgtccctctgcaaaccccctaagtttctgaaacctccaacaacaagatttctgcaacatgaatacgtaaacagcctcagcctcagcctcagaagaagaatcactgaatcaaacacttgcagaaaaagaagagggatcgtgtgcgggttgccattgccagttgatccatgggcacctaccattgactcccagagcatcgcatcccagctcttcgcgttttccttgtttccataca

SEQ ID NO: 29142 - DNA, 289 bp, Glycine max
gttcttctctatcttttctggtttggaaccaaaacacaaacacaagagatagtagaactaatgaacacaacacaacatatcaagcattgagtgcaattgtaaacaacacaacacaaccaaggttgaagagaagtgaaagttgaatcctgtgtggcgcaggagaaggagggtatggactcaaactcaaaggctatgtgcttcgtaacccaccaagccatcttcaacgcggttcgatgtgggagaccttgaagggctcaagcagcagctgaaaaacaagggtgctgagggg

SEQ ID NO: 29143 - DNA, 245 bp, Glycine max
cgaaaacaacaaggccttgccgttgcagtggctgtttctcatcctgtggctgatgggtatgcctggattcacttcatcaacacatgggcaaaggttaatagaggaggcatgttagatcttaatgacatgccatgtctagatagaactatacgcagatcatcgtcgttgtcatcaccgccaccgcgcttcgatcaccctgaattgaagcctctaccatttaaactaggcaaatctgacagcactga

SEQ ID NO: 29144 - DNA, 258 bp, Glycine max
atcaatttccgactttggagtctttgaggtcaggtcacacctactacccgtttacttcacccagtcagtcagtctatgggcaactgctgctccgacgtcgctggcggccaatctgccatcggcggcaccgccgccggccacctcaatccggccaacgctcccaacgacgccgtcgatcgcttcctcaggtctcgcggctacaacggcctcttctctcagatcgagctgtcgttttctgcttctggcttgcgtgatcgg

SEQ ID NO: 29145 - DNA, 344 bp, Glycine max
aaatgagttggtggaaggtggcgttggaaatagacaactgagatgaaaatacaaagtttgttgaggggtggtgtggtgggatgaaaaatgagtgggctgaaagagcaccttaaactggcaagagaatacgcggtggaagggctctacgacacctccgtgatcttcttcgacaacgccgttgcacagatcaacaagcaccttaacagcaacagcgtggaggaccctttggtgcgagccaaatggatgaaggtgaagaaagcgctgtgcgaggaaacggaagtggtgaagcagctagatgctgagagaagggcgtttaaggaaacaacacgatcgccatctcaatc

SEQ ID NO: 29146 - DNA, 416 bp, Glycine max
agtggttttgctggtgtcacacatgactggtgtgaacctttccctacctaccccagaacatatgatatgcttcatgcatacggacttatctcacatctctcctcggagaggtgtagtatggtagacttattcctggaaatggatagaatactgcgtccagagggatgggtcattctttctgatacaataggagctatagagatggctcgcatgcttgcagcacaagtacgttgggatgcaaggataattgatcttcagaatggcagtgaccagcgactacttgtttgccagaaaccatttgtgaaaaaataattgatggagcacaagtatatctcactatgacagatgaacacaatttttttgctctgagaatggattggttagttggcacatctttgtatatacaaaactcagag

SEQ ID NO: 29147 - DNA, 243 bp, Glycine max
ctccttctcacctcctcctcctctttctctctcttcgcctttctttctctaaaatctcagagctgttgttgttatctgctccttcgattccaggtgttataagaggagtgttagtgaaatagtgcttgatcagggaatggctgggatttcgagcgaggaatctggagtgggaaagtctgcggagggaactttcagtgggcagcgttgtcaatctggggaagcattggcagaatggcggtcttc

SEQ ID NO: 29148 - DNA, 407 bp, Glycine max
gttgagatggaggatataatcgttgaagagactgttttggacattgatacctgtgatgcaaacaaccctcttgcagtcgtagactatattgaagatctttatgcccactacagaaaattggagggtactagctgtgtctcgtcggattatatggcacaacaatctgacattaatgaaaggatgagggctcatactgattgactggcttattgaggtgcacgacaaatttgacctcttgcacgagacattgtttctcacagtcaatcttatagatcgatgtttggcaaagcagacagtggcaagaaagaagcttcagttggttggtctagttgccatgcctttggcatgcaagtatgaagaagtttctgtacctgtggtgggggatctaattctcatatcagacaaag

SEQ ID NO: 29149 - DNA, 300 bp, Glycine max
cttcttttgcatacgttcatattgttatgtgggtattcttttgcttccatttatcatgagcaacatcccaagatctctcaccgactcttccctaaccctcttcaaccttgccatatcatcctctgacccctggcctttctcactcgttttcttatagccctaattaacgtgttaataattctcactccacttttcttaaaccttgctctttctttctttttttcccctatccctttagcttaattttttggctacgttatggggatccttagcgatcatcataatcagaagcatcaccac

SEQ ID NO: 29150 - DNA, 407 bp, Glycine max
cccacgcgtgcgagtacacacacgaagccaaagccaatccaataaacaacactgttcattattatcatcatctgcacaaaacccgcaacaactctcagtcagagacccgtgaatcttcttgaattccaattcgttaccacgaaaaatgaacgttcccacgagaaaacgccgcaagaagaacgaagaaggatcaagatcaatccagaagaataatactcagaagaaagaacttaatagcatactcacttcgctcttggttcgttgatgcaaaagagaaaaagaaggaagacatgctcgatggttactacggcgaggtggaagaatccaataaccccaaaaagagaaagaaactcgccggcgccggcggtaattcagtgagccaccggcgagtttgggtgaaggagcgt

SEQ ID NO: 29151 - DNA, 437 bp, Glycine max
ctaaactccagtggatccgaagccaccttcagctctgagtgtagaatccaaatcctgaacctcaacaacctccggcatcacgatctgctggattatcatctgtgcaaccctgtcaccaacttttacttcaaaatcagtgtcttaatggttgaacagtatcacccctacgggacccctgcaatccgcgtcgatcacgcccgctcccacatcgatcgagtgcttccatgataatccagatcgcggtgctgaaaaacaaaacaaaacggggagatttaaagttagccctcggctgggaaagaaagaagggaggggaagagattgcaaattcgaattcccccaagtcattctaacaaactaacatttgcacaaaacacaccaaaaggagtgaagatctaaacaagcaatctgtgtgtgttccgccatgaacgaagaacaac

SEQ ID NO: 29152 - DNA, 863 bp, Glycine max
accaggcaaaacacaacactcaaagctttagccaaaggcttgtttggttgcacatacaaggaaatatcacaaaggtgaaagaggaaaagtatatgggaaaaggagattaaatatttcatttcctacctacatgttcatttgcaagacaagaattcagtattaattccacacaaaatattttctatatttcagcaaatgatggctgggaaccctaactggtggactatgcatccaccatctctgatccctccacagtatgttcttggatcttcttcaattccttttaattcttctacacaaaaccaagagccccctcactcattgagccaacttcttttcactggtttaccaggagaagaagagagagttgcattcagtcatttccaatcaaaaaagttagatgaatggaatgaacaaatgcttaacccatcctctatcgttcctatggctgatgtaataaagcaagaggtttcccaaagtggcaacttgtatcaccatggacatgatcaggaatttcaggtttctggggcaccttggtcacatatggtgccagtttcttcttcccctaggtctagtgttgctagcttcagtagcaataatttattggatttcacttacaacaagacagatcataggaagaaccaactaccagatcacatccgagtgtaatagcacagccactgctggagtttacaagaagactaagagccaaccatcttcaagccaaccacctctcaaggtaaatgtgcatgatagttgaaagagagaaaaacacatgaattcatgtactaactttcttaaatattatgaaatctcttaaaaatcaggtgagaaaggagaagttaggtgatagaataacagct

SEQ ID NO: 29153 - DNA, 304 bp, Glycine max
gctcattacattgacgaggaatggacattacagacgaaactcctgaactttgtcacacttgattcttctcatactgaagacttacttccagaagtgattatcaaatgtctcaatgaatgggatattgactgcaagctttttgccttgacacttgatgattgttccatcaatgatgacatcactcttagaatcaaggagcgagtttctgacaaaaggccttttttaagtactcggcaattacttgatatacgctctgaagcacatctcataaaatccaatgctcaagatgcaatggacgcattac

SEQ ID NO: 29154 - DNA, 841 bp, Glycine max
tgggcggtgcagctgctgtcgctccccttgttgctgatatgtactctgagggaggcggtgactgcatccaagccaacggcaacagtaacggcggtggggcccacgctccaaactccaacaccaaccaaacgacagcgacaacaacctcaaacgatagcctaacgatgacggagcaccaggtcgcgaaactaatggaagaagacatgggttcggctatgcagtatcttcaaggaaaaggtctttgcctcatgccaatttcacttgccactgcaatctccactgccacgtgtcccaccaggaacgttaacgttaaccccttgatcaacgccgccgccggagccacccattttccgaccgcagccaaccccgccggcgaagggccgtcgtctccgagcatgtccgtactgacggtgcagtccgccatcgcaggcaacgacggcgccgcctccgtttcgaagccgtgatgacggtgtttgagtgactttataggaaaaagaagaaaaaaccaaagtgaccaaaggccagaaaatgacgtgtgttttttttttcttaaaaaaaaaggagccgttaaagtctacgaaaataaggcgtcagggatacggaggactcgacgaccccgtatttacctagactttgtttggctgatgctaactttcaaccaaccaattacaaactcccccatgccaattaccaacttcttcgtcttctttttctttattattattgttaattgttaactgtcgctttgggtttcttctgttcattgtttttaaaaatctgtagtggaatttctctttttggtgtttcatttccgtctaaacaagttaatcttgtactggct

SEQ ID NO: 29155 - DNA, 299 bp, Glycine max
acgttatgttatgttagtttgcgtctcgtgccacctgcactgcacgcaccctctttccctcttcgtcgtcgtagcgacaacgatccagggagcgtagttttaatggaacccatttgattttcagctttgatcctcccaactacaatcattgtgttcttccaaatttcattttaataacaattccgatattttaatttttgtccgttttctattcccttattcttcttcttcccaacagcaatagactcggtcgttcgttcctcagctagggtttcccccaatgccgccggattcctccg

SEQ ID NO: 29156 - DNA, 383 bp, Glycine max
cagcaacattaggtccttcaaaattaatgtacaggtctcttttagcagacatcatacaaccacagcacctgaaggaactttgctcagttctggtgctagtatctggacaagccgctaagatgtttacagaccacaaaaatttcatggataagcatgctgaagatcagacagaaacttctcgtgcttcttcaactcaggagcaattaccaagccaaaaggaggctaatgttgagaaagctatggctgatgatgattgttcgagtgcaaaccagacagataatatcagcctggataattcttgttcagatggtgctgatgccccaaaagggaggccaatgtctcctggaactttagcattgatgtgcgatgagcaagatacaatg

SEQ ID NO: 29157 - DNA, 517 bp, Glycine max
atgttcaaatgtagcttgtttggaaagacaggaagagtacatgcttgcaaaaccagcaagagatgctgcagccaaagcaaaaatggaagctgaagcaccatcaactgaggaagtgccacttcatgaagaaaatgaatggaatataagtgttgttgatgatattgagctggatagtccggataccagaagttcagatgttctgccggaaggtctcacacatgaacttcctactgctgacgagtttcataaggcaactcttgacgctccattagttgacaatgacgaccttgaagatcttcgtaggcaacttgaagccattaattctgcatagtgtcagcaaagtttttgtttttatttttatttttagaaaaaaaaacttttgaaatttcaaagttcaaactgtcatcattgttcaagtaagccagttcaacttagcatcagtttgttttaaaattgaggaaaactaatttcaaattattgaccataattacagtctatctaaattaatttcaatcat

SEQ ID NO: 29158 - DNA, 422 bp, Glycine max
gtgacaaaactttcattgcagaatgcaaagttggaatttgaattgatggccgcgcgagacctggtcaactctcgtagtgctgttgtgcaaacggttaatggtgtcaaccgcaagtacaatgatccaagagctggaaggaaggggaggatttctagccgtgctaatgaaatttcaggaactggtgtagatgattttgagtcaaggagtcttgatgctgatgatttaaagatagaactacaggctaggaaacaacgagaggcagctctggaagctgcattagccgagaaggaatttgtggaagaacagtaccggaaaaaaactgaagaggccaagagaagagaagaagccttggagaacgatttagcaaatatgtgggtccttgttgctaagttaaaaaaagacgggggtgctgttccagaatc

SEQ ID NO: 29159 - DNA, 421 bp, Glycine max
caaagtctcattattactattagagcctccgagaagttccaatctttttcggctcttttctccaccgcactgaaaccccatattcgttcgatccggtagaagtttctgttcctctttggtgtgtgaatcttcccaaaagggtatgttctctgctttctctggtgttcattcatttggggtggtgctattcctatgatcaataacaataaccatcacggcacacttttgaggttgatttgtgtgattagtggttctgtttttaagttctcaagttccttgtaataatagttttctgaattggggtttgtctctatagcaaaaaatggataactcaaaaaacaggcataatgacaatttgggtgtgaacaaaatgggaaaaaacattatgaagagcccattacaccagcccaattatggcaac

SEQ ID NO: 29160 - DNA, 596 bp, Glycine max
aaggtggtggtggttatggcagtggaccttatcctcctcaagggcggggggcaccttacgggtccaatagtatgcctggtggcggtcctcgtggcggtggtgccagcggctatgttggagctccaaattatccccaacaaggtggtccatatgggggctcagcagctggtcgtggctcgaacatgatgggtggaaaccgcaatcaacaacagtatggttggcagcagtaaatatactttatgatgttcagtattagtactacaatttggcaatacaataccctgataaatttgagaaggatcggactgtttatggatcaagttactgagaagaagatacgagatgtgacctctatggtttgtatgctactgagatatttgttctcattacttgaagtgcttggaaacctttgtgatgcatgcatgcaccttaggtaatgttcggggctccttatcacgggggcaccacaaaagaagagtgaacctccaattttgtagtttttcttttcactatatacattgacattgattcctgtgcagtatgtatgaatgatagcagcatacttcaaaatgtgtaacaagctgctgcttactgat

SEQ ID NO: 29161 - DNA, 699 bp, Glycine max
caaaagaagttatggtgtgccaagcagcgtgccaaacaagattccgggctttaatacatgagtatggcattgatggtaaagcaacaattattgttagagtgatagcatgcttccaacccttgcatttttgtcaggctgagtacttccgtcatttgcttaagcctgtcacgtagatcgattcacatttccttctcactaagctggagtttgtagtttttgtttctttttttcctttgttacttagaaaagcagcaagtttccaaagatctcatacaataacaccataacatctactagtcatttgttttgttggatggttaaggctgacgggtctttgcctcgcccacaccacgtggcttggcaatcaccttcttcaaattacttcagtatgctgcctaagcccagcttacttggtcttccaacatatctgaattcaggcacttccatcttgcctgctgtcagtacatttcatgggcttgcagctccttctatcccaagtctgaagaccaagctaacaaatgaagtgcagggattccttcagtattgcatatgctgacacaagtttgacagaaacacatgttggaggagctttacaaaatgcaaatccttcttctttgcagaagaggttgctgatctttgaccgctctgataataagacaaggttgttttatggtcctgtcctccctcttgtccagagtc

SEQ ID NO: 29162 - DNA, 392 bp, Glycine max
cttccttctagatcaccttattcctctttcctcttcattctcttcccaaataaaactataatcagtcttcagtgatcgtcaacacttaagacccaagtgtaaatgaagaaagtggtggtgaagttgaatttgcacgatgacaaagcaaagcaaaaggccatgaagtcggtttctagcctagcaggcatcgattctatctccatggacatgaaggagaagaaactgactgtcgtgggtgaaatagaccctgtcgatgtggtgagcaaattgagaaaaacttggcacccagaaattgtaactgttgggccggcaaaagagccagagaagaagcaagaagacaagatagacgagggcataatagatgacaagaagaaagatgatgataagaagaa

SEQ ID NO: 29163 - DNA, 254 bp, Glycine max
ctgatcctcaacgtgttcaaacaccttcaattatggagtactggaaacccttggctgaagatatggatccctctgctggaatagaagccgattatcatcacaagaataacagggtttattgttggaaaggtcttaggctttcagcacgacaagacttggagggattttctaagtttactgatcatggcattgaaggggttgtccctctagaacttttgccacctgatgtccgatctaaataccaagctaaacca

SEQ ID NO: 29164 - DNA, 282 bp, Glycine max
ccgtaatttaattctagctaatttgctaaagtaccagcaaaatgtatcctacagtagatgaacatgatgaggtatacgcagctcatcatagacatccagggtatgttctaccagttgtggtgcctccaaattatggccctcctcaaattccatcctatgctcctccatacatcagcaccagtgttagtgtaaggggccctgtgatcaggacacagcgatggtcaaccggtctgtgccgttgtactgaggatcctggaaactgtttggtcacttgcttctgcc

SEQ ID NO: 29165 - DNA, 251 bp, Glycine max
ctttctgagaaaccatcgattattatcattacaatggatcgttcagaatatcaaattgaggatgataacctgaagcttaaggttatcttccttccatttttatcaattagtcacataattcccatagtggacatggccagaatcttcgccatgcatgacgtggacgtcactatcatcaccaccacgtccaacgccgcgcttttccaaagctccatcagtcgcggtcaaaacatcaggacgcatgtcatgaa

SEQ ID NO: 29166 - DNA, 310 bp, Glycine max
gtttcaggcccaaaaccaggaactgaagtcagccttgttaatgctgtgccttgtagaattgctttcgaaaggggcaaagagcgccatttttgctttctagcaatctctgcaggaacatctgggtggcttgtgctagcagaagagttgccaatgaagaagctctatggagttattcgggttgctgcaccgttggctgggtgcaatcccaggattgatgataaacacccaagatggttacatatgcggatccgaccgtcttctttacctgttctagatcctgcgaagttcaacgcccacgcccacgcccacg

SEQ ID NO: 29167 - DNA, 624 bp, Glycine max
caacatctttggtgcatttgaaagtgaggagtcttatcagaagacttttgggactgaggagaagcgcagtgagttcttgagatggaggtgccagttgatggagaagggtattcagaggcttaatttgaagccaggtggtgtgtcttcattgcttcagatcaatgaccttaagaactcccctggtccttcagagcgtacggttgccacggaacaaactcttgcaatgtttcaggacaattatccagaaatggtggcaaaaaatattttcatcaatgttcctttctggtattatgctctcaatgcccttttatcccccttcttaacccaaagatcaaagagcaaatttgtggttgctcgtcctaacaaggtcactgatacattgaccagtacattccaattgaggagatcccacttcactatggtggtttctagagggaaaatgattctgagttctcttcccaagatggtgctgtttcagaactcattctcaaggctggatcaactgcaaccattgaggttcctgcattggaggtgccaactaatttcttagatgtttttggtgtagttctctgaccaaaattggagttttacagtgataataacatttaatgctgcagacctttc

SEQ ID NO: 29168 - DNA, 241 bp, Glycine max
atttgttctatttcctcccttcaaacgacatcgtttggaaatgaggactgtgagtgttttcgctctcccacttgtcgctttgttcatcatggcaatctcccgtcttggccaagctcatgacttgcctctttctccagcacctcctccaaccagtcatggaaacgcaattgcatcaagaattgcttagattcttatgctggtggctctcgcaatcagatagatgatgcattaattgttctta

SEQ ID NO: 29169 - DNA, 507 bp, Glycine max
cgatgatgaataagaacacagacatcatcatgagttattcttattcttattcccctgccactccattctcgtcatcatcttcacattccatggatcccataatttggagcaaattgccacccgaaatcctcgaatacatactctcttttcttcctctcaaaaccttcttaaacctaagatccacttgcaaaggtttctggtctctcatattctctcctcctttcatttcgaaacactgttctcccactgcttcttcacccttctcttcattcctcttactctcacaccctcaattccaccgtcacttccctctctacgattgcacactcggcacgtggcgcaatttctctctctcactctctgattcattccactcttttccttctttcagcactcttatctcctctggtggtctcttttgcctatcagattccacatcatgttccttgctcgtgtgcaaccttttggccaagtcctctagaaagattcaatacccaagtttctctc

SEQ ID NO: 29170 - DNA, 503 bp, Glycine max
aagaatagctctttctatcaaacggatggtgctgaggatctattgagctatgcttggcaactttggaaggatggaacacctttggaactgatggaccccatattaagagaatcctataatcagaatgaagtcatcagaagcatccatattggtttgttgtgtgtccaagaagatccagctgacagacccacaatggcaacaatagttcttatgctagacagtaacactgttactctaccaactcctacgcagcctgcatttttcgtccacagtggaactgatccaaacatgccaaaggagctgccattcgatcaatcaataccaatgtctgtgaatgacatgtcgattagcgaaatggatcctcgataagcttgatcgcttggaggttctaatatgtattattatccatgtacttatttctcctagttttaaatgacgaaaccttggaacactttgtattatagttgcttatttttcaactaaataaaatatatgtattatgc

SEQ ID NO: 29171 - DNA, 279 bp, Glycine max
ctggaatgggtgggggaactggcacaggtggagctccaattattgctagtattgcaaagtcaatgggtatattgacggttggtattgtcaccagccctttctcgtttgaagggagaaagagatctattcaagcccaagaaggaattacagccttaagagataatgttgacacgctgatagttattccaaatgacaagctactaacggcagtttctcaatctacccctgtaactgaggcattcattcgggcggatgatattctccgaaggggttttcggg

SEQ ID NO: 29172 - DNA, 293 bp, Glycine max
tctactccagccattgaagccactcaaaagcttcctcaagatccaagtgctgttgctgtaattgaaagcgcgtcagatggtcagtgcaagatcattggagaaatttctgcacgtaagttatggaaatgtgattacttatccgcagcatgggctttagcgaatctctccgccggacagtttgttatgggagttgaagataatgtcaccccaaggtcactgcatgagttcagtttagattcaccatctggagacattgacttagttaatagtgggggttcaaggaaaccaaggaa

SEQ ID NO: 29173 - DNA, 302 bp, Glycine max
gtgtttctcattttcatttcctctcatttgatccaccaaaaaagcaaactctaaggagaaagaagcacaaaaaagtgctccttttcgacacccagatttcagtttcagtgattgtgggacttggaaaggttatttggaagaaccttaactaagggattggcgctgttgatcagagtccctgcaatgtatgggcctgtggccacttcagattcagccacatcccggggtggattgccaatgactgtggggactctgttgtgactttggatcaagttccgaggtggattgatgctgagcattcc

SEQ ID NO: 29174 - DNA, 328 bp, Glycine max
tcggaaccttgaatcattcttcactcgtttcagtcaaacctttttctctctctttctttcttcaaattcaacttgcaattccaattcctcgtgagttggttctcttttccgacgaaccatctcaaatccgccaccacataatgtaaatgtactcgaatgcgaatgtgaatgtgaatgcgcttctgtgcggtttcgattcagatccagattcatggggatttgcttcagcattgaagacccaaacaacctctccatctccgattcgaacgccaagcctaataaacctgcaagtcatgaatctggcgctccattggcttccatgaatatc

SEQ ID NO: 29175 - DNA, 262 bp, Glycine max
gacatactaatggggttggtctccagctcttttgcagagatttagaaaggactctacacacttgccatttgattaacgaggtattgcaagttggggctcagatgaaatggcgttttctagcataaaagtggtgtcaatgagtagcaagttgttacttgtacagtttatgaattcatctttcggcatttgtgtgtggactactgtgtagaactttcatcagacaatcacaatcactgatcacctgaatcactctgtgtttttc

SEQ ID NO: 29176 - DNA, 356 bp, Glycine max
ttctaaataagcattggggggaactttgtgagccgggtgctagtattaggcacatacacaaccatttggttgaaatgctgcacaaaggacttaaagagcttgggattttgagagatgttggaagcaggtcctaccataacgctgaacccaacttctataggtcactatctagggatggacattcatgattgttcaatggttagcaatgactgtcctctgaagccaggtgtgtaataactattgaaccaggagtgtacatcccatcttcttttaatgttccagagaggtatcgaggcattgggatacggattgaggatgaggttctcatcacagaaactggttatgaggtcctaaca

SEQ ID NO: 29177 - DNA, 266 bp, Glycine max
cacaatattcacaaatggatagacattgttttagccttaccaagaagagttcagcactatgtttaactcactggacccccatcaaacgtaagccagaacatccttgtgtggttgcaatgctcagaacaccctcagacaaatcacaggagaaacaagaaaaactaatgcctacaaagataacttgtttgatcgtttagcaatacaccatctttcaaaaagcgttcaagaagccacgggactcggtaacaataagagtgggtatgaga

SEQ ID NO: 29178 - DNA, 354 bp, Glycine max
gttgttccccattctgctgtgcgctcctcatcgaatcttgtcccaccaatctctctctctctctctttccattttctctgcactctttacccattttccccccaatcgtacgcaccaaactcacacggatacgaggttgcaagagtcacaatgagtctggcatgtcttgtgtgccatagtgtggatagtccatcaccgtcacattctttcaggagttactctgtttcaagtgcagaaaatgaaggaagatgtcatgctgttgcaacctgcttaaccaggaaattatctcttccaccctctacattacactcttttcttgcaccatcatcatcatccaaagtgaccccacaacct

SEQ ID NO: 29179 - DNA, 453 bp, Glycine max
gcgacagaagctgataagaaggtggaagaacttgagaaggaaattatggagtccagagagaaaatagaattttaccgtgcaaaaatgcaggaacttgttctgtacaaaagcagatgtgacaatcgtcttaatgaggtcatagaaaggatagctgctgataagcatgaggttgagattttagcaaagaaatatgaagataaatataagcaagtgggagatttatcatccaagttaactaccgaggaagccacgtttcgtgacatacaggagaaaaaaattgaattgtaccaagcaattgtcaagatggaacaggatggaaaaggtgatgcaactctgcaggctcatgttgatcgtattcaaacagaccttgatgagctggtgaaatctctgaatgagcggtgcaagaaatacggattacgtgctaagcccactacattattggagctacccttt

SEQ ID NO: 29180 - DNA, 276 bp, Glycine max
acgaacttcgaagtgccctcattttccctaggcctcgacgatacgcccccccattccccaacccatccacctccttctcccgatcttcacgtctccgactccgactccgactccgatcccgaatcccgacccgacccgcctcgccccctcctcaaacgcctccgccgcgggcccccgccaccgtgtctcgaccccgatgccgacgccgacgatgacatcgaggatttctcctcgcaagaagatcccgatcaagggcatgcggttccatcggcgtgg

SEQ ID NO: 29181 - DNA, 350 bp, Glycine max
gctcgagcggctcgagccgcagttagtcgatcaaagcatttagacatttacggagggtgaaaccccccataaacacttaacccccgaagtaagaagtactgaaagtcgcaggtatggatacacacagagacataaacacaaacacttggaatgcaatggaaccctgagaccgagaggagaagaagaagaagaacattcccattccaattccattgatccatgatgctcccactcaaacatgtaaccaaacaccgtctcagatccaaatccttcatctcctcaattctcgacccgtgctctgaccatgctccatacacttctctagcatcatcatcttcctcagcctcaac

SEQ ID NO: 29182 - DNA, 295 bp, Glycine max
acattacttggaggttacaaacagggaaacgggatagtctgtggttgttgtgatatagagataagcccttcacagtttgaagcccatgctggaatggctgctaggcgtcaaccttaccgacacatatatacttccaatggattaacacttcatgacatagctctatcgttggccaatggtcaaaaccttaccacgggagacagtgatgatatgtgtgcagtatgtggagatggaggagatttgattctttgccatggatgccccagggcatttcatgcagcatgcttgggtttac

SEQ ID NO: 29183 - DNA, 465 bp, Glycine max
aaaggatcttcaaaagaatggaatgaagcctgctaccaacactgcacagaggaggagtgcagctcaaattcaaggcatttcttccaagcccaagcctaagaagaagaagagtgaaatcagccagagaacgaagcttaccaatgcccatcttccagagctctttcagactttaaacagttcctgattaactctcagcaagtgttggtgtagttcaaatagatactttatcagccagtctataaactagattagcagagtgaaatattcaggaggttcttgctgctgtgccctacttttaatttctatacatcaaggctgcagctaatggactattgtggtctataacaactcgtcttgtgaatccctgtatattaaaatcatgttgcatttagttttctagtcttgtaactttttatacataaattattagattggaagttcaatttttttcttcaaaaaaaaaaa

SEQ ID NO: 29184 - DNA, 716 bp, Glycine max
gtctgatcggcgaaaggatcgagtggaaaccaaccctgaacagttggctgctgcttctgccttggctgatagaatgaccacatccactggaagcacaaccagagttattggttggtaccgttcacaccctcacattacaggtctcccttcccatgttgatgggcggactcaggcaatgtatcaacttcttgattctggatttattgggttgattttttcctgttacagtgaagatgtaaacaaggtaggaagaattcaagtaattgctttccagtcatctgatgggaagcataatcacatgtcaagacctgtacctctgtctcctgtaaatagaagccctgttattgatattgattcatcgccaagttcctccgagaatgtatcaacaaagcctggttacttcgaggcagagaatgccgagcaggatactggcgattcaagaagtgttgttgttagtaaggatggggggagatcagacttggggaatttctttgctaatgctgatgccaactatctagggagagataaaagtggaggaaactaccatcccaacaattcagacaccaacatagttgatgttgatcccatggatatgtcagaaagtatgcaagaggctatgcatcgttcaaatttggacatgagtggtgcagagttcgtaagacaagaaattcccctatatgttttgccagccttgtctttaatcaaccttgattcac

SEQ ID NO: 29185 - DNA, 1068 bp, Glycine max
cccacgcgtccgtgactttgcaatgtagaatatccagtgttgaagcaggcacgcgatacgtggaataatcgtggacagcttggatcggaatcaagggtgtgatgtggtcacaccccaatcacatcacaatcatcacttggtttctcgatatactcaaagaatagcactggtgtatgcaggatcttcctgtccgcgggcgcgttggttcgtgtgcaaagagcgtgatcccaaagcattcttcaactggatgaggatcataaatagtagtagcagcatattcaagatgacatagttgtaataatagtgttttcagcgcgcatcactctttctttcgctttctctctcttcctcgttcgcttctctccccgaaatggagcagtctctgctgagaggcgaaagcagtgaccagagtaaccggtcgcggggaatattccggcgctccgatgctatcacctacggctccaactacgagaaagccgctgcgttcatcgatctggctgaagatggtgttggtctccctgaggaaattctcgactcaccaaacttccaaaattacataagattttactttatattcaataaatgcaatctaatctggtctcttagttattttgctttgatagtcctgaatttcctggagaaacctctatggtgtaaaaagcttaccacaaattcctgcaacgatagagagtatttctatttgggacaattgccatatctaacagatgcagaatgtcttatttatgagggaataactcttgttttgctaatcatacatacattcttcccattgttatacgaaggatcccacacatattggaaaaatactattaatcaattgaaggttttctctctattagtgcttgttgctgatgtgctgctctatgcccttttcttgtctccactggcttttgattttctacctttcagaattgcaccttatatcagagttgttctttttgttctgaatattagggagctacgagaaaccatcactatcttggttgggatgcttgacacatacttaaatgtcttggctttgtggcgttctggtcttcattttgctag

SEQ ID NO: 29186 - DNA, 558 bp, Glycine max
tctctgcctgtgtagatgaaattggcaatttcagagtaaaaaccaattatgctgcagagataacaaaggaaatttggaaatattctgaacatatttctgttgagtgagatcagtgtaatcgtggttcgtgatttgatctggaacaacgcttacttaaaaggactcttattttctctgttctctgctctctcggtctgtcagaaatggctgtagcagactcaatatctttccaagaacaactacttcagagggttgcttcagctcagtttaggaagcctctccttcatcttgtgtccactcaagaagacaagggcagatacctcacccaatgtgtcccacttcacaaagcatcactcaaaggtgactggaaagaagctagaaaactattggatcaagatgggtcacttctcaaaacggccataacaaagggggtggtgggccacactcctccacatagccgtgggagcaaaccgtgttcactctgtggaggagctgctaaagttgatgcaaccagaagaattggaattgcaagaccacaagggcaacactgcattctgc

SEQ ID NO: 29187 - DNA, 578 bp, Glycine max
ataatggtgtttataaatgtgggtttgcaaagaagcaagaaccatacaatgaggctgcaagacaattgtacggggctttggacaaatgtgaggatatactaagcaagcaacgctatatatgtggcaatacactaactgaagcagccattcgtttgtttgtcactcttattagatttgatgaggtttatgctgttcacttcaagtgcaacaagaagctgctacgcgaatacccgaatcttttcaattacacgaaagacattttccaaattcctggcattagtagcacagtgaacatggaacatataaagttgcattactatggaagtcatccttctatcaatccatttgggatcgttcctgtagggccaaatattgattattctgctcctcatgacagagaaaggttttctgcataggtggtttatagcatgtttgtataattgtaagagatttatgaggaattttctgtatcttctaagtgaactgttttgttgaataactgcagaaacaatagtgctttgttgaaaaacatattttcaaaataaactggcataggtgtgtgcttgtgtctactatct

SEQ ID NO: 29188 - DNA, 352 bp, Glycine max
tttgtataatgaggagtgctagcaacacactcctcctaacacacaccctatcattgcttgaaatttattgaaaattacaaaatcatgagagagggacattaaagatgatgtaggacccactatcttttataatttccaagaagagaatgtgttcaaaagagtgtattgttggcatttctgttgtataattgtaagagatttatgagaaattttctgtatcttctaagtgaattgttttgttgaataattgcagaaacaatagtgctttgttgaaaaacatatttctcatcataaactgggacaggtttgtaaaaaaaaaaaaaaaaaaaaaggggcggccgccgattattga

SEQ ID NO: 29189 - DNA, 253 bp, Glycine max
attctctcttacctgcattattacgctcactagatgaacaaaggtctccaaaggctaaattggctgttattgaatttgctatcaattcctttaacaaacatgctatgaatccagaaggtgctgcgaatattggcatcctaaaattatggcttgctaagttaacccctttggtcaatgacaaaaatacaaagcttaaagaagcagctattacctgcattatatcagtgtactctcactttgattcgactgctgt

SEQ ID NO: 29190 - DNA, 263 bp, Glycine max
aaaatggcggggatgcagaagctgccatacggcgacgttgattccagtttgagggccttggccggtcgcgccgagggtttcggccgcctcgccattggtggcctccacggtcctctctatttcgtcaccactctttcagatgatggccctgggtcccttcgcgaaggttgtcgtagaaaggaaccgttgtggattgtgtttgaggtttcgggtacgattcatctttcatcgtacctcagtgtgtcctcatataagacaataga

SEQ ID NO: 29191 - DNA, 365 bp, Glycine max
ggaatttccgtttgaggttaaatccttcgaacccaccaaattctgttcctcccactgcattctcaactgggagcatgattaggcattctggtgtccctccatcctctcaagtatcccaaaggcttcattttgttgataattctctgaacttgaggtcagcaccaccgatagataatgtggttcctcaaagccagccacttgtaatccatgttcctgctttgcctaggaatagacaatcatttagatggagtggtggttctagctccagaaacatccattcatcaaactcagttatatgcgcagacagggatcagcaggatgcaagctcaagaagaatgtctagaaatatgttagaacatccagtc

SEQ ID NO: 29192 - DNA, 399 bp, Glycine max
ctttcttctccttcactttctccatccatttttagcgttcagtgcttttgatgcttctgctgtccttccagatcttgcacatcattcagttcttctgcttcttcttcactcagatttctgtggggtgttcctcatgtcacggaagtaaaggcaaaaggaggtttctcttcttacctatatgaacttttggtgttgaatttggttggtgtttaaattattgaagagtgtattggatgattgtggagaaggacgtgcagagatcagtctggcaaagcttcagctgcagaactggtgcaggctgtcaatgaaagactctctgctgctgggatcaaaatgcatgaggaaaagcatgctctatttcaaagaacaataaatttgcaagaaaatctgaaagagtct

SEQ ID NO: 29193 - DNA, 255 bp, Glycine max
ctcagatttctgtggggtgttcctcatgtcacggaagtaaaggcaaaaggaggtttctcttcttacctatatgaacttttggtgttgaatttggttggtgtttaaattattgaagagtgtattggaggattgtggagaaggaagtgttgaggttgattgtggagttgaaaaggattgaacttgttttgttgattattgtttgttgaagtttggttttgctctcaatggctgtagaggagtctgagcctgtgattg

SEQ ID NO: 29194 - DNA, 276 bp, Glycine max
cagccaagccacagagcaactgtacgaggaactgatgctgaggtacttgggttcagcctcctcatgttcaggaactcaactttataaatctcttccatgcttcggtcccactctctaaacactatacatacactctccttttctttttctttgttttcttcctcttcccttttcaatcacatgtaagatatgaatggggaagatctcaaagggatttatttctgtctgcttctctgcgacatatgcatccttctctagtctttagcgcgttgattt

SEQ ID NO: 29195 - DNA, 356 bp, Glycine max
cttttcttattttgtcttctttccatttccctcctcacttgttctgagatcttgaaaaaaaaaaaaaaaaaagtgtttgaaaactgaagacccttttaggaataggagaatgcaggatccaacgttgttccaacccatgaaaccccactttcccgaacaggagcagcttaaatgcccgcgctgtgactccaccaacaccaagttctggtaatacaacaactacaacctctcgcagccacgccatttttgcaagaactgcagaaggtattggaccaaaggtggtgccctgagaaacatccctgttcgtggtggaagcagacagatcacaaagcgatcatcttcatccaacaacaaca

SEQ ID NO: 29196 - DNA, 283 bp, Glycine max
caataacagaagcaatcgagaactgagaacacaacaatctctcatctctctctctctctctctctctgtgacatattgatatggctgcttctgcttcaaactcaacccttcactcacccaccactcccaacaccaccttcgtccaagccgacccttccaacttccgcgccgtcgttcagaaactcaccggcgcctccgacgacccctccgcccctaaactccccctcactctcccctcgcgcctcgcggcggcgcagtcccaccaccgccccgccgtcggcgc

SEQ ID NO: 29197 - DNA, 534 bp, Glycine max
  unsure (1)..(534): unsure at all n locations
ctcgagccgaatgtattaaattttcacaacatccaacccaacttccccaatatttctttacactctttcttcttctgctttcttccctcacccctctaaaaatcacaaagattctaccttttgatgcaaatgggatcaacccaccaaccctagggtcacataccagcaagattcattctttcattcaatctcaaaccaaacaacccccatttcaattatggcaccatttcccacttcccattacttcagggccttcactttctccattttgttcctcaaaaccctagcttttgacccaattcctctgttttcctatgctggctttggaaaagatctgaaatttaagcccaacgtggccctttttggtaatgcaaaggttctcaatgaagggtctgggattcatttctctggctttgggagttcaagaggcactgggagaatcatgtacaagaaacccatcaagctttctcaaggtaaaccaaggcaattagtgtctttttctacttactttgcattntcagtgtccttggaaga

SEQ ID NO: 29198 - DNA, 259 bp, Glycine max
ctcgagccgttgatatctgccgaaacagaatcaccaactacggtaccaagcgtggcaccaaagggatccaaagatcaaactgagatcattaccaccagttgttctttaccagttacatcaatttctggttctgcagctgtcccagtatcgtcttccgatgatgaggtagatgctgctacaaaaacctgtcttgcctcacctcaatcaactagcacggaaatcagaaatctcattggctttgattttagacctaatgtaa

SEQ ID NO: 29199 - DNA, 501 bp, Glycine max
tcttggaataagtgtgtactgcagacaccgttgcctcagtcatacttaactttttgggttacttgcaatcttgttggagtatctagagaaaatggctcctaggatagtggatcttcggtcagatacagtaaccaagccaagtgaagcaatgcgagctgctatggcgagtgctgcggttgatgatgatgttcttggccgtgacccctcttgttttcggttagagacagagatggcaaagatattgggaaaggaaggtgcactttttgttccatcaggcactatggccaaccttatatcagtgcttgtgcattgtgacataaggggaagtgaagttattctgggagacaattcccacatacacatttatgagaatggcggcattgcaacccttggaggggtgcatccaacaacagttagaaacaatgaagatggaaccatggacattcatttgattgaggctgccatcagagatccaaagggggagctagtatatccaaccac

SEQ ID NO: 29200 - DNA, 257 bp, Glycine max
ccatctcaactcaatggccaaaccgatgcctctaggcaactaggatgtgcttccaacgaccccaccatgtattgcaccagcgtcgaccatcatgctcttcatcatcaaatccccaccctccgatcctcctcaacgtccgctaacacacgaccttcccctgcacccgcattcatcaaccccccaacacaggacttcaccagcgagattgacctttggaacttcacccgatccacgtcctcactgttggcatcctccga

SEQ ID NO: 29201 - DNA, 281 bp, Glycine max
ttcggataatgctcctgcagggatacagggagccaggcatgctcaatttggaaaatctctatcagatctccaccttaacaataataaactgcagttggggatgcttccaactaatatccatcaacttggaggagtgtatactgggatttcaagtggtaacatgatgaccaaacatgataagagcaaagaaagcttatcgtgctttctgaccatggggaaatctagtaagagtttggagaaatctgatgatgttaagaaacaccaatttttgcttttcggtc

SEQ ID NO: 29202 - DNA, 572 bp, Glycine max
ctgtcaaaggatctcccttctgatcttcaaaagcttagatgcaaggttgctttcaacgcactacggtttgctcagccgattcaggaactcggtgacggcattgcagagagaatgcaaagcaagggaccttaccttgttcttcatctaagaatggagaaggatgtgtgggtgaggaccggatgcctccccggtttgagtcccgaatttgatgagattgttaacaatgagaggatacaacggccggagctcttgactgcaagatcaagcatgacttaccatgaaaggaagatggctggtctatgccccttgaatgctgtggaggttactaggcttttgaaaggtctaggagctccaaagaatgcaagaatttactgggctggaggacaaccattgggtggaaaaaaagccttgcttccattgatccaagagtttcctcatttttatagcaaggaagatcttgccttgccaggagaactacaaccatttgcaaataaggcttctataatggctgccatagattacatagtctctgagaagagtgatgttttcatgccatctcatgggggaaatat

SEQ ID NO: 29203 - DNA, 470 bp, Glycine max
ttaggaaaaaagaaagacccagtccgaaagtgagaaacaaagcgaaaccattctgcattggcggggttttagggttttgtgatcactgcacagtgcacagcgcctccatggaaatgcctgccagaagatccggcaactacaccctcctcagtcaaactcctgacgacaacttaacggcgccggtgttcggttgctcctccggcgacggtcaaatcaacagcagcaagttcgagagagtctccgattgggactccggcgtcgaacaccgacaggggaatcggatcgggaatttgcactcctcgttcgggatgcagcggcagtccagcgagtgcagtttcggcgagagctctctctccggcgagttctacgcgccgactctgtcgctttcgcggcgaatgagatcgacggattcagaggcacgtttgcgggaaattcggcggcgaggagcggaggttcctaccgcaagagct

SEQ ID NO: 29204 - DNA, 357 bp, Glycine max
gttaagtcatcaacctttcaattttcttggtggtgatatattctactttacttgagtctaccctttcttgtctctctgtctctctctccaattcagtcttcagacgaggtagtttagtgtcataattgtggaatgtagctttactcatctttcatgtgaagacgcttcatatggttgctgcaacccattgaatagtccccaaaattcattctcttaggatacatttgctatacccaattaatgcccttcagcctacagcgtgtgtcttcaattacagcatttggcatgaaaaaaagggtagagaggcctcggggttgttccatggagacagagaacagtgacaccaggtccaaaaag

SEQ ID NO: 29205 - DNA, 285 bp, Glycine max
gtcaaaatgaaataaggactataccatttcaagaggaggaactcaaggcccttttattgtgctgttggtattttcttctttttttgctttaggacaatatgcagctgcacatatctccaagtttgaggcatgttactgtgtttccaagtaaagggttcaaggagtttatcaaagtgaaggttgcatcgaagcgtgtctcgtatcggatgctcttctactcactcttggtcttcacttttcttctccggtttgtgtttgtcttaacagcagtggatggcattgatg

SEQ ID NO: 29206 - DNA, 346 bp, Glycine max
tatttgttgaatgagaatgatgatagcctcactgaagcagaagctggcattgaaattagagatttctaaaccatttcaaattcagatcatgatctggaggtctgtttggtagagctaaatgatttttcaaatgttgtgtaaatatggttttaaaagataccaaaatgcctcctgtatttttattaacgatatgcaaagagggttgcaagttgtaaacaagggtgatgtatcaaccatgtagctcgttaaattttcagcgtgtaacaatgtagattgagaccactaaaaagaattcttttagatgataaacaaacaaaataaaagcagaatagcagtagttatggac

SEQ ID NO: 29207 - DNA, 427 bp, Glycine max
ttaactttttgttcatattccttcttcttccaaaagctctccttgtttttccaaagaagatatacacttacaagaatttcattgccaataaaggcttagtaaatggtgtattatggtttctccaggagctctgcaggatccccaaattatggtttggttggctaggatacctattttatcttatgttgtgcccctggtttatggggcaagtttttactgaagggaaaaatatggtatacatgacctatatgggttgggccatagagacttctaatggaaagggggaggttgagtatgttgggtctccagatattatggtggtggttcttccccatctattatttgtggttttgcctgcaattttggtcactggtgctctgacggctgaaagagcaatttgccgggaacatatgttagcaattttggt

SEQ ID NO: 29208 - DNA, 688 bp, Glycine max
ggaagacctgctgttgatccacaacttgcaagagaacaagtgaatttggcagaatggggacttgaatggctgcaaaagggcatggtggagcaaattgttgatcctcatcttgttggacagatccaacaaaactccttgaaaaaattttgtgagactgcagagaaatgtttggctgaatatggtgttgacaggcctgcaatgggtgatgtgttgtggaatttggaatatgcacttcagctccaagaaagtggtcaacaaagggagccacatgccaatagacatgctagtgaagaatttgtgagtgtgacaaatgcaattattcctggaaatccttctaccaacagaaggacagagagggatcattataactgttcttcagatgtaagtactagccaagtgttttcccagctaatgaacaatgaaggcagatagagataggtttatgccgcaaatataagcaagaaattaaagcagtacctaagctttcaaacttcttttttttcctaccaagttttttttttgaagaaaattgcatcaaaaccgtattagcaagatttactcacggaaggctccatatagcactagttcattggtagcaagatttttgtagtataatttattcatttattttatacagcaattctgtacttattattctggagcttaatcagtcaaatttgtaatgagc

SEQ ID NO: 29209 - DNA, 294 bp, Glycine max
ctcactatagagctttctctctgcagtgtgtgtttttgttttagcttccacttcttccatcctttaaacaaaacctttcagttataagttccacgttcctttgggtataaaccaaaaaaagcttctcctttgatccacactcagccttctctctccaatgctctcattgctgcattgaagcgagctcaggctcaccagagaaggggctgcattgagcaccagcagcaacagcctctgctcaccatcaaggttgagctggaacacctcatcatatcaatccttgatgaccctagt

SEQ ID NO: 29210 - DNA, 259 bp, Glycine max
ctcatttaggcatattcacaagattagttctaatggctgggattgtggtgatttttgacttcgactcgacaatcatcgagtgtgatagtgataattgggttcttgacgagtttggtttaacagaaaagttctatcagcttcttcctaacatgctttggaaccctctgatggataagatgatgaatgaacttcgttcacaaggatgaaccatagttagataaagactcattttggcggaaaaattccggatcctgatcct

SEQ ID NO: 29211 - DNA, 659 bp, Glycine max
  unsure (1)..(659): unsure at all n locations
gtttacttgacgccgcaaagcaacgaaatctctcgctctctctgatggacgacgtttgcgaaggcaaggacttcacgtttccgaagcaggaggagaagattctggacttctggtcccaaatcgacgcattccacactcagctatctctgacgcaagacaagccggagtacatcttctacgatggccctcccttcgccaccggcctccctcactacggtcacatcctcgccggcacaatcaaggacatcgtcacgcgctaccagtccatgaccggccatcacgtcacgcgccgcttcggctgggattgccacggcctccccgtcgagaacgagatcgacaagaagcttggcatcaaaaagcgcgaggacatcctcaagctcggaatcgacaagtacaacgaggagtgccgcgccatcgtcacgcgctacgtctctgagtgggagaccgtcatcacgcgcaccggaaggtggatcgactttaagacagattacaaaaccatggacctcaacttcatggagtccgtctggtgcgttntcgcccagctgttcaagaaaaaacttgtctataaaggtttcaaggtcatgccgtatagcactggctgcataacgccgctctctaatcttgaggctggtcagaattataaggatgtatctgatcct

SEQ ID NO: 29212 - DNA, 272 bp, Glycine max
cctccatcttctcatgggctctgacaaaatactcccttctcatgtggtcgcaaatggccacgccccacttgattccggccacgcccgtctcaaagaactcggttacaaacaagaactcaagcgtgatctttcggttatttcgaattttgcgttttcgttttctattatatcggtgttgactggagtgaccactctttacaacactgggttgaattatggcggccgtttcgctggtgtatgggtggtttttagcttctgctttcaccatgatc

SEQ ID NO: 29213 - DNA, 243 bp, Glycine max
tggaaaatattgcggggctactgctcaggaagatgttaatttagctatcaaaaagcttagagagcagcatctttgggctgaacatagcttgatagatgatattttctctgctgttaataacaatattgacaaggccacagctttattggaaactatggaccctgcagcgaattttgaagaatccaaagtatccagcaatcctagatcaactacttcagatgatactccttgtaaggataagac

SEQ ID NO: 29214 - DNA, 278 bp, Glycine max
ggctcattctactctttccctctcaatttcaaaagtttgaaacgcagcgtctcagttcaatcacgttcccatggacgacgaagctattgctaacggtaacggagctccgtcgcctccatgtgtcgtttcggtgtctgcattatccggctcccggcgccgcctatcgacgagcttcgtggagcggagccgcctccatttctcgtcgtcggagaagctcaagccaatggcgtgggtatcgctccagggaaggctcctcaacgccgacgaagccagctcgg

SEQ ID NO: 29215 - DNA, 426 bp, Glycine max
tctgccctcacccgaagaagatgtgtttcccctggttatatgtgctgaaactactagtaattccgtaatagatgcatctcctcacatgcaaattactcaagccgtcttagagaaaagcaatggtattggtcctttccaggtaaaagtagttaggcagattctgtggattgatgatattcgttatgagctgagagagttatatggaataggaagttcaacagtagcagattttgatgataatgatcctgggaaggagtgtgtaatatgcatgactgaacccaaggacactgctgtcttaccctgccgacatatgtgtatgtgcggtgattgtgccaaagctttgcggcttcaatcaaataaatgccctatatgtcgtcaaccaattgaggaactaatagagatcaagataaacaatggcaacgagtg

SEQ ID NO: 29216 - DNA, 411 bp, Glycine max
tctttttttcgtccgtcgagattgtgttagggttcgcaaaattgcagcttcccttcacagttttcgtcccgaaaaatccatagtatcgcgtgacacgcattgaagcacttgaaagatgcagaaattgggagagtttaaattaccacctttcttcaattacccaccttacttcactttgcagccagtcagagacacaagagagaagcagatacagctatggaaagatcttattttagatttttgttaaacacagaagatatgtataattgggcttgaagaagaatttccactatttacaaatcatggaattgaaaggtctcttactcatgaagccagagaagctttcctttcagcattagtgtctgaagggcgtgcagaatggatggataaaggacataggaaatgtcttat

SEQ ID NO: 29217 - DNA, 292 bp, Glycine max
gttcgcaaaattgcagcttcccttcacagttttcgtcccgaaaaatctatagtatcgcgtgacacggtacgctattttatcacttgtctgagagtaattaggagaaaactatttaagcttctgagaaggctgttaatttctgtgcatagcattgaagcacttgaacagatgcagaaattgggagagtttaaattaccacctttcttcaattacccaccttacttcactttgcagccagtcagagacacaagagagaagcagatacagctatggaaagatcttattttagatt

SEQ ID NO: 29218 - DNA, 434 bp, Glycine max
ctttcttccccccttttttctctaacccaacaaaaatggatgattctggaagtaaaactaaactgttgaatccatggatgctccacttccagaaactcgctctcgaactcaagtgccctctctgtttgagtttgttcaagaggccggtgttacttccatgcaaccacttgttctgcaattcatgtttggctgattgcataacggctgggcctggatgtgctgtttgtaaggcaacgtatgctcaaacagatgttaggcatgtgccttttgtggaaaacgtggtggcaatatatagaagcttggatgccactttttgtgctagtttgtttcagccatgttcttctggtgatgggagggttttggagccgtgccaagcaattcttaattcaacttctagtagtttaaaagctgccaagcttcctcggaatttaact

SEQ ID NO: 29219 - DNA, 280 bp, Glycine max
  unsure (1)..(280): unsure at all n locations
ggcagaagctttatgctacattggaaacgctcaagcacaatggagataattttgcagctgaaattcagaataggttgaggataattgttgcgggtggagatggtactgccagctggcttcttggagttgtatctgaccttaaattacctcagccgccaccatttgctactgtgccattggggacgggaaataatcttccctttgcgtttggatggggaaagaaaaatccaaccacggatctccaatcagtggagacattcctanatcatgtanaagcggc

SEQ ID NO: 29220 - DNA, 529 bp, Glycine max
agttttcttcatctctttttttatttctctctctcatctttgtccatggtttcttcgttctctgcgtgatcgttatggttttttggaaccctaattcggccgcgacgatctctctttttacacagtttctagcagtctagacagtgtagatcgtttgtagaagcttttcagctcgtcacattttgctccttcttctgttttcgttgttcggcggaaatcagcgcggttccttcggagaacttcttcgaggtttttggccaatttcgcgcgtcgttctgctctgaccgaaacgtttctagaatttcaaatatcttttctttcgtcggaatttgcgaaggaggatgagatttgaaggatgaacgatgccggtactgcgtagcggagcgcgcaagggccgggcagcagcgaaacagcaacaacaagaacaacaacaacagcaacaaaagcagcagcagcagcagcatagtcccgtggtggagggagaggctattgcgacgaggacttcgtcgcggcgtgcggcggcggcagc

SEQ ID NO: 29221 - DNA, 266 bp, Glycine max
atcatttcatttcccatataaaaaggcacacaaagtattaggaataataatatattaacaacaacgacaatataataataatttctttctcccttaataaacagagcctgctctgtttcttcttcttcttcttcgcaaaatgatgccgaaacaaccgatgaacgttttgaccacaaaaccttcacctttgagcaccatggtggtgatgctgatcctctgcattctgggtttctacgctctgcatttccctcactcttccacacatt

SEQ ID NO: 29222 - DNA, 449 bp, Glycine max
cggctcgagaaaaattcgaatacccaattgggaaaaagcaaacaactttgctaacactcggtgaaaaaaaaaaacgcattccgccttcagtccttcgtttcgcattgagctctgtttcttttccagatgaaacggcgatgaagtagctgtcgtttttcgaatcagaacgccaccgcagaatgctgtgcaggaggagctccaaaaacggcgtcggctcgggatcggtgccggtgcacctcaacgtctacgatctgacacccatcaacggttacgcttactggttcggcctcggagtgtaccattctggcgtgcaagttcatgacgttgagtttgcgttcggggctcacgagtatccttcgacggggatattcgaaggggaaccgaagaggtgcgaaggtttcgcgttcaggaaaacgattctgatcggaaaaactgatatgggaccctgt

SEQ ID NO: 29223 - DNA, 248 bp, Glycine max
acaaaatcctagaggttgtgatattatggctcctacacttcaacgtgcactttctcatctgctcactcttgtagcttcactttcaatactcctagtggtaccctcctcttgtttcaaccctaaaaagattgtgaatgcttcctatgcttcatactccttatatggttcagattggtctcctgctgtagccacttggtatggaccagcccaaggggacggtagtgaaggtggtgcttgtggttatggaa

SEQ ID NO: 29224 - DNA, 338 bp, Glycine max
caagagaggaggttgtagctgattacaaggctgcatccttagccccagatgtgttggagaagaaacagatgcaaactgaaactctctctgctgtctttgagacatactttcgcattttgaagaagacaatgcagtccatatgtgccacgcctgaagcaaacgctggggcattatctgctgcaggggaacccctcccttggcttgctccatgtctgaaaggactggcaaaatgttcacatttgattgaccttgatgtcatgggtgatctaatgaaccatctgagagtacttgcttctggaagtagcaactcacgcaacacttctgacaagtgttctaaa

SEQ ID NO: 29225 - DNA, 258 bp, Glycine max
cttcctctcatccttccctcactgagttagcactgcatgagttcatgtgactttcactcctccacaagaatctcccaagagacatgatgcagagctttctagtggctttggtttaattaactgacatggaatagaagggtagcatatcagtcacctcactcagagtgacaatttttagtggggtacagtgatcataattgctaagttttgttgaaatgggagtggtcactgttggagaattgaagactagcatctcag

SEQ ID NO: 29226 - DNA, 421 bp, Glycine max
attgctcacaggatctgttcaccctacaagggatgaaaatggcaacttactcgtgactgagtttggattgtgcaaatacaaagatcatcaaactttgtccattcaagagttcccgagaattctgctcctggtcaactcccaagaacagtggatgtcattgcagaagacgatcttgttgattcttgcaagcctggagatcgagtggcaattgtggggatatataaggctcttgcagggaaaagcaaaggcagtgtgaatggagtattcaggactgttctcatagccaacaatgtttctcttctcaacaaagaggctaatgcaccaatctacagtgctgaagatgtcaaaaacattaaagagatagctgcaagagatgatgcatttgatctgctaagtaattcacttgcaccttctatatatg

SEQ ID NO: 29227 - DNA, 268 bp, Glycine max
gttcctttcagtcagatactccttcacgctcttcttcattctcctcctcttatcaccttcacacattgcttcaacaacaccaacactagctcacacactaacacaatcagccaccaaaatagccatcacaaaccgcaacatccatagccttaacaatgctggaagaggcaccaaaatcaccggcatatcgcaattcaaacgatacctgcatcgttttgggtacttacaaaacaacaacattagtttcagtgatgaatttgatgccgtc

SEQ ID NO: 29228 - DNA, 277 bp, Glycine max
ctttcccatgatctcaagtctccaccaccccaacactgaattctgcaatttccctcaaccatttccaattccctcttctgggcaccgttaaatttcccatcttgccaccgatatctcatctgggtcattccatggcgcacgcgaagaccgattccgacgtcacgagcatggacacgtcatcgtcgccaaaacgcgccgtttactacgtgcagagcccctcgcgcgactctcacgacggcgacaagtcgtcgacggcgacgcacgcgacgccggcgtg

SEQ ID NO: 29229 - DNA, 358 bp, Glycine max
ggcagaccttccgggtctacttgaaggggcacatcgaggttttggtttaggccatgagtttctacggcacactgaaaggtgttctgctctggtacatgttgttgatggttcatcacagcagccagatctcgagtttgacgcagttcgtctagagctgaagctatttaatcctgaacttgctgagaagccttatgtagttgcttttaacaaaatggatcttccagaagcatatgaaaactgggaatccttcaaagaaaagttgcaatctcgtgggatcacaccattttgtatgagtgctgtcaaaagggaaggtactcatgaagttatctgtgctgcttatgagcttttgcgtaaaaga

SEQ ID NO: 29230 - DNA, 251 bp, Glycine max
agcacgtgcatggaaacttgaagcccagcaatattctattgggcaacgacatggagcccaagattggagacttcgggcttgagaggatagtgacgggtgacacaagctataacgctggcgggtccgcgcgtatttttgggagcaagagatccacggcatcacgagatagtttccaagacatgacgtttgggcctagcccgagcccgagcccaagctcaataagtggtgtgtctccttatcatgctcctgag

SEQ ID NO: 29231 - DNA, 281 bp, Glycine max
gtgtgtgtgtgagaagagatgggaagagctccttgttgtgacaaggccaatgtaaagaaagggccatggagtcctgaagaagatgaaaagctaagagagtacatagagaaacatggaactggagggaactggattgctctcccacaaaaagctggtttgaaaagatgtgggaagagttgtagactcagatggcttaattatctcagaccaaaccttaagcatggggagttttctgaaggtgaagatagaataatctgcactctctttgctagcattggaag

SEQ ID NO: 29232 - DNA, 359 bp, Glycine max
cagctccaaacactcgtttcaggcattcttgccttgttagtaggtgccttgctttataagtcaaagacaacacatggtcctaatgcaaagatctgcactgcgccacaagcaggaggagcatggcctattgttggtcatttgcacctcttcggggctcatcaacttacacacaaaacactaggcacgatggctgacaaacatgggccaattttcacgataaaacttggttcatacaaagttctggtgttgagtagctgggagatggccgaagatgtgtttcactgtccatgacaaagcattctccacgaggccctgtgttgcagcctcaaagctaatgacctacaactctgcaatgtttg

SEQ ID NO: 29233 - DNA, 289 bp, Glycine max
ataacctactatattcaactcttatgagcatcaacagggactctcgtggactaaccaaattccaagtgacagattctatcaaagctagctacctattgaaaactcttcttttatcatttgggcgttgcaagagataaatgaaaatggacatatacgagccatttcagcaagttagcctgtgggggggcaactttaaacttgatggcggtctgaattcaattgcttccccaatgttaatggttggcactaatgtggagaactaagtcagagtatattcctcgggaaccaa

SEQ ID NO: 29234 - DNA, 527 bp, Glycine max
  unsure (1)..(527): unsure at all n locations
attgactccagtttctctgaggattgctgcacttgagacattggaatctcttattactgtggctggtgctttaaaatctgaaccatggagatcaaaagttgatagcctcttgttagtcacagcaatggactctttcaaggaaggatcagttggtgaagaaagaagcgtgtttcaacaaaaggaacctgctgcaactaccacagagttgcagcttgctgcattgcgtgctttattggtatcctttctttcatttgctcgggtacgacctccatatttagcccagggtcttgaacttttccgtagagggaggcaacaaactggaacaaaactagctgagttctgtgcccatgctctgttaaccttggaagtgcttatacatcctagggcacttccaatggtagattatgcctatgcaaataacagttcttttggtgaagctcacagtaatctccaacatgaatattttggctggagcaacagtacgccatatggtttaccacaagatcctnctgactatgatgatgatc

SEQ ID NO: 29235 - DNA, 647 bp, Glycine max
ctttttaaatctgaaggggataaaaaggttatccaccagttggtttccctatacaaccaagattctactgcttcggtaccagaaggcacaaatcctgttgatgtagcagctcttgtaaaatattatcttgctagccttcctgagccactaaccacattagagctttataatgagattagaagtgctcgatccagtatatattccatgagaaacatactcaagaggctttccagtgtaaactacatgactctggagtttataacagcacttctactccgtgttagccagaaatcacttctcaataagatggatgctcggagccttgctatggaaatggcacctgttattatgtggcaaaaggaacggagacctgaattttatcatcaatattggaatcaggtgtcaaaaagtctttccaataagactgtggatccaacacctggctcatatactgcctgggacatgcttgctgatgatggtgaagccacagatgcatcatctcctattcctttggatgacggcacaccagtagattttggtgcaattgaggttgttcagttgctcatagaacatcataatgcaattttcacagatgcaaatgagacagtctggaaatgaattgctttattccttgtcctgtatttatt

SEQ ID NO: 29236 - DNA, 508 bp, Glycine max
ggaggtattgtcgaaggtggattagagtgttcacacgcgggaccttcccgagtcatgcttacttttaaccccgttgttaatatagacagacatgaagttgaagacaaagaagtggagaaagccttaaacttattatacttggacatattagactcgacaatacagagagaaggggtgaccccaacattatcaagtccgaatgagttgtgttggttagatctctcttactgtggatcccttacaagcctttcacatgagtttgacctttctaagttgaaattcctcaagaaacttcttctcgatggttgctcagagttcgaaatattcccagaaattgaggacacaatggaaaatctagctgtgctcaaattagacgcaacagcaatacaggccctaccttcatccttgtgccgtttggtagcgcttgaagaattgagcctgcactactgcgaaagacttgagactattccatcttccattggagatctcagcaaactctgcaagttag

SEQ ID NO: 29237 - DNA, 265 bp, Glycine max
gcaggtcaaagcctttgattggccatcatgtgtaggccaatgataaacaccacaatctgaggaccctcccacttgcagagagccagtgtgagccactgagagagagattggactccttctcaagcaggagctcaatgggcctcttgtgtaaatctgtatgggcccctaataatcacatggcacactatttgattactcataaaggttccctgcaccccattgagatgtgattgctgccactaccaagaggaagaggtggaagctg

SEQ ID NO: 29238 - DNA, 314 bp, Glycine max
tcgcgagcggccgcccttttttgttattattcatcttttctctaactcacccatggctcaagagaacaacgatccgcccagggacgagaattttcgcaacgagaattttcgcgacgagaattttcgagacgagtcgagacagtcgttgtcgtttcggtcgcccatgagtcgcatgttgtcgttcacgaggatgctcggcagggaacgtaaggggaacgtttcactgtcgtcatgcgggagtgattgtagctgcgccgcggagcaaggtgagccagaggagactcagtgagtccgtgactcgggttttggcacga

SEQ ID NO: 29239 - DNA, 391 bp, Glycine max
tcgcgttcgcgtggggtttgagagtacagagaaagcagagccccaatcagcaaattcaggcggtactagaaccaataggcaactaaaatcccctttccaaccctaattgatcttcttaagtaagctcatttaagtcctttaagatgcagaccctcaagcaaccgtgccccaaccctctcagctatctaacccgagcgcgacactcggctattcggttcgcgccgacccgattcaccgtcaaatgcggctacggctttgaatccgcgagtttctcgcagggagtcggcgcgagccgagccgcattggcaacgctcgtgcgccatcttagccagtcaagtcgcgtcgcacagggaagattctcccgcccacgggggcgacaacaacaacaacg

SEQ ID NO: 29240 - DNA, 401 bp, Glycine max
aaaatctcttgttcaactcttaaggccatgtaaattattcttgaaaaattcaatgctcttatatgtttatcaaaattgttagaaaaagataaatttaattcaagcctatttttttcttcatagtaaatcttctgattttgtttttttgacttctattacatcaggaaatgaggagtcaatgaatcaataaagatcgacttcaactactgcaagatgttagtggtgcttttagaccaggaattttgacagcacttgtgggtgttagtggtgctggaaagacaacccttatggatgtattagctggaagaaaaacaggtggatacattgaaggaagtattagcatctcaggttacccaaagaaccaagcaacattttctcgtatcagcggtattgtgaacaaa

SEQ ID NO: 29241 - DNA, 267 bp, Glycine max
gtggggagatcagaaggaattgcagggttgtgaattgatcatgatgtattttgtaataatgatgcatgcattggcatttaattcatgtttgtgtgttggctttttgtgtagctggtgatggcaataataacaagagtatcagcaggtggtagtagtagcgacgtgttagaggtcatgactcatgagagattagtgtattgcaaggtcatggtcatataagtttgactagatcttgggttatattaatgttagtatttttcagttggt

SEQ ID NO: 29242 - DNA, 459 bp, Glycine max
atattttgttgaggttcatggaatgcgtttctggaagccatttgtggagaagcctattgatggtgataatcacagtataatgatatactatcccagttcagctggtggaggtatgaaggaattatttaggaaggttggcaacaggtctagtgagttccatccagaggtgagaagagtgaggcgtgaagggtcatatatttacgaggagttcatgccaactggagggacagatgttaaggtatatacagttggccctgaatatgctcatgctgaggcaaggaagtctcctgtggttgatggtgttgtgatgagaaatcctgatgggaaggaagttaggtatccagtcctcctgactcctgctgagaaagaaatggcaagagaagtttgcattgcattcaggcaagcggtttgtgggtttgatctcttgagatgcgagggacgatcctatgtttgtgacgt

SEQ ID NO: 29243 - DNA, 481 bp, Glycine max
ttctacattggatctctccttcaattctttgacgggtgacctgcctcagactatgagctcactttctagcataagaaccatgtatctgcaaaacaaccagtttactggcaccattgatgtccttgctaatctgcctcttgatactttgaatgtgggaaacaatcattttacaggctggataccagaacaattgaaaaacataatacaaaaggatggtaatgcatggagctcgggacctgcccccccacctcctcctgggacacctccagcagtagcaagaaaccgaaatcacaaatctggtggacatagcccatcagatggtggctcaagtgacggtggaggcaaaaaatctggtataggaggtggtggaattgctggaatagtgatctccatcttggttgttggggcaatagtagtattctttctggtgaagagaagacccaaaaagtcatttaatgatgttgaaaagcttgacaatcaa

SEQ ID NO: 29244 - DNA, 261 bp, Glycine max
cccattttcccttttgatgttctaggtgtcccagccttgccaaagttttcacaaatttcaaaagggtcttgcatgagaaggacttagtgcgctggcatggtaataacaaacaacaccgttttctaggctgcggcaggttttgtgaaggagggaaagcagcaatggaagatgaggctttgattgattataagagtgaaggtgttgaaagaagcatagaatgtgaaaatggttgcagtgatgagagttttgctgatttgatta

SEQ ID NO: 29245 - DNA, 692 bp, Glycine max
ggcacagatagatgtccatggaaaaaagaaagtgtcaggcaacaagattaccggcattcagttctcccaaaaaaacagtcagagaataatgatcacatcagaagattctaaaatttgtatatttgatggcactgagcttgttcagaaatacaaaggtcttcctaagtcaggaagtcagatgtctggttcatttacatcaagtggaaaaaatataatctcagttggagaggactcccatgtatatatttggaactttgatgacatgggaaatgcttcttcgaaacagacgaaatctgaacgctcctgtgagtactttttctctaaaggtgttactgttgcaataccttggtcaggaatgaaagcagatcaaagggactctagtggtaattattcccaccgttcttcagaaatgccaacccaacagctagaggttgcccctgagactagagatcacgaacttttttctcttggtattggttcaccactgatggctcgtgtcgaggttctatgacttggcctgaggagaaacttcctagctgggatttacctatagcagaagaagaccagcagttatctcacaaagataattgccatgacagaagtgtatcagaaacatggggactatcaattgtggcagctggttgtgatggaactatcaagacattccacaactttggattgcccgttaggct

SEQ ID NO: 29246 - DNA, 422 bp, Glycine max
gttgggggagagttagttgaggttgttggaatttcagatggtgcagatgtagaaacagaacctggtccagttggtgttaaagaaggaagtttagttggtaaatatgaatctcttgtacagattactgtaataccaaaggggaaagagcagtcctctgtcaaggaggcagattcatccccaaaaggtgtgactgataaactacaagaagtcttgaaaaagatcaaaaccccagtcaaaactgggatttatgatgacctatatggagaatcgttatctgtcaaagttggatcttcctgggcatattcacctgcactcagtactggtgaacgatctccagataaggaggatggtgcggggagcggaaagtcacctgttgatggagatgatgatgatttatttgggtgactattcaacttatgcag

SEQ ID NO: 29247 - DNA, 443 bp, Glycine max
aagaaagcgtatttgaggatacaaagtatttggtgcagtctgctgtagatggttataatgtttgcatatttgcctatggtcaaactggctctggaaagacatttacaatctatggatctgacaacaaccctggacttaccccccttgcaattgcagaactttttagaattttaagaagagataataacaagtattctttttccttgaaggcatacatggtggagttgtatcaggatacccttatagatctgttgttaccaaagaatggaaagcctttaaaattggatatcaagaaggattcaacgggaatggtagttgtggaaaatgtgacagttatgtctatttctacaattgaagaattgaatagtataatacaaagaggatctgaacggcgacatatatcaggaacccaaatgaatgatgaaagttcaagatctcatctc

SEQ ID NO: 29248 - DNA, 425 bp, Glycine max
gaaccctgatgttagccagtgagaggattccgcattcgcaagacttctagtaaacttcacctacaactctattatacttcaaccgttgaagcaacctccaaaggtataccatagaatagagagatacagaagtgcatgccattctgcaagaactctcaaagcaattgttacggcataaactcgaatttggtagtttatttttttcttcttctttaatatgtggaggacatcatcttcaatgaattgaagggatttcaggattgtatataaaaatcaatgaggttaagtggcagaacttgaggttttaaagagattttcttcttgacgatttggtattcataacaacaaataaaaatgaagttcatgaaacttggaacaaaggcagatactttctacactgaacaagctaccaggactctgatatc

SEQ ID NO: 29249 - DNA, 318 bp, Glycine max
cttttaccaagtgcaggttggattcagaatgcagcttccacagtatattgccgcatcattcttctgcctaatctgctcatccattatttactatggaaaagcagaggcgcatcaagttaatttctatgtgcacaataaatgtccctttccaatatggccagcaactgcaccaaacagtggccaaccagtgatagcagatggtggattctaccttgctccaggccaaacccaacgtgtcatagcaccatggacatggaatggtagaatttgggcgagaacaggctgcaattttgcttcaaattggaaaccagcttgtga

SEQ ID NO: 29250 - DNA, 615 bp, Glycine max
ttctttgtcctatataccaaccaataaggttccaaggggaatcccaaggcgacttttcagtccaaatccatggtctcctggtgcatactcaaattggactgtaattaaggaaaatgttgaatgtgcctctcatctatattattggagcatttataccggcaactatgattgccgtgctttactactttgatcatagtgttgcatcacaacttgcccagcagaaggagttcaatctaagaaaaccctcatcttatcattatgaccttcttctcttgggcttcttgaccatactgtgtggacttattggaatccctccatccaacggcgtgattcctcaatctccaatgcatactaaaagcttagctactctaaaacatcagctcttgcgcaataagcttgtatctgctgcacgaaaaagcatgcagaaaaatatgaacctgtgtcaattataccgaaatatgcaagaagcatatgaccaaatgcagactccattagcccgccaaataccacctgccctggggctaaaggagctgaaggaatccaccatccaactgcttcaagtcatggatacattgattcccctgttgacgaggctgttttcgatgtagataagga

SEQ ID NO: 29251 - DNA, 370 bp, Glycine max
ctttttatttttaatgaagcttctgtcttctttttctgtaccttgttgcagctgctgctttctagcttaaaatgctcctcaatttcatccaaattcccttgctttatggcctctttgtgttgtacatgctcttcccaatgaaacccacttccagattgtgttagtaacaactagttgagaatctgaagcataagcacccccaccaacttcaatttctgctttcaccaaatgctacttcttgtgctgtttcatctctctgaatttgtgaagtctgagactaacacatgcttctgaacctctcccatgctcctttcagcaggaaaatatgaaggccggaaaagtttactccaaatttaattgtcgatatctt

SEQ ID NO: 29252 - DNA, 229 bp, Glycine max
actcgagccgattcggctcgagacgtggcagacgtggtggtggtgcctatgaaggtggcagacctggtggctatgaaggcggccgaggtggtggttatgaaagaggcaggggtggaggaaggggttatgggcgtggtaggggccgaatgggtggacggacaaggggtggcggcggcggcaaccaggcatgattgcaaagggtgctattgtcattcttgctaaatgcttg

SEQ ID NO: 29253 - DNA, 562 bp, Glycine max
cgcaattaaagctcttagtttggtcttagttagattgctcggttgtctttcatatatgtgttaatccatttaaatgtctcactaatcgcttagggaagatttatctgcaggtagcctgttgcaacatttatggatgttgaaaggaaagtgtctcagtaattttgccccttcatgtttcatttaagtcggtgttggacggatgaactcatgttggatagaattttattgaacttttgttttttcccttgtaatgtatgactagtgtgatcataacaaactgaagaaagcatattaagctgaagaggccacacagttgttgccatggaagatcaaaatttacagcctacaattcaacagattttcacgttgggttgaatggcccagacccagagggattccttttgaattcagtctttttgggttcttaaatccctacaaattgtttatatctaaatgttgtaggccaataaacacatctttgaagagtattttataatgctaaaggaatttacaacagaagaacgattgacaggtcatattaaatatttctgggttattgttt

SEQ ID NO: 29254 - DNA, 466 bp, Glycine max
ctctatattgattccataaggggttactcttcttccttttgttaccaaaaaaaaaggccatgattttttcactgatggtgcaatgatggctggctgatgtgtgattgattgtgtttgcctcagttctgtgtgagagtttcagcaagtggctcagctgatgaggagaggactattataaggaaagagaaagttgggtggaagatcaattactcaggagagaaaccagcaacaccattattggacacagtcaaccacccaattcacatgaagaatctgtcaacacaggatcttgagcaacttgcagcagagctgagggcagatattgtacacagtgtgtcagaaactggtgggcatcttagctcaagcttgggagtggtggagttatcagtggctttgcatcatgttttcaacacccctgaagacaaaattatatgggatgttggccatcaggcataccctcacaaga

SEQ ID NO: 29255 - DNA, 367 bp, Glycine max
gctctgcttcatatctagtctgttactttctgcattcttagaaacatcttttccaatcttcttctcacactaatttgaattaccatgaccttctgtggtggtgcctttgttaagccaaactattctgtgtccccatgccacaaacacaaagctccaagtccataccaaggtggcagacaccagttctgtgtgagagtttcagcaagtggctcagctgatgaggagaggactattataaggaaagagaaagatgggtggaagatcaattactcaggagagaaaccagcaacaccattattggacacagtcaaccacccaattcacatgaagaatctgtcaacacaggatcttgagcaacttgcagcag

SEQ ID NO: 29256 - DNA, 359 bp, Glycine max
aagggttcaaatctcgaacccccatcgtgtccgtaatccttcttccaaatttccaacttccctctgcctcttctaatggtatcgtatctttcgatggaagggtttgtaagggtttaagctcaaccaaaccctaaaccctaaatttcccaatttcttctttcgatcttccactctctccctttccatctcataaatttcgaatccatacactctcacctcatgccctcagatccaatccgcacccttttatcactgaagtgagtggcgttgttgaggtgtggttcttggtggggttttgagatgatgaatgatagtgatttggggaatgtgcgctgttgggttttcaagtgatatgaagt

SEQ ID NO: 29257 - DNA, 266 bp, Glycine max
cggctcgagtgacgacaatgaagattatccacctccctggcaagtcatggtgctcttggttcttacttggcctactctctatcattgcttcccttgcttcagctgcagagaatcactaccatgagtttgttatccaaactgtgccagtgaagaggctgtgcagaacccaaaacatactcactgtaaatggccagtttcctggcccaacagtggaagcaagaaatggagattctcttgcaatcaaagtagtaaatgctggaccatac

SEQ ID NO: 29258 - DNA, 672 bp, Glycine max
tttaggggaacctctatccacaaacaggcaatatgatagagattcatttggtgaggatccagaaagtgaatcatcaaacgaagatcctagcggggcatctctagttactgagttgacttctcaaatggcaaggtcccagttcttgcaagaactaagcacaaagccacctggccttactcaagaggccttggactgtttgcatcaggaagtttttagcagcaatgccagtgagatagggttggattccagggtactgcaggactgcagtatatgtttggagtctttcacagacggagatgagctgatacgtttgccatgtggacataagtttcactctgtttgcttggatccttggattcgctgctgtggagactgtccatactgtcgaagatgtatagttgtaaatactcactcatcattaaacgaggacgagtaattgatttcttgattgactttgttttgttctgtggttgtatgacaggataagaatgctgtaatggagctggttttttgtaacgatgctgaatacttgtctcttaccttgatatcgtattttttttttatcttttcctggtgacaatgggaaagatgtgggtagctaaatttggtattgtaagacgtgttataaaataataacagtcacgtgaatagtaaatagtatttttaatattt

SEQ ID NO: 29259 - DNA, 262 bp, Glycine max
gctttgttagttttgctggaaatggaattaaacttaggcgtggttactctccatcaaattcaccaaaaccaacccaggatgaactaaggcagcagaaggaggaggatatggatgattactgttcgcaggtccctgttcgacacttggtatttatggttcatgggattggtcaaagattggaaaagtccaatttggttgatgctgtgggcaatttccggcatattacagcaagtcttgcagagcagcaccttactccacatca

SEQ ID NO: 29260 - DNA, 409 bp, Glycine max
tttctttaggaatatatcccttcgctgggggctggcttagtttgttctccccttcttcacatccaccatggcttccttactacagaaagctttcggctctgaaatctcttcgtttatataccgcctttttatctatcaaaatcataacaaaggcattcctaggaacttcaagatgccaaagaagggccgaccactttccttgcagaccgtagagctgaaagtaaggatgtgctgcactggctgcgagagagttgttaaaaacgccatttacaaactcaaaggcattgattcagtggaggtggacttagagatggaaagggtgagggttggtgggtatgttgacaggaacaaggtgcttaaggctgtgaggagggccgggaagagggcagaattctggccttaccctaat

SEQ ID NO: 29261 - DNA, 385 bp, Glycine max
ctcgagccgaaaatgttgatacatagaattttggacccaaatcctgaaactcgtataacaattgagcagataagaaatgatgaatggtttcagaggagttatgttcctgtcagtcttcttgagtatgaagatgtaaatcttgatgatgtaaatgctgcttttgacgatgctgaggaaccgagggctgatcaacaatgtgacaacgaggacatgggtcctctaatgcttaatgcatttgacttgataattttgtctcaaggcttaaatcttgcaacaatctttgatcgtgggcaggactctgtgaagtaccaaacccgttttatctctcaaaaaccagcaaaggtggttttatcaagtatggaagttgtggcacaatcaatgggat

SEQ ID NO: 29262 - DNA, 414 bp, Glycine max
aaaaaaaagaaaaagaaacgacgtcgtgattattcccggaattaatgttggcgctacaacggacacgatgatcaccactttactttgccaccaaaacccttctcattcctttcaaataaaaataacacactcacagtgttaatgcaatcgccattaacgccaatgccggatatcaccgtcgatttccgcgctccacctccctctccggtggcttccggccggagttccaccgtcaccaacgacgacgttttgacacagtttttagaggcctcgctccgcgtccccgatcttgtattgcccgacaagatcttccccaaacagatccacctcgaagcacctcccgaggttgatttcgtctccctctgctttcactgcgacgacgctctccgcgacatcgtttccgactcgctggcc

SEQ ID NO: 29263 - DNA, 282 bp, Glycine max
gcaaaatttcacaaagcacaagaaatcctcaccgccggcgcaaccatctgaaaccggcgtttgcaactggaagcaccggtgctgttaatttttaggttcagctcatcactagcataatttgtgaattataaggtttagaattgtggcatcatgggaagcgaggatgcgaaagatccgttcaaaggggtggattggaaggccgttggtggcgagatgcagcaaaatccgagtgctaaaccagcattgaagaaacgattaccatagacagttagggaaattcct

SEQ ID NO: 29264 - DNA, 301 bp, Glycine max
ctgcagcatccatggcttcttcattgggtcgaagaagaacccacgctcccaaatcttcctccaccctaaacgacgacgtttcctgcgaggactgcggcggcggccactctccttcgaagcttcttctctgcgacaaatgcgaccgtggctaccacctcttctgcctccgtcccattcttccctctgtccccaaaggctcttggttctgcccctcttgctccaatcacaaacctaagtgtttccctcttgtgcagaccaaaatcatcgacttctttcgaatccaacgctcgcccgaggcatt

SEQ ID NO: 29265 - DNA, 248 bp, Glycine max
ctcgagccgctcgagccgctcgagccgctctgagacacttaagagaacaaggtctgcaaaggctgcaggactccatgagactagtgagtgatgtgagggatgccaacaacaacaacaacaacaagaagttgcatgtggaattaggcgtgccagtgccgcagaacaaaacgagaaggctctcatcagaagatgctgagctccacaagttaacagacttagacttgttgcccgacgacgacgaattcgaa

SEQ ID NO: 29266 - DNA, 478 bp, Glycine max
ctatcactgcagggttctttttccatgcttctagaaaggacccccaggaaggttacagaacccttgtgagaaccagcctgtgtatatccatccaagttcagctctgttccagagacaaccagactgggtcatctaccatgagcttgtgatgacaactaaggaatatatgcgtgaggtcactgtcatagaccccaaatggcttgttgaattggctccaagatacttcaaagtggcagatcctacaaagatgagcaagcgaaagcgtcaagagcgaattgaaccactttatgacagataccatgagccaaattcatggcgtttgagtaaacgtcgtgcataatatgtaattcatctatgttctctttatgccccctcctccataatgttatatgttgcatttagttttaaatgcagtttttgtccttatatgaggatttaaatggaacgttagccatatttttattttcattactaggaa

SEQ ID NO: 29267 - DNA, 416 bp, Glycine max
gctgagtatgaaaaacttatcaaagcttatgagaaaaagcaggcaagctctgcagatgatgatgaatcagacaagtccaaatctgaagtgaatgatgaagatgatgccagtggagaggaggaccaccaagaggacgaggatgatgaggaggaagaggacgatgaagatgatgactgagattgatgtccaaaaccttggttatgatattttgtttatgagggaggctattatatattctgactgtgcatactaggctactttttatgtttgtgctggtagaaaagaatgtcttctttgttggtacgatatattgccaactacttgagcttccctcacttagctatcgtacctgaatcactttttgtgcattgtagccttaaatgggttgctttaagtaatataatttctttctgatc

SEQ ID NO: 29268 - DNA, 651 bp, Glycine max
attgttgtcttgtgttgtatgcattaaccaacaaaccaatgcgagttctgcagaacgccgggatccgcgtttttcgatcactccattccaccctatcttaaccctcaaaacctccctccttcttctaattacccacattagcaccttattattataaatgccgaattgccgttaaggtaattagttaatgtgtgtgattgtgtcgtaatttaggattctgttgcaactaacgaaacagttaaaccgaggattaaaaagcagaaggcgttggttggtgtgtggtattcggagaaattgaggttgatcggcgccaacaatgtctgctcgaagtgaacaccaatcggttcctctttcggtgctgctgaagcgcgagttggcgaatgagaaaattgagaagcccgaggttgttattttgcacggccaagctagtgagaataagaaaggagaggatttcacgctattgaagacggaatgccaaagggtgcttggagatggcggtttctacctattctgtttttgggctattcgatggacacaatggatctgctgccgctatttatgccaaggagaatcttctaaataatgttttaagtgcaattccttctgatcttaacagagatgagtgggtagcagcgttgcctagggctttgg

SEQ ID NO: 29269 - DNA, 415 bp, Glycine max
gagaagggaagagagtccatttataagacggaagtcagagaagcttcaaagttagagaaaatccgcaagaggaaggaggacagagtgagcaacttacccgatgaagtgcttcatcgcatactttccactttggacgcaaaatcagcggttcaaacgtgcgttttgagcaagcgatggaggcacgtttggacttccctaccagtcctcaacttcctcgactcttccttcgacgattttctccatttccagtgtttcgtggaccattttctgtctcgcagagatgcttacagcaacatctccgtactcaactttgcgtgcacagatcatgaacttgatgatgggcacacgcacatcgtagattccatcattgaccatgttaccctcacaccacccatgaccattcagggtctctaca

SEQ ID NO: 29270 - DNA, 273 bp, Glycine max
gggaaagggatggagaaggaaagatactccatctataagagtggagtgacgaaaagttggattgatgttaaaattagagaagctcgaaagttaggagtagcagcaaaggagaagaagaggagcagagtagtgaagaaggacagactcagcaacttacccgatgaagtgcttcatcgcatactttcctgctttggacgcaaaatcagctgttcaaacgtgcgttttgagcaagcgatggacgcacgtttggacttccctcccagtcctcaactt

SEQ ID NO: 29271 - DNA, 435 bp, Glycine max
caacaaatgacttcgatgaggctctacttataggcactggtggatttggaagtgtttacaagggtagctttgatggtggggcaacttctgtggccataaaacgtgccaatccaatgtcacaccaaggtgtttcagaattcgagacagagatcctttggctctcacagcttaggcatgccaacctagtctcacttttgggttactgcaatgaagatggggagatgatattggtctatgacttcatggacaatggaactctatatgaacatcttcatttgaggcagagagatcaaccccctttgtcttggattcaacgtcttgagatatgcattggagttgcaaggggtttacactacctacacactggcacaaagcacaggatcatccaccgtgacataaagacaaccaacatactcttagatcataattgggtgc

SEQ ID NO: 29272 - DNA, 372 bp, Glycine max
  unsure (1)..(372): unsure at all n locations
gtagctagctagggtgcagaaatttaaaaataaaaattcatcagaaaaatgggactggggatgtttaaggcattgttttgctgcagcaagccccatgaaattgacattgcagactcctgggactcatctcctgatcatacccccaaacaacattctaaaccaaagccaaagccaaatgctgcacctactcattccaataataaacaaaccaccacatctacacaaataggagcaattctagggaaaccatacgtgaacatacaccaaatgtacgagatgaagaaggaactgggaagcgggcagtctggtgtcacatatctgtgtgtggagaagacgacgaacgcgagagtatattataaaaccccntctctc

SEQ ID NO: 29273 - DNA, 362 bp, Glycine max
gtttgtgtgtgaagaaagagggtgaggtatttcagcgtattatgccgcaataaaggaaaaaaaaaaaaaaaacaaagaaatgaatgtttagcccatgtcttgggggttagagaaagtagcactaacgctggcatggggtgtgtgagttgtgtttttttgaaatgagaagaccactggttgttccaaaaacgagagtgcacgcctcttggttgttatggggcccaacctcacttcctctttttgtaaccttgtcgtgttcaatcctttgtgggtttgcctttttctctgatgtaaaaattatcacttctccttttgtgaaagagattgtgacaactttggctataaaggggggcccctcttcc

SEQ ID NO: 29274 - DNA, 343 bp, Glycine max
aaaaaaatctcaattagcaacacataaacctcaaagctgtatccactctctcaagcaattaacatggcaacaacattaatcccctcagatctcactgaatttgtgatgcttcaagggaatggagtaaagggcctctctgaaatgggcctaaagagcctcccaagtcaatacgtccaacctttggaagagagggtgatcaatgttgtgcctcaagagtccattcccatcattgacatgtccaattgggatgacccaaaagtacaagatgcaatttgtgatgcagctgagaagtggggcttcttccaaatcatcaaccatggggtgccccttgaagtattggaca

SEQ ID NO: 29275 - DNA, 478 bp, Glycine max
ggaataattctaaaggtttaacataactggaaaacatgtagtagcagttgactcaagtacaaaacccttcttgtctcggtcgttgaattacccttaatttctttgtgttccttccaatcacatggcatagaatttgaggttttccacagaagaagatctagctaggaagaagagacgaagcaaaagactagttagtgagtgaaaattcaagttggaaccatccaaaagtgagatatggaagcagagagaggtggtgcacccaattatgagcttcaagtttcgttcaccaacaccccacaagccttacacgaaatgggttttgttcaatatgaagaaaaccaggtccttggcttcttgtcaccctcttcacaatctcaatcttctcacctctctcaatccttaaatagtgatactggcgttgttgctgtcactgccacgacccccaccgcaaccatcggattcatgagtcatagcggac

SEQ ID NO: 29276 - DNA, 540 bp, Glycine max
gcacattctaacaagccctcttggtgtcttggttcttgatctttaaatattacctattggttattagctatttggttgttctttgatactaatcattaggcaatcaacaacacactttgtaattggcatcaaatggcaactgaagccgatgctcctgtcattcctcttctcactccctacaaaatgggtaacttcaatctgtcccatagagttgttttggccccgttgaccagaatgagatcttacaataacgttcctcagcctcatgctgtattgtattactctcagagaacttctccaggaggtcttttgataagtgaagccactggtgtctctgacactgctcaagggttggtgcacacacccggcatatggacaaaagagcaagttgaagcatggaaacccattgtgaatgcagttcatgccaaaggtggtgtattcttttgtcagatttggcatgttggaagggtctcaagtccagtttttcagccaaatgggcaagcaccaatatcttttactgacaagccactcaaacaaaat

SEQ ID NO: 29277 - DNA, 449 bp, Glycine max
ctctcccattcccaatcccaatcccaatcccaatccaaacatgttagggttttcagtgttcaaatttccccttcccatttcttcaattaacataactcatgcagcatgattccgccaccttcaactccaaatttctttacaaacgcactcaccaaccaaccgatcgcatttcttcccttcgccaaactctcgcctattcgcccttcctcggagacaagtgtaaaggcagaaaggttgtaaaatcttcaaaggatttctcaatcaaggggtggtgttgcaatgttagcttctaaagaaatgatgaaattcaaatcttaccagaaccgggctaatttgtttgtgaaggaatatttgttagcagaccctctgattccatatacttctattattggtggtatttttgcttgcaagatggtctatgatcttactcagctatttagcactgttca

SEQ ID NO: 29278 - DNA, 488 bp, Glycine max
ctattcctgataaagcaaggatgaactccatggcttcattgtcatcacatgtgttcttcaagcagattgttgtccaactactctccctggcagaagaaagagagacaattttgctagacaatgtagacatggatgaaatggacaaaaatggtgcactgttatttgtaggggaaatgttttctcgcatttgtcgccgtggctctgctgatctcctaactagtgaattaattccagaagtttttaggcttgtcaacagcctcttatcatcacgtaatgattcagttactaatgaattgcttgagtcaaaaccagccacggtattttggtcgagaataatggaatccatcagtgatccttataccgtggaaagaatctctgagctgattttgcataagttagctactcaagatgctgatgatgttcaagcgtattgggtgttgtggttgttattccatcgaatttgtaagcttcagccttctgtcaggtct

SEQ ID NO: 29279 - DNA, 436 bp, Glycine max
aaggggtccgtcacacaaaatatgaaagttactaatagccaacacggaaagaaatctcttgtcatgcgcataaagatagcatacaagataaatggcaaagagacacaagaagaaggacaaatcaataattttcctcgtgatttatgaggccagttggtcagtggtctatctggttatgcacaaagcctatatattttccgcactttataatcacttgttaaatattcatgatccattctttcacatgaggtctcagtatggttcatgcatttaaccgggtcactttttggaacaaagttgtctattcggtggcttcacatcttcactatagaatttttttccctcttagattgtttatgtaaccattagtacaaattatacctgtatgaaaatgtcgtaaccaattttttcttttcaaggcataaaatattgtatc

SEQ ID NO: 29280 - DNA, 292 bp, Glycine max
tactcgagccgattcggctcgaggtgacttagaaaagtaacagcaacgacggcaacagaagctggtcactgctgaattttgcagagctctttgtctcctctctcttttctctctctctctctctctgcctcacttgtggcctcatctcaggcacaaaaaacaaaagctttgaagctcagagggtaacacaacaaacacactaacactacaaagtttgagtctttgacacaaaaaattgagatagctcagagaaaaagaaaagagactatgggagaaggaagaagaggaggga

SEQ ID NO: 29281 - DNA, 421 bp, Glycine max
aacgtaaactgctagcaattgcaactaattccaaagtagctgcagatccctttgtagcgcaaatcaacaatggcttgcatgagatgactgaggatcctaccaaagaactatcaaggttgataagcgagggcaaatttgaggaagcatttacgggagcccttcatagaagtgacgtttcgatagtttcttggttatgttctcaggttgatttagcccgtattttggcaatggtgccactgccattaagccaaggagtacttctgtctcttctgcaacagttgtcctgtgacatcaatacagagacacccaaaaaattgacatggatgacagatgtggctgctgctataaacccggcagatccaaggattgcagcacatgtgcggcaaatattagatcaagtgtcccgaacactgggcctcgt

SEQ ID NO: 29282 - DNA, 258 bp, Glycine max
ctagtcaacaaaacatatatacaacatagttctcttcctagtcttttccttaaattacaacaacttttcaatactcagtctacttaatcatatagcaataataacagctatggataatactccaagattgattcaaacggtttcaagcttggttctgattctaagcatttcatcattggcctcggcatctctgaaagtgggtttctacagctcaacgtgtccctctgccgaggcaatagttaaaagcacggtagaaaa

SEQ ID NO: 29283 - DNA, 278 bp, Glycine max
ctagctccagttatactccactaacaccgggggtttcaattgggggaaacatttcgcacggagctgaaatggtacagacaaacaagtaccttgggcaatttggatttcctccgcagccttcttttggtgatcctatgtacatgcactatcatcagctaccttttgtggagggatatggtatttcttgtcattttgatccactggcacctagagcccgtggtgttagccaaattagtccttatgattcgcaaaaaaggcccagtactggtgcctatttg

SEQ ID NO: 29284 - DNA, 454 bp, Glycine max
gtgactatggaaaattactatgattctggctggcacatgggcaccagcaactgggctcaatgcagtgatcattcttcttcttcttcctttgcagtgcctacacaacaaatactccctcatcatgtcactgacgctgcctctcttcaatttggtgagtttcactcatggtcacttcccattgaaggggctgcagaagagagagcaataagtgcttccaagagtcacaggcaagctgagaaaaggcgcagagacaggatcaatgcacagcttgcaactcttagaaaacttattcccaagtctgataagatggacaaggcagctttactagggagtgtgatagaccaagtgaaagatctaaagcgaaaagccatggatgttagcagagccttcacagttccaactgaaatcgatgaagtatcaattcatcatgaccatgttcttcaagatgaaagct

SEQ ID NO: 29285 - DNA, 332 bp, Glycine max
  unsure (1)..(332): unsure at all n locations
ccacaccctatattccgcacacatcctntgattgtgaaggtagtgggtaaagtatacagctacaagtgctatgactgggagtatcccgaaaagtctcataacaagaaacacctcaaaggtgctgttgtggaggtcaaatgcaaagcaggaaggaatatcatcaaggcttatggtgaaactaagagcaacggaaagtatagcatcacggttaaggacttcaattatgtcaaatatggacctacagtgtgcaaggccaagctttatgctccacctaagggatcacccttcaacatacctaccaagttgaacgaaggaacagacttgaaggtgaa

SEQ ID NO: 29286 - DNA, 309 bp, Glycine max
ctgtttgataggattgtggcacaagataggtactcagagactgaagctgcaggtgtggttcgccagatagcttcaggattagaggctattcatagagctaacattgtccacagggacttgaagcctgagaattgcctcttcttggatgtgaggagggactctcctcttaagatcatggactttgggttgagttctgttgaggaattcactgacccagttgttggtttgtttggatccattgattacgtttcaccagaggctctttctcaagggaagataactaccaagagtgacatgtggtctctgggg

SEQ ID NO: 29287 - DNA, 713 bp, Glycine max
ctaagatgcaccacatttattgtcttttgtatttgcagaccgaggagccgctggggttgccaaataactgatgctggacttctcagaatatctttcgctaagtgtataagcaatctcacatccatatcactgtggggtttgactggcatcacagatgaaggtgttgttcaactgatatccagaactagatctttacaacgtctgaatgttggtggtacgtttatcacggatgaatctctgtttaccattgcaagaagttgtccaaagttggagaccattgttctttggagctgtcgtcatgtaacggagaatgggctttttgcgctagttgatcaatgtttgaagctcaaatcaatgaatgtgtggggaacaagagttcctgtggagtgcctcaataatttacttattgtaagtccagcccttcagataaaagtttgaaactggactgcctttatagaatggagttcaaggtgctccaataacagcggtattttcactgcttaattttttatgtatatgtcaaaatccacttcttataggaaatattctgtgacagtgtatatatattgtacttaatcaagttgctatttactgtaaaggatcaattcataaaacaagtcataatcaacgtttattgtactttattgattcatttagtgtatatatttgaaagtctccaaaaaaaaaaaaaaaaaacaaagcaaaaaaggacg

SEQ ID NO: 29288 - DNA, 249 bp, Glycine max
gtttctcgcaagttcgctcaggagcaagagttctttcgccaaaccgctctcatctccaaaaaagagaaggaaaaggtctgaatcgcatcctttctctctgcatctttcctctctcctaggccgtcgatgaatgaagaaaaaaagaaaccgaggcccaaggtagacagtccattgcatgattgacagcaggagttactcagtcatcatagcgagaaatcaaacaaaaagaagtagattcacagcaagagt

SEQ ID NO: 29289 - DNA, 211 bp, Glycine max
tctctttctctgtcagaagacctctgttgttgttgcgttgtccgtttttttcttcttctctccaaaccagagagcgaccgccggcgagcctcacctcgccggaaattcgctcttcttcgccggaacctccatttttcccgatttcagcttccaattgcgcttgctttttttctttccaccgtctccttcaagaggagcctttccgcgcaat

SEQ ID NO: 29290 - DNA, 565 bp, Glycine max
  unsure (1)..(565): unsure at all n locations
cgcatccatgctttttttaatcactgcaatcgngtctattacagtttgtaactacttccgtcaccttccctgtctattgttttatgataaattagcgtaaaggcgtctattacagctacatgcttatgaatggcgtggcgcgagcttggaaagaagagaatatatatgaattttactagagcgttgtcgacaacaccatttaggcatgcggcaggatcaaattttgcatccatctttactgtgcaatctgtttgtgcatcagcaagatgtgtgccggatttcaccaaccaatcatctcagggagtggctggttttggcagggagactaaagaatgtgaaatacggtgcttccatgctagttcgcaagtctgggcaagaagtgatggaccattaggtttgcagaccccaaagagggtatatgtgaaaaggggtggtagaaaccagctacctgttggagctccttatgcctgtcgtaatgttccagctaccaaatctaatcctgataaaacaatagaaatatttgaaggcatgacccttgttgaactggcaaagcgcaccggaagat

SEQ ID NO: 29291 - DNA, 445 bp, Glycine max
ctcgagccgaatcggctcgaggaaagaagaagaagcatgttagggtaccaccttcagttcctttcatatgggaagtaaagccaggcattcctaagaaagattggaagccagagccagagccagaggtccctataaccccactcaaactaattgcctcagtcccctttgtttgggaagaaaagccaggaaaaccccttcccaatttctcagtggaccaccctgtgcctccaaagccattacttattcatgttgcatcatcttcagcattttcttttgcatgcaactttggccatgatcatgacaaagacaaaggaagcttaagcagcagtgacaatgaaagcataactaccttagaccttgaagcatttagctttgatgaagatgagtcttttgttagttcagttccctcattgcttgcaaattgtcttgtgccatcagctaaagt

SEQ ID NO: 29292 - DNA, 375 bp, Glycine max
aaatgtccgttcgtttactattacgatatcagaactgtgcgcgttgtggaattgcattggttttggggcacaaagcgtgaagagagagagatggagggttcagacgaaggagtagagagggttgtggattcgaaggacttgcagcaacagagcaaagctttcgacaagctcacagaccgcgtcgaggatcgccaactcgattcttcacgagtccaagaggccatggcatcaattgctgcatcttctgaagctgactggcaagccatcgtaagagggagaaagaattagctgctgttaagataaatgctgctgatgttgacataattgcaaatgaactagagctggataaaaaggtggctgaaaggaccttgcgtg

SEQ ID NO: 29293 - DNA, 476 bp, Glycine max
ataaaggaagtatgaatcattggtccgtgtcttagcctaaagagaaagtagcactcacaccatagcatggtgagtgaaccattttgaatgagaagggtgtggttggttattccagataagggtcccaaaaacgagtgcacgctgatatggggcccaaacttgcttcctctttttgtatcctagtcatgttagagagaaaatgaagaaatttttttcactggctgtgagagatcgaggtaacttggtgcggttggctcgggcacactcgttcacaagtttcctccgggatagttacagcagtgtagtgtaggacgcatgtgggaaacagatatttgtgttctgagttgtgccctacttactacttttatgggtttgtgttgtgtgtatcgttacccgtgtacgactatggactacttaaaggattggatgataccatctctttggttgatgttatttaaaaaaaaaaaaaaaaaaga

SEQ ID NO: 29294 - DNA, 281 bp, Glycine max
cacagagctgagtgaaagatgggacgcgaagatcgaagaagtggaagatgaagaagaatgcaaaatctgggggttttgaatcacttggtctgaatcccaatgtgttcaaaggaatcaagcgcaaagggtacaaagtgcccactccaattcagcggaagaccatgccccccatcctttctggctccgacgtcgttgccatggctcgcacgggctctggcaaaacggcagcgtttcttgtccccatgcttcaccgcctcaatcagcatatccctcagtctggt

SEQ ID NO: 29295 - DNA, 385 bp, Glycine max
atctttgtgaaaaattgatgtacaggttctggcatatcttctgatatcggcatcatcgtctgcagccacacgggttgacgattggatatcgaactgggggaaagacgagttcacagaaatggccactgcttctattggaatggccttcctcgctttcgttgcctttgctatcagctcactcatctctggttacaccctatgcaaccgaagctccatgtgaacctcaaacttcctagctcttacaacttgtctgtctatagagttttttctcttgtttcactttatctgtgacggaatcgattaaagaaactgttgatgcccctggcttttcactgtactaacggacttatgtatatatacagtttcagtatattattggtgttgc

SEQ ID NO: 29296 - DNA, 521 bp, Glycine max
gtgtagtcaatgaatgaccttgtgcactgggattatgactacgatcgagatagcatagaaagaaaggtgtttttgcaaagtcaacttcacataccccgtcaccaacttggatccgttgacatgtaccatggttgaaagagtgatgagaggatgtttattagtactaattgacaataactgcaaacatataaaaattgttcttatctggaatggaaaaatttgtggagtaaagaaaaagtatattaaccagctagtggcgttgagtactgctgaacatttcacctcattcattctgtgcttcactcactagaaatagcttctcatcattgttaatcgtgcctacataaacaattttgccacattgttctgacaaaatacaggaagcgtttggaatttccaaatgttttgtcgcctcctttataagctcttcaatgctttgtggaaccgttaggaccactccctcttttctatccgctttctgatcatcccatgggtggaaaggaaatactatacatctcttt

SEQ ID NO: 29297 - DNA, 382 bp, Glycine max
ggaactcaatgggtgtttgttggtttcattggtgggagtggaagctccaatccaatggcaatttttgtctgtgcctgtgatgcacagtgaaataatcaaccctattcatcaatctccagtgttgcactgccatcaatgtccaccaccatttcttcccttcccttctctctcccccttcgccaaaactctagggttacccttttcaatccaccctcttctcctaatccatcccaatcatcagtcacctttcctaaaacacaatggagacttttgtggtttaggcatggaaacacttcatcaaaaactgatggttctgagctcaatgaagataaattgtcagaagatttggtgaagctcgaaggtgtccagtccaaagacctga

SEQ ID NO: 29298 - DNA, 247 bp, Glycine max
gctaattctgattcaatgcaacagccctcacaaaatctaagcctgctgagtgttgatgacattttgggttcagtttcggagacaacacatcaagtaggacggatttctatttcaacaccgtttgacatgccttacaaggaaatggctctccattgtgaggccctcctcgtgggaaagcagcagaagatgtccactttcatgggtacccttccaatgcaaggatattcatttaggattcctgctcctg

SEQ ID NO: 29299 - DNA, 344 bp, Glycine max
gccaaagcataaagtaaaataaccgcagaatattctttgctctgttgcacagattatcccttccttccttccttcttatcatttctctcattaattttctcttctccaaaacaaccaccatttaatccctaaacctaatccttatactttaaacccttactcaccaaactgttcatagttttgtgatttttttttccactaaaaattgtgttatggagcttctgacggtggtggatgatttttttgtcacggcttccctggcgcttcttctcaccttcatcgtcttaaagctcgttgaggtcatcaacgacactcacgccataccaaaacgcacgtcgtccacc

SEQ ID NO: 29300 - DNA, 492 bp, Glycine max
cctaatcaaaccaaaacaaaagaaaacgaaaatccccaatcctgcgttgtgttgcgacttgcgagccatgagaggggtcgtgaaagcgtttgcggggaatctgttgttccatggaagaaagactcagactcagtgcattcgctcctacagtctgatcccaatggtgatagagcactcttcccgaggtgagagggcatacgacatcttctcgcgccttctgaaggagcgcattatctgcatcaacggacccatctccgacgacactgcccacgtcgtcgttgcgcagtcctcttcctcgaatccgaaaatccttccaaacccatcaacatgtacctcaattcccccggtggcgccgtcaccgcagggcttgctatttatgatacgatgcagtatatccggtctccagtcaatacaatctgtatgggtcaagccgcatccatgggttctctccttttggctgcaggtgccaaggcggagaggcggtctcttcct

SEQ ID NO: 29301 - DNA, 428 bp, Glycine max
cggacgcgtgggttcagtcgcagttcgcaaaacttgaagccatggatgaagattcggatcgtcctatcaggattatgaacttcgtctccgaagaccaattggtagaagctaaaaaaacaagaggtgaacgagttgaagacggcactgcccagagggatagacctctctacgagattctaaaggagaataaggataaaaaagatgcggaatttaatgaaaggttcaagcacagacctcctaaagctttagacgaagatgagactgagtttcttgatacttatgaaacaacaagaagggaatatgaacgacaagtggcagatgaggaagcccaacaaatccgaagctttcaagcagcggtggaagcacagtccaacatcgtgcatgaagtaaaggaaaaaactccattacctgtcgtccaggaacagaag

SEQ ID NO: 29302 - DNA, 491 bp, Glycine max
accagtccagactccgagtggagaccatctgggaagatcactggcacagatgagccgagttcacatcgtggagaggaacaggcaagccgtggctgactacaacagcttggtcaagaacttgctcatcgcggttgagtgcatcaccgagttggagaggctttccaccaaaggttatgacttgaaggacgtcccagccttggcagaagccatgcaagagatccctgttgctgtctactgggctatcgtcaccactgttgtctgtgctaatcactttgatttcctccttggtgaatcggactctagatacgaaatagccaattttgacgacaagcttgcagctgttatcagcaaattaaaggcgaatctcaccaggagcagaaagacaataggtgacctagaagactactggaggcgtaagaagttgctccaaacccccacagaaattgtagaggttctcaaggttctgatctaccacaacgaagttcacgacc

SEQ ID NO: 29303 - DNA, 473 bp, Glycine max
agctcagcctataaattttcatgctggtgaaattgaaattacctatgatttatgaatctccacttatgtgtatggtccattctatccttgtggagtggttaagtattccattaaactttgaaggaaattactgatcgttctgtgattgcggtttgtgataaatgatgtaagaagttgtggtccaggcaaattgattatccatctggctattgagttcttggtatatgttcttggattttttagtgccaatgctcattggggccactgagcacaccatgagctgtgaggcaggagggacatgtattattgatcaattagaccggaaaagtgaattttgaatcattaaattactattgctgtttatagattgactttggtaaagaattatcttcgtgactttagttttttcttttttaacctttcagcacgattctttaaaaggtgcaaagtggagcaacagagctgagatgact

SEQ ID NO: 29304 - DNA, 443 bp, Glycine max
  unsure (1)..(443): unsure at all n locations
caacaacatcagcagcgacaacaacatcaacagcagcagcaacatcaacagcagcagcaacaacatcaacagcaacagcaacatcaacaacaacaatgcgctgcaaatgatttgggtttcatgttgccaaagggagagccaaatgtggaggctattcctgaacatggtggccttaacctgtcaaatggctcatcagtgtaccaagaaatgatgagtcgcatgcctcttggacctcatatgtaaattttattccctgattctttacagacgccactacatgtttacatctgataacatacatatatagatttatacatatatgtaatgccaaggcatacataggcggacttttcattattagactcattgtaacgtttgacattcttcatcacatgtcaaaggtatatgttattttgctcanaaaaaaaaaagattctagccga

SEQ ID NO: 29305 - DNA, 275 bp, Glycine max
gtttctgtttttaagagcactgatttgtggtgtttttatttttattttatttttctgttatgctttagttctatatggagcactaacatgcttataattagtgtacttgctgttataaattccagtcttctatttttctgccttttcatattttctcagtttgcttttgctttgtctttctgtatatcaacacacactataaccatccttctaaggcgggaagaaggcgggaaaatgtcattagagaatgagtctgagatcacccatctcaagaa

SEQ ID NO: 29306 - DNA, 729 bp, Glycine max
ctctcgagccgattcggctcgagaagatatggagttggaaactgtcagtaatgttgaggaactagtagccagaaaatgaaacaacgttaaaaatgtcaaaagattgggagtggagaacagtaaagaatgttgaggaactgaagccagaaaaagaagctgagttgatagtttcaaaaagtatagaggaggtgaaattattaaaagctattgaagagatgaaattaaagctagatggacttgagtcaaaactaaatgagtctggagtaacaatatctaagttaacagaggagaggatgctcagcaaccaagagacaaaaatcttgcaagaaaaactagcagatcttattaataaaggtccaagaaaagttcaagtcggcttcccacttctatatgtctgtatggtggcacttatctgtgtcttcttgggatcccgtttacactcttgatacctggccaatcaatcgtctgcaggaagctactgacattttgaatttccccgaatttgttaatagcggaagtttaggcataaatcccctttaaatctatgaaggtaaaagtagggatcctgtatactggcgggtctgtaaaattcgatttaatctgtctagtccatattcatgtacgttcatggtttgtatatgcaaaaattacccaggtgcacaagtaccaataatgagatatatagcccaggtagatgaccttttgtggatagtaaaaaaaaaaagaaaa

SEQ ID NO: 29307 - DNA, 446 bp, Glycine max
aatttcccttctccgaagcattcgagggtttatcacactcttattctcaaactcttcgtcgatcagacgaaaactgaaaaccccaaacttattcattaatctccacaacatgacgagtgtgattctcagaagatcctcttccgtaatctcgcgccgcttcttcgccgctctcgcctccgtcgagccgcttcctcgcaggttccccgccgacaggcacggtgtatccggcaacggagcccggacctttcacgcgaatcccggaccgttgaatttccgagcttcgctggttcctcgagcggcgcagttcgccatcgagcgcgattactccaactacgaggaagttagcaacgcgaacagcgacgaaggactcgagatcgcgaagctcgggatcgctccggagatcgtggatgctctggccaggaaagggatcgcgaagctctttccca

SEQ ID NO: 29308 - DNA, 243 bp, Glycine max
gcagcgtgtctcttttctatacttggctaatgacatattgcaaaatagtaggcgaaagggcagtgagtttgtcaatgaattctggaaagttctcccagcagctctcaggcatgtctatgaaagtggtgatgaagatggaacgaaagcagtgaccagactagttgacatatgggaagagaggaaggtttttggttcacgaggtcaaggtcttaaggatgatgtaatgggcaagaatccccttcc

SEQ ID NO: 29309 - DNA, 479 bp, Glycine max
tttaaaaattcgcatttcatttggaatgtaccatgtttcacagtgaagctaatcatccccatggtgagaagaacatgctacgaggatagaatatgcggacaactgaaaccgattggatcccatgaaggcatccaacgtcatggccatgaataaaaccatgtgaaacttgtaccataatttttttaatttgagttgaagtgctcacactcacgggtaccacacctcaacacatatctctctctaattatatatatagaagcattaacattctttgcagtttgcacactcatggacaaagaattctccactataccggttgccggccggagctccgacgatgtgagctttgctgatacagtttttgggttttgggatttatccaattcaagcaatgatcgcgacgacgacgatgatgacgacgatgatgaaaccatttgtactgcggaaaatggtaaagcattttgggaggaacaatatca

SEQ ID NO: 29310 - DNA, 1083 bp, Glycine max
gaaggttttgccaattccagcaggagatttaagctttgggtctggtgcacagctaaaaaattctgttggcaattggtctagatggcttactgacatgtttggcatggatgctgaagattgtctgcaagaagatcaggagaacagtgagaatgatgaaaagcaaggtggagacggtgaacctaaatcttttgttctccttaatgacttgagtgaccttctgatgctacctaaagacatgcttatagatagagatatcagacaggaggtgtgtccaaccatcaatctttcattgattatacgggttctctgtaacttcactccggatgagttctgtccagatcctgttccaggaactgtcttggaggccctgaatgcagagactattatagagcgaagattgtcagcagaatctgcaagaagctttccctatgtggctgagcccgttgtgtatatggctccctcttctgctaatgtggcagagaaagttgcagaggctgcaggaaagtctcacttggcaagaaatgtatcagctgttcagagtagaggatataccagtgatgaggagctagaggaacttgattcccctcttacatccatcattgataagcttccttcatctccaactgtcactgaaaatggaaaaggtaataatcataaagagcaaggtggcaaccccaccacaaatgctagataccaactcctacgtgaagtttggtccatgtaaaccttgtcagttccacatgtttacacctaccaagggaaaaatgaatactacgttagagatttggctgcaaagaattgtgaattgaaagaaaattaaaaagaaatggaatagaaagattttagatattgagagaatcttcaccaatagcagagcttaagcttgcagatttatttttttgtatataaaaataagtcattatagtgtagcattaaaaaatttgttatgttcaatgtttacatctttgtgtctgctttataattagaatgcaagatatatttgtaatagaaattttagtatttatttgttgttaattgtatacaaattctttatagtttacaaagcttacgtatttgaatgtt

SEQ ID NO: 29311 - DNA, 273 bp, Glycine max
aaagaagagggatgatatgttgagattcaaacagatggacccttccataagtgggcgtggtgctgaacctgtatatcgtgataaagtaaaaggagtacgcatttcgaaggaggaatacttgaaatcaaaacagaaagtagaagaaaaacccaaggagatagaaatagaatggggcaagggcttagctcaaaagcgtgaagctgagactaggctaaaggaactagaacttgagaaggagaagccttttgcacggaccagagatgatcctgaact

SEQ ID NO: 29312 - DNA, 305 bp, Glycine max
tgtgttcctctttctctctcttccgcgcaccctgcgctctgtgacactttgctttctcgatccgaacctaacaaaacaacaagacttccacgagccttgagttccgctccgttgttttcaattttccagcgccatcttctgtttcattgcgactgcgatcaacatttctattttcctcgttaatctcaccctcacgggttgccgcatcttcctcgtcgtccaatcgtcagggttgttgggttgagggtttttctctggttcttccggtccggtgtcatgccaacctatgtgtggtggtgatagta

SEQ ID NO: 29313 - DNA, 291 bp, Glycine max
aaacaacaaaccctccacccctttagtcaagtcttctcaaccaattccatttttttcctccatacgttttcccaatcaatacccactcctcctatctacaaaatcgcatgcactttcccatcctcattctccacacaaaaattcttgtctcaaacacatatttctatctttttccactttcgttaaaacattctccgctatgatcactaaacaaaaacaagaacaacttctcttgttctaagactttagttttggggaaaatagcatttttcattattccaacaacgaatg

SEQ ID NO: 29314 - DNA, 479 bp, Glycine max
ggtcacaatcaggggaagaaattagctctggcatggttggaatgtacatgtcctcttcttcacaccctataacagctccttcaccgctctctggccttccagaattctctcacttgggttggggtcactggtttacactgagggatcttgaacttgctacgaaccgtttttcaaaagaaaatgtaattggtgagggtgggtatggagttgtttaccggggacagttgatcaacgggactccagtggcagttaaaaagatactcaataacattggtcaagctgagaaagaatttagagtggaagttgaagctattggtcatgtccgacataaaaacttggttcgacttttggggtactgcattgaggggactcacaggatgctagtctacgagtatgtcaataatggaaacttagagcaatggcttcatggagcaatgcgacatcatggatatcttacctgggaagcacgtattaaaatt

SEQ ID NO: 29315 - DNA, 649 bp, Glycine max
agcaaatccacattcctctccatgtccggagagccaccacggccgttggagatccacctgagggtcaactccaagagaggcggcaccaccatggtgcaccccgtggccacggcggttccggttcagtaccccagagaggaggagggagtgaagcattacagaaaatggtttgcttggctgatacctctctttgtggttgccaacgtcgctatgtttgcgatcactatgtatgtcaataactgcccgcgtaactctgtctcctgcattgcctccttcttgggtcgcttctccttccagcccttcaaagaaaaccccctcttgggcccttcttcgttgacgctgcaaaagatgggggctcttgatgtgagcagagtggttcacaaacaccaagggtggcgcctcgtcacctgtatgtggctacatgctggggttttccatctgttggcaaatatgctgggtattctagtcattggaattcggcttgcgcaagaatttgggtttgtgcttattgactgctatttgtcatatctggatttggggggagtttgctttctgctctgtttatccagtcaaacatttctgttggtgcttctggtgcactttttggcttgctgggaggcatgctttcagaactcattactaactggtc

SEQ ID NO: 29316 - DNA, 264 bp, Glycine max
ccacattaccctctctccctcccttcatgtccggagagccacggccgttggagatccacctgagggtcaactccaagagaggcaccaccatggtgcaccccgtggcggcggcggagacggtggaggttccgattcagtaccccagagaggaagaagtgaagcattacagaaagtggttctcttggctgatacctctctttgtggttgccaacattgttatgtttgtgatcactatgtatgtcaataactgcccgcgtaactctg

SEQ ID NO: 29317 - DNA, 544 bp, Glycine max
tctcgagccgaatcggctcgaggttctagatcgcgatctagaactatgtcgtgtcctttagattgtgaaagaaacaactacacatcaatggccacttcactaaccctattcaaaacaacctttgttttcttcatcatcttcactctcctcacacaccaagccacggctgattgtgaagccgaatccaaaaacagttgcaacaacaaagagaaagccctacctctaaaaatcatagccatatttaccatcttagcctcaagcataattggcataaccctacccttagtgacacgttcagtccctgccctaagcccggaaaacgacctcttcataatcgtgaagtgcttcgccgccggaatcatcctcggcacggggttcatgcatgtgctcccggattccttcgccatgctctggtcggattgcttgaaggagaagccgtggcacgagtttcccttttcgggcctggtcgcaatgttctccgccataatcacgatgatggttgattccattggccacaagtgtttacaccaagaggtgtaggact

SEQ ID NO: 29318 - DNA, 373 bp, Glycine max
catgcttccaaccttgactgaacttcgacgcgctttggacatgcaatcagcacttgaatccctcgtagaagaagggaattactggaaggcatttcaagtcctatctgagtatttgcaactctcggatcgttcgtcagagctttcagcaatacaagaaatgagtcgtggcgtaggaggtctggctgggaagaactttacagaagctggatgctctcttattgggagtatgccaagaatctcaaggaagacggctatataacagtaatagatgcatatgcattaataggggatactgccggtcttgctgaaaagatacagatgcttcttcatgcaagacgttatatcagaaacacactctgtcttaaaggctatt

SEQ ID NO: 29319 - DNA, 513 bp, Glycine max
gaccgacagttggattgtagtggaaaagatgaaatgagagaattattatgtgtctataataatagttattgaaagttgtgaggaaggaggaggatggtgtccccgatgtcaacggttctggtgacgggaggggcaggcttcatcggatcccacacggtgcttcagcttctgaagcagggcttcagggtttccatcatcgacaaccttgacaattccctcatcgaagccgttcacagggttcgccgcctggtcggtcctcatctttccaacaacctcaccttcttccacggagatctccgcaatgttcaggatttggaggcagtgttctcgaaaagcaagtttgatgcggtgatccactttgctgggctgaaaggtgtcggcgaaagcgttgcaaagccccggcgttattacgacaacaatctagtggggactataaacctttttgaagcaatggctaaatacaagtgtaaaaaaatggttatatcatcatcggcaactgtttatggggaagct

SEQ ID NO: 29320 - DNA, 351 bp, Glycine max
caagtattaaagacttgcagattttcaggtttcttaaaaatggaggtctgttgttggcaagagtaatagctgtgacattctgccagaccttggcagcctcattggcagcaaggtttggtccaattcctatggctgcattccaaacctgcttgcaagtgtggctcacatcttcccttcttgctgatggtttggctgttgctgtacaggcaattctagcttgttcctttgctgagaaagattatgaaaaggtgcttgttgcgccaacacgaacactgcagatgagttttgttttaggagttggactctcttttgcagttggagttggattgtattttggcgctggaatctttt

SEQ ID NO: 29321 - DNA, 305 bp, Glycine max
gtgcggttgcacgtacagagagagagagagatcgggggagtgtacgagaaaaagaaaacaaacggcgtagcttcgcctaagagaagtggcggtgaagttgagactcagagcgcgcgatccaaaactcgagaaatcgaaacactctatgatcatcatctcttagtatatatatatacttccacactcgagacaaagtttaagaagaagaagaagcagcaataagcactactcataggtattattattcttatcattgccgttttatcatcatgagcaccgactaggagaaaccatcttcaccttct

SEQ ID NO: 29322 - DNA, 678 bp, Glycine max
gctgatcatgcccatgttgctttccttgttgttggggatccttttggggctaccactcacactgacctggttgttcgagcaaagaagatggcaattgaagtcaaagtagtacacaatgcatctgtgatgaatgctattggagtttgtggtctacagctttaccgttatggggagaccgtttctataccattctttacagagacgtggagacctgatagcttctatgaaaagattcaaagaaaccgaatgatgggactgcatacactttgcttgttagatattcgtgtgaaggagcccacactagaatctttgtgcaggggaagaaaagcctatgaaccacccaggtatatgacaataaacacagccattgagcagctcttggagattgtgcaagcacatgaagaacctgcctacactgaggatactgagtgtgttgggcttgcacggcttggtaatgaagatcagatgatagtagctggaacaatgaagcagttgcagttgattgattttggagcacctttgcattgccttgttataacaggcccgacccatcccgtggaggaagaaatgctggatttttacagatgcaggacatagatacaacattaagacagcaagaccggtgtaatttagcaaaatagacttcatttttttttgttgtaggagcccttgtatttt

SEQ ID NO: 29323 - DNA, 269 bp, Glycine max
agccacttggtgatgacatttggaaagcaccaaggtccaaacccttcatgtttgacagaattgagtttttggggaggtttgtgtaattaaggagggtataccatgagtgccaggtgatttttgtatgtaatggttgtaccatatgttttttttttccttttgctttttatggttttgccccctctattctgtaatttaagtagcaaaggacaaactttgacatagtatctgaacttttacaggatatattgaatatgttgaacttaaca

SEQ ID NO: 29324 - DNA, 286 bp, Glycine max
tggtaaattaacatgggaaacatgccaaatgtggttgtgttgtgtttctgtctctggaccctgttgtttcctcttgtgttctgtgcacccaacgatgggttgcgtaggattggacttaaaaaggtgaagttggacaccgatgacgttgtggggtttaaggaatttcggtcttcaattagaaagcatcaccttcagaacatccttggaggcgctgaggacaccgatgttgttgcgctgaagaattacttggatgctcagtattacggtgaaatagccattggtaccc

SEQ ID NO: 29325 - DNA, 351 bp, Glycine max
ggtcggggtcggggaagaggtagaggaaggaattggggaaggggtggctatggctatcaaggtggttatgcaaattatcaaggatacgggtattaccaggggggttatgcaaattatcaagataatggtgggtattcaaaccggggacgaggtggtgggcgaggtagaggttgggggtatcgtggtactggttatgatggtggcaggggtggaggttcagggtatgaaggtggcagaggtggaggtggttatgaaggtggcagaggtggaggtggttatgaaggtggcagaaggagtggctatgaaggtggcagaggtggtggttatgaaagaggcagaggaggaaggggt

SEQ ID NO: 29326 - DNA, 557 bp, Glycine max
gaacatagggtgatgacctgttgttgtctaggcccaaagccacctattttcggaaccttgatgtgttgaactggtgaggaacaggtcgccgactatgtggcatcgaattcatcaaactcttactgatctattaggaacaatgatgatgagaggaggtacaagcgaatcaggaatggtaataacaacagtgctcaaaatattggaccggagaagaaggaagtgaaagggagtgttcttcatctccaaatccagaaacccattaagagaccaaagtcaccagagtcatcacgatcaccatcagcatccaattctccaccgaaatcttcgctggttttggtatcgacccggaagaggattgtcaccaatggtgccttggaagagagactgaggaggactaggtcagaagacatcacaagaagtggtgccaccaaacaggtcttcaggaataaggtgagaaggtacaagcttctggatgaagtttctagttaaaataatactaaaaaaatgataagaataaaaggtttagaatgaacaaagttatgtaaaaaatgatcaat

SEQ ID NO: 29327 - DNA, 826 bp, Glycine max
ggatcactttgcaaggaaggataaaatgcccatcaatcttaaatatatagatccaacttacatgattcgggcaattccaagcaatgcatcagaccatgtctactgtacacttcttgctcagagtgcagtccatggtgcaatggcagggtatactggatttacagttggactggtcaatggcagacacacttatattccattcattagaatcaatgagaggcagaacaaggttgtgattactgacagaatgtgggcaagactcctttcttcaaccaaccagcctagctttttgagccccaaagatttagaagaagccaagaaagcagaacaacctccgactcaattgttggaagggaacaattgcaatgatgttggtgatgccgagaaagaacaacctcccaaagatgaacaagaatcaggaaaccacacagacaatggtatcaagacacaaaattagatttagacttgttcatctacaactgtatttggggacatgttttatctttttgactcaagccctacaaccttcaaagcctggagtgttgggagctgttctttttgtccttttaatgttttgcaagttggtacgtctttctttataaagacctaccgtcttgcgtgattgttgttgtactcagaagattgttgaatgttaacctaggtcatattaagattggaacggaattatttgacgtgcttgaaggtactgtatctggttattgttgttctgtgttttggtagtgacttgagtttttatacgcagttttgctggaacgaggtataaataaacaattttctagtaactttttcttttccctttaagcac

SEQ ID NO: 29328 - DNA, 293 bp, Glycine max
gttaatttgttagtctcggttagagagggttgagagacacaaagaagaatcatggaggtgaacaaccaaatcgtggagaggagcaagagggttaaagggagagtggttttgatgaagaagggtgtgttggacttccacgccatctaagcccccgttctcgatcgagttcacgagttattaggcaagggtgtctctcttcagcttattagtgctactactcctgatccagcaaaggggttattgagagggaaggtggcaaacttggagaggtgggtttcgacgattacctcttt

SEQ ID NO: 29329 - DNA, 741 bp, Glycine max
aaaccaatgaaaaaataccatctgatgatgaagaaatatcagatcatcaaaggcttctagacagattgcagttatatgatctgattgaatgcaaggttcaaggagatggtaactgccagttccgttctttatcagatcaactctatcgttctccggaccaccacaaatttgtgcggcagcaaattgttcaacagctcaaatcttaccccgatctgtatgctggttatgttcccttggcgtatattgactatttgagaaatatgagcaaaagtggcgaatggggtgatcatgtcacattgcaggctgctgcagattggtatggcgtcaaaatttttgttattacgtcttttaaggatacatgttacatcgagattcttccacagatacagaagtctgaaagagtgatatttctgagcttttgggcagaggtgcattacaactcaatttatccagaaggagattcagaattgccctcatctcatacaaagaaaaagaagaaatggtggaattttgctggctaggttcagtgtcagtcattggatgcaaccaatcactcttcagtccatgattatgatcgatccatcggctgtgattattgagcttttaatgttttagtgttgttgctaacactaactctgcctccattatttcgtatatattattttctttttctgtatagtattcttttgtatatattatttatttatcctatttaaaacaaaaccgggtatgtaaaaaaaa

SEQ ID NO: 29330 - DNA, 265 bp, Glycine max
gcaatcctttcccatattaatgcaccttctactagtttacgccaattcttcctctatgagaaaatgtgaatgataagcctaatactgcaatgtcatttcaaccaccacagttactgtcatctccataactggccctgtgactttgatatttttatgaggagttgttgaactttgcctttttgtgaaccaagctagtaaattcccccatgtgaactaatttgatgtaaaaggtagaagttattattttccatttgaaggttttttt

SEQ ID NO: 29331 - DNA, 265 bp, Glycine max
gctgttcaagaaaatcaggtgggcagatatttctatctattgttacaaaaatgtcttatttaccatagtttattgacttgattcataataagtctgcaagaaataatatctatagatcttcatggaagtaagaaagggcaaactttattactagatctatgggtggagtacattgtgaatatggatgatacattgtctgtttggacttcttttcctacattgtatttgactgtttttgaattatcatcaattgcagttattattg

SEQ ID NO: 29332 - DNA, 542 bp, Glycine max
ccctcgcgttcgcggacgcgtgcgctaccattgatttccccgcacgttcctctccttttttgctactcttgttcttttggggtgaaaactagaaagaagcgtacggagagaaattttgttttaggaacaaaacgaaaccaatgggaggatgtgcaacgaagccgaaggtctccaaggacgatcccgatggaatgcccaaggcaccccaaccagaaccccaacctgaactccaacccaacaaggacacccttaaaaccaaagcacccgccgcccaagtggaacaagctgctgctgctcacaacaacaaccttaatgtcaacgaaattgttgacgacgaccaagccaacaaacgacgctctctcagcttcttgttcaaggaggttcgcgctcaaattccacaatctcaacacttttccttttctttttcaatcttttgttttgtttatttattcaagaaatgcgtctttagtttttataatttggtcaacgttgttaaggtctctaccgttaataaacatgattgatttttcacattttttttt

SEQ ID NO: 29333 - DNA, 357 bp, Glycine max
tgaatttctgacagagaactcctatcttcatatatatgggggttgtgtgaatggagggacattgttgcccgtgcagaggatgagagtacaggatatgtattgccaaataaatctgttcttgaaatcgctaagcagatgcctcttactacaagcaagctacggcgattggtgaagtcaaaacacccttatgttgaacacaatcttgatactgttgtcagcatcattaggcattctattcagaattcggctgcatttgaggaagctgctcaacagttgaaagaggcacaagctggcactgcatcggatgtagtaccctttacagatggaactgaagatccccaatcccatacacaagat

SEQ ID NO: 29334 - DNA, 549 bp, Glycine max
ctcgagccgcaaaatacttggcagtcgattcttgtgtggaacgaaacgaagcaagacataacagccccaacttggaattcaccatcatcttgctcttgatgattgtgtagtgggcagtgtgtgagggttctgaagggttgattgctcctgagaatggctgacatagcaggcctggctgaggctgcaggggcaagatttagttcactggagctcattggacagggatcatttggcgatgtgtacaaagggtttgacacggagctcaacaaagaagttgctatcaaagtgattgatttggaagaatcagaggatgaaattgaggacattcagaaggaaatttctgttctgtctcaatgtcgatctccatacattactgagtattatggttcctttcttaatcaaactaaactttggataataatggaatacatggcctggaggtctgttgctgatctactccaatcaggtcctccacttgatgaaatgtcaattgcttgcattctacgtgatttgcttcatgcaattgattacctacataatgaaggaaaa

SEQ ID NO: 29335 - DNA, 368 bp, Glycine max
acgagccgctccttattactggaaatgctgctttcttcttctcgcgctcatcttcactgactacttccgtctgtgcattttccattgttgaagaaggagaaaggtcttgaggtgtggggtcggtgatggacggtggagtgaactacaaccctcgcactgtggaagaggttttccgggacttcaagggtcgtagagccggcatgatcaaggctctcaccactgatgttgaagaatttttccagcagtgcgatcctgaaaaggataacctttgtctgtacgggttccctaatgagcaaatggaagttaatttacctgcggaagaagttcctccggagcttcctgagcctgcattgggcataaactttgct

SEQ ID NO: 29336 - DNA, 282 bp, Glycine max
gcgtgcgagagggatcagaacgagacagagttatctcaagttcgaatctttggaaaaatttctaacctcggacagatatttttcacttgcgtgaaccgtttgacaagccaaattacggtatctgagacatcacagagctatggttgccgttctacttctcaacccttttgggaatgaggggtttgcgaagcttgaggtctggaaactgggagttgtcaactctttggatgcattgaaactgcaggaaaaactggccttggatagaaaacttcataggagatg

SEQ ID NO: 29337 - DNA, 590 bp, Glycine max
gcgatctgtgagggctatgttaagcattccccagaagttttctatgctggttctttgtggatggtcagtgtacaagcttttaatgatgaagacccccaagggcggcgaacccttgggttgtttcttcaccgtcggaaggcagagataactgatatacatagaaaggtgcatatgtatgttgactcgcgtgaaaaggtgactgcacgctaccagttgactgttccatcgaagagggaaatgacggtgtttggaagctttaaacaaacaggcactcttctacctaaagctcctaagggatggggatggcgaactgccctgttatttgatgagcttgctgatcttcttcaaaacggtgccctaagggtcattgctgtagtgcagcttgtttaaattaaacggttaaaccattaagttttgcacactatggctgaacatgctgatgatttgtggaaggaaaattattagtcagttttttcttttgtaaaacaaaaactttcttttgtccagtcttgggggctggacgatggtgaaagcctcattacatatacatgataaaaattgagaattatgaaaatgcataatattgtatg

SEQ ID NO: 29338 - DNA, 548 bp, Glycine max
aataaataaatataagtttgattcctcattatcaatgttagggtctgcaatttcaagtctcccgcccgagtggagcgagttctcaagtttaccaatacttatgtggcatcaaggtcttattgctttcagggtcagagcgcttatcattgctcaagctgcaattttatgatgagtggtagaaagaagaaaatatgtcttgaagaccatagcatcatacagaagacaatgaattatatctggagaccgattgccaccaatgctagttcttgtgacgaaagcttgatgcaggatgcacttgttgagtccgaagatggatgcaaagctcaagaaactggctgtagcacatctagcactatttcaaatgaacatctcacaaagatagctgctgaagctatgagtgaaattgctgaatcagatactagtccaagccagttgctggataatgttgaaaacagagtgctagaaggagattcatctgtctcaccgaaaagcattcaatttccgtgctggttggtgcttctctatttcgttttattaaaggaaaaggg

SEQ ID NO: 29339 - DNA, 248 bp, Glycine max
ctgcggcgcagtcatcttcattcattcgttgggaatgatagcttgcaggtctctcatcggagtggagccagttctcaagtttaccaatacttatgtggcatcaaggtcttattgctttcagggtcagagcgcttatcattgcttaagctgcaattttatgatgagtggtagaaagacgaaactatgtcttgaagaccatagcatcaatcagaagaaactgacttatatctggagaccaattgccacca

SEQ ID NO: 29340 - DNA, 302 bp, Glycine max
gagaccagaagtaaaaattaaagggaaaaatatttctgatattcaaatcaagcaggttgaatttggatgcagtgagacaaactattgcaatcactgcaaaacacccattttggatctccatagaagctgtcctagttgttcatatagcctatgctcaagttgttgtcaggtattaagtcaaggacaagcttctggagcaatgaactcatccgtgttcaagcgacctgataaaatgaaaccttgcagtgctagtgagaaccatactttggaggagagagccacatctattggcgatttaactg

SEQ ID NO: 29341 - DNA, 296 bp, Glycine max
cagcaatggacgacgtcaaaggtaaggtgaagggcttcatgaagaaagtcaacaaccctttctcctcttcctcatccggcaaattcaagggccaaggtagagtcctcggttcttcttcttcttcttctcccactaattccaatctcacccctcgcccccaccctaattcgcagaaaccctcctcttcagccacaccctatcccaaaccctcaccccagaaaacggacccatatagaaccaccgagatgcctcgcaaagatgatggctttgacccctttgattctttggtcactaat

SEQ ID NO: 29342 - DNA, 300 bp, Glycine max
caaaaccctaagggttcttccaatcgccgccggattttaacccttacattgtcactctctcattccatcttgttgcacgaaccctcacctcaatttcacccttattactgatttcttttcactaattatgccgtgcttaaatttgttttcccaacctgactgattcttcagttagttttcgtttcagctctgcgaatgacctgggtataattttcatggccataatttattgtgactattattgttttgattttaagtttcgttcgcagcagttatgagtgagcacgcctgaagttgtga

SEQ ID NO: 29343 - DNA, 498 bp, Glycine max
caatcccttcaacacttcttccctctcgctggaaacctcctctgtccaccaccaccccacaaacccttcattcgctgcaccggtgatgactttgtcaccttaaccatcattgagtccgaagcagatttcaaaaatctctcatccaaccgccccaaaagcctcaaagatttggatcacttggttcccaagttaacatgctcaaacacacaccatgacacgttcattttcccattggtagcattgcaagccacggttttccccaaccatggcctttgcatcgcgatcacgtattgccacgtgatggatgatagttgttgcagccatttcatgaagtcttggtcctccatttgtcgaagtggtggagttactttactcttgtggagaagtcaacaccttgcttcgatagggaagtgttgaaggaccccaaaggactcgaagctatcttcttaagagattactttgaagagaggtcaacttggaaggttggtaaaacttctg

SEQ ID NO: 29344 - DNA, 473 bp, Glycine max
cccgagcacagaatagcatagccacgccaaacactcgcttcgttctgccaccctttttctcgtgcttccaaattcttccctttcgttgcatcttccttcattaataatcagggtctctcccaaaaatacaaagtataccaagcatcgccctaaaaagctacaacctttactcttttcttcaaagaaagccacatttttttttaattttaattttctgggtcagtgagaaaatggctgattgggcaacggttttgatcggggtagttctgttcgtgctgctccaaccggggctgcttttctcctttcctgggaacgggaagcagcttgagttcggtagcatgaagaccaacggcaaagccattttcatccacacgctcatcttcttcgcgctctactccgtcctcatcctcgccgttaaaatccatatctacaccggctgatccggttcccgggatctgaggtatcatttcgtt

SEQ ID NO: 29345 - DNA, 485 bp, Glycine max
ttctggtttaacgggaggaggaaccagaagcaacattctccaaaaccaacttccaagatgtatggcagcccgatgtatgatgacagagaggtaaacctaggtgctcatgaggaccgccgcgtgctgtcatttgatgctgcggtcctgatgtcacaggaactagaccgggtcaaagaggtacctgaagaagagcatgtcgaggaagttgatcattattcaagaaatggtaatgggtcagatcatctgcatgtcgatgagatcgtggaagaacctggaaccagtgaagctgtcaataatggatcttggctcaattcaacttctcttgcccggcatcaaagcttggagaatggctctacctctgaaatatgtcctgatgtcaaagagagtgccataagaagggaaactgaaggtgaattcaggttgttgggtaggagagaaggcaaccgttacggtggtggtaggttttttggtttggaagaaaatga

SEQ ID NO: 29346 - DNA, 441 bp, Glycine max
agcgtttccttgcgcggagcttcattcagctcaagagagatggcgaacgaagagttgggtagttggactgatctgctacattcttccaccaagcttctcgaacaagctgctccttctgctcagttccctccacttcagaggaacttagatcaactggaagcattatccaagaagcttaaatccaagacagtaaggactgaagcaccttctcaatctattgctgcaacaaggctccttgctcgtgaggggataaatgcagagcagcttgcaagggatctgaagtcatttgaactgaagacaacttttgaggatgtttttcctgttgaggcaacaagcgttgaagagtatctgcagcaggttcatgaaatggcgatggtctctgctgtccaagaagctcagaaggataatctcaggagtttcaatgattatatgatgaaagta

SEQ ID NO: 29347 - DNA, 365 bp, Glycine max
tgcttccatgatcaacaccatagcttcccttaccttcatcattgcagtggcactcaggtttgaggttcttgatcttcgaaatcctcggggtatagcaaaagttattgggaccattatctccttagctggtgttttgatcatgacactgtacaaaggacccgttatgagaaatttatggcatccactaatccatattccagggaaaagtgctgctataaatgaagactggttaaagggttcaattcttacagtttcaagttgtgttacatggtctttatggtacattatgcaggcatccactttgaaaagataccctgcccaactctcactcaccacgtggatgagctttgttggagcagcacaat

SEQ ID NO: 29348 - DNA, 395 bp, Glycine max
gtttctctctcttagggttttctcctcccccattgacccagccgtccatcgcaaaggaagtcgcgcccaatttccatgggtaaaaatttctctcccaccattcacttcgtttgccttgtttgattttcgtgaaacgctgaaataatgaaagttgattctttttttattctcgcgtttgtgtttgttattatgtgtcaattttgtgtttttagtgtttcaaatgcttgtcttgatcgtctaggtctttgtggatctctatggagcagagttaaacgttgttgtaattttgatcatctgtcttgaaaaaaaaattatagtattaattgtaaaaatttctgggtgttagttttgttgggaatgaatgattatgattacattctatgcatgcatgagag

SEQ ID NO: 29349 - DNA, 324 bp, Glycine max
ctcgagccgcagaaaatgaaaggcttaaagtggagatatcatgcctctctcagcaagtagaacaaaaagaaatgttaagaaatgacttggagcttatgaagaaatcacttgaggaatccgaggctcggttacaaactcaaacagtggaaagaaatgagctggtgagtgaaattgctttgttgaagaaggaagcagaaaggtcacttgatgagctaaataggatgaagaatctcaaggatgaaaaagagatggcaggtagagtgttgcagtcagagttagaagcacttagagctcaatacaatgacttgaaaagttctcttattg

SEQ ID NO: 29350 - DNA, 193 bp, Glycine max
gagattgttagtaagatcctctgtgcaacgcttattcaaacgcctcagacgacgagaagaacaatcaaaacgacagccagtatctctaacccaccaaaatcaccaaaacgacaccttcctttaccttctcttccttcattcgaccaccaaacgcaagctctcatgcccgaagatacatttccacacaacatac

SEQ ID NO: 29351 - DNA, 289 bp, Glycine max
cctgcatgagatttagggattgaactttcggaagaacgttaaggtttctacttcttgtgtagctacttgtggttgcccaaagtcagaaagaagctagagaacatggctatcagccacagtactttggcatttgccttcggcatgctaggtaacgtcatttcgttcttggtattcttggctccaataacaacattttaccgaatattcaagaagaaatcgactgagggctttcagtcactgccttacctggtggcattgttcagttccatgctttggttgtactatgctt

SEQ ID NO: 29352 - DNA, 523 bp, Glycine max
ctgactgccctggttctttttgttcctttgcatctgtatgcttctgattgtaagcagtattgaacagctaattctcatggttcggcgaaactgaatcgagtttctttctcttctcttcctgcaaattcaaaacccaatctcaatcttttcctttcgttccatttccttcatttgaaattgaccacacccacgcagatcccaaatttccaactcgtaaattatccgccttttttcccattccgaggaaagaagccaatccacgaccgatccaatgccgctttgaatcgcgtgccgtcctccttccctgggaacatctttttgctttttgaattcgatatttggagcagttgggtcgatgagtaacatgtcacactgtttctgaaacacaaaaagacccttttctttaattccctttggaactgctccgtgttttaagagtgtaagagagaaggagagtgtagtgaatggggacgggttccaaaatggaaggaccgtctaccccagcaattcgacgtgacccata

SEQ ID NO: 29353 - DNA, 564 bp, Glycine max
ctcgagccgctccatcttcatttgattttcaattttcttcatttggatgatgatgagtgggctggggaactctagagtgttaattttctctttgcttgttcttgcaacctttcagcaagtggtgtccgatgagcaccaacccctctcaaaagttgccattcataaaacaacacttgctcttgatgaacgtgcttatatcaaagccactcctagtgtccttggcttgaagggacaaaatacagaatgggttacactgcaatatagtaatccaaaacccacaatagatgattggattggagtgttttctcctgcaaacttcaatgcttctacctgccctgcagaaaacatatgggtcaatcccccatttctgtgttctgcgcctatcaagtatcaatatgccaatttctccagtcatggttacaagaacacaggaaaaggttccctgaagcttcagttgattaatctgagatctgacttttcatttgcacttttcacgggtggcttaactaatccaaagctcgttgcagtgtcaaataaagtatcattcatcaatccaaatgcacc

SEQ ID NO: 29354 - DNA, 291 bp, Glycine max
cgcttgatacaaccaaaaaacactccatctcctgtttctccaacaccaccagcagcttcttcaggtaacagtaatactggagctattgctggaggagttgctgctggtgctgctctgttgtttgcagcccctgcaattgcacttgcttattggcgaagaaggaaacctcaggatcatttctttgatgttcctgctgaggaggatcctgaagttcaccttggtcagcttaaaaggttttctttgcgtgagtgcaagttgcaacagataactttagtaacaaacacattctgg

SEQ ID NO: 29355 - DNA, 294 bp, Glycine max
ggcacaaaaagttgttctctacatctaacttctggttagttggtacgaagcgagggcgctatcacatcctaaatcgttcaagtcccagaaacaccagctccataacccagtttcttcttggtgtctagggaaaaaggtaaaattttgaggctcagtaaggagcattcgacatgttcaggtcatctcagcagaggaattcgagatgcagagacttcaaggtgaaacatgctcttcaaatatgtgttcttcttggcgtttgtatctggatggcttatctagttcagcattctcgtg

SEQ ID NO: 29356 - DNA, 402 bp, Glycine max
gtctttcattcccaacctaactttcttccctctctctctctcacatctataagcaaccaatccaatcccatctctctctcgcaaaccacgacgacgacgacgatgttgggtgtcctccgcagcaaggctgggttcctccgccgcctcacctccctctccgtccccctccggcaccggtcgagcaaggcggcggcggcgggtggacatgtggtggaggttgacatggcggagtacgacgtggcgctgaagcacttcgacgacctaatccagcgcatcctcgtcaagaagaacacaccggactggctccccttcgtgcccgggtcctccttctgggtcccaccgcgcctctctccctccaacgtcgccgacctcgtccacaagctctcctacgaggaccaccgc

SEQ ID NO: 29357 - DNA, 281 bp, Glycine max
tacaggaccaattcccggttgcacttctcagggttacactctgcatgttgaaagtggcaagacctatcttctacgcataataaacgacagctttgaacgatgaactgttcttcaaaattgcggggcacaagttaacagtggttgaagcagatgcatcttacgttaagccttttgaaacagacacaattttcatgagcccaggccaaaccaccaatgtcctattaaccgctaaccaagttgttggcaaatacctaatagcagttactcctttcatggacgcc

SEQ ID NO: 29358 - DNA, 487 bp, Glycine max
accgtcttaccctctaaacccaccccaaatgacaaactcttctccttgatcgaacaaattaagcttcgcactcacgcgccactcctctacgtgtacaagccacaccccgatcacgatgcatcaacctttgttaacaccttgaggcactctcttagccaagctttgaccatctattaccctcttgcgggtaggttgagttcgatcgaaggtggaaaatgggagcttcattgcaatgccaagggagcacaactcttggaagccaattgcaaagatttaaacttggatgatttgggtgattttgtgcctacccatttggtgtcacaactcatacccaacattgactacaatgtcctagttgaggacatacctttgttggttgtgcaactaacgaggttcccttgtggcggtgttaccattggggtggccttgtgtcgttgcacaatcgacggaaccgcgtccatgcggttcatgaccacgtgggccaagt

SEQ ID NO: 29359 - DNA, 601 bp, Glycine max
attcggatttcggctcgatattcatcttatctcattagttaaagcagctcataagtgcagtcaaatccaatcttgttcacgttacacgttttccatctctcatcttcctttttctcttcctttcttttagttctgttattgcaattttgcctggcctataatgcaaagttaaccaacatttgattccattctttctgtttccttcttcaaatatctttgtatcttgttttgcaagtaaaacaagaacaaccttatttgtatatattttagaaacttcattatttgacagtatattcacccatagttgaatttcaatggggaaaggaggtggttgctttccaagcaagacaaaggcaccaatttctggagcacaaaaggatccagttagcgttgaaagtctaatcccaacagatgatccaagtagcacaagccaagaggtggaagcaccagcaccagcacctgcagcagtgaaaaagctgaaagttttcattgtgttctactcaacttatggccatgtggagtcattggcaaggtccttgaagaaaggggttgattcaattgaaggagttgaaggggtgttgtaccgtgtgctggagacact

SEQ ID NO: 29360 - DNA, 475 bp, Glycine max
tcattgcatttaagtaacacccccccgctcaataatgaagtttcacccggaaagtgtttcaaatgtactggatgtataatggcatcaaaagctgttcttctctttcgaacattctatgagcaaggaaatcccaatgctccaaagccacacaggcctttagcacgtcaggcatgaagtttaatttgtatatcactagttgctgatgtggttatccgtcatggcctgaggatctgtgctaccgtagcattgtgggcgggttgatgctgttattgaatgccataccgggctttttaattcgaaaaatcaacttcatgtattgattattcatgtatgatttgaaagatgaatcaaaggttgccgtttgaaatgaatcttactggattaagttcatgctaattgccaaacggaatttaagcttctcaattttgttaaatatttgtattctgaaggtgcagtgagtttccattttttgtat

SEQ ID NO: 29361 - DNA, 697 bp, Glycine max
ccaccccattcatctccatggctttaatttctttgtagttggtaggggacaggggaacttcaaccccacaaaggaccccaagaagtttaaccttgtggatcctgtggagagaaacacagttggtgttccatctgggggatggactgctatcagattcagagctgataatccaggtgtttggtttatgcattgccatttggaaattcatacaacatggggattgaagatggcatttgtggtggacaatggtaaaggaccaaatgaatctctactaccacctccaagtgatcttcccaagtgttgagaagaggactaatacacaatcttcgcttaaggaggaagagggggaaacacgtaaagaagatataatttccaaagggagtgtgtaccatcaaggctaataacaagattttcttggagcaaataaaaaggataagctgctaatagggaaaataagaccaattagcatgtcttcactttctctgttttttccctgtcattttttcattttttttgcattatttgtacttctcatctctctccttgaaagatagttttggcttcatgtaattatatatacagtgtgaatcaaaatttacaggattttcacaatgccttgctttacttacttgcatcagacgttctgctaacttgtttttatgtacaatagtactacaaagtctcagcactgattatg

SEQ ID NO: 29362 - DNA, 255 bp, Glycine max
aaagaagagaagtgagagtatatatatatataaaagtgctagctgaaggaagatgtctggagaagcagatcgaacgagcattgaggaagagatggacacaggaaaggcgactgcagagaagaacctgaagctcaaagaccgaaaggtatcatgggcaaagctacgccgcgtagattctctcaatttagaagctggaagagtttctacggttgctcacaacccctaccagatgggttggaggacgacgctgatctt

SEQ ID NO: 29363 - DNA, 245 bp, Glycine max
aagcatgccacagtgtcttgtcttaagaactgatcaacccaatcattagattttagcaaacgtgggcgatttcgattttgactagacaaaaaacagatagaaatttggtttgtttgtaccataaaattgtatgtactataaactgagggtttattaagtttatctctgttaaagttggtttgttgattcaacagcgatgtctctgtttggtgcttactctatctgtgaagttggcaaggatgcgg

SEQ ID NO: 29364 - DNA, 468 bp, Glycine max
cccacgcgtccgcccacgcgtccgctcctctctaaacctcttcattttttccctttaaatttctcattctctcttcctctttctctttctgcgtctctttctgaatatttgaattttttcgtttcaaatcctcagcattgaaaccaaaaatgatcttcaaatagcatcgccgaagactcaaatccaccccaatataaagggcaagcccttttttttgcgcttccggtgtagttttgatattttgattccatctaaaaaatacccatggtttttcttctacaatatgtggggaaatactcacccttttgaatcctgaaaccagacaatccattttttttaggctctcacaaaaaggggtgaaagaaagatcgaaacttgaacactgcaaccacgttgaagttgaaagtggctgaaaggggttatggagagttccgttgggggagagaggagtgaacgcgtggcactttc

SEQ ID NO: 29365 - DNA, 338 bp, Glycine max
ctcctcctctctaaacctcttcattttttccctttaaatttctcattctctcttcctctttctctttctgcgtctctttctgaatatttgaattttttcgtttcaaatcctcagcattgaaaccaaaaatgatcttcaaatagcatcgccgaagactcaaatccaccccaatataaaggacaatccattttttttaggctctcacaaaaaggggtgaaagaaagatcgaaacttgaacactgaaaccacgttgaagttgaaagtggctgaaaggggttctggagagttccgtgggggagagaggagtgaacgcgtggcactttcagaggtggtggcag

SEQ ID NO: 29366 - DNA, 226 bp, Glycine max
ctcgctttctcttctctctcgggttctctctcgggttctctctctctctctctctcgcacaccgaaaccgaaagcgataatatatagagagagagagagtaagaggactgcactgcacacgaggtagagagaaggaactaactcaccgaacagtgaaaccaagacattctgaatttgagcttcggttagtaattcggagtgtgtgtctgtctgacttcgatggctt

SEQ ID NO: 29367 - DNA, 277 bp, Glycine max
gtccttgctgaccccatggccggtcgcgccagcattcattcgcttgttctcaatttgtccaatgtcggggaggcgaattcggatgggagtagccgcggctccagccaccagcgaagagatagagaggttgaaagcccggagttgaggaatgaggtcaaaatcagttgtgctaaggctcttatggaaactctccaaagggtgtctttcaagttgcaggaagattaccgagactaaaggtttgctttgtcttgctaagattattgagtccgagagtggg

SEQ ID NO: 29368 - DNA, 357 bp, Glycine max
caaaccttttttcctttcactctcatgaaatccaacaatgcttactcacatagtcacaaaccctacccatgacaccaccacattctcttgcttccccctcccttacaccatgcccaaatcgcgtgactgtcgcgtaaccgtggtcaacctcgtcacctccttagcccgccgttgcatctcatttatctacaatgacgctctaactctctgtacccctctaagaactgccaccctcggccgcggaagagctcgcacttctcccggctccaaaaacataccgcaatcaactgcgcgatgtggtagaggacgcattctgttatgctccatgcttcttgcgtggtaccctatgatccgatt

SEQ ID NO: 29369 - DNA, 275 bp, Glycine max
agaggcataactttctagacaaatatgaacttcaatcttgcattagtgattgtagtatccaccattttgcggaattgggcttcaaggatgcgatagcaaggttgtgcagttcatttttggagactcactctcggatgttggaaataacatgcatctctcaagaagccttgcccaggcaagcttgccttggtatggtatagacatgggtgacgggttacctaatggacggttcactaatggccgcacagtttctgacattataggtgacaatatgg

SEQ ID NO: 29370 - DNA, 421 bp, Glycine max
aaagaatcttccttttgtttctttgtagtgttagtatgaatagactgttttccaagatagtttgtctgtccagaatctacgactgtcttggaaaacagtctattcatactaacactacaaagaaacaaaaggaagattcttttgtcaagtcttgggaagcttattttgtagtttattgcttattgcaagctcttacggtcctattgtgtttaagcaaattgattttgttgataggctatatgttgtagcatttgtcacataacagaaggaaattcttgtgtagttttttttttttttaaattcccaagtgcttcttgtgtgtaaagaacattagctactatatattgaaagttattctaccaaaaaaaaaaaaaaaaaaaaaaaaaaaaaaaggggggggcccccaaataggggccccccc

SEQ ID NO: 29371 - DNA, 363 bp, Glycine max
gtcatcatagaaacagttgctatgcctatggttgataatggtttggtgttgaacaatcctggtctgcaaacttcttctgttagtactgaggaagaaaatgctgctgatcgcgatgcttgcagattaaaactcatgaatgagcctccacctgcttcacgaggcaatggtgaaggctgtgcaagtgctgaagaaaagataaccctatctactgatatgttggaggatgattcttatgattctgattccgagtcagacgagaatcatgctgtaactattgctgtggataccgagtgctatgttgaagatgatgattatgaggatggtgaggttcgagaaccactggatccttccacagcagaagac

SEQ ID NO: 29372 - DNA, 360 bp, Glycine max
atcttctctctcatccaagaaaaaacttcttcatcttctttactttcctttttctttctgtccgagagttcttgaagttttgtattgaggctccagaaactttatgagttctgttgattgattttcaacttggcaatataatgaaagagcatttcatgtagattttcttcaccactatctgctctatgcacttcttgtgctttctgcagttctgaattattcaagtaactggttcagtttaacatatgatttagtataaaagaaattgacacacagtcatgaagtttatgaaacttggatctcgttcggacaccttttacactgcagagtctggaaggacaatctcttctgaagtttcaa

SEQ ID NO: 29373 - DNA, 409 bp, Glycine max
attttccacaaaattccgaatcgttcccacatcacaacacaactcaagtttacaccaactaccccttttcttcgtttccgttttcttctcaaattgttcctattttcactgtgattcaccccaccaaattatgtgtttctctctgcacttgccaaccccgaattcatagggtctctctcttcttattttcaggttttggtttgaagaatggggattcagacagtgggatctctaggtaacgggcaacagtctcatttacagccttcatcattgtctaggcaaggttcatggtatagtctcactcttgatgaggtcaattgtcaattaggagacatgggaaagccattggggagcatgaaccttgatgagcttcttcaaaatgtgtggactgctgaagcaagcaagtctt

SEQ ID NO: 29374 - DNA, 271 bp, Glycine max
cctcgagccgattcggctcgagaattcacttccggttgtctatgacgggttcctttacaaggctgaaacaatttcttggactaatggaagaagctactagatcttctttgaaacagaattctatgccgcttcctccatggagatctctagcatatctgcaagccaagtggcagtcaccgtatgaacgatacacacattcagaaggcaatattgttagcagcagtgattgcttcgatcacaagcaatgttgtggacatttgaagaggctgca

SEQ ID NO: 29375 - DNA, 340 bp, Glycine max
ctcgagccgccttttttatgctgcaatgcttcagactatatatagttgggaaaggttggtaaagataagaagtgggtgtcaaagttggataatggggtatgaaattattgacgttatggggctcacttgttgagcacatgtgtttagttgttgcgtcttcgttaaggttcttatcttattatatgttgtgtatgacgagtggtctatgtgggttattttctaatccttctcaacccgaggggttgactcgaacttcaaaataaattggtggattgtggaatgcaaatccatcttgctctgcatgagtacactgatttatctacccataatcggatttacc

SEQ ID NO: 29376 - DNA, 1812 bp, Glycine max
ctcgaacggctacttggtagttggagtggtagcttttgctctactttgctcattcagagtttctttgacagattcagttccattattttcgcctgttcatgacgctgcttctttgactcgcaactctttccctgctggcttcatctttggggctggatcctcagcctaccagttcgaaggagcagcaaaggaaggtggaagaggaccaagcatatgggataccttcacacataaccatccagaaaagataagagatggagccaatggagatgtcgccgttgaccaatatcaccgctacaaggaagatgttaagatcatgaaggatatgaatttggattcatacagattctcaatctcttggcctagaatactacccaaaggaaagctcagtggtggtgtaaatcaagaaggaatcaattattacaacaacctcatcaatgagctattggctaatggtgtactgccatatgtgactctttttcattgggatcttccccaagctttggaagatgagtatggtggtttcttaagctcccatatagtagatgattttcaagactatgcggatctttgctttaaggaatttggagatagggtgaagttttggactactttgaatgaaccatggttgttcagccagggtggctatgcaaccggagcgacggcaccaggaagatgtaccggtccacaatgcctcggtggtgatgctggcactgaaccttacatagttacacacaatcaaattcttgctcatgcagctgctgttcatgtgtacaagactaagtatcaggcacatcagaaaggcaagataggtataacgttggtaagtaactggttcataccgcttgcagagaatagcacatcagacataaaggctgcgagaagggcaattgactttcaatatggatggtatatggaaccattaacaaaaggagagtatcctaaaaacatgcgagccctggtgggaagtagattgcctaagttcaccaaatggcaagccaagctagtgaatggatcatttgattttattggcttaaactattactcctctggttatattaatggtgtccctccaagcaacgacaaacccaattttctaacagattctcgcaccaacacttcatttgaacgcaatggaagacccctaggtctaagggccgcttcagtttggatatacttttatccaaggggacttctagatcttctgttatataccaaggaaaaatacaataaccctttgatttacatcaccgaaaatggtatgaacgaattcaatgatccaaccctttccgtggaagaagctctcatggatatttatcgaattgattattattatcgtcatttcttttatcttcgatcagcaattaaggctggcgcaaacgttaagggattttttgcatggtcatttttggactgtaatgaatggtttgcagggttcactgttcggtttggattaaactttgtagattacaaagatggcttaaaaaggtaccctaagctttctgctcaatggtacaagaactttctgaaaagaaactagtgttagacccaccgtttgaaagctatgcagcacctaaaaacggttaggttaagctcaatgtttgtagttgtagctaattccacgtataagtcattaggttgttgttttctgttagaataatttcatggcacactactaagtgtcctgcaccagcacagctataaattaatatgttatagctgatccttcatgtatcggtttgattttgaatgttatctcagaattaagattcagtttcagtttcaacaattataatcttcgcgtgatgattc

SEQ ID NO: 29377 - DNA, 689 bp, Glycine max
tgaagacgacagaagggggaggaaaggaagagattcaagagaagaaaggaaagcgaaagtgtgtcacgttttgttgatgctgttgctgtgaatgaatctgcgatacgatacgcacacacatcatcatcatcgccacatgcatattatgcgtatatacgcgtagatctgataaagaaagtagaaagaacagacagaagaagaagaagaagaacgaggccatgtcgggattcagagacgctcgctgttttccgcgtccaatcctcgctgtgaatctcgccctcgctcttctccacgccgccgttgcgttcctcgcgttctttcagttgctgagaattcacatgaggaatgcgcagcttggttggactcggcaaaaggtgttccatgtattgattggctcttctaatttgggttatgtcatttatttggcattgacaattgttgctgtcctgcaagggatggacctgttggtcgcactcttgtggtttcatatttatggctttccccaaagtacttttttttgcagcatttcttcttcttttatccttctgggttgacctttgccatcaggcagatgatgatgatgactatgaaggaagtttttgtgacaaccctttgctggagaagactttaaatgaatcaaatttagcaagcatagatagccatagaaagtgctttccttttcggtttgc

SEQ ID NO: 29378 - DNA, 396 bp, Glycine max
ggatgctgttgttattgttgatggtgttgcggtgaaagaatctgcgatacgatacgcacacacatcatcatcacatgcatattatggcgtatatacgcgtagatctggaagagagggtagaaagaacagagagagaagaagaacaacaacgcaaagcggtgttcgttccgtacgcactcgcgcacgcacgcacgcacgcacgaggccatgtcgggattcagagacactcacggttttgctcgtccaatcctcgctgtgaatctcgctctcgctcttctccacgccgccgttgcgagcctcgcgttctttcagttgctgagaattcacatgaggaatgcgcagttggttggactcggcaaaaggtgttccatgtattgattggctcttctaatttgg

SEQ ID NO: 29379 - DNA, 604 bp, Glycine max
gatagcaggaaccatattgctgaagtacttgcagcaaatgatgttgattgtgatgacttggaaaaagtaaaccatgctgatactatgctactcagtaattgcattgaagagattgtagcgtctgcaatttctcaccacctgatggagactaaacatccagaataccgaaatagaaaactagttatatcacacaagagtttgtcccatgtattgaatcttttccaggaaagtgaaagtaatctggagaataaagattcaaacaaggaggatgctcttgcaacaaagaaagatggcgacaatgagtttgagaagcgcatgagagcagaggttgtgcctgcaaatgagataggggttacatttgaagatattggtgcattggatgatattaaagaattacttcaagatgtggtcatgcttcccctcagaagaccagacttattcaaaggtgggcttctgaagccttataaaggaatattgcttttcgggcctcctggtacaggaaaaacaatgcttgcaaaggcaattgcaaatgaagctggagcaagcttcatcaatgtctcaatctctaaaatcacttcaaaatggtttggagaagatgaaaaga

SEQ ID NO: 29380 - DNA, 500 bp, Glycine max
ccgaaatcctagacaccatataatgaccttctcagcaattctctctatttcgtacacgccccaaagtagcattttttgtacccaaaaatcaaatccattatccctaaagaccttattattcccaccccaagttgggaagaaacttgtccaccaacctctaaggtacaaagggttttctcccaagggggatgttggcaaaatcaaggcatcaattaagtgggaaaagggctacaagaaagttgagatctccagtaaggagcatcttgctgtatcattggcttatgatgttgctcagctctctaacaaattcacaagagagagaggtgctttcactgtcgttttgtccggtgggtcactcatcaagtacctcaggaaattgcttgaacctccgtatattgattccatagagtggtcaaaatggcatgttttctgggtggatgagagagttgtgccaaaggataacttagacagtaattacaagctcgcctatgacggatttc

SEQ ID NO: 29381 - DNA, 395 bp, Glycine max
cgtccgatttgttctcaagatatatatgttactttttggtgaaattttggctatagaatttggcttacttggaaagatgatgatcgcgagggcgtggtctgtaggatgttcgtggggacgtggaatgttggaggaaagtctccgaacgagggattgaacttgaggaattggttgatgttgccttcaccagctgatatctatgtcattgggttccaagaaattatacctctaaacgcagggaacgtgcttgggccagaggacagtggcccagcatcgacgtggctgaaccttattcgtcaagccttgaactctaacacaagctccagtggagaaaattctcctacatcgtcttttaacagtagaaggcaatgctgcccaaatgaacaacactatta

SEQ ID NO: 29382 - DNA, 334 bp, Glycine max
caatgagagtggtgtggaaagcaagttcggtgtgggtattggaagaattgaatggttgcatgatgagaaactgtggtcattgataggggtggatggacaaaatcttggtcaatttaaggggcttgttgcatcagacaagaatatagtttcccccagggttgcagaagtgacaggaaggacgccaccactggatataaaattggtgccagagttgtcagaaaagttgcttgatcttcctgttaagccatgtttcattgtaatgctggcatttgcagagcctctatcaacggttccagtcaaagccttttcttttgaaaattctgaagttttaagc

SEQ ID NO: 29383 - DNA, 290 bp, Glycine max
ctcccaaagactcatttttctttgtacatcttaaagccttcataaattttaaaattcccagtggaccccacaaggcataacttgagaaaaatacacatggcaagttttgggcctctttgctgcaaagctctagtgatagccgtggtggctatggtgatgggtgcaccaagctatggccaaatcagcacgccatgtaacgcttcaatactaggcactttcttcacaccttgcatgaattttctgactaatagcagtggcaatggaacctcaccaacaacggagtgctgcag

SEQ ID NO: 29384 - DNA, 698 bp, Glycine max
acgaggatacgtccagtgtgctcaatcttgatgataactctacagtatcttgatgtttatcccacttgggtcagctggataaacacagtcattctgaacatttcagtgtcactggcattgtattctcttgttgttttctaccatgtgttttctaaagagctggagccacataagcctcttgccaagtttttatgcataaaagggattgtctttttctgcttttggcagggaattgtgcttgatctcctggcagcactaggaataatccgatcccgttattcctggctagctgtggaacgcattgaggaaggctaccaaaaccttttggtttgtgttgaaatggttttcttctcaatatatcagcaatatgcatacagtgctgctccatacaaagttaacagtgcaccttcagataaaaagtcaaagtgattccaggacatggattacttggctgttaaagaacatcaatgtatgtactttcaatatgagtgttgcttctctcccacttctcttccatgagacaattagtaaacaaatgtgtggcagagtcttttgaataagatccagatacattgatgcctattctaatgatctagaaagttttgtccaacatttctgcttggattttctgctttaattatttgtatttgtcttgactcattgcagacctaattacatttgtggtcttacaccaacag

SEQ ID NO: 29385 - DNA, 328 bp, Glycine max
ctcgagcggtagttctatatcatccaccacgtatatgatagtaatctctataggacacatattcaagtatttaagttatgaaaaaaatactgtgtcacataaaaattagtttaaattataatagtctcaaatcaccaaataatttgtcaaggatgttaatttgttactaaagctgttatactctcttgtagccctcaaaataaaaaataagggccattattgtgtcttgtcaacttctgaattattttaagtgctgtttcattctcaggcaatgtatgagaccgtgctttggtccttcacgataattaaatatattatgttgaataaa

SEQ ID NO: 29386 - DNA, 478 bp, Glycine max
caatcaatttaatatattcatatccttccacctgagttcttagtgctgaatgtccttgtctgtctcagtgtctctcttcacaacctcaccgatctgccatttcacactcataacaactttgtacaatttgactcgatatgttgaagtttctctgcagctaaattgaccaatagtttggtgcacttagatctaaaagctagaaagatgtcttttattggcactcaacacaagtgcgaggcttgtgacaaaacagtgtaccccgttgatcagctttctgctgatggcactgcttatcacaacccatgcttcaagtgctctcattgcaaaggtaccttgaagctcagcaactattcctccatggaaggtgttctagactgtcagcctcattatgcgcaactcttcaaggagacaggatctttcaagcagaacttccagtcacctgctaagcaagctgtcaaaacaactcctgagctgacaa

SEQ ID NO: 29387 - DNA, 302 bp, Glycine max
acaaaaaccgagagagggcattgttcccatcggaaaccctagccaaccgcctccgtctttcatggcgttttcctcctccgcctccgttgccacgcgatctctcccccgacgttgaacttcctctcctcgattttcccgccgccggaaatgtctccggcgccggcgaagaacccaatgtttttggtgtcagatagggagcctcacgcgctcagatctctccgtttgttactttctaacagactacataactaactaattacataactgacgaatctattgcgacgatcgtaaatatacgcggc

SEQ ID NO: 29388 - DNA, 453 bp, Glycine max
gttcaacccctctgaccccattgtcattattctcagaagattatattagttatatttattattattcccttgtttaatttcttcaattttgatgttgaatctgagagaagagagagagagagtcgtgtgccacaattttcccagctttaattggagtgatttctgatattttgtgttagagttcaatccagatcgtgactagagaagccacagatccttgattttgctactgtttgaattttggggtccatagcaaaatgggggttatgtccaggcaggttgtgcctgtctgtggcaacctctgttgcctctgtcctgctctgcgggcaagctccagacaaccggtgaagcgttataagaagttgctagctgatattttcccacgcaatcaggaggctgaacttaatgatagaaaaattggaaaactatgtgactatgcttctaagaaccccc

SEQ ID NO: 29389 - DNA, 268 bp, Glycine max
cgacgttgaatgatttgcgcgtaaacgatcgatcatgaagcgcaacagagtcatcgtgcagtcaacttcccaaccacaccaatgacctcaatccagatcgtgtctagagaagcaagaggtccttgattttgctactgtttgaattttggggtccatagcaaaatgcggggttatgtccacgcaggttgtgcctgtctgtggcaacctctgttgcgtctgtcctgctctgcgggcaagctccagacaaccggtgaacccttataagaag

SEQ ID NO: 29390 - DNA, 352 bp, Glycine max
ctgaggttgctgaagaaatgcttgttgatgggtttaggcgatgtgaaaaatggatgcggaatgacattgtagactcaaaagaatccaagacaacatcatggttcaagcggtttataggacgtaagcagaagccagaagtgacctggccatttccttttgcagagggtagaatgtttgtccttactttacgtgctggtgttgatggataccatattactgttggggggcgccatatgacttcatttccatatcgaacaggctttacacttgaagatgctacaggattggtagtcaaaggggaccttgatgttcattcagtttttgctacttctctccctacttcacatccaag

SEQ ID NO: 29391 - DNA, 244 bp, Glycine max
aacacctcttctggtaataatttgaaaagggtttttggaaatcccgaacaggttgttattccaatgagcagcagtgccactggaagtggccgggatggtgtcgatcctagtgtgaatcagggtggcggtgggcatattgactattccactacaaatcggatcgagatggattctttgtgtctcaataatgttgatttagcatatgaatatactgcacccaacacttctgcccaggtgggtggtg

SEQ ID NO: 29392 - DNA, 345 bp, Glycine max
ttctggttcttaagttgtgcgtcgtaaaagccacaccaattcccccatagaaatcagaaaacccaccgaacccttaccagcggatcgtcgtgctgagtgcgaagcgaaggcattatggggttgacgaatttcgtgctgacagtggcgggtgtaagcgccgtcgttcttctccttaggagtgacgcgaagcaatctgcctccatcttccggcgcaacgtcaagcacattcgcaactggctcgaagaagaaagcgccgcttcatccaagacaatggagaagtccactcccaaagaacttgaatcaaaggttcctccgaaagacattcctaaggaggacaaacattaa

SEQ ID NO: 29393 - DNA, 284 bp, Glycine max
gctgaatgtgtctctcttggacgagctgaagataaagctgttgacactcaatgctgtgctcaatgatgctgaggagaaacagatcactaattcagcagtgaaggcatggcttaatgagttgaaagatgctgttctagacgctgaggatttgttggatgaaatcaacacagattctctgaggtgcaaggtggagggagaatttaaaacctttactagccaggtgaggtcattactttcttctccctttaatcaattctataggagcatgaattccaagttgaagc

SEQ ID NO: 29394 - DNA, 370 bp, Glycine max
ctcgttgttacatgccattcattcacaatttcaggatggctgctccggccatagtttctaaaactttgctcttatttcttattctccatgccattctcatgtctctggccacatcacagccaaacttcgtaaaacattactgttttgaccaaaatggtaactacactgctaatagtacgtttcaggccaacctcaataccttgttgtccaacctctcttccaacactgaaatcgactatggcttctacaatttctcaaatggccaaaacactgacaaagtcaacgttattgggatgtgtagaggagatcttaagccagaagcttgccgtagttgcctcaacaattcaagaatccttctcacacaactttg

SEQ ID NO: 29395 - DNA, 247 bp, Glycine max
gatacatccaagcttccttccttctccatctctccgtggatcctactccgccgttgcgccgccaccgccaccgccgtgccgcgtcgccttctccaccaaatctgtctcctatgtctttctctttcaatcttccattctgatttttgcacggttttggttagggttcgagggtttaaagagacaaccaatggatatagaatgatcgagaacgtcacagttacaaattgagattcacattttctcagca

SEQ ID NO: 29396 - DNA, 500 bp, Glycine max
ccctactcagcatatcactactactgtgctcctgggaatgctcaacacttggagcaaccagtgagcacttgtgatccttacagcaatcctcatgctcaagagatagttcagttgcttcctcaccctacttggggtgagtatggctatcccaccaaaaaaggtgatggttgggtgggggatgcaaggacttgggagcttgatgttggagggctatcaagtagactctacttttatcaggacccaggcactcctcctgccaagagaatatggacatctattgattctggtactgagatatttgttagtgacaaagatgaagtagcagagtggactcttagtgactttgacgtcattctaacacaatcagggaccaacttgatgaacaaggctgagagaaagaagtaaggaatattgacgatggactaaacttttgggatttttgatagtccaccaagtgtaggcttctaaatctaggggttacagcacatttacacgaaaat

SEQ ID NO: 29397 - DNA, 288 bp, Glycine max
catcgagccgaatcggctcgagcccatggctgctgctactgctaccgcggacagcgtgtcctccgcaggcatacctctcaggacaacgcagtgcaggaaacgagaattctgatatcagaactctgtcgccacttctattctctcggatgggtctctggaactggtggcagcatcaccatcaaagtccacgatgactctatttccaaaccccaccaactcatactcatgtccccttcaggtgttcagaaggaaagaatggaaccagaggacatgtatgtgttatctcac

SEQ ID NO: 29398 - DNA, 428 bp, Glycine max
tgacaagccgtcggcaaaagtatcaggtgatgatttatctgcaaatgaaggctccaattctttacctgattcttgcaccaagttgcatgaaactggaagcagtcctgccaatcagtctgataatacttgtggtgtcaatgttacatttggaagccaacctgaaactgaaaaggatgtgaatcaagttaaggcttctgctaatcggaaccctccagtttctgagtgcataaataaggatgcattgaacacatctactgatcgtgatcctaaggggaatgatgcatctaaagatgagaaaagctcagctcctgtggtcaatcctgtgccaaatttgtccaaaaaagatgtttcagaaaagaccaccaaaagatcaaatttgggaaagaggcaacgagctgcagccaaaaaagctccaatggttgtagagg

SEQ ID NO: 29399 - DNA, 581 bp, Glycine max
ctcgagccgtttggctagaaaatgaagcaaccatcatcaaaatcaaagccatggagaccattcacagcacattgctgctccacagaggaccaaaccatttttaaaaacttcagcaggtgcaagccatcacgttcggatttgtcaaagaacattgcacctttgccatcattcagaaggctctctttctcggatctcagccgttcgtcgtcgacgcgaatcaacgaggatcttgcacaagtcttttgggtcggacttggttgattttcagctgattgagctgcgtgccataacacagaattttagcagcaatttcttgctgggtgaaggtggctttggaacagtgcataagggttacatagatgacaatttgaggctgggtttgaaggcacaacctgttgctgtcaagcttcttgacattgaaggtttacaaggacatcgtgaatggcttgcagaagtgatttttcttgggcagctaaggcaccccaatttggttaagttgattggatattgttgtgaagatgaagaacgattacttgtctatgaattcatgccacgaggaagtttggagaatcacctcttca

SEQ ID NO: 29400 - DNA, 290 bp, Glycine max
tgacggtctacaaaggaaaatatggtcagatccacctgattgcatctcttgctgctggattaagtcgctatcatgatgagtttgctgtagctatcgttgatgaggttctggaggagattagagttgggctggagttaaatgactatgggatgcagcaaagacgcattgcttacatgcgattcttgggggagctttacaacttcgagcatgtagactcatctgttatttttgagacactatatctcattctcatccatgagcatgggacatcagagcaagatgtactggat

SEQ ID NO: 29401 - DNA, 280 bp, Glycine max
cttaatcactagatttttcttctccctttgaaaccctagcgtactcttatacctttcacatctttcatccttttcatatctcctcgtgctaaatctcataacatgacttacctttttttggatatgtaaaccaaaatcttcaatcattgagctcaatatgaacatcaacttgcgcttgatcgagagattctaaagatgaagattcaagatattaaaggtgtggaagctacataggaagatgaaactaactttgctttgtgggaggcaattagagatatgg

SEQ ID NO: 29402 - DNA, 297 bp, Glycine max
ctgcaattcactacttgagagtttgaaaatggtacttgtgctatggtcaagagggactaagaacatggacttcctaaccctcttcactcttctactcttgttattcattcatacagcactctcttctacccaatatcatgatgggaacatcttactcactcatcgtaagatcttccccaaacaggaagctatcacctcgtacgctgtcatctttgatgctggtagcactggtagccgtgtgcatgtcttccatttcgaccagaacttggatctccttcgtattggcaacgaactcga

SEQ ID NO: 29403 - DNA, 424 bp, Glycine max
ctcgagccgcacaaacacaaacacatggcttcctccttcttctttctaacattgcttctcctctccattatctccgccgccaccccctgcccgccgtcagaacgggcagcactactggccttcaaagctgccctgaccgaaccctacttgggcatcttcaacacatggtcgggcaacgactgttgccggagctggtacggcgttgcctgcgaccccaccaccggccacgtcaccgacgtcaacctccgcggcgagtcccaagacccaatgttccagaagcttggccgctccggctacatgaccgggaaaatatcgccggagatttgcaaccttagcaacctcacaaccctcatcgtcgccgactggaaggccgtctccggcgagatccccgcttgcgttgcctcactctacactctccaaatcc

SEQ ID NO: 29404 - DNA, 420 bp, Glycine max
tctttttccttttattacaattgtcaatactgagtttgactgaaatcttctaacactgactaagtttctgatatattttcctttcttgattattttaacatagtcacattgctgtattcactatccaaaagtcttaacaaattccctgacataaaggacaatttgtccaagaacatatctgttctctaactatttcttggatccagtttgttgttggagctccaggtgctatgtgcctttgtgtaaggtttttcttcagttgtcaaaatctgtttatctaaaagaaactcacttatagcctgaaatttctactagaaacctggaggattaatatgtcactatgtcagacatgccatgttcagtacaactttttattggtaatttgcaaaacatactgagtaggattaagctatgtgaata

SEQ ID NO: 29405 - DNA, 420 bp, Glycine max
gttcttacaagaactgagttctgttcaacataccaaagaatcccctacctatagctattgagagagggtgtgtttacactttggaaatggcagagaaagaagtgagaaacaagcagttggtattaagggactatgtcactggctttcccaaagaatctgaattatatgtgacttccaatggtaccatcaaactgaagctagaaggtgactccaaaagggttttggtcaaaaacctctttttggcagctgatccacacctcaggcccttgatgaagaaagctgataaccttagtgttcttcagtccttcacacctggcttaccactgtatggatatggagtggctaaggttgtggattctaggcacctgcatttgaagaggtgactatgtgtgtggcataactggatgggaagagtacact

SEQ ID NO: 29406 - DNA, 527 bp, Glycine max
accagatctgccttccaccaagttcgacggcaatttgaatcacttgagcgagcaccctcccgttacgtcgcgcaaatacttctacaggatcgagaacaccgttacccccgtcgcggataaccccgttctctgtgttaaacctgttacccgacgcattcatggctacgccaggctcttcatcgctcaatgcttcgccaaaggattcgctgataggcttcaggtcttctccacggatttcattgacgaggatttcgttgacgcatgcgctggactcactcatgcaagggtcgaagggaaagcctgaatgcccgaattcaactattaatattgtttgttagggatggatgttttgctttgtgtgttcctttgatctttgatggtgtcgtcactgtactttttttatttatttgttgtaaagctgtatacattttattctatactgtaaactggaatatcgaaatgcaccctgtccgtttaccaagaatttcattgcctgctgctagtacacagccacaagtcttgtatca

SEQ ID NO: 29407 - DNA, 464 bp, Glycine max
cgcgcagtgagttctactcgtatctcctaccgtcactcaccgcactcttcttgtatttacgaacacaaccatatgcagcattttgcttcctcaaaattctcttcattctcactttcatttcctcaaaattaggaatcaccattcttctccaccagatccggtgctggatcatcgtcgaatcgctctcttcttcgaatgcctctccagttcctgtgatttccggtgaatcggaattcggaactgcgctgtgattcttcttcctttttcgattttccgaaatgcttctcctcagtcctgtcactcccggtcaggtctcgttcctgctcgggatcattccggtcgtcgtggcatggatatattcggagatgttggagtaccggaacaactatgtcccgtccagagcgcaatcggacatcaacttagttgaaataggaagtgatgttgtcaaagacgaagacagagca

SEQ ID NO: 29408 - DNA, 366 bp, Glycine max
tttggttaagtcttcaagtctactagggtttgcctcagggacagcccgtggaggtgttccatcagcacgcattgctatatacaaagtatgttggatcaaaataggttgtcctcaagctgaaacccttgcagcatttgatgaagcaattgctgatggagttgatataatttccatttcaaccggacttactagtatagtgtacattccgtatttccaaagcgcatttgatataggaagtttccatgcaatgaagagaggtatattaacgtcaaaatcagccgataattcgggtccagggttatcctctatcacaacttattcgccatggatactctctgtggcagctagcactattggcagaaagtt

SEQ ID NO: 29409 - DNA, 514 bp, Glycine max
cttcactttcacctaggactctgcccccactttctgaaggcaataaagccagcataatgttcaactctctgtctctttttcctttctctctcctctctctttcttcccaccttctctgatgaaagtctcaacacaaagcaccttcttcttcttctcttattgacttatggccaccacagagactcatttctggatcttctggtgtaaagacctttaaaagtttagtatttgtcaacttgaactggtgtatagtgctagagagtaaagtttgaaacctatcttgttactttcatcgtcagaagcttacaggttgcatccatattttttctccttggaaaatgatgatgatgtttgatgagatggggctttgtaataatttggatatgatatctgctccccttggagaggaggatattaccacccggcaaactgatcctgaggtaattgttgaggatgattttactgatgaagaaattggggtagatgaactcgagcagaggatgtggaaggacaa

SEQ ID NO: 29410 - DNA, 424 bp, Glycine max
agacagcaaaggaagagtgtgtgttacaggaggtacaggttttattggttcatggataatcaagaggctccttgaagatggttactctgttaacaccactgtgagacccgatccagaacacaggaaagatgttagctttcttactagcttacctagagcatcccaaaggctacaaattctcagtgctgatctcagcaatccagaaagttttattgcttccattgaagggtgtatgggagttttccatgttgctacaccagtcgactttgaattaagagaaccagaagaagtagtgaccaaaagatccattgaaggtgcacttggcattttgaaggcatgcctcaattccaagacagtgaagcgagttgtttacacctctagtgcctctgctgtcgataacaataaagaagaaattatggatgaa

SEQ ID NO: 29411 - DNA, 388 bp, Glycine max
acctgagcgttcagttcacagtgtagggtacatgtctcttaaagctgcgaaatgggtcattaacccaactcaacgattcaaaggagaaaaacaaaagaatcattcaaatgaaatggtggttcagaaatgggggaaggaggagcctccctttctctctgtgtgtatgggttgcgagaaggagtagaaccatgcgttcagacgcggcgttggaagccatagccaaagcttcagaagacagagttcccaacatagttctctacaactacccttccttttctggagcattctccgctctctttgctcacctcttctacactcaccacaatctcccttccctcatattacccttctcttcggttccccttctcgctctcaggattgaagattt

SEQ ID NO: 29412 - DNA, 799 bp, Glycine max
ttcactcacaaataatattccattctccattttccaggaatatgcatttcttgctctgtgctctttcctttactttatactatttatttcatgtctccctcctcccaaacacacggttttcataggaactaggaagtaaaatcaatccacaagatcagaaaaaacaggaaattggttttaattattttcctcactgaaatgagtagtagtaagaaaaggttcattcctattaatctggaagatgctgcagtggacttgttaaaccatgtggtgaagttgaaggagaagggatggattccactcttcattccactcattttgattgcttgggctattcacagatggctcttctctttctccaattggcttccccttgtacttgctctatgggcatctatgcaatatggaaattatcagcgcaaactacttgaggaagagttgaataagaaatggaaacggatcctactcaacacctcgcccatgacaccattagaacactgtgagtggttgaatctgctattgacacaaatttggtcccactattttaaccccaaagttctcaagaaggttaaaagccatagttcagaaacggctaacgctccggaaaccaagatttatagaaaaggttgaggtccaagagttttcacttggatcatgccctccaagtttgggtcttcaagggatgcgatggtcaacctctggtggtcagcgagtcctcaaaacgagtttcgattgggacacgagtgaaatgagcattttgatgcttgctaagctttccgttggaacagccagaattgtg

SEQ ID NO: 29413 - DNA, 889 bp, Glycine max
acagatagaaagaaaagaaatttcaccgtaccagagaacaaggaaggatagaagaaagtgaaagaaaatggcgttgtacatggacgaagaagagatttggaagtgtccgaagcatccatcaaagagaagaagaagcggaatttgccctacttgccttcgagaccgtctcgtaactctttgccctgactgtgctaacgtgcgcccctgttcctgctacgccaccagctcctcctcctcttcctcgtcttcctcctccttatcgcgtttttctggcgccggcgatggcgtcggttccgtcggccgcgtccacaacctcatcgagcaagagcctgggctccgccgctcgcgctccatggcgattccgtttctcaggtcacggtcgcggttctctggcggcggagatagggtttcggatctcgacagcacgagggactcgccggcaatgaacggaagccggtcggcgaggtcgttctggtcaatgttcaagtcgcagaagagcagtagtcacgccggcggagaaggcggcgcgccggagcaagagtgggaggcgaaaaagatattggcggaggaacgagacggcgatggtggcataaatccgatgatggtgcggtcaaggtcggtggcagtgacggcggtaatcggtggtttccggcgacggagaattgagaccgcggacgaaagggagagggtggttcttcccaagtccgatgaaggctttccggcaatccaaggtctctaaagtgattcaggaagggtctcctttgtatagaggttgaaattttgtagattaaaaccattatcataataataacaacaaatactttatataagtttatatatattaaccaaaaaattaaaattttcttttgtttcagtacggtcttgatta

SEQ ID NO: 29414 - DNA, 507 bp, Glycine max
cactgatagaaaagaaaattcaccagtgaacaacgaaggatagaagaaaaaaaagcttcagtgatagaaaatggcgttgtacctggacgaagaagagatttggaagtgcccgaagcatccatcgaagcgaagaagaagcggaatttgccatatttgccttcgcgaccgtctcgtaactctttgccctgactgtgctaacgtgcgcccctgttcctgctacgccaccagctcctcctcctcttcttcctcttcgtcttccttctcgcgtttttccggcgccagcgactccgtcggccgcgtccacaacctcatcgagcgggagccagggctgcgacgctcgcgctccatggcgattccgtttctccgatcgaggtcgcggttctccggcggcggcggaggagatagggttttggatctcgatagcgcgagggagtcgccggcgatgaacggaagccggtcggcgaggtcgttctggtcaatgttcaagtcgcagaagagcagtagaca

SEQ ID NO: 29415 - DNA, 275 bp, Glycine max
cgctgccagacacgatagggtacgagctcaaaaacctgaagaagctatcagtgaactccaacaagctggtgttccttcctcggtcgacctctcacctgactgcactgaggattctggacgcgcgtttgaactgcctaaggtctctcccagaagacctggagaatctgataaacctggaaaccctaaacgtgagccagaacttccagtacctggactccctcccctactcggtgggattcctcttgtccctcgtggaactcgacgttagctacaac

SEQ ID NO: 29416 - DNA, 295 bp, Glycine max
cagaatcattcattcaatcacttcacacactcacaccttgctccacgccttctccaattcgctacacggtgtttcaacatggagatcgataaggctcttagagagtctgacgatcgaacacttcagaccaagtacaacaacgctacctatgttgttcagagagctttggctttgtattctattgaggaggttgccttcagtttcaatggaggaaaggattcaacggttttgttgcacatactcagggctggctatttcttgcacaaaaaggggcaaaatagtgcaaatggggatc

SEQ ID NO: 29417 - DNA, 390 bp, Glycine max
ataatgagtaagcatgcttaatataattagcagctccaatgaatgatcacattatttttatatagcaagaggtacctcattcagctcatggattcagctccttctagttcttggctgcaagccttctccttcttagcattggtttggttatttaactgtggatgtgtccatggagccaccccagcagtgaaagtaggtaacttttcaaaggtggaagatgctggaaacttccatatttactatggccagaccttcaaagtcattaagaattctgctgatggccagagctaccttcttctccagaatacttcaaggattgcatcaaggactaaatattgcacatcaagaatcaagtcatttgtcataccattgtcgaactattctgtcgat

SEQ ID NO: 29418 - DNA, 478 bp, Glycine max
taatggttggcactaatgtggagtatatgtcagagtatattcctcgggaaccaagagagccttctggttctggagccgatcaagaaactacaaataaagatgttaataagatgctaagacgcctagctcagaatcgagaggctgcccggaaaagtaggctgcggaaaaaggcttatgttaaacaattagaatcaagccgtttgaagctcatgcaattggagctggaaattgggaaagcaagaaagcagggtctgtatatgggcactgcattagatgccggctatataggatcaacatcagaaacaataaatccagggattgctgcttttgaaattgaatatggacaatgggttgaagagcaagaaaggcggaatgaagaacttagacatgcatttcaaacacaagcacctggtgtacagctcaacgtagtggttcagagtgtcttaaatcattactcaaatcttttcagaatgaaagc

SEQ ID NO: 29419 - DNA, 474 bp, Glycine max
aaaatattcaatctacctcagtttttgacaaagcgagacgcatgggctggaacactcgaagatctcttatctctaagcaccccacgtactgattgtccagtgaaattgcctgaccccgtcaaactgcgagaggctgcttccgcggaacaacaaacgcaattgagtgaatttcaagaagatttgatatatatggcagcaactctaaatggggatcataataagagtatataccccaagctaactgagaacttaactgtttcggaggcagtgaaatactgtgaagatgcatttggaacattcttgaatgagtgtgagaaagcaaaacaaagtaataaaattgatggatctgaaattgtttattgtgctagaccgcatacggccccacaatccaaaaatttctggcacaagatgctgtcatgtatattatgtaattgatagttaaatatattttggctaaatatgtttgaggtcatg

SEQ ID NO: 29420 - DNA, 440 bp, Glycine max
gcagatgctagttatctcacaaatgggtatttggagactagcattgattggatacccggcatcaaggaaattcgactgaaggatatccctaccttcattagaaccacagatccagatgatatcatgcttaatttcgcacgtggcgagtgcataagagcacagaaagcttctgcaataattttgaacacatttgatgccttagagcacgatatcttggaagctttctcaaccattttgccacctgtgtattccatcggccctttaaattttctcttgaatgaggtcaaggataaggacttgaatgcaatcgggtccaacttatggaaggaggagccagggtgtttggaatggctcgacacaaaagaagtcaacacagtggtttatgtgaactctcgaagcgtcacggttatgacaaatgaccaattgattgagtttgcatg

SEQ ID NO: 29421 - DNA, 359 bp, Glycine max
ggaacccctctgagtcaaacaccgctttcaatttcaattcagcaacaactacagaaccagaatgagggaaatagtaataataacaataacaataatgtgaataagaagaacgaagacgttcaagtcgacgctgacgtgcgagattgaggaggatcagagtaaagtggaggcgagcctggtgcggttggaccggtttcttacggtgttagggttcaaccaggactcgccgttgagcttcgtggtttcgtggagcgtcttcgcggcggtgggagtggtggcgccgctgctggcgctgtccatgtacgactgtcccgtgtgcgacaggtacgagattcagagcttcgagatggcgatcgtcg

SEQ ID NO: 29422 - DNA, 272 bp, Glycine max
ctttagtgcttctttaggtgaagtctcgtgaagctcaaaagccatggccttcttgaattgtttcgacatgttggtccttctgcttttgcttgtcaatatgagcttttatggaaatgttgatgctcagaaaaatggcttaggagcctctttcatctttggggattccttggtggatgcaggaaacaacaactatttgtcaactctttctaaggcaaacatccctcccaatggaattgatttcaaagcctctggaggaaatcccactggtcgct

SEQ ID NO: 29423 - DNA, 1105 bp, Glycine max
tcggaatttactgcaatggatagaagtgagatctctctattcctggaacgtgcgtttgttcgattggaagcatggttccattggttcaatacaactcagtcagggaaacagatgggcagctactattggcacggacgggacgataggacaatgcgtgaagtaaatcctaagacactgtcctctggtttggatgattatccacgagcttcacacccaagtgaagatgaacgccacttggatcttagatgttggatgttacttgcagcagactgtatgcattccattcaagagttgttggatatggaaagcaaacctggaatggattatggttctactgtgaaattgcttttggattttgagttactgaaccagatgcatggggatgatgcatatggtgcttactttgattgtggaaatcatacagagaaggttcaacttaaatggaaagaactggaggatggacaaaattatgctactcgccaacttctccgggatgttatggatatgcctgtattgagattggttcctcacattggttatgttagtttattcccgttcatgggaaggatcattccatctggatcacggattctggaaaagcagcttgaactcatttcaaatcgcagcctcttatggaccaactatggattacgttctcttgccaaaacaagttccttgtacatgaaacacaacacagagcatgaccctccatactggagaggcccagtttggataaacatgaattacagaattctttcagcactccaccattactccaaagagaatgggccatatcaggagaaagctaaagccatctacgaagaattgagaagcaatttaattagaaatatagtgcgcaattatcaacagacgggatttttgtgggaacagtacgaacagacgaagggtaagggaaaaggggctcatccatttactggttggacatcgcttgtagtattaatcatggcagaagcatatggaaatatttaggataaacacagcttggtggaggctattgtaacaaacattccttgcttccttctcattttccgtccatgaataccaaggcagtaagtgtgcatgtaacgttgttgtttaaatatgc

SEQ ID NO: 29424 - DNA, 483 bp, Glycine max
atctcattcactttcctactaagagacagaaaaagtggttggcttgttttagtttaccttggtgcccataacagtattgaaacaaacttcgtgtgtaatgtaacacacacacacacacaaaggtcttatagttatatataccaaaccaaatcaaaagctcaacactgacccttgtatcttcttaggccagtccaatctaagagaaaaacatggatctagaactccctgctcatgctgcaactgtgaatgaatctcaacaacaaaagtttgctctacctgtggattctgaaaacaaggcaactgtgttcagattattttcctttgccaaaccccacatgagagccttccacctatcatgggtctctttcttcgcatgctttgggtctagctttgctgcaccacctcttctccccataatccgcgacaacctcaacctcacagccactgacattggaaatgccggtgtggcatcagtctcaggtg

SEQ ID NO: 29425 - DNA, 555 bp, Glycine max
cacatccatcactctgcatgtcttgttgtatctataaattaaattccttacatcatgccttgccacagtgattcactctaagagctgagacaacaagtcccttcccttctcttctccttcttctccaaaggcaaaggtctttgagatggaagtcttaaacccaattgaaggcaagacctacaagctcccagttggatacagatttgatccaagtgatgaaattcttgctggttactaccttaggaagaggatcatggcccaaccactccctaatgacctcattcaagactgtgatgtttaccaaacagtgccttgggagctgccaggaggtggtaataagaatttgaattggcagaggtttttcttccatgatttgaggacccgtgtgttcgaaaacctcaacaagagagaagccgggaacggtcaatggagaacaatagagaaagctcaagattttgagctctctaaagaacaggttgttgcaagaaagaacgttttggctttctgggaagccaagggcaatggttttgccaaatcgaattgggtgatgcatga

SEQ ID NO: 29426 - DNA, 299 bp, Glycine max
ggttgcagtgcagcaattccagtgcttcacagaatcaaattggagaaatataacaaggccatgcattccccctcacagttcacttcttctacgttcacgcaacaagattcacatttctctgatttcatgctcttcatcacagaccccagaagctgatacacaaactgctgaatcttgcgtcaatttgggtcttgagctcttctccagtaggacgggttaaagatgctttaaccctgtttgaaacagcactttccttgagccctaatccagtggaggcccaagctgcgtactacaacaaa

SEQ ID NO: 29427 - DNA, 284 bp, Glycine max
cacccacagtttcgcggagatcactcaaaacgacacagagaaagcatcgaaggtgctgctgctcggttctctcgcttgcgctccagttccgatcaccaccacagggttggagctggggcaatttccaccagagctaaactcaccggcggtgtttcggtgtgtgaaagtgagtgcaatggacgcaccggacgagcgttacgcgtatcaaaccgcagtggacctaggagggcacgtcttcaagggaattccctacgaccaaggcatcgacggtccgtatgccggtg

SEQ ID NO: 29428 - DNA, 267 bp, Glycine max
gattcagctcgaggttctgcagctgatatccgtgtccatgagttttttaagacaccatatttcaagtcagggatccaccctcttccacgtgctcagatggctcttcagaagttatcaagattttgtagcctatcagttgtaacatcacgacagaatgcaattaaggaccacacaattgagtggccagagaagaattatcctggactgtttcatgagattcactttggtaaccactttgctcttgatggtgtgtcagaccaaagtcag

SEQ ID NO: 29429 - DNA, 663 bp, Glycine max
cggctcgagttccctcgtatacttcccctcctcaactttgttttgtttttcatgtacgctttttgaatcatcttacgtgctcctaatcatgattccaacacttgtttgtattggcacaacaatattccaaagcaccctctcttcttactcattgtctttcatctctctttttctctccacgtcactcgcccttcttgctatttccctcaactattggcttgtccccggaggttttgcatggaggaaatatcacagtcgttacaaaggccatgcaaaactctctggcccaatgggctggcccatattgggaactttacctgcgatgggccctctagcccacaggaaacttgctgccatggccacttcaccaaaagcaaaaaagctcatgacattgagtctaggaacaaatccagttgttatcagcagtcacccagaaaccgcaagagaaattctttgtgggtcgaacttcgctgaccgacccgttaaagaatcggcccgaatgctcatgtttgagcgtgccattggatttgctccatatgggacttattggcgccacctacgtaaagtggcaatcacccacatgttctctccgaggaggatttctgacttggagagtctccgacaacatgtggttggcgaaatggtgatgaggatatggaagga

SEQ ID NO: 29430 - DNA, 469 bp, Glycine max
atttcacagtactcaaaggtgaaagagcagtttcttgattatgaggaaggcaggtttctcttaaaatgcttctggtactgtgaaacactgctaaacgagcattcgcctaaagtattttcccagttgcataacagttccttgtgtcaatctatactttttaatttgcctatggtagacatatttgagtattttatgtgaattgcccaatctaaaatattggatgtctcaatacaaatgccgtgatgattctattgtttctatgctgtaatgatgttcttgccttgtaggaagcaccctgtggggattttgttacccatttttgctgccatccttgtgccatttgtcaagagtaccgtgagatacgtgaaagatctggggattgtgaagccacagacttgaagctagctgtagttacagctccgccaattcagacaatgcattctgattctaagcagtaatactactgctg

SEQ ID NO: 29431 - DNA, 488 bp, Glycine max
ggggcactcttaatcttgttttggttcaaaatccctacccctctctgtctctctctctctctctgctttgttcgcaggcagtaacttccagtgagcggcggatgtatttgtttattgtaattggtagatgcatttgaggtgcatcttgtgaggtcatctgaaagatggatcttgagggcaaaaaatttgggaagggcaatagagaatttggaagtactcgtgatctcataaatcagaatagactttggctctactataaattcttctgcaagaagtcactcccagtgtcaatttcagagacacattatcttcacaatgtggtgggtgacacaaaaatcaggaagggagaaggaatggaactggatcagctctgtaaaaacacagacacgagtgagaaaaaagcttgcttatgtccttttgacttggatgtactcagtgaagctttccatatgagggatatgaatccagtccacctttcttctgtaaga

SEQ ID NO: 29432 - DNA, 328 bp, Glycine max
ggaaaatcaatggtaaaggcagcaggcatggcatgacaaaaaagtctcaatttctcaaacaaagttttgaaaggcaaaggacattcacaactcacttcacaaactgcgatcaagtgaagcagccatttccactcccttccatatcccattcactccttgacaagctagatgagttaattaaggctttgcctgggaacaataatggaagggatgaagcttaaaaggtggctcgtgagtgttttgttcctcattgttgccacagtgagcaatgcagcaggtgcatttgtgggggtaaacattggcactgatgttactgatcttcatctgc

SEQ ID NO: 29433 - DNA, 322 bp, Glycine max
tgacccacaagttaagcaaagcactggtggctgtgactcgacaagtcagatgcctacccattgtggggcggcagctgtaggatttgagcaatctgctttggctcatagtagaggtcatgcatccaaggctaatgacaatggagctgttaatcctgatcctggcagataacattgtgtgattggttatgatcgacaagaccgtgctcaatggaagttttaaaaaatgagtccaaaatctcttgcagattagcacacaggctatattttagagtcattgaggttaaccgcatcaaaataactactgaatcctaatttcaggact

SEQ ID NO: 29434 - DNA, 510 bp, Glycine max
gttctcactctctctctttccctcgccatcgcttttcttactccaccacttcgccactacacttttctcaccactacccattaattttcaggaacaatgggggagcacgtggttttatctgttcttgactctcttatagcacctgcaactttgcaaccacaacatgatggtgatggtgatgctttaggttcactcattgagggtgctactcatgttaatgatgttggggaatgtgatacacttgaagaagaagaagaagaagaagaagatgaagaagaagaagaccttatcaaaatggtggaatgtcgcatttgccaggaggatgatacccttcaaaatttggacataccctctgcttgcagtggaactttgaagtttgctcatacgaaatgtgttcaaatatggtgctacgagaagggtgatacaatttgtgagatctgcaatcagccattcaaacctggttatactgcaaattcacctgtctgccatcctggagatacttcaattgat

SEQ ID NO: 29435 - DNA, 588 bp, Glycine max
gggatccttctggggagtttctggcatctgtcagtgaggactctgtcagagtttggactcttggatcagggagtgaaggggagtgtgttcacgagcttagctgtaatggcaacaagtttcactcacgtgttttccatccaacatgttcttcgctgttggtcgttggttgttaccagtcattggagctctggaacatgactgagaacaagacgatgacactatctgctcatgaaggtcttattgcggcattggcggtttctactgtaaatggtttggttgcttcagccagtcatgacaagtttgtcaagctctggaagtgaatttgttgtgtcattaatacaggttgttttttagtctgttgatattgttgtagtttatgatgtccccttttttgtagtttggtcaaccaccctccctcgcatgtttgtagtttatgtacccttttatgtagcttgatcaaccaccctccctcttttgccatttgggtataatctgattttctatgtaaccatagatactaactttttgtaatattgtcacccctgttgtatcctgtttcataattgttatacttggagatttctgctc

SEQ ID NO: 29436 - DNA, 441 bp, Glycine max
ggcacacagcacacaaaaaaatcggttggcgaacagagcatgccccacattccatcacctccaaatttatcacctttttctctgtagcgggttacactgttgacccaaaatgcaaacggtttgcgtttgtggagataagttatggcgttacgacgccgtttcattcttcggctctcacgtgtcgtttacgagtacccgtgtgtcgttttgcccaccccgaagaagaagcggattagtgtccatggttgctaagcgcagccccaagcgtctcaagtacacctccgcttctcgcttcaccaaggaggatggtttggtgtacattgaagcagacccatctgcctctgattcttggaaattggaaccaattgcgaatcttttgaaacaaggtgctgttggagtcattcctactgatactatgtatgcaataggtatgtgacctta

SEQ ID NO: 29437 - DNA, 291 bp, Glycine max
atagagtagaggcaaacgtaagatgatgtctgttactgttgctgccgacactacctccgccgccgtaggatcctgtctttcacgatcgcggcggcggtgcttaacggtggctctccgatctaaagtgtcagtcaccccaaccagaatattgaccaaactcaaacacgagtgtgccactcctctgccccttcttcaccaagtggccaatacacatgtcttctgacatgcgagctgggcttgctgcagaggctgggcctgggcccgggcttcccatgatacccagctatgttg

SEQ ID NO: 29438 - DNA, 301 bp, Glycine max
cttcctccaatcacattcctcctcttcaggactacaatttgtacggtggcggaggtggaagaatgtatcggagcaacgcgcagaggagcttcactgagtattgttttgatccggccacgcctcctcggagttacgccattaagaaaaacgccaacggttacggcgacgaagactattctcctcgtgatttcagccccggcctcttggatctccattcttttgatacggagcttcttcctcagattacgtcctccaatttgtatgattccgagccttacattttcggcaaacaaactgtcag

SEQ ID NO: 29439 - DNA, 531 bp, Glycine max
  unsure (1)..(531): unsure at all n locations
caatcttcaggttaagaagggtttgcttcagagtgatcaagagttgttctcaacacctggtgctgataccatcagcattgtcaacaaattcagtagtgaccaaatagctttctttaagagcttttcggcttccatgattaaaatgggaaatattggtgtgctaactgggaagaaaggagaaatcagaaaacaatgtaactttgttaacaagaaatctgcggaacttgatataggtagtgtggcatccgaatcaaaagagggtctggttagctcaatatgaatgaattaggaagagttttatatacactaggaaatcatgtgattgaaggttcccaataaagaagctatatataggcccattatccgtataagtgcccccagcaagccatgttttattgtataagggcccccagctagctatgttttattgtgcacgtgtgagatctttattgttttttgaatcatgttgtattcgcaaccaacttctctctttacttctcnnnnnnnnnnnnnnnnnnnnnnnnnnnnnnn

SEQ ID NO: 29440 - DNA, 257 bp, Glycine max
aaaccagagaaatctatgaagaatcctgtgaaattgaaattgaatgatagctaaatcagaaacatggatcaatcacagaatcagagaccagcgacatcaacaaccacaccctcgcgctctttccagttccacccccttcgtgactcaattttcgatctcttcaacctctacttaggactcggccgaaacagtcgccagaaacccgatgactcacttcgcgacccaccgaacaagagcactatacgcgtacacgccct

SEQ ID NO: 29441 - DNA, 750 bp, Glycine max
cgacgccagcgtctccgacggcaagatcggacctttcctccctccctccgccgccaaaccccctctctcctccgtcggatcgtgaagtaacggcggatgcgaacaaggatcgattcggttcgaggacggaaaaagaaaagtggcaactaaagtcaactttcgcgttgtggaatgattttgttgacgaggacttttgtgtaaatttgaccccaagtaaagtagtgcaggtctcaaagaatgaaaattatagtgatctcatctgtttttctttatttctatttttttttaaaaagagacatttatttatttatttatttgatgttagagttgaattggttgaaggatggggctgcaataattttcttggtagaagaataaaaaaatattaatattgggagatctaagttgaaagattagattctttttgttgaaagaaaggacggtgtttgggggcaaaaagtcaaagtatgagggccccacagagaagcatgtggagttggaataataatgataactttagcattgagtaatggaaagtaggggggaagggaaggaacaggtcaatggttgttatggcgagtgggtcccactgcgtgttgttacttcaaaattcaaatatctctttctctctggtctctaatctctaatctctttgactggggtgcgtgtctccaattaacgtacgtaacctaacctaactaacattgatgccaacggtggccgggggtgacgccatataatagtagaatt

SEQ ID NO: 29442 - DNA, 348 bp, Glycine max
aaaacttcactgagaagtgggtcatttgtgctcaaaaaattatataccagtgatgatgaacttgatgaattggattcaccactttctgctcttggcatggatgactcatcacttttgtccaaggaactagttaagggaggccgcaaggttgtacgatatgagctcttgcgagaagcgtggaagactagtgaatgatgttcctatcaatgtgttcttttcttcttcttcttgtatataatatgtgtatctaaaatttagcccgatatattttgtattttttttaaataaaaatcttggtcttacaatcatgtacttttttacccataaaagctgcaaggcagttcctgt

SEQ ID NO: 29443 - DNA, 265 bp, Glycine max
caacaactttgtccatgtttgagttaccgttttcatggctcaaaatcacgtttacaaaagaatctcactggatacttatgcgttagaagtgcgttgaaatgacggcaacccaaacatgtgctttctttctactctttcattttccttactgctctgccttccagttatcatgatcaggcttgttatgctttattttcaatgctgtttttctctttctttttgtaacattatgtaaattaatcttaactggtgtgcctattgtaaa

SEQ ID NO: 29444 - DNA, 399 bp, Glycine max
gctatcttcatctagaagcctccttcatgaatccattttaacagtagatttaatgaaatataaaagcagtgtcactgccatttccatcaaaaccatacatctagatagaatggctgctcctactccagttcctattggcacaaggggcacaattggatctcttgtaaagaaggaaattgaatacttctccatgtttgagttggggaactcacagaggcctcagccacactttgtgaacattgtttctggaagaggctattccacttccaggtccagtttctgggtcttgctaatgacagggaagaggaggaagcgaaggggtaacaatgtgtttctcccaaaaatgtgttcggttgctgaagtggtagaaagcaataagtggaacagggttcctggtta

SEQ ID NO: 29445 - DNA, 274 bp, Glycine max
agattaatcgaattgattttataaaatagtaaactcattttttcttgaactagtttgaaaaaaaatcaatttgagttaggttcggttacaatctggttcaatccgaaccagtttttttgaacacccctagttactgccttgtacattttaccctcccaggtctccctatgtgggagaacaattaaaatgagggagattacatgtggaaaaagtgggacaacaatgattcaaatattttatattgtcattttcagagagttctgagtgactggtc

SEQ ID NO: 29446 - DNA, 613 bp, Glycine max
gcgccgtctctgattactgcccgtttacgcgcatttgcatgtccttcacttatttcttcgactcagtgaagaaaatttctcggcataacagaatcatcattaccaagtccaaacagagtctaactctgttcctactttgcacccttttactcaccatagcagaaacctcggcatcagtgttcaacaacgttagctgcacgagcaacaagactttcactccaaacagcaccttcaacaccaacctcaacacccttctctcctacctttcctcaaacgtaaccaacaacgttagattcttcaacgcaaccgtagggaaagattcgaacaccgtctatggcctctacatgtgccgtggagacgtgccgtttgctctatgcagagagtgtgtgggttttgcaacacaaacaataccttcgtcatgtcccacatcaaaagaagctgtgatttggtacaacgagtgtttgttgcgctactcttacagggtcatcttctctaaaatggaagagtggccaaggcacaagatcaatattccattgggggatcctgtggttttgcatagaaatggattctacactggcgtaggatccattttcgatgaattaccaaataaagc

SEQ ID NO: 29447 - DNA, 304 bp, Glycine max
atttgactctgcgagatcgctgcatctggcttcactacctgcatctatggctaaaccccaccatctctttctccttcttcttcttctctgcgccactcttgagttttcttcatcttcaccctccgatcacctctacaatgttggagaacttgtcccattgtttgtcaacaaagtgggacccttcaacaaccccagtgagacatatgagtactatgatttgcctttctgcaccccagacccaattgtcagaaagaaagagtcccttggggaagttctcaatggtgaccgtttgagcaatgctttg

SEQ ID NO: 29448 - DNA, 465 bp, Glycine max
  unsure (1)..(465): unsure at all n locations
gcttctttctctttaatttggtttaagctttgtatgttaatttagttttccaaatttaacacattgttaaggctaattatggctgatattgagggttctccaggaagctccatgcatggagtaactggaagggaacaaaccttcatagcctcagtggcttcccctatggtccctacagacaccacagcaaatttcgctttgccagtagattctgagcacaaggcaaaaattttcaagcttttttccttagccaaccctcacatgagaaccttccacgtgtcttggatatccttcttcacttgctttgtctcgaccttcgcggcggcgccacttgtccccatcattcgcgacaaccttaacctcaccaaaggcgacatcgggaacgccggcgttgcctctgtctccggcagcatcttctccaggctcacaatgggcgcggnttgtgacctacttggaccgcgttac

SEQ ID NO: 29449 - DNA, 310 bp, Glycine max
atttcgttcttcttctccaattagggttctatcaagccttttcctctactctcccactttgcattttcccatggctaccgagcttcttcaaatcgaacccgccgagctccgattcgtctttgaattgaagaaacaaagttcatgtttggttcaacttgccaacaccaccgatcactttattgcttttaaggtaaaaacaacttcacccaaaaaatattgcgtcaggcccaacataggcatcgtctagcccaatgataaatgtgattttactgttactatgcaagctcagcgcatggcaccgcctgatatg

SEQ ID NO: 29450 - DNA, 319 bp, Glycine max
caagccttcgcaaagaagtagaagaactgcacattccattgcagcagatccacaccttcgctttcaccatggccgaatttctggatctcgaatcccaagacggcgtgcgaatgccgtggaacgtgatccccggcacgaagcaggacgcccaaaacgccgtcgtccccgtctccgccgtctacactcccataaagcacttcccctcgatgccggtcctcaactactcccctctccggtgccgcacgtgccgctccgtcctcaaccccttctgcatcgtcgacttcgccgtcaagatctggatctgccccttctgcttcca

SEQ ID NO: 29451 - DNA, 581 bp, Glycine max
ggaataactgttgtgcttcagattgtcatcattgaatatctcgggaagttcactaaaacagccaagcttaattggaagcagtggctcatttctgttattatagcatttatcagctggcctcttgctgtggtaggaaaattgataccagtaccagaggcagaactcagtaactttttccgaaaatgtcttcgtagacaaaattaaagaaggatggaatctgaggcttctcagcagagtctttgctgattcactctcccgtccgtctcatttattgacaggtttaactacatccttcgggtgatggaaaatagtatactagttagttgtacagagattctacagatccatacaaaagttggatttgctttatacttaggtcctaacaaggttagatttatcatatgcgaggaatttcagctagtctttttttaccaccagtgtattttcagtttgacaaacgctgatttatattttcgtatatttgacgagttgcagagatgtatgataattccttccaaaaaaaaaaaataaaattagaaaaaaagaaaaaaaaaaaaaggggggccgagaagaggtaagcc

SEQ ID NO: 29452 - DNA, 372 bp, Glycine max
cgaaaaccttctaccatggtgcaaaagatgcaaaacatcaagaggttaagaggacaccgcaatgctgtctattgtgctatatttgatcgggcaggaagatatgtgattactggttccgatgaccgacttgtaaaaatttggtcaatggaaactgcatattgtttggccagttgccgtggacatgatggtgacatcactgacttggctgtgagttcaaacaatgctttagttgcatcctcatcaaatgactgtgtcattcgagtttggcgcttgccagatggcttgccaatatcagttttgcggggacatactggagctgttacagccatagcatttagtcccagaccgaatgctgtataccagcttttatct

SEQ ID NO: 29453 - DNA, 309 bp, Glycine max
ctctttctttctgcgtgtcgttggcacaatggagtctctgttatacgtaacatcttcttctctgaaattcttagtgagagcttcatgggacacacagcagagactcccttacaatcccaacgctcccagaaagcttaagaataacattgttgcaactcccactcccactcctccaattacgcgcaagagggagcaatacatttccgatcttctcaagcgcgccactcctctccccaccatagggcatatagaagaagtacaagatgaaacctatttggggtatgagaaatggctcccaactccaccaaa

SEQ ID NO: 29454 - DNA, 399 bp, Glycine max
aaaacagaccacctctctgttctgattcctcttctttctctctctgttctctgcccgccccatatcttctccttctttcccaagttgcccaatttcagttttcttcctttcctccaccattcgtcgcctcttctccagtttcttcaatttggctcatagttttgaacatggtatttgccttttgagtgcaaacttggaagattggtttgaaaaatatatataaaaatcaatgacttggaaaagcaggggagacctgcttcctaaaagtgtcatgtctcagaaatggatgatttttctctgtattggatgcttctgtgctgggatgttcttcaccaacaggatgtggactattcctgaacctaaaggacttgcacggacaacagctatggaggctgaaaa

SEQ ID NO: 29455 - DNA, 373 bp, Glycine max
  unsure (1)..(373): unsure at all n locations
tttgagggataaaaatatatttaagttatntggtgaatgctggcatcgtaaagctatctggctgtacataatgtacatattgtatagacaggtttgggcacattagactcttgttctcctttttgatgccatgatacataaaggaatagacacgtatcatgtatggcatccatcattccgttgttccctctctcattagaaaaacagacaccaatacttgtacgagaattgctcggcctctgttgcttggtgcagagtttaagaaaggttgtttttatactacaataatggatgaagccatgaatcttcacattcaaatttagtccatcatgtgattgataacattttgttggtagtgcaattctgtaagttg

SEQ ID NO: 29456 - DNA, 316 bp, Glycine max
ttcggatccttttatcagtattgatgcactggaagttcttgaggctatcaaaagcattcccggatgtgtacatccattggtttccagaattttgccatctattggaccaattttgaataaaccccaagagcaggctgatggtttggtagctggatcattagatctggtaacaatgttactgaagaatgcccctgctgatgtagtgaaagcaatatatgatgtctcttttaatgctgttatcaacataatccttcaaagtgatgaccacagtgaaattcagaatgctacagaatgtttatctgcttttatatctgag

SEQ ID NO: 29457 - DNA, 378 bp, Glycine max
actcgaggtagtaaagtaccatgctgattttgatgtgcctgataatgatggatggagtcctcttcatatgggctgcatataagggatttgctgacacaataagattgcttctatttagagatgcaagtcaaggaagacaagataaagatggttgtacaccgttgcactgggctgcattaaggggaaatgcagaggcatgtgctgtgcttgtacatgcaggcacaaaagaagaactgatgatgaaggacaatgctgggaacacacctgtacagcttgcatatgataaaggtcatcggcatgtcgctcctttcctttcaaatcaacaacgggctcatagcaactactggaaagggaaactgtgtagtgggatagtgacag

SEQ ID NO: 29458 - DNA, 324 bp, Glycine max
cggctcgaggttctcctaggcgagaccactatatctaaagaaaagagtgcagattaatgtgagtgcaattttgagtggaaaccaagatggccattttttcaagtcaccacggaatgttggtgtctctcttgcttacgtgggtccaaatccaagccaaggtgttttgctaccaatacaaagtgggagatctagatgcttggggcataccctcctcagcaaatccacaagtctacataaaatggtccaaatatcataatctcacaattggagactcccttttatttctatacccaccaagtcaagattcagtgattcaagttacag

SEQ ID NO: 29459 - DNA, 461 bp, Glycine max
tatcaagctagctaggtataccagctaccctctcttcttccatttcaaagatatctctgcatcggcaccatattttggctgcttttcaacacatatcagatacatatatacatgagtcagaggtattagctgcagatattagcagtcataaatctcaaggaaaagcagttgaagcatatctatccttctgcaaaggttttcaagattcccctattcagaaggcaaaggaagctactgtgtatttctttgttgatttatttcctttgctttcaggaacgatgagtagtttccagaacggttcttcgccgcgttcgcggaacgcggcggagagtgacatagaggccggtacctccgctcgccgctctgatgacctcgacggcggcgatttctccgatccctttgacattgccaggaccaagaacgcttcggttgaacgcctcaggcgctggagacaagcagcg

SEQ ID NO: 29460 - DNA, 365 bp, Glycine max
attgctgctggatcacgagatggcgttcagccacaagtttggctgcaggacgaaagagagcttaaaagacaaagacggaaacagtctaatcgggagtctgcacgcagatccaggttacggagcaggccgaatgtgatgaactagctcagcgtgctgaagctttgaaagaagaaaatgccactctccgatcagaagtgagccggatcaggagtgagtatgagcagctacgttctgagaatgctgccctcaaggagagacttggggacatacctggtgtcgcgacgcctgggaaggaggatcttaggtctggtcagaatgatcagcatgtgagtaatgacactcaacagagtggtcagacagaggtt

SEQ ID NO: 29461 - DNA, 428 bp, Glycine max
aatggcttctatacaatggccatatgagcatcttaaaacagctttctctgtttctacttttcatcaataccttttcctctttcttcttgttattgttgtgttaaagctaacaagaagacccaaaatcaaacccagtttcaatctgcctccctccccaagaaagctaccaatcattggcaatcttcatcaactaagcaaattgccataccattctcttagaaccctctcacaaaagcatggttctctgatgttgttgcagttggggcagactcgagccttggtggtttcatctccagacgcggtcagggaaatcatgaaaactcacgacataactttctcaaaccgacccaaaaccacagcagcaaaaaccttgctgtatggatgtaatgacattggttttgcatcctatggagaaagctggaaacaca

SEQ ID NO: 29462 - DNA, 267 bp, Glycine max
tcagtgtacaaggcaaacctagagggtaaggttttggcagtacaaaagattctcgaaagatgtcacggacgagctgaaaattctgcagtaggtgaatcatgggaatctggtgaaactaatgggtgtctcatcagacaatgatggaaactgttttgtggtttatgagtacgctgaaaatgggtctcttgatgagtggctattctccaagtcttgttcagacacatcaaactcaagggcatcccttacatggtgtcagaggataagcat

SEQ ID NO: 29463 - DNA, 215 bp, Glycine max
gatagaagtcgtgtaatgacgggcctctctcattataattccagggaagaatgaatgcacatgagatgaattgtaacactgcagattctgagcctctatagtcgacgtacactcttaactggaattataatgaaagaggcccttcattacaccactacatgatagaagttgtttggttctcagtcacatgtcatcattggacatgttcatacatt

SEQ ID NO: 29464 - DNA, 479 bp, Glycine max
catgttgctatctgcaatcatgtcaccatcttcagcatgtctttcaacgactgaaagacattttacttgggaaaatttattaaaatgtgttcatttgcgctcgaggtttggctacaaggtgagtgaaaacaagtgttctgttcaggaataatttgaatatccttggttttggttcagctgctgttctatgcctcaaaatgtcctcagtagctggctggtcattacattcaaaatctctgcgtaatctgtactgaatcagatcagatatccaccgagcccttgttcaggtttgtcattaatgaagggtccgtatgcttgcttttttacgtggcgttcggagcctgttattattattattagtttttttttgggtgtgattcagtgtgtacattgtaagtataatcacttcacaataagggcatcacgcgatgcctacttttagaggcatccaagttattctccttcaaaaaaaaaaaaaa

SEQ ID NO: 29465 - DNA, 285 bp, Glycine max
caagactgccattgatatgtgcaaggagattttcaacaaccggtgccgtgttgatgcaacgttgctgcagggcgtggtggataagctggcgagtgagggcatggatacagaggcgaaggagattgtggagatagggaaaaccaataggtattgtcgctataggctagatttgccagcagagaagtagaattatgttagtacttagtcgcattttattgttgttcttgcaatttaaatggtttttttttcacaatgatggttgggaaattgccaacaatggatttt

SEQ ID NO: 29466 - DNA, 774 bp, Glycine max
ctcacgcgtccgcccacgcgtccgctttctctgcgtgcaagctaacctcattcatagaccatattgtacgacaaaaaccatcattatcctctccttctctctctccctccctagggattgttttgcttgctttatatatatatatatatatatatccaaacaagtcttgtggtttctattaccaacctcacttcgcaatttgcatgactcctccctccctaagatatctccattctcaaccttaatttgcactctcacgctttccctttcttctttttttcatgtcaagtactaccacttagacactcagatagatacacccacatataaaagcacgcctttgagattctaataaccttagtgtgctgtgcttagtccgattctgattgtatgaatgaatccttctagtggacaaccccagcaaatgtctagccagtcagtggagaagaagccaaagcctcatccagaacaagctctgaaatgcccaagatgtgactccaccaacacaaaattttgctactacaacaattatagtctttctcagccaagatatttctgcaagtcttgtaggagatattggacaaaaggaggaacactgaggaatgttccagtgggaggaggatgcaggaagaagagatcatcatcattaaagagggctcaagatcaaacattgacacccaatcttaatccactcactacactccctcatttgtcttatgactccaatgacttcactctagcagtagctaggtttcaaaaacaatcaagtggaca

SEQ ID NO: 29467 - DNA, 286 bp, Glycine max
cctcgagccgaatcggctcgagataaccttctttgttcaccaatcactatagttcttagtcgtactaagttgttccttcttcatcaggtctctaatgttactaccaacctgcaatctattaaacttcatgcttaatgcagtcagagacacattcaaattcaagttttaaacttctctatcaagttcatctcttgcaccatcgaactagacatgtgcaaggacttcctattgagagcatcaaccactacattgactttccctacgtggttctttaactcgaaatcat

SEQ ID NO: 29468 - DNA, 288 bp, Glycine max
  unsure (1)..(288): unsure at all n locations
cacaatcttagaaataaacctacatatccaaccctcatataaatacgcccttancctacaaccatatattctacacatagctagacatggtgaaaccagccatggctagtgttgattcttcttccttttcttcttgtgacaatgattcattttcctctaactacagcattcatacttgcaagatgtacaaaggggtaaggaagagaaaatggggcaaatgggtgtccgacattcggcttcccaacagccgtgagcgcatatggttggggtcctatgacacccaagtga

SEQ ID NO: 29469 - DNA, 281 bp, Glycine max
cgaccagtaaagaattgaatgtcaccaagggtaacctggtggcagctttgaaggaaattgaacaatacaaggcgcaagtgcaagccctacatcaaaatcttgaacaaagaatgaacaagcctaacgaaactgatgaagaaaaaaaagtgctttgtactcttacacaaaagcaacaagaaacactaaaactgattgaggaaatagaaagggaaagcaggaagcaaatggaatcaaccattaatctcatctataaattgttggcaatggttactgattttgaa

SEQ ID NO: 29470 - DNA, 282 bp, Glycine max
attcattttaccttcttattttccacttataagaagtttctccaaacagtgcataagtcagggaagcaattcagtctgccactgtgttgattttggctaatattcatttgttctcctaatgtatcttccttataagttatgctaacaaattaattggattcaattacgaggccttcttcacatatataattttctggaaatggctaatgtgagcatgttatcgcattatgcaggcaaaggaggggaatgcagaagttctttagactgggatagccgcttgag

SEQ ID NO: 29471 - DNA, 192 bp, Glycine max
cttcaaacccatttctccaaaattctttttgggtccctcttgaattgtctccctgctgtgtggagccttccaaattttgggatctgggtactagggtttgaagggtttcagcttttgactttctctctccttgggtttctctctccttttctgagaaattgggtttgcaacctattctggattcctcacaac

SEQ ID NO: 29472 - DNA, 516 bp, Glycine max
gggtactaataacacaccttcatcttcatcagctaaactaccatcatcaagtggctactatcttcccaacttcaacaacaacaacaacaatcagcaaatgcttatgatgaagccagaagaacacaaaatatatgagattcccatcaacaactatgcctccaccagtcaagtggatttcactactactaataacccaatgggaattagcacaagcaataataatatccttctttctcagcctcaaattcgaacccaaaattcaacctcagtacccttcaacatgttccaagattgttataatcatacgcaccaaggaaaacagtgcaagatggagcaattctccattgacagtactaagaaccagcccgtggtcagtgcctctcaagacacgtgcctcagcaatgacacttcctcggtggtttcaaagcaagacaataacatgggaaggaacaaggcattgtacgaggataattttgaaggtccttcatcagttgctactaccctctcagatttgga

SEQ ID NO: 29473 - DNA, 495 bp, Glycine max
attaaaagatggtttttcttgtgacactgaggtgatctatgtgggatccctcaaggttgtattagatgctcatgagcaggaagaagttgctcagaaattactggaggactttaattgcatacctacctttctaccccatgatgtccagaagaagttttattatggcttttgcaaacagcagctttggcctctctttcattacatgctacctatgttccctgatcatggtgatcggtttgaccgctcgttgtggcaggcttatgtttctgcaaacaaaatatttgcggacaaggttatggaaataatcaatcctgatgacgattttgtttgggttcaagactatcacttgatgggtcttgccgacatttctgaggaagcggtataatcgcgtgaagcttggattctttcttcacagtcctttcccttcatctgaaatttaccgaactttgccagtaagggatgaaattctgaggggattgttgaattctgatttaa

SEQ ID NO: 29474 - DNA, 625 bp, Glycine max
catttccaatacacaccaaaacgtacttcaacccaaagagtcataataactttgcctaacacctacctcttcaaccaccgcgttcgcgccatcacgttcgtcctttcacttattacactcctcacgaaactcccactgtttccaatattattcacaatggctccagccccaagggtgatctccgacaaggcctcgatgcggagctggtcgcgctcgatgcgggcccagggcaagctcattgggctggtccccaccatgggcttcctccacgcgggccacctctcgctcgtggcccaggcccgccaactctccgacgtcgtcgccgtctccatctacgtcaacccgggccaattcgcccccacggaggacctctccacctacccctccgacttcgacggcgacgtaaagaaactcgcgtccgttcccggcggcgtcgacgtcgttttccatccccgtaacttgtacgattacgggaagaacggtggtggtgacgtggcagaggctggtggaatggtgtcgtgcttgagagtgggtccgggcacgaaagttgggtgagggttgagaagctggaattggggctgtgtgggaagagcaggcccgttttcttcagaggggtggcgactgt

SEQ ID NO: 29475 - DNA, 487 bp, Glycine max
cctacgcgttcgcccacgcgtacgcggacgcgtgggcggacgcgtgggtgtttcacaagtttccttggaagcggacgcattaccctctctccctttcttctattttctcattcctgcctctcttctcaacatggccgccaacagatggttgaaacctgaggtatacccactcttcgcttcagttggtgtggctgttggaatctgcggtatgcaacttgttaggaatataaccaccaatcctgaagtcagggtgaccaaacagaacagaactgcaggaattctatatatggatctttcatatttgtatacaacaagatgctggtttggacttcttttgatcttcattgaccaaagaacaatgttttcctctatcaaaatacaattccacatgtaaattattgccagacatgcagctatgtgtaattgcacaatatttttttaaaacatgcataattcttgtctttggatctattccccatattattga

SEQ ID NO: 29476 - DNA, 490 bp, Glycine max
ttttctcattcctgcctctcttctcaacatggccgccaacagatggttgaaccctgaggtatacccactcttcgcttcagttggtgtggctgttggaatctgcggtatgcaacttgttaggaatataaccaccaatcctgaagtcagggtgaccaaacagaacagaactgcaggaattcttgagaattttgcagagggagagaaatattcacaacatagcctgaggaagtatgttcgcggcaagcagcctcagattatgccatccgtcaacaacttcttctctgatccatcaaactaaagcaaatgccaaactttctgttcttgagatttgatttctgggattaatttttttggcttaatttccagtattgggaattgagaagtaggacagagggatttgatttttcagataaagatgtactatgattctgtaatttgttgatagatgacattcaaactgtctaataataaaattttatacttcgcattt

SEQ ID NO: 29477 - DNA, 608 bp, Glycine max
tggactatgccaccttctaatctcacccgctacaatttgacatcatttgccatcacactgaatgagcttactcccgggctatagccttttctgatcccgggtaatttgatcacggattaaaggagaagcttccacccacggattccaggctgagaccagatcagcggcatctagagaatggggaatacgagaaggctaatatggaaaaacaaaggttggaaaagaggcaaagaatgtcaaggaaaatgcaagaaaatggatggcagcctaggtggttccacagacagagtgaaaatggaacgttccgatatactggcgggtattgggaagcgagagctcaaggaagatggaatggatgcccaaatatcttcggtgaaattcatgaaggcaattttgatcctttaggtgcatcttgatgttagttcagataatgataatgataatgataatgaatgcaaattactatgtggagggtttatcttgaaccttcttgcatggaggcaacttgttttactgaatcgaaggggagagtactctttaaacgaggctcgttgaagttctggttgggcaggtttgtggattgtccttgtgttacgactctgacaaca

SEQ ID NO: 29478 - DNA, 432 bp, Glycine max
agttggtggtggtggtggaggtggaggtcgaattcatttccattggtcaaagattggtatggaggaagaatatgttcctgttgcaagtattactggcaccgtgaataacagtggaggtgctggggacaatgatggccgtcatggacaggagggaactataactgggaaagcatgccctaaaggcctttatggaattttctgcgaggactgtcctattggtacttacaaagatgttgatggttctgatgaacacctttgcattccttgtcctcttgatcttcttccaaatcgtgcaaatttcatatataaacgagggggtgttacaagacggacttgtccatataaatgtatatcagacaaatatcgaatgcctaattgctatacacctctagaggagctcatttatacatttgggggtccctggccattttc

SEQ ID NO: 29479 - DNA, 276 bp, Glycine max
  unsure (1)..(276): unsure at all n locations
ctctctcacattgcacattgcacattgcacattgcacattgcagccattcttctcagatctatagcaacgtccaaggaaatcaactttctcttaaagcacacttttaaagtctttgtgtgttgaggcgtttggtttcctcagatgcctcatgtgagatgcggaagaaaacctactccgacttgtctctcttttttcttccgctcttgctcattctagtttcacactctctatgaatcacagnattctcgcacaatggacctctcacagactcccaa

SEQ ID NO: 29480 - DNA, 502 bp, Glycine max
  unsure (1)..(502): unsure at all n locations
ggtccatactttcccaagagaattcaccacagaggatcttccttgccttcaatagcagctcatccacaaagcatagggtgtgatggaggtttcaacccatttttccattcgatgaatcctaatcctaacatattggttgcagccatagtcggaggtccaaaccaaaatgacggatttccagatgaccgcagtgattacagtcattctgagcctgcaacttacatcaatgctgcttttgttggacctttggcatactttgccggtatccgctaatgtttcattcacctaaattacaaggttaagtctagatgtcattttatctgcacccaactaagttagtggtgcatcatttataattctagccctttcactcaaaaatgtaacttattgtaattagtatccaatatatttactgtgctttacgctnnnnnnnnnnnnnnnnnnnnnnnnnnnnnnnnnnnnnnnnnnnnnnnnnnnnnnnnnnnnnnnnnnnnnnnnnnnn

SEQ ID NO: 29481 - DNA, 408 bp, Glycine max
gcgctgttggacatgttttgaatgttctttagatgattcaagtgtcagcaaagtatttcttgtcttcgaatatgtaccaaatggcacgctcaggaattggatctctgatgagcatgctagaaaatccttgagttggactcaacacataggagctgcaattggagtggcaaaaggaatccagtttttgcatacagggattgtccctggtgtatattccaatgatctgaagatagaagatgttttattggatcagaatcttgttgcaaaaatcagcagttaccacctgcctttgttatctaacatgggaaaggttcggtgtggaaattcttccagtggattaagaaattctagcaatagtaaaagtgtaaagcatgaagataaggctgatatatacgactttggagtgat

SEQ ID NO: 29482 - DNA, 450 bp, Glycine max
ccccaacagatgcctggatcagtccctctctcctcaacttttggaagcagtgcccgtgactaggactatacattgttcatcacattcaacatagtcaagtccctatctaaacagccctgtgctctattgaaattctaccgattagtccacctgatgacttccgttcaacccatgcagacagtcacatgagcccactcatatcaggactcagattgtaatgctggtttcaggaatgcaaccatatacctacccgaagataacggttacagttagttggagggaattggttcgaaatctatctattgctatgagtctcggagaaggcccatatctccaattttttcttagaatatcatataaatccaatacttcttgtataatattgagtgaaatagttttctttgtacatatacagaatcacacagctcatataggatcctacttgctctc

SEQ ID NO: 29483 - DNA, 423 bp, Glycine max
cacttacacaataaataaaacatactaataataatgagtttttaacagcagctattaaaggtaattatcaatcttaatccctttggggtccaagagtgtgccacacacacacatttcttcagagaaaaaaggattgagaaaaaaatgtgtcctctgcgattcattctgatattcttgtccgcaaccctcgccggttttttcgttctcagaaacctcagatctcagcctcaaattgaagaaggcgacgctgttgttcctcccaaccctaaaatctcagactcctccgacgcttcctcaaatgtaacttccaagcttcgcgctgtggtagagtctgggttctggaccttcgtggatatggctagtggccgttatctttggaggcatttggtctgtaattcttccaagagatcgtgatgatgcgat

SEQ ID NO: 29484 - DNA, 528 bp, Glycine max
gcaaatgcgtgcgtgccacttgatcaaatgcaatgctattccactccaccctctacacacggctcaaaacacaaccctgttactgatgccatgtcataagtgcttcctctcctttccattttcttggttacaataataccattgcagagttccttcgcacttttcagattctcacgattcaaaatcaccactcgctacgcaccgtttcgatcccgtggactcttcttcgggagcttcagacaggaacggagcagagttcgatgtgcgtgcactctagctagcgcttatagaagatgtcactttatattggtaatctgtcagaacattctcgaagagatgatctcgagcgtgttttccgtcgatttggacattgtaatgttcagctgaaaagaaatggctatggctttgtagtatttgatttccctctcgatgctgaaaaggctctgagagcactgaaaggtagaaatatatgtggtgaatcgctgacactacgtggtccagtaaacagcctagttcgcatttttctag

SEQ ID NO: 29485 - DNA, 562 bp, Glycine max
ttgctactgaggggccacaggaacagaaattgaatggaataccattattgcatggtccagaaacagagcgaaaaggctcacggagtatggttgaaggaatgaactttttccggagagtcaatagaacatcttgcatctcaactgaagctaaaaaagtttctagtcagagcatggacagcaatggggaatgtgatttcatttctgattctgattctggatctgctttacttctccttgggactgttcaaactgctgaattgtcagaacacgataatcctagaaatccctttgaaagctcaaaaagacataacaataagtttactgagcatttgggtgcccagtgggatgtctttcgcagacaagatgttccaaagctcatcgaataccttaaaagacattatgctgaattttcttatacccatgactatgacaagaagatggttcatccaattctagatcagagcattcttcttgacagtactcacaaaaagagactaaaggaggaatttaagattgaaccatggacttttcagcaacatgttggacaagctgtcatcattcc

SEQ ID NO: 29486 - DNA, 281 bp, Glycine max
cacgcgacgaggtcggaatcggctcagtcgagcgattcggctcgacgggagtgtggccatggggagtgttgttttccctaggttgcgtctttggttagctcattattgccattgagaccaggaagaggaggaagaagaaggaggctgctcttgaagcctatggtgatggtaattcccattcgggtccggccaatgtgagctggaagcacaccagtactcgggaagctcttagcataaaccttgcaacatttgagaagccgctccggaagcttacttttgcg

SEQ ID NO: 29487 - DNA, 261 bp, Glycine max
acagtctaagcagaacaaagatgagtctcaatgtggatgaagatttagtgactgaagtggaggaagcacccacttttgctccatctataccattagaaaatgttcaagaagtagtggtaaggaatgatcctttgcaggtgcctataggatatgcgacgagtcaagaagaattgcagaaagccaactatatgcctcacctttcatctgagatccctgtcattgatttagcactgctctcaaatggaaacaaggaggagttgt

SEQ ID NO: 29488 - DNA, 401 bp, Glycine max
atctttagtagacttgccaattttggtagtagcattggaaaaggtggaaaaaagctcaggaccactaattgggagcagcatagcttctattcagaaaaatactgcccctaagatgctacttgcccttatggatgaggcatatactggttcaactatagaagatggtggaggagattctgcatctgaggataacagtgcaattgatgtagctgatccgtttttccttgagctgctaaacggtgaagatgatggtatcgctgaacggcactgggcgtctccagtgatggctgcgatactacaagcttcggtcaatagtccttagtctgataggctgatggcagtgctcgacatggctcctcagctgcttgatgtgtacttctccatagcattgcatactgtca

SEQ ID NO: 29489 - DNA, 431 bp, Glycine max
gcaattttggagtgagagcaggagaggacttcaaaccttggagcatgaagggggaggaggacgacaaaaaggatgtgtttgatttcaaagaggatgtggggcatgaagggaacttcactgctttggatattaatcctaaagtcgatgttgaacagcttgagaagggagaacatgctctcactgctgttgtcaaaggcccaaaacgtgcatttggtgatttgattgctgcttctggaatcacggatgagatgcttgatagtttgattgcgttgaaagactttgatggggttcatgggttgccccctcttagtgtaattgaagacatgcggtatgagaagaatactagaaaatcgactagaggtgaaatggagcgtctgaagcaagaggaagctgccaaagctagagtgaagcaggttgatgataaaggacgt

SEQ ID NO: 29490 - DNA, 279 bp, Glycine max
cccgctcgagcggctcgagcctttttgtagatcacttctacaatgaaaaggggattattgatgacactagatgcttcacgctacattttaactctaaccctcgtctgcagtctaagtgccaacaatgtgttgacagttagccacctcttcatggaatctgttccagtctctctgaagtgttattggtgatagtgttgtaattctaataatggagagatataacattttgagagagcttggggatggttcttgcggtcatgtatataaagctcgcgatat

SEQ ID NO: 29491 - DNA, 515 bp, Glycine max
aatcaacagaagatccttcaacgcgtacaagtataagcaacttctgattgattggttaatgataaatcactaaaaaatacctataaagacatgacgagaatgagagaactgcaagtgtttggtttttaattcgcaagttaaaaagaagaaaaatggcaagagaatcatcattgacgttaataggattctggggtagtccttttgtcctcagggtcaagtgggctcttgaactaaaagggattcagtaccaatatgtggaagatctcggcaacaagagtgccatgctcctacagtataaccctgtccacaagaagctaccggctctcgtgcatgacggtaagcccctggcagaatcactagtgattcttgagtatattgatgagacctggaagcaagatccctcccttcttccacatgatccctatgataaggccaatgcgattctggtccgaattcgttgatgaaaaggtagtaaaaaattagaacacagcatgttattaagtgctttattgaac

SEQ ID NO: 29492 - DNA, 321 bp, Glycine max
gtcggattcactcgaaatccccttctccgtttgatgtcgccgccgccgccgccgccatcactaagctccgacagtgttcacttcaattcaatgttggacgagagcaagttcgaggtgcacctcaaactctgggcccttcgaatcccttgccaacattgcaagctcgccacgagaatcctcaacggttacttgctcgacaggccccgagttaaacccatcgccgaggacccaacctgtgacaaaaaccgttaccttatactctctgacaatgttcataatcaagatttatctgatattccaaaacaaaagctagatgagctc

SEQ ID NO: 29493 - DNA, 274 bp, Glycine max
acgtacagaacttgaaaacacaattcaattccttgtttccttcccaatcaacacatagaaccagagtgcaaagcttttgcagtcaccaagaggaccagtagaaatcccacaccatggattcgctcctagaactgaaaaccgcactggaaccgttccgcgaaacactagtgttcacaatcccattgactctgttgctgctgggcatagtgtcccgaatccgcagaaaaacggcgccgtatccaccgggcccaaaaggcctccccctaataggcaa

SEQ ID NO: 29494 - DNA, 456 bp, Glycine max
  unsure (1)..(456): unsure at all n locations
tctttgacgggtgttggcggttgcggtttccgttgtgctgaatcttaaccgttattttggggccctcaaatcgccgatactgtgttcactttcattgccggtggcggcgaagccaccgtaccagccaccgacaccgtccaatccatttcagcctttcgaattacgatgacgtatttcgaggaggacgccattaacgatgacggtgatcgcgtgagggacgtcgagcgcaatcacgacggcggaggagaatacgtcaaattggtttgggatccacaaccggaggccgtgcccactcaccggggaggatcatcgcgcctctggtattgggttaaattggtgctctgtttcttatgtctgggcctcttggctctcgttgcttttgaatgggttgccccactcttcatagaanaggtgattattcctataataaaatgggagacgaacacgttcagttct

SEQ ID NO: 29495 - DNA, 434 bp, Glycine max
cgttttcgtgggtgaacatctgactcgacacttgcctaggcagtggttaacatctgcaacccttgagaagaatgcaggaactatagactctttagatgatacgatgatggtaattgaagcccctcggcaatcagacttaatgatagaactaataaagaaattgaagcctaaagtggtggtgactgggattgctcattttgaggctgttactagttcagcttttgtgcaccttttagatacaacacgagacattggatctcgtcttttcttggacatatcagatcactttgagctatctagccttcctgggtcaaatggggtcctgaagtatctttcaggaactcctctgccctctcatgcagcaattatatgtggactggtaaagataaggtttatccggatttagaagtagcttttgtcatttcggaagaaga

SEQ ID NO: 29496 - DNA, 341 bp, Glycine max
ctcaacgacaaccattttctattttctagtcacacaacacaacacaacaaccttcctccttcctctttcctgtgttgttgtgtgctgctatggggcgagggctgggtgttgtgctggtgttgttggccgtgtactgtgggctggacccgttccagcacagcccaatagcccacttcccggacttcgaggtcaagagggtcgacatgcccgcatggtccgaggttcccaccgaccaagacaagcacaatttgttgcagaagtcagagattaagttcgcgaatcaggtgcagggaccagaaagcattgccttcgaccctcttggtcgtggcccttatactggt

SEQ ID NO: 29497 - DNA, 357 bp, Glycine max
gcttccttcttgttcgcaattaatggctagtaagattgaaaagaaagccccgagggttgaacggaggcatattgaggcgcccaaaaatttgatggaggtagtcttcatattagtcgatgccataacgtcgcttggttacaccgagagacggcaagtctccaacttgcccagagccctcgcttccgctgtgttggacaagggtaagaaaacagttgcaagagaatgcggtgaaagaagtgatcgtgtacaactcaagtcccccgaagttataaaggagttatatgagataaagaaattgctgacacggaccatgctttttagcagcagaaaacgggttcttgggtttttgtttgctgc

SEQ ID NO: 29498 - DNA, 496 bp, Glycine max
aagttcctcagcgcgcagagcccatgcctatgatcatggacgagctgccgccgcagtcgtcgaccgagcagtcgtggctcggagggtggttcggtggagggaacaaagaggagactgccaccaccgccggctccggaagcgagacgaagattctggagagttttgatgcgccccctgtgcccaattttgagtataagtaagtggagaagttatcccatggttcagttcagaccagaccaacgtagtcctaattgatctccacatgtcatgaaattgcgtgtcatagttaattggaaatgcttgactagttgtcttgtagagattgattgattgagatcataaaacatgtggtggtctgagactatctaataatttctcaagtaattggggtttggttataggggttagttattttttgtggaagagttgagaagttaaatattgaatttgttgttgaacctcacttgatgattgtctatcatacaatgattttgtt

SEQ ID NO: 29499 - DNA, 425 bp, Glycine max
ctctatcctccaaccttaattaaagaaaacaggttttgtttttgtcaacattttcattgaatttcaagaccttaatgtgttgtccccctcaccatcaccacccacatttatacaccacctaggtttgctctcttctcccttctccatactccttcatttctcattggtttaatggtctttgaatctgcttttaattctctcctcagccatcattgattcaaagctagtttttttttctctctatttgataataacaaccatgtacttgtttcattaactttgttcacacccatcttcaattggataacaaccatagcctacctcaagtagatttcccaagaaagtgctatttgttttctctctaatcccttacattgttgagttcttctattcatgtattgtgttcatattcaagatctgaggga

SEQ ID NO: 29500 - DNA, 431 bp, Glycine max
ccctctctttctttgttttccgtggaaaccaacctatcttcctttgttattttcattctgataaaacaaacatattttcttccacctttttccatctttgcaaaggggataaagggttgctagttgctaccatttatggttttattccgccatttgaaggaaccttatgctcttaaaacaaataaaacccaaagggttctcttgaaaaacaccagaactttcatctaatcaaaacacgtgttggccaaaaacatcaccttctctttattatcgcatgcaagagcttttttagatgctcctttgtgttcaagattgagagaaaacataacctgggtatgatatgactacgagcatgccccgttaatgtttcaacggtttttgtttctttggttcattttcagacacccccatattcttcttctcaattgaaa

SEQ ID NO: 29501 - DNA, 370 bp, Glycine max
tgattattcgaccgcgaaaccagatggagctccagatggcgtaccaagacgcgtggacggtctgcctaccggacttcaagcggaccttctcttctcttgaagatgcctgcgagaggttgttgccttatcatggtgtggcagactatgaagaagaagaggatgataggattcttgattctgacactactggccagatgctttcacggtcccagcagtgggataataatattactgctaaaattgctgagttcacggcaacttttgagaaacaagcacttgccttcaacataataacccagacgagaggtttgggggagttccggtctgaggagagactgatgattgagcaggcacttctccaagaagaaaa

SEQ ID NO: 29502 - DNA, 774 bp, Glycine max
ggaattggagcaagatgtcaccgaggatgaccctaaacagataattgattttcctggagggaaagttggatttacttctgaaatgagattcatttctgagtctcctcagaaaagggtgccctgttatcgtgttcttgatggcaatggtgagatccttaaatacagcgactatgtacaggttggcaaggaaatgggtgtgaagatgtattctgacatggtcactcttcaaactatggacagcatattctatgaagtgcagaggcaaggtagaatttccttctacctcacccaaatgggggaagaagcagttaacattgcatctgctgctgcactttctcctgatgacatcatattgcctcagtaccgagagcctggagttctattgtggcgtggttttacactgcagcaatttgttcatcagtgctttggaaacacacatgattttggaaaaggcaggcagatgcctatacattatggttctaacaagcacaattacttcacagtgtcatcccccattgcaacacaacttcctcaagctgtgggggctgcttattcccttaaaatggatgggaaaagtgcatgtgcagtcactttttgtggggatggtgccaccagtgagggagattttcatgctgctatgaattttgcagcagtaatggaggcccctgttgtttttatctgtcgtaataatggatgggcaatcagtacacctgtggaagaccaatttcgaagtgatggtattgtagttaagggtaaagcttatggcatctggag

SEQ ID NO: 29503 - DNA, 675 bp, Glycine max
agctcgagccgtgattgtatctaactactacaactatttgatatatatagtgtcggattaatttttaatgtccaacttgttatgatgtaacattaaaataaaagggagaatggaagcaaagttgagcaagaaaaccgttttggagttatccgaagaccataaagttgatgagaagggaagaatcagcacctataaagttgaattcattgtggactctgattttgggatccctggtgctgttaccgtggttaacggctttgacaatgagttcttcttggaaagcataaccatggcacaaaatgttcattttgcttgcaaatcttgggttcaaccaaacaagcttgacccagagaagagaattttcttcgttaacaaggtgtatctaccctgtgaaacaccaattggggtgaaagaactaagagaaaaggaactgaaacagctaaggggtgatggatggggacttagggtatcttctgatagaatctatgactatgatgtatacaatgatttgggtgattcagacaaaggagataggtttgcaaggccaacactgggtggtcaacacaacccttaccccacacgttgccgcactggacgaccaccatctaccgttgatacgaaaatggagtcacgaccgagtgatgaatcagagttaatatacgttcctagagatga

SEQ ID NO: 29504 - DNA, 353 bp, Glycine max
ctcgagcgaatcggctcgagttcagttgctgctgctagtgctcatcgcactgtcacgatcacgaaactctgaagaatcaatggtggggaatagtgaagaagaccgagatggccttcaccaatcgccgttacgaatcccggaattgctctatgtttcggtgaagatggagaatcccaatctcactctctctggggaccttctccctcacatatctggctcttgcccttctggggatccttccaaagctctttctatggaacgggaatcagcgtcagtgtgggagttgagctttgatgttccacctaatcacgaagctttagagttttaagttccttttgaagcccaagtacatc

SEQ ID NO: 29505 - DNA, 544 bp, Glycine max
tatgatccaaaggaagttgagacgattctacaggttgcattgctttgcacccaaggctatcccgaggatcgtccaaccatgtcagaggtggtgaaaatgctgcagggagttggcttggcagatagatgggctgactggcagcaacttgaagaggctaggaatcaagaattctcactcatgactcaccaatttgtttggaatgatgagtctactcttgatcaagaagccatacagctttccagagcaagataagcagagctggagagtcaattttgaaatttggttgcttggtatggcatagaatataacatatactgatatactatacttatgtgtaatttaatgttctctaaagaaaaatgtataattaactaaaaaagcctgtgtttatataatgctggatgtacgatggaaaagaaaggaaaggaatgagggggatttggcacaggcaaacatattcgaacaggagaaaatttaggttgcaaatgtatatatcccaactgtgttgcttttgtaaccatggaaattaatggcttgtgcttgc

SEQ ID NO: 29506 - DNA, 355 bp, Glycine max
aattattctcctccaaaattgaagtcattttctgacagccagatatgctgttcatccaaaggagatcttgttttggtgaatggtggccaagaaatttttgtcgtctccctgttggtccaaagacatattttcaggcttttggactctattagctgcatctacaggcaagcaatgaagctgtcacaagaagagcttgtccctagcccagtcatccataaggcatagagaaagggtatattcagctctgttatcaaagattgtactggcagtaaagaaaagcatgctcccattttggaaacagacgatactagagatagcatcctggaactctcagctatcttctcaaatgaaaatt

SEQ ID NO: 29507 - DNA, 1084 bp, Glycine max
tttcatacgcaaagacctcaatattgagtaatcacgatgttcaagagaatatggtgagatagatatacattacagggtatcacacaaatctgaaagaaatttgtcaaacattctatgattcagaacgctgatatgagactcgaatcagggacttgtaatgtgtgctcagctttggatttcacttgcattcatcctaaccgagctctcatggggtcaaaggctgaagaattctctgatgaaaactgtcgcttaggggaggttaatcagtattgtgatgagagtgatagatcttctcttgggagcagagcttgtgaaaggttgaagcatggtgtcagtgaaaccagtcacaagcctagtgtttcttccactcatgattctctacctgaaaatgctgagaacagtcaagccttatcagagaagtatcaggattccaagtgtttagaaagtcttgatgatagcacttcttgtattagtaggaccagtaatgctaatttagcgagcagttgccatcagataaatacagacagaataaatatatcttgtagttcaacttcagttagtcacttagtggcagaaggatctggaaatgggccaactgttgacatatctagtttgtcagaatgttgtatggaaaatgttgattcatcattgaccaaagagagagtacctattattgttcctggtgaaaaatctctggcagataaggaaaacctaaataatggtacagccaaggtttcaattgaaatatgtccaaagtcagaagaagatactgaaaataatgttgatgttgcggaagatgatgatcataaatattcagcccatgatggattgcatgagaaggttgaggagctgattaaatcatctggaagggctgaacctcaatcagaagatgagagtgatgaatcagatgttgttgagcatgatgtaaaagtatgtgacatctgtggagatgctggtcgtgaggatctacttgccatatgtagtaggtgcagtgatggtgcagagcacacctattgcatgcgggaaatgcttgagaaggtccctgaaggggactggttatgtgaagaatgcaagtgaaatccaa

SEQ ID NO: 29508 - DNA, 447 bp, Glycine max
caagtttcaatttttttgggttaggaatttgctttgaacggaacaagaatccaatagaagacagaagaagatgtgggtttcggatcataggttgtttcttctctgcattctttgtggcctctgtttttctctgcagttcacaacgggtcatgcaggttcaaatgctggaagaactttgaatcaggagggtggtgatcatcaaatacattgctctagagaaagaagtagaacagcttggaagatcattcaagagtatttgatgccatttgtggagaaagaaaaataccacatctcaaaaaggtgtatgcttcaccctgacaatgacatatacagagatcaggagcaacataagtctcatacagatataaacgaatggcagtgtaggtactgtaagaaaagtttctatgaagagaaacatcttgatcagcattttgacaacagacactc

SEQ ID NO: 29509 - DNA, 331 bp, Glycine max
caccaatgtttcaaccgaggcagataagctttcatcattcaacaacaatggaggaccagattctgaaggaggaactaacaatggaggaggagggtatggtctgagggagaatccaaagaagacttggcggttcaatgattcgagtgaggacaacaacaacaacaacactactttgttggtgttggacaagttgtgcaaagagtgtggcaaagggtttcactcttggaaagctctgtttggtcacatgaagtgccactctgagaaattgtcccaaaacaacaacagcagcagcagcttattattggaggatcaagattcgtggaatgataat

SEQ ID NO: 29510 - DNA, 296 bp, Glycine max
cacaaacataatcatcaagcacacacaatctcactactcgaaacagatcgaatagagatatatatagttagagagagagaatattatacagagagataagtgcaataatggagtgttgtaagagggtatatgagtggttatgcaattcaaaatcatacttgataatattgagcttgcaatttggctccgccggcatgtaccttatcaccatggatgctctcaataagggcatgagtcattatgtgtttgtcgtttaccgcaatgtcatcgccactattgctcttggccctttcgca

SEQ ID NO: 29511 - DNA, 280 bp, Glycine max
gggatgtgatttcaagccaggatgcagttagttttgtgcggcgtggattaagaaggcatgacgatcctcaacaatgtgccagagagcttgttaaggaagcattgcgcctacacacatcagatgctcttactgtgattgttatctgcttgtcccctgtccaaagcattgtcgaatcatgtccaccccagaggcgaagattcagagcttgttctctgtctgaagacgccaggaaccagattaaggagcttgctagagggaaactgaatgtaaatacggttct

SEQ ID NO: 29512 - DNA, 402 bp, Glycine max
gagagacttaaagaagagggcttcttaacagacataatctatgatgacgaggttatcactcggttaaaggagagacttcaagttaaaactgataaaaatcttcctatggttgataacagaaaatactctggagttaggaaatcgactcttggactatcaggtggcaaagaattaatagccatcatccgagcttcagggagtattcgccgtatcgagagttcattaagtacccgtagctctggtatcattggagagaagttaattgagaagatacgcaaagttagagagtcaaataaatacaaggctgctattatccgaattgacagtccaggaggggatgctcttgcttctgatttgatgtggagagaaatcaggcttctggctgcctcaaaaccagtcatt

SEQ ID NO: 29513 - DNA, 475 bp, Glycine max
gaaaaagatggaatgttccttatagaagttgaccgtgttcttaaacctggaggatactttgtgttaacctcacccacaagcaggtcacagggaagttcatcacaaatgaaaaggaggaacatgttgatgccaatggaacagctgacccagaaactctgttggactcctctagctcagcaagatgagacattcatctggcagaagactgctgatgttaattgctatgaatctcgaaagaagcatgctataccattatgcaaagaagatgatgatgctcagtcgtattatcggcctcttcaaccatgtataagtgggacctctagcaagcgctggattgcaatacagaatagatcctctggatacgaattgagttcagctgagcttaaaatgaatggtgttcagcctgaagatttttttgaagacttgcaattctggagatcagctctcaagaactatcggtctttgcttacaccac

SEQ ID NO: 29514 - DNA, 275 bp, Glycine max
cttctttctcttgttagtgcctaaggcgactgttcgaggagaacgcataaaatgcaaggatataacgcgttgaagtatttcctcactattgcagctgtttgcctaaggacagcttatactcttcatcaaggaatgggattgacagtgcatggcctggatattctcaatatctacagccattttttccacatattgggaccttgtcttagattggggcctcctccaaagacattccaagaaccgctggctcagagacaagcttctagtccctcaga

SEQ ID NO: 29515 - DNA, 318 bp, Glycine max
caaaatgatccggaaaagggttgcagaaggaaaatccctctttcccaaaacacccaatttctgaggcttgattatgtgaactgctcaagtgacggtcatttgaatgatcttaaagctgataactttgccatgtgcgaggcagattgctcaagagaaaaaacctgtcttgggtttggattcaagtatgatggatctggctactgtatgttcgtgaatggcacaaatcttcaatatgggttttggtcaccaggcactgaggctgccttgtttgtaaaggttgacaaatccgagtcatcagtttccaacttcattggcatg

SEQ ID NO: 29516 - DNA, 483 bp, Glycine max
gacaaactctggcgcaggagcttcagcagcagcaccgccgccaccaccgcgactctcgaagggcaagaaatgggacgcgctgataatcggtggcggccacaacggcctgacggcggcggcatatctcgcccggggaggcctctcggtggcggtgcttgagcggcgccacgtgatcggcggcgccgccgtgacggaggagctggttccagggttcaagttttcgcggtgcagttaccttcagagcctgctgagaccgtccgtcataaaggagctggagttggggaagcacggcttgaagcttctgaagcgcaatccgtcgtcgtttacgccctgcctcgacggacgctaccttctcttaggtcccgataaggatctcaatcactctgagatctccaaattctcactcaaagatgctcaggcttatccaagatatcagactcagcttgagagtttctgtaagttcatggatctagtgctggattc

SEQ ID NO: 29517 - DNA, 282 bp, Glycine max
gtagtgttcgtctgcgaaattgaaggtgatgatggattgtggggtgaagagacgtgagagtgtgagagaggaagatgatgaagtgatgatagtaacaccattgggggctggaaacgaagtgcgtcgttcatgcgtgtacatgtcctataagggtaaatccatattgttcgattgtggaatacacctaggtttttcaggcatgtccgccttgccctatttcgacgagattgacccttccaccctcgatgttcttctcatcactcactttcacttggatcatgc

SEQ ID NO: 29518 - DNA, 279 bp, Glycine max
ctctccagctaaagcttgtagcaacctcagacgcgaatctcccattctgctctgcctgcatgaacagacacacatagtcacattccatttccatgtctgcgtcatgcccggtggtggactgtgtgttcgtgctgggctgcgcgcggtggctgtggaagcgctgcacctacgtgggcagctacgacagcgccacgtggccctccgccaccgccgacgagttcgacccggtcccacgcgtctgccgcctcatcctcgccaactacgagcccgatctccgta

SEQ ID NO: 29519 - DNA, 312 bp, Glycine max
gaaagaacagggcaaaaacagaacagaaacagagatgggttgcaatagctccaaggctgagccaccaccgttggaaaacaccatgcatcatcatcatcatcatgcagacgttgcagagttcctaaaacccaaaaccctaaaagaagaagtagtgctacagatcccaggatgcaaagttcatctgatggaccaaggcgaggccctcgaactcgcacaaggtcacttcacgatcatgaagatcatggagcagaacgtggcactagcaaccattataaaagttggaaacagtgttcaatggcctctaacgaaaga

SEQ ID NO: 29520 - DNA, 386 bp, Glycine max
ctgctattaacgatggcgatatcctcgctgttccaattcccgcttgtgcttcgaattttccgaaatccgcctctgattttggcttgcttgtccctaatggaagctatgccattaccgcggggcactgtgtgcaatgtagctgtggacccaaaaaccttgatttgtactgtatgccggcttctctggctgtttcttgctccagcatgcaatgtagaggcagcaaccttatgcttgggaatgttaccgtgcagcagactagtggtggttgcaatgttactgcttgcaattatgatggcattgttaatggcagcattgtaacaacgttgtccccttctcttcagcctcaatgtccagggctgcaggaattccctcctcttgttgcccca

SEQ ID NO: 29521 - DNA, 436 bp, Glycine max
tgtaatcaattgactaaaaataggaatctgcttttgatttcatagtataattgagtttacacccccacctgcacagtccgaaaaagcctccattacagatgtattccaattaccaaacgctttttgggtttccactgtctgtggaaaaactgaagattatgaagataaacaaagtggtgtcacttccttcagcggcagctcttaaatctttctgttccaagacctgttgaggacagctagctagcatattgaaagatcctgtgcacagacttgaaatacgttcagaaatatggacatggtaaataatgcaaactcagcagcaacatcatcaccatcacaaacgcaggtggttgttcctatggcttctgctcaattttcaagcccttccgttgaattaacaacatcttcaccaccggcacatgtggttcagatgggc

SEQ ID NO: 29522 - DNA, 371 bp, Glycine max
gtaaggtccgcagaaaagataattctagtgaagagatggatagactaagacgtttgtggatgtctcttcttccatttggatttctgttgttctttagttcagctttcatcggagtacctggtgcccttgcctggagcaaagagggtcatgttatgacatgccaaattgcacaggcacttttagagcctgaggcatcggaagccgtgtaccaattgttacctgaccatgtcaaaggtaacctatcagccctctgcacatggcctgaccaaattagacactggtacaaatataggtggacaagtccacttcattttattgacacaccggataatgcttgttctttccagtattcaagggactgccatgatccc

SEQ ID NO: 29523 - DNA, 313 bp, Glycine max
cttgacagagagtagattttctttctgtttgggcagcaccacagtcactaaatcagaatccccacccaccactgggtcagcgatagaggaagcagagaggggtatattttggcgggtttctatgtcatatcaaacttttccctttagggttagaatagaacccaacaaaagaaagaaaaaaaaaacatagagagagagagagagagaggaatcaatggaagaggaaggcatagggttagtgttggcgagagccacagaacttcgtttgaaaatcagcaactgcatccaaagagccaccgctaatggcccctcg

SEQ ID NO: 29524 - DNA, 420 bp, Glycine max
  unsure (1)..(420): unsure at all n locations
accagaagatgccaaggctagtttttgctgcatgtatcgtctcacttgcatcaattgctttggcagctctgcctgtgacatatatctttggtgactccttgacagatgttggaaacaataattttctacgatattctttagccaagtctaactatccctggtatgggattgactacagtggtggccaggctactggaagattcaccaatggaaggactattggtgatttcatatctgcagagcttggaatcacatcaccaccagcttatctgtcagcgactcagaacgttgataccttactcaaaggtgtaaactatgcatctggtggggcaggaattctcaatgatactggactntactttattgagagattatcttttgacgatcaaataaacaatttcaagaaaaccaaagaagtaa

SEQ ID NO: 29525 - DNA, 505 bp, Glycine max
tgatctcttctcctctcaagttgttaatgccaagtcctgttggtgttgctactgtaactgcaggaatgtactgcatgagcagatatgcaactgatattggtgtcagaagtgatgtgatcaaggtgccagtggaagacttggctgtgaaccttggatggatttgtcaagaggaggaggaggtagctgaacatgaaaatccagacagacagattaccaccagatgatctagcattgctcttcatccttactatgcacatgaaactgttgcatgtgtcactgttagttatacactagttcatagcagatatgtcttcattcatgttatatcttctgtgattggtgtctagttattcaagttgtgtctgggatgaaaatggaacaatattattacttatagtagtaactataatgtgatgtattcctttgcagacaaattttcttctagttgcctataataatgcaacattctacccacaatagtgatggaccaacctggtggtgcatc

SEQ ID NO: 29526 - DNA, 266 bp, Glycine max
tggtcactactgaaattgtaatgtaactcggatattactactactgtagtgcagtgaatgatcagtgtgtgtgttagggtgagagagagagagagagagattggtgtattagatcacatcaacaattaaggggatggatgatttgggtgtgtagtcgttggagttgggggatggtgtggccaaacaccaagagggacggccattagttctgtgtgtcggggtcggtgggacgcacaaatcagaatcaggatctattactggtgtgg

SEQ ID NO: 29527 - DNA, 294 bp, Glycine max
ctcgagccgaatcggctcgaggaaagagtgaccgagagcgatcgagagagagagagagagagagagcccgatcttcctctatcgatctctgctctttcctcccccctttcaagattcgttgcattttctcatttctcgcgaattccgaaatcgcgttccgttggctctcgattcccacgctccacgttcacgattttgattgagatgaaacttgaaagggcttgatagtcaacaagggaagagaaagtgccgaggcccaggttcatgggaaagtgcttctgttttggacaatgg

SEQ ID NO: 29528 - DNA, 357 bp, Glycine max
aataggtggtttggaggctatgaatttcattgctgttgccgcacctcatctaggatcaaggggaaataagcaggttccatttcttttgggggtacctgcttttgagaaggttgctagttgtgttattcatttcatttttagaagaacaggtcggcatcttttccttactgatgatgatgaaggaaaacctccattgcttaaacgcatggttcaagactacggtgatttgtatttcatgtatgtctgttgcttcttacattattttccttttatatatggaatttgttgagtttgattcctttaaagaatcttcacgtcttctgatttctttgtgcaggtctgcattgcgtgctttca

SEQ ID NO: 29529 - DNA, 306 bp, Glycine max
cacgcccagagagagagagagagagttgtggaaatggaagaaggtgttggcgccatctttctcgactccaattcagagactgtcggacttggaggtacaaaagcaaagaaagtgaaagtgctgaagggagattccgttcctgttggaacggaagtgagagcgaacgtgggagcttcccagaacaaaattcttgctgacataagcaactttccccaacaaccaaagcaacacatctctgttgaccaccttctcaaggaaaaggaaattttgatcaagcatcttgctactagagatgccgttatagaa

SEQ ID NO: 29530 - DNA, 251 bp, Glycine max
ggccatgcagcagctcctaatgacaagattttggaagatggagacatggcgctgtttgatatgggagctgagtaccatttctatggatctgacataacttgttctttccctgtgaatggaaagtttacaagtgatcaatctcttatatatagtgctgtgctagatgctcataatgccgttatatctgcaatgaaacctggaataaactgggttgatatgcacatattagcagaaaaagtgattctggagtc

SEQ ID NO: 29531 - DNA, 280 bp, Glycine max
tctagaccataacaactctctatcactcacaacactttcacaaacactttctgaaaaacaattcgtttcttttccctaccatggccagatcacaacagcgataccgaggcgtccgacaaaggcattggggctcttgggtctccgaaattcgacaccccatattgaaaactaggatatggctagggacttttgaaactgctgaggatgcagctagagcctatgatgaagcagcaaggctaatgtgtggcacaagggcaagaacaaacttcccttacaaccc

SEQ ID NO: 29532 - DNA, 416 bp, Glycine max
gcgttgtgtcgttcacaaacccgtcaaaaccgaaaacgtctctttctttcatcatcgaaatcaccgccatgtgctcagtgataagcgcgcaaggggtggccgttgcgaccgccgtggccgtctccggcacggtgatcctcctcgccctccgtctccagaagtctttcccaccaccccaattctccgttcaccaccaaatccctccttctccttctccggttctgcgatcttgcatatccaatgtagggaagaagagcaagaagaagaagaagaagaaaagagtgcactttgcggaggacgtggtggagtcgtgcagagacggagaagagttcaggaagcgaaactcacgatcgaaggttctgaagagttattataacaacaacaacggggaagaagaagaagaagaagcgaagatc

SEQ ID NO: 29533 - DNA, 549 bp, Glycine max
cctcgagcggatcggctctagagagacccttgctgaaggttaaatcgttcaagtcacagttcgcagagtgcaagcccagaaagcaatatgcgggcttgaatctggaatgactggaatcctcttgaaagaagactatacagatgactggagagatataattgaattatctgataggctacatgaaggtgacatgctcacttgtaaaattaagtcaatccaaaagaataggtatcaagtcttccttgtatgtaaggatagtgaaatgagaagtaatcggttacagaataaccgtgatattgacccctattaccatgaagaccgaagctgttttcagagtgatcaagacaaagctaggaaagaaaaggagcttgcaaaaaagcatttcaagccaaggatgattgttcatccacgctttcagaacataactgcagatgaagcaatagagttcttgtctgacaaagatcctggagaaagtattatccgtcctagttcacgaggaccttcatatcttactttaactctcaaaattaatgatggagtatatgccca

SEQ ID NO: 29534 - DNA, 281 bp, Glycine max
cctcgagccgaatcggctcaggggaaggccgtacttggcacacagcattctggtttgacacactcgaatatcactgaacgagagaagaaacattttagtacagaaaattaacatagtattctggttcgaaactaacaggtgctacccttttaagctatcagtttccttcaatttgtaggattgtgagttgcaagcagggacctcttgaatcttgatggacgttgaattagctgctaagagtgtttctaggagtgaggaattggatgatgatggcagaatca

SEQ ID NO: 29535 - DNA, 330 bp, Glycine max
cggctcgaggagactttgagtcttggcctctccactgcctccagaagctaccaatccaggctcaagtcacacttcgagctattcatcgattttgatgagggcaatggggacgaggagttgaggacggcttatccatgccctttttgcactgaggattttgatcttcttgagctatgttgccatattgacttggaccatcctgtagaagccaagtctgggatttgtcctgtttgtaccatgtggataggaacaaatatggttgatcatatagcactacaacacggaaacctgtttaagagtcagctcaaatcaaaatgctacaaggatgaa

SEQ ID NO: 29536 - DNA, 375 bp, Glycine max
cactatgattgatctatttcccaatcaagttcttagtggcactaaaggacaaacaactgttgaaaaaagatgttgaggaagaatcagctggtgctaaaaagacagctggtgggtgaggaggtgcaggttccaagagaagccgtccagctgaagtgcataatctatctgaaaggattatgccaatgggaggtggtttatatatgcctccaatgatgttaccagcaagagagagattggttgtgatataaacaggacatatgcactcaaaaacataatctcaaaccaaaagagacaagcctggattctcgaaggcaacgggaagagacaaggctgtcatgaccctccacagggaatagtaagaggaaagatggatca

SEQ ID NO: 29537 - DNA, 272 bp, Glycine max
ctcgagcccttcagacagagcaacgatggtggtgagtagagttacgatttacctccccttactattcggctgacgagtcggatgttctcacgttagatcactcaaacttctccgacactgtgagcacgtacagtctcatcgtcgtcgagttctatgcaccaaggtgtgtttccattctcgtttgtttcgattggtgttgtttactttgtcagtgtttaagcaaatcagtgtggtgtgtttagagtgttgacaagtttgaccgttgaaacttg

SEQ ID NO: 29538 - DNA, 277 bp, Glycine max
ctcgagccgtttcggcctaaaaggtgacgttaaagcagagaaaggcaaagagtttccgagaaacatagatgacaaatttaattcaaaagacgtagaaagaacgcatcttcaactgaactcaaagggggaaaagataaaacatatttccaaagccacacacttgccagcttttcactggggtcagaaagcatcaaaaagtcatccagaaaagggggatgttaagattgagaaatggaggtagcctaaaatcaagagatgggattgaatacatcagtgg

SEQ ID NO: 29539 - DNA, 455 bp, Glycine max
cttcaattgaaagttcacaggaggctgctaagaagtccctggaaaaagctgctgagcgtgtgagatgccttgaggatgatttagcaaagtctaggagtgagattattgtattacgatcagaacgtgacaagagtgcacttgaagcaaattttgctagagagaaacttaatgacattatgaaagaatttgaacatcagaaaactgaagcaaaaggcattttagaaagaaatattgagttttctcagctggttgttgactaccaacgaaaattgcgtgaaagcactgagtcattgattgctgctgaggagctttcgcggaaactttctatggactgtcagttttaaagcaagaaaaggaagtcatatcaaatgctgaaaaaagggcatccgatgaagttcacagtttgtctgcaagggtgcagcgtttgcaggctagtttgagtaccatacagagta

SEQ ID NO: 29540 - DNA, 416 bp, Glycine max
ctggtgaacaatgccgcggcggttccaaggcttgggatgaaagggtacgagtggtggtcggaggcactccacggagtttcaaatgtgggtcccggagttaagtttaatgcacagtttcccgggctactagcttccctcaagtcatcaccaccgctgcttccttcaatgcttctctccgggaggccatcggacacgtagtgtcggatgaggcaagggccatgtacaacggtggaacagcagggctcacgtattggagcccaaacgtcaacattttcagggacccaaggtggggccgtggacacgaaactcccggtgaggacccagtgttagccggtacatatgctgctagttacgtcaggggactacagggaacggacggtaaccggttgacggttgctgcttgttgcaaacacttc

SEQ ID NO: 29541 - DNA, 320 bp, Glycine max
agaacacaacaggttgatgctcatatttgtttgtggaagtggaatgcaagaattgtaatttcagacgttgatggaactattacaaagtctgatgttttggggcagttcatgcctttagttggcaaagattggacacaatctggagtggcaaggcttttctgtgctattaaggaaaatggataccaactactttttctgagtgcccgtgctattgtccaggcatatctaaccagaggcttcttgcttaacctgaaacaggatggaaaaaccttaccaaatggacctgtggatatctaacctgatggattatttccctcact

SEQ ID NO: 29542 - DNA, 442 bp, Glycine max
ctcgagccgcaagcatgcccaagaaaattcgagattacctcttcaaaataaaaaaccctcgccctcaagtccggttaccctctaagaactggattctctctggctgcaagcatcctaggaccccttcctttgccttgtacagtggtagaaaccaatctcatcataatcctgttctcaacaacaataacaataacgatgctgccaccttagcagacgttgatcgtttcctcatggagaatttcaagtctctatacctcaaagacgaacatgatcatcaaaaccacgaccaagaaattacaacgccacgtgatcttcctggctcgacccgattctttgtgaagcctgcagggttctctgggtccctagtggaggatgctttcacaagtgacgaagcagcatcaatctcaacaatcaacgatgtttcttcttcaaattcttatga

SEQ ID NO: 29543 - DNA, 422 bp, Glycine max
catgtttccggcatgcttagaacataatgatgcaggcttgcattggaaccacaaaacaagtacaaaattcagacaaaacctcatggacatggtgatgtgcatgcgcttctttattcaagtggcattctgaaagtatggtatgaagctgggttgaaatgggttctattttttcaagatacaaatgggcttctcttcaaggcaattccatcagcactgggcgtcagtgctgccaaacagtaccatgttaactctcttgcagtacctcgaaaagcaaaagaagctattggtggaattaccagactcactcactctgatgggaggtctatggtgataaatgtggaatacaatcagctagatcctcttcttagagcaagtggataccctgacggcgacgtaaattgtgagactggctactccccatt

SEQ ID NO: 29544 - DNA, 310 bp, Glycine max
gtgtaaggcaaaccaacccaaccaaattaccaaagttacaaacttcccaagagaagaaaacaaaaatatcacataaaacataaaacgtgtttttgttcactaaacatcaaagagaaaaaaaatgcttcttaaccacattggcgccggattctactggatcgacccgccacgacccgatccgaaacgtcaaacccgaatactctcctctagtttaaaccgccggcgggcgtcgccgccgtttccggcgaggcatgcggctttccacggcgtgcgaatggagaagaaaggcgataagccgcggtcgatatgc

SEQ ID NO: 29545 - DNA, 463 bp, Glycine max
gtgctcgggaatattctttaaggcagttgctccttgatgttccaggacatgttgatatggtcatatttcctaactatgagagcagtatcgagcgagatgatatcaaagaaccttttagtgaggtatcgatgtttaaaaagaattatgaccatcttccaaaggatacatactttggcatgtataaagattctgtacgtggcaatccaaactacttcctgacttacgggaatggaaaatcagctgctcggatacaagatcatcttcggcctaatggtgcacatagatggcataattatatgaaaacccctaatgaaatcaaattggaagaggctgctgttttacattacacatatgctaaattctcagacttaacttctagacgtgaccgctgtggttgcaaacctacaaaagaagatgtcaaaagatgcttcatgttggaatttgatagatctgcatttattat

SEQ ID NO: 29546 - DNA, 448 bp, Glycine max
ggaaagatacctggccaaacagcagggtgaagtggtagtggactctatatagctaagttttgagtaggaaattgtgttactgcgggaaggtgactttagggaaacaattatatttaatcgcaacgtttggcttagcgaaaattaaagtggtgaatgactagcgtgaagtgttcttttgagaaacttatgattggatgagaacatcctctattatgtacataagtgtcagtgtcattgcatttgggtttcctggaatgatattttgatggattgatgtaaaatggtagttttttgtaagatggatgatttgctgtcatggcatggtttcatggtaaacttcaattgttgagattctcatccagaaaaagggttgatctttagcatggtgtgaaactctgaaatgtgaatgtaagtagaaaagttatatattacctctcatcctttttta

SEQ ID NO: 29547 - DNA, 277 bp, Glycine max
cgcaaagtgaggccactcaaaaaacaatcacttcttagcttgatccttctcagcaagagatccaggtttttaagtttttagcctcttatttttgttttatcgaaaaagaaaaaaagaaacaatcacttgcaagtctttagttttctcctccctgttctctggttttggaattgagacaggctctacttataatttggaaaagtttttttctttttgtttgggttttcttaacttgttcttcgcatatcgtaaaacatgggaaccgctataggcatgt

SEQ ID NO: 29548 - DNA, 333 bp, Glycine max
ggagataggtccaagctcattcagtgttagccgctcattgaccctggatgaataatcggctaccactactaccagtggtgtagtgctctgaaactgcaacagcaacagcaacgcgatggggagaggaaaaagagggaagagtcgcactcaaagaaagcatttccagcagtccagagagcacgtctggacatcttccaaacgctctaaatcagatccttcctccgaaaatcctattcctatctgcaatccctacgccactcaaaacctcgctttggatcactattacaaggagcagggaatcgtttcctcagaagaatgggatgcattcgtgca

SEQ ID NO: 29549 - DNA, 620 bp, Glycine max
ctcgagccgctcgagccgattcggctcgagggcgatcccacatcgatcatgatcctatttcgtaaggaattgaatcacaccccatagaatagtatatatcaagcatattgacattaatatatttattaacaataaattggaggcaacccaacatttgaagaattgaacctgccattattgtaagtaagaattgggaaaggaaggaaggagatgaatctccctatcatagatctgtcctcacctgatcctctttccactgccatttccatccgtcaggcgtgcattgagtatggtttcttttaccttgtgaaccatggcgtggagaatgacttggtcaaagcctttgatgagagtaagaggttcttctcacttccaccaggagagaaaatgaagttggcccgcaaggaatttagaggttatactcctcaggatcctactttaggcctccatggtgattcaaaagagagctattatattggtcctatggcggattcagcaagtgttaagctgaatcaatggccttcggaagaattacttgaaaattggagaccatcaatagaagccatctactggaaactctttgaagctggaaaaaagttgtattctctaattgcactttc

SEQ ID NO: 29550 - DNA, 273 bp, Glycine max
gtttttcttgtgaaacttcctagcacaaaatcagatactcatttcaatcgacttctcatttattggattcagagtactctcatttgatgtactgggtctatcggtcctatgttttgtgcttaatcaatcatctgggacttgtaatcttgctccaaagtctttacttttcaaagcgtattgggtttctcatgtggtttcatgtttttcgtttttagcagcagctcaagtctaggtacctatttagaatggagaaccagcaggtgaagggtgttg

SEQ ID NO: 29551 - DNA, 383 bp, Glycine max
gcacgtgtgtctttagcagtgagtgttatatcgggttgcattggaggttccatcatggtggctgctagaggggtttgggggaatttgtttagtcatcaaaaaggggttgtaaagggtgtggagaaggcaatgttgctgatggctctggtcgaagtgtttaattttcctgtgacggtttgtcggaggcatagtacgaggaactggacgaccctggctaagcatgtatgctaagtcttggtgggttctatttcctgacactaccattgggtgtggtttttgccttcaagcttcggtttggacttggtggactccttataggactcctgattggtattgctgcttgcttggttctgttgttaacatttattgtgagaataaattgg

SEQ ID NO: 29552 - DNA, 550 bp, Glycine max
tcggtgtagagttcacccccacctccaccacctccgccgccgttgcctgcggaggaggcgaggacagtgtcgggtaagaagaaaagagggagtgctactaaagaatttttgatatctttaagagggaagaagaagaaacaaagacaaagaagcgttgaaaattttgatatcattctaggttctgaatcattattttcacaaccccctccaccaccgccactgccaccacctaaggtttttcagaacttgttttctttgaagaaagggaaacacaaaaaccgtcacattgcttctgtggcaacaacaacaacaagcgtatcaaacaagagggatcatggttcttcctctaggttgcaagataatgtgacgatggctggcaatgagtcaccattaaaccctattcctcctccgccaccactgccgccgttcaagttgccggggtggaagttccgggtgcagggtgactttgttagggtagacagcatgggtagttcacgtagtggatcacctgatgatttggatgacgttagtgtggacacaccgacaacta

SEQ ID NO: 29553 - DNA, 429 bp, Glycine max
ttcacttttccgaccacgcgtccgtgatcattgacattgtagcaggtgcatcaacatgttctactaattaccaaaagcacaagcataaaggacacttggaacaagcatgaattctctgtgctactagacaaagaaagaagcagcgagaaccaccaagaaatagaagatagccaaatcacaacagattcagtcctagactcacactcacccacgtcgacatcgttatgcaccgtgtctggatcaacaagtactaatagtgggagtgtgacagagaatgagtcactaaaaaagaaacgtggtagtgctgacatggtgccagagatttggtacacaatggtgaaccgccgaaaaggagtccctcatcgatctccattctactgataacatatcctccaaccaattgttgtttcaatcgaataaaccaatttt

SEQ ID NO: 29554 - DNA, 544 bp, Glycine max
acttaatagatggtcttttaggtcactatttgatgatgaatcagctacggctgccaatcaacctgtcagagggagcttcttaaacctcttacctcctcaaatggaagttcctgaaaaaagtgaatcacaatgatccacaccaatatattacaggacttcttgatggccatggtcacaaccaaatgttgatgactactgattgttatactttttctcacattcttttgttagattggagttgatggatttggaagccaggtccctgaaatttctggtttttggatggctgatttttttggctgactgggatattttccgtgtagaaaaatcttttaaggtgtatattcttcaatccaccttctatcaaactgcaatgtgttaaatatcatagttttctctctctcctgtaattgagttactgttaaagtatgaagtgctgacaaggatgtgcaattcacacatttttgtacagtatatagagattgatcggtttgtaggttaacattttctgttatgtgacattagggtccaaactttacaactg

SEQ ID NO: 29555 - DNA, 354 bp, Glycine max
atgaactcccagaagagagtgatttagagcctgtcattgttggaagtgcaactcgccttgaatctcaatttcggctaacttatatcatgattctacatctccttcgagttgaggaattaaaggtagaggacatgcttaaaagaagttttgcagaattccatgctcagaaaaaacttccagaaatgcaacagctgttgaagagaaagcttaatcagcccacaaaggctattgaatgtttaaagggtgaaccaaccattgaagaatactatgatttatatttagaagcagagacatacagcaaccagatatcagaagcaattttgcagtctcctagtgcacaacaatttctcaata

SEQ ID NO: 29556 - DNA, 264 bp, Glycine max
tctcgagccgattcggctcgaggcagatttcagtacatctgagctgcctttagaccctagcctctcttggaatcaacccgccacaagggagggaacatatcagcttaggcagacaacaatagctccttctctgaaagaatttgtcattattgcttaaatgagtgttgggcgttagcgactgtgctgtgaagcgtaaattcatttggaatgtgaagaaataaatgttttgctcaactagttgctcgctttacctcatttaatcgt

SEQ ID NO: 29557 - DNA, 260 bp, Glycine max
caggcagctagtactaccctgcccctgctagctattttgtaacaagcagatcaaattaattgcttgatatcaagaaacatggcaatcaccggtgttcatggatggggagacatcaagagtctcagcgtccaagtgatcaccggtcgatggttcgtcgtattcgcctcttttctaatcatggcagccgccggagcaacctacatgttcggtctctattccagcgacatcacgagccagctctcttacgaccaatccactct

SEQ ID NO: 29558 - DNA, 662 bp, Glycine max
cttgtttggatggaatatgtgatttgttttgtagatatggagtatgaagcaggatacttatcttcatgacttaagggagcattccaaggagatatataccatcagatggagccccactggtcctggtacaaataaccctaatcataaactggtgttggctagtgcttcatttgactcaactgtaaagctatgggatgtggaacttgggaaactcatctacagcttggatggacacaggcatcccgtatattctgttgctttcagtcccaacggcgattatctagttagtgggtctcttgacagatccatgcacatatggtcattgagggacggcaagattgtcaaaacatacacaggcaatgggggcatttttgaggtctgctggaataaggagggtgacaagattgctgcatgttttgctaataatacagtttgcgttttggattttagaatgtaatatctgtgtagcaccaatttctccacactagtacattaaattctttcttttcaccccttgagatgagatcggtggaagtgtattttgggtgggtggtaggttacccattttaaccatagttgtaggtataactcattgttcgtggatcccgttgtaatttgctataacattagtaaaaagtagtttgtaggagtgcattcttaat

SEQ ID NO: 29559 - DNA, 266 bp, Glycine max
ttggctttgtggcaaatgaggaaaccttatatgatggaaaaagacaaaatgaacaacaacattaagagcaagctaaggaagggattgtggtcacctgaggaagatgaaaaactcctaaggtacatgatcactaagggacaagggtgttggagtgacattgctaggaatgctggccttcaaaggtgcggcaagagttgccggcttcgttggattaactacttgagacctgatctcaaacgtggtgcattttcaccccaagaggaaga

SEQ ID NO: 29560 - DNA, 749 bp, Glycine max
ctcgagccgtgcattttgtataatgaatagatcataccacttctgagtttcttaatcatcagctatttaaagcaatggtcagaaactaacttcccccccactagccttctatagagccctttgaaaatcgttcaaaaccaatctatctatctatttggtataagcatggagctttgttggcaaaaatccatccatggctcttaaagaagcttggaggattttgtgtgagagggttctcacccttcacactccacctcctacagtttgcttatgctttagccattggtttctctaatcaatcaccacaaaagggtatacatggaggaacataattctctgagtggcatgaagcagagaagctatggccacatcttagcaaaccggcaagtcacaaaaaggcaatggactctctctcattaaagggtccttatggctatgtatgtattgattctattgtagttcttcttctttgtttcggtagaatgtattaataaacaaagatgttcttcctttgagaagctacataccaacttgtgttgtccataacactcaatttgcagatgactagaatcaggctttctcttcagtttctgcaaatgagtaggtaggtaattatgaccttatatcatatcccatgtgtgttagtgtgtatgcttgctatgttgtgaccttatatgcaataaaagaattatggtagtgttttaaaaaaaaaaaaaaaaaaacaaaaaaaaaaaaaaaaaaaaaaaaaa

SEQ ID NO: 29561 - DNA, 452 bp, Glycine max
cggctcgagctcgagccgaatcggctcgagggagtatgaagcaggaaatgagttcgggaggctaacttgtgcagcacagttatcactttcagtgtataaaacaatgggttgcacaaaaaaatttctgcccagtatgtaagcaacaagttgcggctcgacactgagtgactcaacccttctgtttttttggacagcttccattctcatccataaatttgtgtatagtttttcatatccaatacaagcaagagttttcattctttgctgtcaattatcatttcatctttcaaaattcctgcatcctctgcgaggaatcggcaattatatgttatcgagtaaaggtttatattcgggctgagacctttgcatattatacgcaagagttgccttgcttaagagcagttattattatttttttgttttgggtttttaatgaagttgtgtctgtgacg

SEQ ID NO: 29562 - DNA, 444 bp, Glycine max
tttgtgatgtcaaacaagatgtgatggttgggacatcactgtcaagtaattaaccaagatgtattcgtggggttaaattaaatcctgaagatttagattgaatggtcttaagttccatctattctaggtgatgatgatgaagaggcaagtttactgctataacatccagtcaggcagagagcatgagggactacaagagatattaagcactattggatggccataaaagcaaaggcttttatctttttatttttatttttttccttgtttcataattattctgcaacacaatatgtacatatatgtgttgtacatgctgtggaaatgaccttatttgctctgaaaggtcctcttagactatcgatttacactgatagagcagtttgtgattgtggccaattttattcagttagtaaaggtgcaattgctggattttatggtttg

SEQ ID NO: 29563 - DNA, 805 bp, Glycine max
cttggatcagttggagattgtctgagtctacgagatactacttggtttggttcatcatcaggttctatagttatatgctctaattgattcaccttcattcttttcttatgttgtataaaatgattatcatcactagaggcagatatttcgatttctgaatcttgcctgctattaatattgtattgatctcttttcggtcatctgatccagttcctttttctgtttcttgttctgtcgttggttccgtgcaaagtttcattgacattcctagtcaattattgttgacttcatagaaacaattttcacctcttgaggtacatgtcttctaatttcttggtcgagttcaacatgaactctcttgtgcaaaactttggtggtcctatctcagtattttcaaatcaggaccaagtagagaaggggtttgactttgagtttgatgattcatcttccccttcttccggcacaagctcaggtcgagaatccacagaggtaaccaaatattccaacccaatcctagatacataagcgacatactcatggacgaggaagacgacttggagcgcaaaccctgcatgttgcaggaatgtttgagactccaggctgctgaagaatccttccatgatgcccttctccatcaaaacccttcttcttgtttctctgatgaaaattatggtcgcactgttagctttgagagctgcaccactgataattcatgtgagtctgaattggtcaacggtgttggtgaatttgattcttctttcttacaactacaaacccctctggttcatgatccatttggggagtc

SEQ ID NO: 29564 - DNA, 476 bp, Glycine max
cacaaaaccaccgaaattcatccttctattcatcaatccgtaattacctatctttccactttctttctcctaccatggggctaccacccactattgcaacatgctttctcatattggtgctacctcttgttgtgcgatgtttgtggaagctgctaaactgggtgtggctgaggccaaagaaattggagcgggcattaagggcacagggtcttcagggcaatccctacagacttttggttggagacaaccgggaaaagtttaggattctcatgaatgctctcacaaatgaacaattcacgagttctctctcaaatgataagaacgtaccaccgcatatcgtgacctttaaccatcacattgtcaacaaattcagcaaagattcatttttatgggaaggcaccacaccaaaagtgatcatgacagaccctgagcacatcaaagaagtctgtaacaagatccaagactttgagaaaccc

SEQ ID NO: 29565 - DNA, 258 bp, Glycine max
acaacaactactatgggtatggcagatgctaagcaaagatatgctgttgtcacaggtgcaatcaaagggataggattggagacagtgaaaggtttagcctctaatggcctcaaggtggtgctcacggccagggatgtgaagaggggttaccaagctgttgaggacttgaagagagaatttggtttctctgaccttgttgtgtttcaccagcttgatgtcactgacccttctagtattgcttctttagttgagtttgtg

SEQ ID NO: 29566 - DNA, 490 bp, Glycine max
ctttctttctttttttctctttctctctgcaaaaccccgaaacgcagaaaacaaaacaaacacacctccaacgacaacacacaacacaaaccaaccgactaactaacagcaaaacgcaaacactctcctcaaaacgacaaccgccacaaaacaacacaaccaccgcccctcgccgccttcatcttccctctctctctcaagggtcgatggctgaactcggaaacaacaacaacggcgccaacacgacgtcgtctaggttctccttcttcaaccgctccctcaccacgctccgcaacgaaccaccgccgcagaagccgccgcagctggaccgttcgctcacgaagctcgtcgaatccgggcgcggcggcggcggcggcggcagcgtcgtcaagcgcctctgcagcttcttcgaatccgcaaaaccttcctctccggaaaaacaacaaaatccaaagctcaaaccctcgaaattaatcgaaaactcaaactc

SEQ ID NO: 29567 - DNA, 437 bp, Glycine max
ctgctaagaacatgggcaggtttgagtatatccccacttctttcctcagtattttgttcactttttgtttctgtcccatggtgttgtccctgctgtctcaaaaccaaacaagaaccatgatcaatctctcaaagaaccttcctccccctgttccatggaatgcctcatacccaccatgttcatggatgggagtggattgtgaccctaccagttcttctgtagtagggatatctttaattcggtattcactgtctgcttcagactttctgccacttgtttgcaaaattcaaactttggagcattttgatgtctccaacaaccgtctgagctcagtcccagatggtttcatcactgagtgtggaaagattaaggggttaaaaaagctgaatttcagtggaaacatgttagggggtgatttaccatctgttcatggtttt

SEQ ID NO: 29568 - DNA, 272 bp, Glycine max
  unsure (1)..(272): unsure at all n locations
aanaaacacgttttccctctctgcattgtcttccttcctttccatttctgtctcccgtctcttttcccagttttgccgggattccccaaacaaacccgaaaccacaccgtaactcgcacgcacgccggccgaaacgacgaacgatgtagacggcgattctggccccgaataaacggcacgagtttgggctctggtgctgcgttttgtgcctcgcgatctgcgctagggtttgcggcggggccagatccgaccaggaaacgcgggagaggttc

SEQ ID NO: 29569 - DNA, 457 bp, Glycine max
tagcttctcacaccttcttccttccaaagccaccattctctcttcttccattttttgtttctcttttctcactgcccaattctctctttcccaatatatctgcagcctttgtattcaagttctgaggctttgtttccatgtttttccttcatggggtgctgatatttctccgttttttgcatcatgggtttttccctcaaaatgggttcttttgagatgatgagttggtgagtactgtggtatttattttgggttttggcttcaatttggactgcatgaaatggcttctcttgtgaggaagttaaggccttcgtctgtgcctactgttactgtggaaactgtaggtagcttaagcagctatgagtactcccttgctgtggtgtagaatggccctcctctcagttactccattcctgaaatccctgctttcaaaattgaccaaatcccaattgcaacc

SEQ ID NO: 29570 - DNA, 534 bp, Glycine max
cccacgcgttcgcccacgcgtccgcattgtcatgagaagaggcaaaaaataagtggttgtgatgacgtaaatgtaacagtgctgtcagaaccatcagatgttgcatttagccattcagaaaatgacttaaatgaggatcaggaatttgatagtttatcagccatcaattctctgatagcagaatgtgaagattcaaaacagaaatacttatctgtcttcagttcgaagctatctacatcccaacaggagtttcaaaattcttacacgcaggtctgtaatgcatatcatgacagcagaacagatcaagatacattttggtggttagaagcactccatcatgctgagcagaacaaagatttctccactgagttgattaggaagattgaagaagccatctcaggaacttcaaacaattcaaagtcatcaagagtaactgctcggtcagtgatgctatgattgtgtaacacaattgtcaagtactgcaattttgtcataatccatatccttaactttccaagttatgcttgatcaaat

SEQ ID NO: 29571 - DNA, 389 bp, Glycine max
atgaccactgccacaccaatgagtcgcactcttaatcctgatgctgaattcgcatatggcgcgggtctaattaatcctcttaaggcggcaaatcctggtttagtgtatgatattagcgaagggattatgtcaagttcttgtgtggagagggctatacagatgaaatgcttcgagttctcactaaagatcatagtagatgcagcaaacatgctagaaaggaagctgtatatgaccttaatctcccatcattagctctttatgtaaacgtctcatctttcagtcgtattttccatagaacagttacaaatgtgggattggcaacgtctagttataaagccaaagtggtatctccatctttgatagatattcaagtgaaaccaaatgttctg

SEQ ID NO: 29572 - DNA, 343 bp, Glycine max
ggaacataagggagaccgtgcttcaataagtactcagggtgagctagcacatgcattgaggttcttagcatctgtcgtttctcaaagctttttagcttttggcgacattcttgaattgcacagaaagtttgtagagctttctggtggtattaatcggatctttgagcttgaagagcttctggatgcagcacagtctggggactccatcaatagtagtattacatctccaatatggggttatcatggtaaagatgctatttccttttctatggttgatattgtaacccctacccagaagatgttggccagggagttgacatgtgaccttgagtttggtaaaagc

SEQ ID NO: 29573 - DNA, 381 bp, Glycine max
gggaagtgtattaacgcacttgcagagaatagtgcacatgtgccatttcgtgactcaaagcttactagattgctacgtgattcatttggaggtacagcgagaacttcactagtaatcactattgggccatctccacggcataggggagagactgccagtactataatgtttgggcagagggctatgaaggtggaaaacatggtaaagctaaaggaggaatttgattacaaaagcttatctaggaggttagatatagaattagataaactcattgtggaacatgaaaggcaacagaagacatttgaggatgagattgaaaggtcagccactgaagcacaacatcggatatctgaggctgaaagaaactatgtagattcattg

SEQ ID NO: 29574 - DNA, 250 bp, Glycine max
ggaaacaagaagaatattattcagacattttcgattttgtctttactttatctttattaatggagttttgattttcgtcccaaaatttcctgagtggtagcctgagagctaacatattactttcataccaactcaaccaatttatcttcttctttaattcaactacagaaactggttcgcggggaaaacttgattctcgttatttgacataacatattagtaatccttcaggggacatatgaattatatg

SEQ ID NO: 29575 - DNA, 542 bp, Glycine max
  unsure (1)..(542): unsure at all n locations
attacacttcgcaaagtaaacacgttatactttattagtccattacccgcctctgttctttctttctccattctccactaagaaacggaaattggaacacaactaactatgatgatggctgataatagtgataatacttcactaccgccggaaaaaaccgaaagcacgtcgagcctcgccacgctccactccgacatcatccacgcgcacatcctcacacgcctcgacggcgccacgctggcatccgccgcatccgtatcgtccctcatgcaccgcctctgcacccaagacgatctctggcgcgaaatcagcaccgccacgtggccctcgctccaaaaccccatcgctcgccacgtcatctccgncatccccggcggctaccggtccattttctccgacgccttcccttccctccacaactcctccttccgccgccaccgcccgcctccgccgacgccggagctcatctccgccgtggacatgtactaccagggaaaacccgtgttctcgcgcgtgatacgcacggaaacgcagaagaactg

SEQ ID NO: 29576 - DNA, 420 bp, Glycine max
agaaagtgttcaaactggagccaaaagaagaggtggcgctggtggtctaaacaaagtttgtggtgtttctcctgaacttcaggcagttgttggtgagccggcaatgccaagaactgagattgtgaggcagctgtgggcatacataaagaaaaacaacctccaagatcctggtaacaaaagaaagataatttgtgatgatgcactgcgtttggtatttgagacagactgcaccgacatgttcaagatgaatcagttgctagctaaacacattatcccacttggacctacaaaggagtcacaggctaaacgagtgaagctggatgctgaaattaaaattgaaagtgctgaacctgcttcatctactgtggtaatatctgaagcacttgctaaatttttgggcactgagggaagagagatgca

SEQ ID NO: 29577 - DNA, 411 bp, Glycine max
gtctaattccaatattgagtttatttgttcaatcactttttctttgtgatgataaccaccaaaatgccaaccatgaatccagatagtttcaaattcatagaagccttaataatattaatggtgggtttgatgatgatgatgatgttgcaggttgtttgtgctgaagaggaaataatgtgcattgagagggagagggaagcactcctcttattcaaggctgcacttgtggatgactatggcatgctctcttcttggaccactgctgattgctgccggtgggaagggattcgctgcagcaacctcactgaccatattctaatgctcgaccttcacagtttatacctcagaggagagatccccaagtcgttaatggagttgcaacaattaaactatttagatctgtcagattct

SEQ ID NO: 29578 - DNA, 540 bp, Glycine max
ctagctggaagtgttaggtgatgtaaaggcactgcattttcaacttgggtgacctcaaactcaagtactcaacaacgcttctgcaagttggaaagatcagagatcgagagatgggaaagagcgtgggggagttgggagtggaggagttggtgaatgcaggaggcctaagagtggaagaaggcaatgaattgtaccatgctttgagggatatcctttctgagtttcagtctccttcacacatatggcgccaaattgtgactcggagactgctcaaaccatcctatccacactccttgcatcagcttctctactactctgtttatcactcttaacattcttccctcccactctattgcttgccttctctagatcaatccaaacgctccaacctaggccgccttatggaaaaacatggacctgagcttttaggaccttgctacaaagaccctattactagttatcctctatttcacaagtatatctgttcaacaccctcagctttactggtcccttgttctcaaggaactttcagtttccttt

SEQ ID NO: 29579 - DNA, 394 bp, Glycine max
caaaaaagccttgcagattccgatcaattcaaagatggatgcgaccttcccaccatcccctttccatattccgttattatcatcgttttctctcatgttctgacaatttctcttgtgctttctctaatggcggttgcagccttcaaatcctcttcgcgaagagcaacccagtcttccgcgccttcgaacgcgcctccgaacacgacgtcgtcttctggcagatcctccaccagagctccgaacccgactcgcaggtcgaggagcgtgagcgcgttctccaggggcagttccgacatttccaccgccaccgggttccccaacaagagggacaaccctctcttcttcgacgaaaagcaatccgccactgtttttcttctggaaacttccacgcccg

SEQ ID NO: 29580 - DNA, 274 bp, Glycine max
cggtctgtcattggccgtcattgtcggattggtcctactgttaaggttgttaattcagtagttatgaatcatgttactatcggagaatcttgttcaatccaaggttctgttatctgcagcaacgtacagctccaagaacgtgctgtactaaaagattgccaagttggagcaggttttgtggtcactgctggtagtgagtgcaagggggaggtcttggcaaagatatgaaactggaagtgaaaatcgaggctggggaaatacatagcaaaatgac

SEQ ID NO: 29581 - DNA, 358 bp, Glycine max
aaagaagtttgattcatcattcatgtctttgtctcctcaggttggatacttgggtccactagatcgaaattcccaggaagaagcttcagttcccaagtttgctgtctcagatggcataaacgttattgggcgtaacaacattcctgtccccgacaagaggcttagccgcaaacaccttactttaactgcttctcccaatggctcggctagtttgctcgtcgaggggacgaaccctcttgttgttaattctgggaataagagaaggaagctgaatcctaaagaagaagctaccatttgcaatggtgatataatcgagcttattcccggtcaccatctttttaaatatcaggtgttgggt

SEQ ID NO: 29582 - DNA, 293 bp, Glycine max
ggcaaggttacgtccaagaataaaataaacattggaatcgagagctttttggatagcttggcctccttgatctctagctctaatattggaaaagttgttgttcaagttaatacggcctagtaatgtgcttgatcttgatctcaacaatagttcagcaccagatattgaactctcttccatatgtctgtcctttattgtaaactcgtctaagaaggaatatgcacgtaataattgttgtattttatatatttaatttaaaaaaaaaaaaataaaaataaaaaaaagggggggcc

SEQ ID NO: 29583 - DNA, 409 bp, Glycine max
cggctcgagctcgagccgaatcggctttagatttcatcaacactgagtctcaggttaggagtaggttcctcaggtacaggatgcaggagctggagtgtgctgcgctggttcgagttccctcgccaaagtgtcatgtgttgaaggactttgcagcatcggtgtttccaatgctggaggacatcctgagctgtgctgcagtgatccaaatggtggcgttggaggacacgtttaaggtggcgtgtatggaggatccactggccagagaggttgctggaattgttcagagtgaggggttttggaatgaactggaggctgtttattcgctggtgaagctaatcagaggagtggttcaggacattgaggcggagaggccgttgattggtcgttgtttgccgctttgggaggagat

SEQ ID NO: 29584 - DNA, 278 bp, Glycine max
tgagattcagcaattgaatgaagttcagacagaagctatggacgcagattctgaatatcgtgaaaatagtgattcttcatttgtttgggatgagaattcacaactttacttccacgccagtagtggatcctaccatgaccctaatgctggctggtactatagcaacaaagatggtgcgtattacaaatttgaggatgggaattatgtgcttttaggtaccacagaggatgataatgtagagatgtatcagtgcaaggcaactacaaaagaaaatcctc

SEQ ID NO: 29585 - DNA, 232 bp, Glycine max
ggaagcacaatttgacggcgagtctctgacgaccaacatggcactgactgcagatggagacgagcttaatagaaatttcgggttgtagcagttgttcgctggtcactgcactaagtcattaaccacggtcaaccaggacatgggtattgtactcaccgacatgcggacccattcatattgggtcttgtgaaagacactcggaccaaaggcatggctgacctgtgcttttggt

SEQ ID NO: 29586 - DNA, 258 bp, Glycine max
agaagactatagtttattagtatatgttttccgggcatttgtgtcattatccggaagtttggtatcaaggtggacttgaatgcatttatcatgttttgctattcaatattcttttcactttaatatcttttactgtttcctttttttcttgtctagaatttgcactcattttggatgcaatcgatgtatcttgttttgtaatgattgaaataatacacaatcgctgatgggtttgtgacgaccattttggggtatctc

SEQ ID NO: 29587 - DNA, 447 bp, Glycine max
gatttcacaattaggctgagaaaacctcactactctgaaagctccaatttggaggaggcgtcgcctgaagagtcctctctccgccttcgtccgtcgtcgtcgatcatcgcttatgactgtaatttgaaattgatggattccaacaattggagacctaatcaaggtactaaccccactatggatacaagtgattggagagctcaactaccaattgattcacgccaaagaattgtcaacaaaataatgaagacactaaaaaaacatcttgctgtttctggtcctgatggattgcatgaacttcggaagattgctcaaaggtttgaagacaagatttttactgctgcaacaagccagactgattacctacggaaaatatctttgaagatgcttacaatggagactaaatcccaaaacaccttggctaacaatatgccaccaaatcaagtt

SEQ ID NO: 29588 - DNA, 847 bp, Glycine max
  unsure (1)..(847): unsure at all n locations
ctctcacttttccgattgatttcacaattaggctgagaaaacctcactactctgaaagctccaatttggaggaggcgtcgcctgaagagtcctctctccgccttcgtccgtcgtcgtcgatcatcgcttatgactgtaccgtctctctgtttctgtctctggtttattcgattcgattcgattctgtgaatccattgaaatatagaattctctctctctctctctctctctctttgattatcgctgattttgattgacggcctcgctctgtgtaaggtttttgcatctcaaactcgatttttttttggacgcaaacgatagtgtttgtgaatgataatgacgatgatggaattgaaatttctgaccagcgttgaatcgcccgatgtatgtgtctttgaaaataaacggagaatctgcatggaaatgatagttaaagtgtaatagattatgaggaagaagctgaggtttgatgaattgattaagggaattggagtagagttagttacttgagatgatacaataagtgcaaattgacctaatgtatttatatgataaaataagtgcaaatgagttctgtggaaactcttccaaatgtgccccatgtcttttgaatctatagcagtttttattgattaactttagaggttttggaaattggaaggagcaaggatgccaaaactttatgcttgtagttcgtttgtgtgctcatagttgttactagcaagccatagccacaatggagatataatgtctctggtaatttgaaattgatggattccaacaattggagacctaatcaaggtactaaccncactatggatacacgtgattggagagctcaactacc

SEQ ID NO: 29589 - DNA, 398 bp, Glycine max
gattctctgactcgtcttgctcctactgcttactttcggctttcttgtccttcaccttgttctttgttacactcaaggatattggattgcaagaggtgtctaaacaactgggtctgcaactgcttgttgctagcttagtgattctctcgctgaacgcatcctacagcaattctaaatctgcctcctcaagcctggctgaaaatgatcttccatactttgcaactgagattacaactccgttaagcccttttgcactatctctagcatggcatttgcactccataggagctaaaatgtatggtgctttctggtgtttgcactgtcaggaacaaaaagagaaggtagtgctctagatacttcaaccagaagcttgggtttgtgactttgtcttcaagatt

SEQ ID NO: 29590 - DNA, 261 bp, Glycine max
ggcatttttcagttgtaagaaagcattgcataagataagataagtaagaaacacttccattgggcagagcaaccagcaccatgaattatgagctgctacagatagttgcactgctgacagtgatagcatttggaggagcattaaggaaagcaacaggagcatgcggttcagatgacttggaaggtttgatgggcttcaagaatggcattcagatggatacatctggcaggttggcaaagtgggtgggtaggagctgctgcg

SEQ ID NO: 29591 - DNA, 406 bp, Glycine max
aaggattactgttgaagatgcactggcgcacccgtacttgacatctttgcatgacatcagtgatgaaccagtgtgcatgactcccttcaactttgactttgaacaacatgctttgacggaggaacagatgaaagaactgatataccgagaggctctagcatttaaccctgagtatcagcagtagtagtgatagtcttgttgtcattggatttggatcgtgtgatgtttgtgtccatagatcaaaagatttcattgtgtatatatatctatcatctgaaaccaggtgatcttggagttgaattatttccatcagaggcatgattggtagactgaaacaatcataaggtatttgtattggctttttgcttcatattattgtccaattcattggctccacccaactgat

SEQ ID NO: 29592 - DNA, 609 bp, Glycine max
ccctcgcgttcgcttgatgattctgaggaaggtgaaacagatggggggaaggaggattccagtgttaggaagtcattcagttatggaacactggcttctgcaaatgctgggggattttttcattccaatgcgagagtaaattgtaatgatgaagactgggtttattacagccatcgcaagtctgatgttgggtgttcacagagggaggattctactgcttcttcttctcagccttatttagtacaaagttccaagcgcagcatacttccatggaggaagaggaagttgagtttcagatctcctaaagcttataagggagagccattgttaaagaaggtgtatgcagaagaaggtggtgatgacatagactttgatcgccgtcaacttagctccgatgaatccctttctttgacttggtacaagactgaggatgacttgtctgcacatcgatcgtcaatctctgaatttggggatggcagttttgctgtagggagttgggagcagaaagaagtcatgagtcgtgatggtcatatgaagcttcaaacacaggtcttctttgcttcaattgatcaacgcgtgaacgtgcagcaggtgagagtgctgtacact

SEQ ID NO: 29593 - DNA, 273 bp, Glycine max
tttcagtgtccatgacgcagaaaaagcagcactccaatcctgtgcgctgaatttgaccaattcaaagatgaatctgcgaacccaaaatcaccgtggaaggagcaccaggcttcttcttcttcttcttctgattctgtatggcatttgcgtagccgaaagcaatgaaggagtcgaacacgtcagaggaggccccgattctgtggtttgggtggttcagctttccgatcttcatttcagcgttcaccatccaaacagagccctcgatttcgctaa

SEQ ID NO: 29594 - DNA, 360 bp, Glycine max
ctcgagccggcttgcgtcctctctctcacaggctgcgacacatcacacacaaaatatcgaaagagaagccttcagcttcctgaccttgacttctctcctctcttcctcttccaccatgtccatcgcacgatccgcgttcacattaaaccctctcatcacacactaaccctctcgacatctgtctcttttctttattcacaaaacttcatcccctttctcacaattaattccgcgccaaataacctaatcctaaaccgaaatcttatatcatcacgaatgctgttgcttttccagtatttgcgatcggtttaatcagaggacgccgtacggataaaggaacacgcacggtaggtgaagcga

SEQ ID NO: 29595 - DNA, 269 bp, Glycine max
atcacaatcatcaatatcagttgtgtaatcttttctctgttctgctcatggcttctgttcatgatgatgctgctgaagttggttttgaagaaggaatgctctggctaccctctcatgttttggacgaggcatgcgactccaagatacatatgaggaaccgccaccaaaaacagcggcaacacggttaccacagatatcaacgggaaacacagtcacaggtactgttcaattgctcaaatctttttacaagatcatcatgtcaaaggccc

SEQ ID NO: 29596 - DNA, 803 bp, Glycine max
ccttcgcggtctctgacgcgggggaacgaaccctccaccttgaccatcaccaccgccaccacacccaacctcgtggtgtgccccattccgtgagccatgccttcttcccccaagtcctacgccatctcctacgcgcgccagcccacgcgcagatccaccctctacctcctcctctccgccctcttcctcttcggaatcgttgctttcctcggccagattcgtggcagccgctgcgtcaacgcgcacccccgatcggtgcgcatcgtttgggaacactccgccggcaacggtgccgccggtagtggggtcggcgacggagacaggcataaggtgatggggtttgtgggcattcaaaccgggttcacgtcggcggggaggagagagtccttgaggaagacgtggttcccctctgatcgccaaggacttcaacgcttagaagaagctactgggttggcttttaggtttatcattggtagaacaagtgacagagcaaagatgtcagcgcttcagaaggaagtagcagaatatgatgatttcattttgttggatatccaagaggagtacagtaagctcccatacaaaacgttagctttcttcaaagctgcttatgcactttttgatgctgaattttatgtcaaagctgatgacgacatatatttaaggccagatcgtctatcattactactggccaaagagcgatctcatcctcagacatatataggatgtatgaaagagggacctgttttcactgatccacaactcatatggtatgagccattgtcacatttgcttggaaaggagta

SEQ ID NO: 29597 - DNA, 508 bp, Glycine max
ttttccttttccaccaccacacccaacctcgtggtgtgtccccttccctgagccatgccttcttcccccaagtcctacgccatctcctacgcgcgccagcccacgcgcagatccaccctctaccttttcctctccgccctcctcctcctcttcctctttggaatcgtcgccttcctcgcccagattcgcggcagccgctgcgtcaacgcgcacccccggtcggtacgcgtcgtttgggaacactccgctggcgctggcaccgttgccggcgatgggggcaggcataaggtgatggggtttgtgggcattcaaaccggattcggatccgctgggcggagagtgtccttgaggaagacgtggttcccctctgatcgccaaggacttcaacgcttggaagaagctactgggttggcttttaggtttatcattggtagaacaagtgacagagcaaagatgtcagcgcttcagaaggaagtagcagaatatgatgatttcattttgttggata

SEQ ID NO: 29598 - DNA, 408 bp, Glycine max
ggcatagcacggcacgacgaggcagtgtctagaaggtggtcttatgagcattcattcttcgacttcaacctaagcaacacaacacaatacaacacagtgtgaaagagagagcaatgggtagaggaagatgcttcttggacattagcataggggaagagcttgaagggagaatagtggtggagctttatgatgatgttgttcccaaaactgctgagaatttcagagccctatgcactggtgagaaaggcattggtccaaatactggggtgccccttcatttcaagggatcttgctttcatcgtgttattaaaggcttcatgattcaaggaggtgatatatctgctggggatggtactggaggagaatctatatatggacttaagtctgaagatgaaatttcgagttgaa

SEQ ID NO: 29599 - DNA, 234 bp, Glycine max
tgcatggtcttggacaatgaggctctctatgatatctgtttccgtacattgaagcttgctacaccaacttttggggaccttaaccacctcatttctgctaccatgagtggagttacttgttgtctacgtttccctgggcagctgaactctgatcttaggaagcttgccgtgaatctgatcccattccctcgtctccatttcttcatggttggatttgcaccattgacatctaga

SEQ ID NO: 29600 - DNA, 409 bp, Glycine max
gagattaagttgtgggactgagtggctgctattatatatttataaagacttgtgtaagtctccaacattcccatacccaccttgctctcattttttggtgttccattaattttcctttggaagaagaagctataggcgatgggaaattgccaagccatcgatgcagcaacattagtgattcagcacccgaatgggaaagtagacaagttctatgcacctttgagtgccacacatgtcatgaaaaccaaccctggtcactacgttgctcttctcatctccaccacattgtgtccaaccaaagacattcaaaattgctccaacgccaacaacccggttcgaataactcgaatcaagcttctcaagcccactgatactcttgttcttggccaagtttatagactcatcacaa

SEQ ID NO: 29601 - DNA, 350 bp, Glycine max
tccaattataagccaccaacaccaactcattcatttcaatattctctcccctcttctggtttccaaaaacgaaccatgaaattcaagtcaagaagaccacaaccacgagcactagtagcattctttctcattctgtccatcttctctctaccggcttcatcatcatcatcttcttcttcttcttcttcttccattgatgacgtgaaatcaagcaccatcattctcaattcaaggaagcccccgaattctacaactccccagaatgcgcctccctcaccgacaacgaggtagacagtagcgacaggtacatatgttcggaggaagcggtacacgtggcaatgacgctggac

SEQ ID NO: 29602 - DNA, 571 bp, Glycine max
cttccgtcggtggttgtgaccgaagctgacgtcgtttgcccggtttgtaaagacgagtttggcgttggggaaggggtgaaggtgttgccgtgttcgcatcgttaccatgaggactgcattgtgccgtggttggggataagaaacacgtgtcccgtttgtcgctatgagttccccactgatgatgctgattatgagcggaggaaggcgcagagatctgttgttatgtgataatcatgatcatggtgttattattagggtcagtttttttttcttactttcagtgatagggtataaaaagtatagatttttttttttgctgctgaagaaaattgtgcttgttgattttccgaaatttgagttttgggatgatgcttctcttcgaattgtacttttgggatacatcacagaaacgattcatttttccatcatggaatctgtttatgttgtgatttcttcatgttcttgttcttgtggattgctctgctgctatcttgtatcgttctgggttacggccagattggaattctgtgaaagtcttagctggttcctttgacggattttatatcctctc

SEQ ID NO: 29603 - DNA, 401 bp, Glycine max
gtaaaaataagtttggtgtctggggaaggggtgaaggtgttgccgtgttcgcatcgttaccatggggagtgcattgtgccgtggttggggataaggaacacttgtcccgtttgtcgctatgagttcccccctgatgatgctgattatgagcggaggaaagcccagagatctgtaatgtgatgatgatggtgatggggttattattagggtcagttttttgcctttcagtaatagggtaatggatgaaaacttgagacagtataggttctcttttctcgctgccgccgaagaaattgtgcgttttaattttaaaaaaaattgagtctagggaatgatgtttctctttaaattgtcccttttgggatacatcacagagatgattcaaatttccatcgataagg

SEQ ID NO: 29604 - DNA, 316 bp, Glycine max
cgatgatcctgttcaaactgcaacaatgcgtgctgaacttcatagacgtggtatagcacaaatgaggatcaacgaccggtcacttcaggacatgtatatatttggagatcctttgcgtgttcctattattattgttgaacgcttggacaacatgcaccgttctgccagtgtgaagtcatatttccttcctttggaggacaaagctagacatatcctggaaaatggatctagagccataataccgttgcctgggaatagccccccacaaaatgagcacgttttgagagtagttgtttttgttcacgggttccaggga

SEQ ID NO: 29605 - DNA, 422 bp, Glycine max
cagaaaccgaacgtggttacaacgctactcttgaaactgaaaaatcctcccaattttcctaatgaacactaaccctaattccccccttttgatgataacagaccctgaatttttagttaactgaaaaacatcctcatggatgcaccacgtgtctctcgagcaatcggcgaccccaaaatccgccgcgttggtttcttcgcttcagattcttccgccaccgattctctcatgatcccgtcgccacgtcatcgctccattccggttccgccgacgcacccttccggagatcgccacgtggcatccgggagctacgatcccacggaatacccaaaactcgctactggcattgaaaagagaggggaggaagaagaagagaaagaagttctgcaatcaagcttaaagccgttgaaagcaaaaactac

SEQ ID NO: 29606 - DNA, 569 bp, Glycine max
cacttgttgcgccgaacttgggagctggcaagtagcaactaccaagggccaccaatgcacgcgccacctcttccagtttccactattcccttccaaaccctaattttactccaattctccgttccacatttgcactttttgattccaagacaccccaaaatatggtttatttagcgcatatacgcttccgctttctttgttgccgctccccttcctgtgttgcataacacaacctattcttttaccactctgatgcccatttgattactaagcaaaatacaactactttctcagtttaattgagttcatttacagttctttgcatcaaattttgattttgaattggtgagtgtttttgttctgttatgagtgatgatggcactcgaatcttgggttctcagtcaccaagtgttcacctccagttccagattgttttaccctgcgcatgagaatcggcgaaagagcttaccaatcaaagttttgggtagaaacactagatacccatttccctttgtgcccaattgtgttgctccatccacttttgcaaggcttcaggcttcaagttttgg

SEQ ID NO: 29607 - DNA, 284 bp, Glycine max
gccttcatgaattcaaccaagaatccgttaggatatatttatccacccaagaccaagttgcagataaagcctgctccagccatggcagctttctctcctagagggcccaacacagtcacaccggagatcctcaagcctgatgtcattgctcctggtgtgaacattattgctgcctactcagaaggggttagcccaacaaatctgggatttgataagcgcagggttccttttatcaccatgtctggaacatccatgtcttgtcctcatgtggctggagttgttgg

SEQ ID NO: 29608 - DNA, 909 bp, Glycine max
ctatttatgatggactggtttctggctggaggaaccctagcactaccctaaatggaaagctctatgccttagactgcaaggatggctgcaagattcgggtttatgatgaggttgctgattcatggagcaagcatattgacagtaaattgcatttggggagctcacgggctttggaggctgctgctcttgtccccctgaatgggaaactatgtatcatccgtaataacatgagcatttctctggttgatgtttcaaaacttgaagatttgaaaggatcatctgctgaacagttatgggaaactattgctgggaaaggacagttcaagaccttggtcacaaatctgtggtctagccttgctgggagaaccgactcaaaacccacatagttcactgtcaggttcttcaagcttagaggttgtatagttctaaaaaatcgacaatcagcatgtcacaagttacaatatctctcatcttgatggtatatgtgtgtgaaaagctgggacaaatcttgccagaacaccatgatgcagtctattgttgcttttcatctcaaacccgtggcatcatgctcatcccaagaggtgaaacatagataagatgttttactaatcaagtaatcatatagtgttacagatattgatacatagttgttacatttgaaaaaattgagtaggctgcttaccagatcacatggtttatcattagcttgtcttttgttttgctgcaaccaatgtatgacttggagtgttggacgggggagaagaaatgaagaataatacttaaagagtcagtttggtattcttataaatttgagggtgaaaaattcaagaattacttttgaatataatttttcatattaaaactcatctatgaatttttcaccctcattttctgtggcaataccaactg

SEQ ID NO: 29609 - DNA, 267 bp, Glycine max
gatgtttcttatttcttccgttcatatatattcaaaatttcaaatcaaatgaaacagcttttgtgttaaatatagaggaaacatggttataaattgattgtctcctcataagtcttctgaaccctttcagaaatgaatttaaggggaagaaccactcaactacatatcaacactttcatttattttgagaaggttaaaggctaagggagatgacagatgagagtgagcacacatggtattttcttgcacgatgacgattcatgcttg

SEQ ID NO: 29610 - DNA, 273 bp, Glycine max
gtttttcataaaaaactagcagccctttctaagaaacaaagcagtgctaaagatggcaatgagcaacaatgtgatcggatgcataaacttcgtggcggtgatcctctcaatcccaatcatcggcgccggaatctggcttttaaacggggaagccgattcctgcgtccagttcctgcaatggcccgtcatcatcctcggagtcctcatcctcgtcgtggccctcgcaggtttcatcggagccttcttcagagtctcgtggctcctcatcgtcta

SEQ ID NO: 29611 - DNA, 380 bp, Glycine max
acgaggtggtgcttgcatagttggattcaatgtaaaaagtccacctactgctcttagtcaggaagcagctcgtgccggtatcaagatagttctgcaccgtgtaatttaccacctcttggaagacataggcaatttgataatagagacggcccctgggacttctgaaacccatgttgctgggcaagcagaagtgctgaatatctttgaaatcaaagggagcaagtccaaggggcctgatgttaagatagcgggttgtcgtgttatcgatggttctgtgacaagatcagcaaccctgaggcttcttaggagtggggaagttgtgtttgaaggactttgtacatcgcttaaccgggagaaacaggatgtggattctgtgaaaa

SEQ ID NO: 29612 - DNA, 312 bp, Glycine max
tccgaggcgatggatttcgtggccgctttcgagagggactacggctccgctcgggcccaatttcgtgggcgagggcttcatggacgcgcttcagcggtccaggaactcgttcaagcttctcttcgtttacttgcattcccccgatcaccccgacacgccgtccttctgccagaggacgctctgctctgagaccattgcgccgtttgtgaacgagaatttcgtgtgctggggtggcagcattcgcgccagcgaagggtttaagatgagtaacagcttgaaggcttctcgcttccccttctgcgccctcgtcat

SEQ ID NO: 29613 - DNA, 561 bp, Glycine max
  unsure (1)..(561): unsure at all n locations
acgagccgcgacgcgctgacctgcgacgacggcagcaacaacaacaacaatattaacaagcccgacttccgaggactcgatctgggctcgccggtctcgccattgcggaccacgcgcgggcctgccgccagtagcagctccagctcctcgggctccttctcgggccgaaccgggcccacccgcaagcctgaatcggctcaaaataattagcaacaccaacactcacactcatagtctcagcaacaacaacaactccggtgaactttctggttcaagtgagaacagccccaccgcgcgtaaaccgggtcacaggagatctgactccggatctgcgctggtgccgttgatatactccggtcagacggcgacttcgccggccatgaatgttcttccgaccgggaacatttgtccatctgggaagatcttgaaggcggngatgatggcgaatcggagtagcagaactagtagaagcgatgttttggggtcggngatgggaaactacggccacggaagcataatgcgtggcggagggaaggtggagccggcgagttctcgcggcgg

SEQ ID NO: 29614 - DNA, 270 bp, Glycine max
gacgaagacgggttcttctgtttgacagtgtgactgcttgacagggttcttctgtttcttcttccaaagcttttcatggagttcgcggcactctctcacgctacccaacttgggggcttcaaccccctcagaaccaaccttcaaagttctcttccttttcggcatgcttctttcccttcttcctctcgcagagattgctcatgcaaagcccttctcagcacccgcacacccacctctacccacaacatgtttggaccccattccaccgat

SEQ ID NO: 29615 - DNA, 610 bp, Glycine max
ctttccttttttctcatttgttctcttacttttgtctctccaaaaaccattctctttctccgatctctccgccatttcctacgaacctcagatggaggactctgaaaaatttgatgcaggtagtgaccaagggaatgcattggtgactccatattataccccatatccgaagcacttgttaccgaaatctggccttcaacctgtcaatatagagttttctcctagctcaggcggtgataactctgtggcctctatgaaagagggccctggatcatcttcttcatcatcctcatcatccacagactcagagcaagaaaggaaaatagttggggaggaaaaaacagataatgtatcattggagagtgagaatagaagttacaatgagttgcttaaagaattccttaaaaataaggaagagctgaaactttccaacatcaaacttaagctctcagaagaaaagatagtcaagttgaatgttcaaattgagaaaagtgagggtgagcttaataatgtgttggtagaattaaaagtgaaagaagaaaatctcgagtatgaaaaaggacaggtactggagttgcaaaaaaagacagctgatttggagacacatgtt

SEQ ID NO: 29616 - DNA, 287 bp, Glycine max
ggcgtgcttagctttgatgaatttggagtgatgatgcagtgatgatttctttttatctttatttgatttatttggggatgggggtaggatttagttcatttgttgtacatatttttagtcactgctttcattgtgttaggcttttgtaagactcagtaagactgatttgctgagctttataagcttcttgtattatttgggcacgatcagatattctctgctacttttcatttgtaatcctgatttttagatatttacactatataaacatctatttttttcttaca

SEQ ID NO: 29617 - DNA, 374 bp, Glycine max
cggtcgcgtggtcggacgcgtgggctgtaagcctgaacgccagttcatttccgtttccttattttcagcaccaaaaccaaagtactgcgcatattctccctctttgccatttctctctcactctgcactttcttcttgaaatttgatctcacttctcgcatctttcaacatttttctctctcaatctgctgtttcttcttcaacatagagatggttaagatggaagaagagaagaaagaaacaaaagtggtgctcacaaggccactaacaataggaagggaatctgattcagacgcgtcttataaagcccctaatcttttgcaacgaatactcattttattcaacaatgtacgcccaggctctgatctcacacg

SEQ ID NO: 29618 - DNA, 320 bp, Glycine max
ggtcctttgagatgttggcctggtggcttgtgtctctcacgatccattggtgatatggatgttggtgaatttattgtccctgtaccacacgtaaagcaagtgaagctttccactgctggaggcaggattattctcagcagtgatggtgtctgggatgctctaagtgcagaaatggcccttgattgctgtcgtggcatgtcacctgaggctgcagcaacccatattgtgaaagaatctgtgcaagcaaagggacttagagatgacacaacctgcattgttattgacatattaccccaggagaagccacctacttctgtgct

SEQ ID NO: 29619 - DNA, 572 bp, Glycine max
tcaaaggctcattccgaaagacaaattcactaacttggtttctctcttcttttttgttaatgttactatggctgtgagcgatggctatgcgattgcggtgaaggaagcagcttcggccggcattcacagcgtagagaaactcgtgaacatgattttgaatcaacacagagagggtggttctgaattggaagcagttgctgacgtggcggtgaaccgcttcagcgaggttatttcgctgctcgagaaaccaacaacaaccagaaccaccggtcacgctcgtttccgaagggcccctacaacggcgccacctgtccctgttgttcagttgcagcaaatggtgcatgattcataacacaaactacagcaacaacagaacgagacagaacaaaaacaacaaacctctgcttttaaggtttattgtccccctcctcctcctcctctgcctcagaatcaaaatcaccaagaacaaccttttattcttcctctgcataataatgaagcaaatggttctactaccaactcctatggttcaacgttatccatggacactgagagtttgcaacggtcatgtc

SEQ ID NO: 29620 - DNA, 338 bp, Glycine max
caatatcctcctcaccaaaccctaaccacaatcatgcaagactttttgcgctcccttcgccgctccttggttttccgccccggcggtgacgattcacctttcgccggaatcgccaacaagctcggctccgccattcgcaaatcgcgaatcgccctcgaacctcctcctccgatacggtggcgcaagggcgagttgatcggttccggcggcttcggtcacgtctacatgggaatgaacctcgactccggggagcttattgccatcaaacaggttttaattgcacctggtagcgtattcaacgagaatacacaggctaatattcgggagctcgaagaaga

SEQ ID NO: 29621 - DNA, 290 bp, Glycine max
ggattctgtagtaaagctggggcatcaaattaatcgtgatcctgttattcaagtttgccatttgcttcaacttttccatttagcattttctgtcagaaaaagtcaccctctgattgtttttgccttccttgtacaggcatttttttaaaattaatcaccttccaagggattcatttttattgcagacaagctttgtcttgctaaaaggatttgctttgatgatcgcagaaacagtaactcatttttcccaggagggaggatttatggacatgaagtttcaggatgtagga

SEQ ID NO: 29622 - DNA, 306 bp, Glycine max
gcactatatttgataactcaaagatgtcataaggtcagtcaaggtatcatcaataggcatagttatattaatgtgtgatgtgttagaggatatgcgcattggtgaagattgaaattagaagcaagaatgaggagggcatgcaggaaaatatggcgatcggtgccttgcacgagcaggaaaagcttgcgaaatgactctaggaaggacatggaggagattctgagggctaagctttcaactattaaggaagagccagaattgtgtgatgagaacttagcatcaccaagacatgtgtgtatgccaaga

SEQ ID NO: 29623 - DNA, 169 bp, Glycine max
atggaatgctcgcaatgtttcattggttcacaggacttacttcttacctctgctcaaaggagacccttcagattctatctatatggaagtagagcgaagaaggctgctctatctcaagcaaaatctcgaccacgggaatcagactgcggaagatggacttacccctgaa

SEQ ID NO: 29624 - DNA, 406 bp, Glycine max
  unsure (1)..(406): unsure at all n locations
gctaagctaagctatctcttcttttccgttcaaatcaaaaccacaatcaccccctcccccaccgcaactcaacaacaacaattcttcctccatgttctgcaccgaccactcaatactcgactcaccgaatcggcttcttctcaatctcaacacgcaccaacatggccaccacaaggtcatcttccgaggacatcgtcgattccacgccgctgctcgccaattccggcggctcctccgacgagctcacctccggccgcggtttttcgcggcgacagcggctacggcaggcggcngcggttcctccggcgggcgagcgggcgccggatgatgcgcgagccgtcgatgctggtccgggaggccgcggcggagcaattggaggagcggcagagcgattgggcgtattcga

SEQ ID NO: 29625 - DNA, 281 bp, Glycine max
cttccttcctttatcctctctctctatctctctctcaaaagcttttatttgtttctgtcgtacgttgtatgcttgggagcacaacacaatgaaagaaaacgtaggaaaccctctgcacctaaagtctgtgaaccatatctctctcatctgtacgtccgtgaaagaatctatcaacttctaccagaaccttctcggattttttcccatcaggaggccgggatcatttgattttgacggggcatggctattcggatacggaattggaattcacttgctgcaag

SEQ ID NO: 29626 - DNA, 281 bp, Glycine max
caatcatgtacgttacgaggacgagaatagtagatacctttgcattggaagtgtagagaaggtgttatgtttgattgcccgttgggttgaagaccccaactcagaggcatacaaacttcatttagcccgaatccctgattacttttggctggctgaagatggcttgaagattcagagttttcggcgccagatgtgggatgcagcatttgctattcgggcaatacttgcctgtaatgtgagtcaagaatacgggcctacacttcggaaagcacactcttcgt

SEQ ID NO: 29627 - DNA, 304 bp, Glycine max
catttacgaaggcagcagctgcaggaggtgcgtgcatcgagcggagcatgatctcgcaattcttcgttctgtcacagcgtggcgataacatcgtttttcgagattatcgtggtgaagtgcagaagggaagtgcggagatatttttccgcaaagtaaagttttgggaagatgggggactgcaggaggcaccacctgtctttaatgtggatggtgtaaattactttcatgtgaaagttgttggcttattgtttgttgcaactacaagggttaatacatcaccttcttttgtcttggagcttgtaca

SEQ ID NO: 29628 - DNA, 285 bp, Glycine max
gattccagtgaagtggagtcgttgcgatatctccatccaaattccacaatcggtttctgaaaatcgaagcaacttcactacttagttaccgtccaattccataacacagatccacagtttttattttcccgagaaagtgtggggaagcaatggaaaagatgaacaaagccttcgagaaagtgaagattatggtgggaatggatgtcgaagacgaagagcaacaagctgcggcattggacaacagcaactccttcgccttcatggacgacttcaaccgcaactgca

SEQ ID NO: 29629 - DNA, 456 bp, Glycine max
ggggaatgagggtagtggcgagacagtgagagggtggaaatggcggctgtggcagcgagaagcacaggcagcgttggtgttggtgctgtcatcttcatctcagtcgctctcaccacttatttcatctcgaaaaagaagaagaagaagaagaaggaatccaggaagaagaagaagggactggtggacgccataggcaacactcctttgattcggatcaacagcctctccgccgccactggttgccaaattctcggcaagtgcgagttcttaaaccccggaggcagcgtcaaagaccgcgttgctgttcaaattattcaagaggctctagaatctggccagctacgtccaggtggaatagtcactgaagggagtgctggaagcatgccattagcattgccactgttgctcctgcctacgggtgcaggacccatgtggttataccagatgatgctgcca

SEQ ID NO: 29630 - DNA, 425 bp, Glycine max
gtcgagccgtgaagtgaaatctgcatgggagacaccagctgctgaagctgggaaagcagattgggaattggcattggtggagaatactagtaacttgtcaaggcaaaaggctgacttggcaggggggtttgatccacgttactgaatgggatgtatgatcaaggggctgtgaggcaacatgtgagcacaactcagctgagtggtgggagtgctagtagtgtggcactgcctggacccgggaagagcgccaccccggttctggctttgcctgctccggatggaactgttcaagctgtagggccgcaggatccgtttgcagcatcactgacggtgccgccgccttcatacgtgcaaatagcagacatggagaggaagcagcatttgcttgtgcaggaacaacagctgtggcagcagtatgggaggga

SEQ ID NO: 29631 - DNA, 427 bp, Glycine max
aaaatgagaggttccagcagttaactaactttgagaagaagttcaaggaagaggttgagagagaggaggagcaggccttagagaaaattgcagaaattttggcagccttgacatctaagaaaactgctatggtctcagaggcatcaagacatatgcaggacacaagcatgcaacagtctaagagattccagctagagatgctcaacatgcagcaagtttcaaaagatggtaactaaggaagttggtgagtatgtagagaatgtgaaaagtcattatgtggaacaaatattctcagccaggatattaaagctaacatggagaattgcctctacggagtggtgagtttttgttctgttccttgactacatatatctttctaggaatctatgaagaatctatcacaaaattatttaatattgatttaaaa

SEQ ID NO: 29632 - DNA, 305 bp, Glycine max
tctcgagccgaatcggctcgagattggatatgtccgagcggctaaggtggcagacttgaaatctgccgagtttcagccgcagcaggttcgagtcccgctgtgttctttgttgtgagctgtgagcttgagtgtgttttgttctatcgctggcctctttggcagtattttcaatccttaaataaaatgttagggttttacgatttctgaatctcaacgacgttttggcgctcagaaatggaagaacaacaatccaaaacgacgcaagagttggcgatggaagggcagaagtacttggaagaaaccat

SEQ ID NO: 29633 - DNA, 370 bp, Glycine max
gaagttttcaaaatcatcagatcgcttcctaatgagtatgttcaaagactcctatctctaaggaatgcagcaatcgttctgaagtagtcgtgtcactttcctcacctctgaactcagttcctattccttcgagtttcttttatcaatttgtgaataaaatcttttagaatgtgaattagatgtactctttaagacattcttaactcatctagtgtcggtctgtcaccaactgtcttgtatgataattagttgattgcaagatttgtattgataaataacgataacggttgccaatcaataatgttgcatgtacacaaactagtatttatatccgtgcacgataaacatttatttataaaaataattatat

SEQ ID NO: 29634 - DNA, 686 bp, Glycine max
gtaatccttatccgttgcagacaccaatttatgttccgcaactgcagaacctagagcagagtgaaaccattgactcattcccagggaaccgtttatatgatgctgaagctgtagctaaagcatttcctcagttttctatttctctatcagtcatctgcccgaaagaacttcctaaaattaaaggcatctacaatgcaggaaatcgaaatagtaaagcagctgatccaccagttttggctaaaacccctcattttcttattttaatatcagaaggtttcagggaagcacagggtgcattaaaggttggtgagggttacagcaattcttctgagtctgagaaagttgcagcaaaatggccccctgtaatgcaaatagttcagcttatatctcaagccacatggataacaaagaatatgtagtttttcaggcaatgaacccatatggatttcgtggtcacctggaggataagaaaaagctgctgcttcaaaggttgctattctggataaatagagaacttgagattgtggccttgctgcaattcttatttggcaaatagtctttccaagcacttttccttttctctttgtggctatgctttctcgtggtaagtatatataacaatggtggacaacttttgaaacttatatttcttattccgacattaactaatgatcccctataaatag

SEQ ID NO: 29635 - DNA, 642 bp, Glycine max
gttggaagcagctagagagatgctggaggatgaggaggaggatggtaaacaagtagaggctaagggggggaataaaaaagacaagggtggaatgtcacttgttgatcttgcataccgacgggcaaaagcagtaaaggctgtcaagaaggcattagattctggcaagattgtggagaagaataaaaagaaatctaataataattcccggaaaactccttcaaggacagaagagatgcgggagctattccagactgacatgaaggataaaaagccaaaaagaggtgttggaggaggaaagaagtcaaagagttcattcaaaagcaagtcaaggtacaagcgcaagtagtctgaggctaataatccttgtcataaatatgtgcatggaaggaccataaatctccaaaatgcgtgtccttataccatatggaggtgattaaatggagctccactgtgaatttcagctagtgattgtgggtcttttgggtggccatggtgatatggggtatggtagcagtaactactacctaccaatacccttttttttgttcattgtatctcgtgagcttggttcttatcccaaatggatagcataatttatagcattgagttttaaatgttaccaatagaaaaaatatttatttt

SEQ ID NO: 29636 - DNA, 448 bp, Glycine max
cttactctagccatattcttcgccacctttctttctccaccttccatctccattcccctcccctaacttcccttcttatcattacaccactctctctctctcttcatcgcttacctttttcgtatacataagcattccctctcgttaatttcattagcatatcacacaaatcccactcttactcctttgccacgtacgccaccgctgatcaattcaggcgatggcgccgcgtctctggtcctgcttccgcagcagcagtagcaagggcagcaccaccggcggcggtgtctccgacgcctccgcctcgacgcgcgtggtgactgcggacctgacatcggaggagcagaagcgcgggggcccggtggtggtggagatgttctcgtcgcaggggtgcgcgacttcgccggcggcggagctggtgctgtcgcggctggggagaggggatttc

SEQ ID NO: 29637 - DNA, 447 bp, Glycine max
gtgtgatgcttttgattcaggtgacataatttgtcttaccaatggcatattttcgtaccagcatgggaaccttatactgagggcagggaagagagggaaactagtgaaggtaggagggttcactatggcctttgttgagacaccaaacatgagtgagattcattggattcctgacccaaacaattctaagaattatatccaacaatatgtaatatctcctgtgtcacgcatctttcctcctccttctgatatataaaagggatgtgcacttttatcagatctgcaatattttgtgataaaataacctttgttttatcactttttcacttgtttttttttcttttttgtcattgttgtgatggaagttgaggttaagttcctctgcagtaaaactatttagtaaattgcttattggttcatataagtaaataattgatgttctgatgt

SEQ ID NO: 29638 - DNA, 542 bp, Glycine max
aacctcaatcacaatccctccccccttcctcgccggactcgcaacgcgcttggacgcgcgaggacatccgctacgtgaaggacgtgccgtcgatcgcgccggtggcgtacgcctcgcgcggcggcgtggcgcctctccccgatgacagagctcccgtggaggacgcggcagagagcgagaggaggatgatcgaggcggagaatgaaatgaggttgcgaatggccaaggccgtcgaagaggaaagaatgaaggtgccgtttccgctgctgattaagcccaagaagaacgagaagcctcctccgcttgatttgaacgaagccattcgccaagttaaggccaatgccaaggcaaagtttgatgaaactgttgaagcacatataagattgggtgttgattcaaagcgaacagaaatggcagttcgtggtactgtgattctgcctcatggtgctccgaaggctgtcagtgtggctgtttttgcagaaggggctgaggcagaggaagcgaaagctgcaggagctgatatagttggtgtaaagagctta

SEQ ID NO: 29639 - DNA, 299 bp, Glycine max
caacgtaatatccacgttcccccgaaaccccacacacctcgttttgaacgaattctctttctctttatcctgttctgttcccctcatatcactcactcctccgttaccgtttcagctttgtgaatcctgggatgcctctattcttctccttcaactcaatgccactccaagcatactgagtgtgtattaggactgttgattaggtgaatccattggattggggaattaagtgtactgtcaatggggggtgaaacaatgaacgggtcatggttcagtgttttgtggccagtctctcgcaa

SEQ ID NO: 29640 - DNA, 332 bp, Glycine max
ggcaaaataaaaccaaaccaacgcagcagctgagttgaatccatcatctccatcacactcatcatccaatcaaacggagctgcaagctcccaacgcgtggcacgttgacatcggagtcatcgaacggtgcaagattgttcctggtcggagacgaaaccattgtccatagatcattattaataatatttcacatttgtttggttgctccgaaaagagaggaccaaacaagcccttatcataactctgtctaacacataacataggacaggcccaaaaccaaaaaaaagcctcgtctctcgtgccgattctccaggacaattcccttcacccaa

SEQ ID NO: 29641 - DNA, 620 bp, Glycine max
agtcaattcgtgaaagcgataaaggtgtgtaacgatttcaagtcgaagtatcctgatattgaagtggtgtcggaggaagagttttttcgcggcgcgccgcaggatatgaaggattccgttttgtccaatcacagtgagcataatctcgtgcttaagaggctcaatttcgagctctttcagcgcaaagagctttgcaaacttcatgacaaactggaacagaaaaggaaaacccttctggatacaattgcaaaccgaaagaagttcttatctagcctcccttcacatctcaagtctcttaagaaagcatcgttgccggtgcaaaatcaactaggagttcagcatactaagaaactaaagcggcatcatacagcagagttgcttccaccacctctttatgtgatttactcacaggttgttggctcaaaagggaggcgtttggagaatctattgatgtggagattataggaagtgtcaaagatgctcaagctttttcccaccatctagctcacaaggacactggcatttccaccactgtggagagtcctaaattggaaaacaatgaacctgatgaagatggtcagagacagagtaaaaggccaaggaggtttcaaggcaaggag

SEQ ID NO: 29642 - DNA, 598 bp, Glycine max
cacatttttccttcactcactcccatcacaataatttcttccctccttccttcccacaatggtcatggaagaatctaaccctttagacaatgaagttcaaccaaccacttcatcatcctctttcaccattactactccctctacctcctcttcctcctccatagaagaagccactaacactactactaaggagaaaaagaagaagagagccattagtaatattgaagggaagcaccctacgtatagaggagtacgtatgcgtcaatggggcaaatgggtatccgaaattagagagccaaggaagaaatcaagaatttggcttggaacttttcccactcccgatatggcggctcgagcccatgatgtggccggctctcacgatcaaaggcagctcggccttacctcaatttccccgaattagccgccaagctgccccgccccgccagcacctcccccaaggacatccaagctgcggcggctaaagcctccgccttggatttcggtcaccaaagccatgaagccgaatccgagctgagccaagccgtttcctcctcaatccaaacacaatcatcatcatcatcatccaattcatcgttga

SEQ ID NO: 29643 - DNA, 350 bp, Glycine max
ctcattgactcaacaaattctaattagtaattactctctcttttttactcttttaagtacacaatttttcttatactaaaaacgaggttgattgagcggtggaggtaacagtagtaggatgaatcaaacagcggaagaaaagaaaacgcaaaggttgttgtgagcggtttcacgccaaaaacagaaacaatgcgcggaagaatgagcgattgaagaacaaagagacagagacagggacaaagaaagaggcattgttgttcttcaatccaaaaatcatagcggcatggttgcattctcctttttcatcctctgttccttaatcctcctcgtacaaccttcttcttcttcca

SEQ ID NO: 29644 - DNA, 347 bp, Glycine max
tacggccgcgagaagacgacagaagggggtacaaagtcctttaactttttgggttttattttccggtttggtcaggcccgagacactcctctgtagcattttcttgaagaaaggaaaggaaacggcatcagttcagagagatcagagatgtgtgggagagcacgttgtactctgagagcggatgatgtcccaagggcttgtcaccgcagcacttcccctactcgcactcttcatatcgaccggtataggtataatgtgtcaccaggattcgacgtgccagtagttcgtagagatgacgcgtctggtcgtgaaggctatgttactcaatgcatgatatggggtttaat

SEQ ID NO: 29645 - DNA, 272 bp, Glycine max
aaaatttgtactactctattactccttccaaattttctctcaccttatctcccacctaatccattaagatgacttcatacggtaccacaattttggcacacttgtttggccttcttgctctcatcctcttgcttgtttggttgctgaattatcgcgagggcattgaatatgattctgaaaatccacttcgtgttttcaatgttcacccttttatgatgttctttggattcattttccttattggtcaagcaatactgtcataccaaacggtg

SEQ ID NO: 29646 - DNA, 540 bp, Glycine max
  unsure (1)..(540): unsure at all n locations
gcaggacttatcagtcactggcagtcacttggaaaagcctgagatgtcttacctcaaaacagaatatgtaggagcagttaaggaaagcaagggccaagagtctgatcaagatgatgataccccagatggttctgactcttctaaccagggcaaaggtcccacaagccctaacattattgacaagaattctgacatggaacttgagtatggtattgttgatgctttagaagttgctcgactagttgcccaggaagttgagagggaatgtgtcagccctataaagcaagggcatggncaagtttcttataaagtcaacagtaccacaaatggttctgattcttttaaatggggaaatggccccaaaagccctaatgttattgacaagagttctgatattgaacttgagtatggtattgttgatgctttagaagttgcccgacaagttgctcaggaggttgagagagaagtttgcagctcttcttcagagaaaatctcagaaggtggaatcaggcaggcagccagccctgattttgtagggag

SEQ ID NO: 29647 - DNA, 260 bp, Glycine max
ctgcagtgtgacatgttccagacaacttacgagataaaaatgcctacatccaacttacagtgcctgtcactcggtgaaattggactggagatgatcaagcgtggagaatttcagacaaacttcttacacaagttacaagttcttactctgtgctttcatattgggtcgaatgtatttccatatgaaattctacaactggcgcccaatatagagaagcttgtggtgtgtgatggttccttcaaggagattttctgctttgt

SEQ ID NO: 29648 - DNA, 276 bp, Glycine max
acttttcttcccgtttcgcccctttcacgaagcgcgccgttagtctctgcgacccgaaatccgaacccgaattggcttcaatctccgagagagagagagagagagagaaaccccgacctagctcgcagaatctactgccacttctcgctcttcaatcgaattgtattgctggtttccttgctatggctgccacagcaactgcatctgcgatgggtccgcgctatgcaccagcagacccgacactccctataccatggcgaggtcttgtggatggca

SEQ ID NO: 29649 - DNA, 274 bp, Glycine max
acggctggaagacgacagaagggggagaatctggagttgtggttgctatgctgagaggttatgcacttgcatgttttgcggtacttggtgggacatttgcctggggtatcgactcttcgtcaccagcatcaaaacgacggccaaaggtccttgagattcatttagaatttcttgcaaatgcactagatggaaaaatatctcttcgctgtgattgtgctacttggcgtgcgtatgtgtctggggttatgagcttgatggtgagttgcacgccact

SEQ ID NO: 29650 - DNA, 361 bp, Glycine max
caatgtttggtccatacatatttggctctctctaaaatcaaagaggctctgtatgcttcaagagaagctatgaaagcaatgcctcagtcggcaaaggctttaaaattagtaggtgatgtgcatgccagtaattctagtggcagggaaaaggctaaaaaattctacgagtctgctctaagactggaacctggttaccttggagctgcactagctttggctgagctccatgttatcgagggccgaaatggagatgctgtgtctctgcttgagcgatatcttaaagactgggctgatgattcgcttcatgtaaaacttgcacaagtttttgcagccactaacatgctgcaggaggctttgtcac

SEQ ID NO: 29651 - DNA, 717 bp, Glycine max
tgttaatatgcatcagggtattggcaatggtttgccattagcagctgtagttacaactccagaaatagcgagtgtgatggctcataagcttcaatttaatacttttggagggaaccctgtatgttctgccgggggacttgctgtgctcagagttcttgacaaggagaagcgtcaatctcattgtgctgatgttggttctcacttgattcagcgtttaagatccctgatgcaaatacatgacatcattggagatgtaagaggaagaggcttaatggtggggatagaatttgtcaccgatagaaaagagaagacacctgcaaaggctgaaacaacagcattgcacgaaagattcagagagctcggtattctagttggaaaaggagggctgcatggaaatgtttttaggatcaagccaccaatgtgtttcaccaaagatgatgcagattttgttgtggatgccttggactatgctatatctaagttgtgagattctgcctggaatcaagatatgattatatatcctgctagctacaagtggatcatcaatccaattttctataaggaaacaaatcctgctagctgcacttttgtacgtgtgttcattgctgttgtgtatttcacatactaccaataacactgcaatgctcccattgcaaagtgaaaatcctgtaaacaattgacaatataaattgaatgtgaataagtggattggtgtgt

SEQ ID NO: 29652 - DNA, 271 bp, Glycine max
ctcggctattgcaacaccatctgcccagattcgattccatgctgccgatcgactaaatacagcatgaacttagctctttattcagtgttattttgtgttcacgcagtctttgcagcaagttctaatgggcatggacacaaatcacaagactggttaaaccatggtggagatctgttcaacagaagatatgcttacaaagagcataagatcagcccaaaaacagcaccgaacctacgtttgaagtggaaattcaatgcaggcaaagacatca

SEQ ID NO: 29653 - DNA, 343 bp, Glycine max
atcttttgcctttttcctttgcttaggatactcccctgaatgggaactgatggctgtgaactggtagagacattaccaaatcctcgctcctttaaggtacatcgcacaatgtgcgcagaactcaggaaattagtcgataggatattgcggattattccacagatagaagcagcacgcccttgtggaatgcaagctctgcgtttgctgaacaaggcaatctataaagccagacaactgctgctatactgctccgaaactagtaaactttacctggcaataacaggggattccatactctcaaaattccagaaggcaagataatcgttagccaaaagcttagtcc

SEQ ID NO: 29654 - DNA, 300 bp, Glycine max
cactcggttttcggctcgaggtgtgggcataatgtgagtgttgaaaatggcttagagtaatgttttgtgatattgttggtgaaagagtcaagtaaagagttattgaagccgcagtgagtcagtgcctttgtcctcaatcaaacactgatacagtggagtagtaaagaggcaagaacttgaaggggatgttgatgctgacaatacagactagcatgctgcacaagggaaaagaaatttagcatcgatcatgatgagcaagaaaatgagagcagaacaagtagaggagatgaatgcataact

SEQ ID NO: 29655 - DNA, 575 bp, Glycine max
ggcataacaatcgaaaggaacactacatcttgacaagtcattgcttgctgataatccttcactctctctgcatcatgacaagcaggattgttacattgacatctgctcacctgaagtccttagcctatttacagacaattttgactaccagcatctacggcgtcattttgtcaagggattgcttcttgatgatataatggggtacaaaatttttgttcatgaaatccactcagactatgctgcaaggattgataatttccgaagctacgacactgtcagcaaggatataattcatcgatggacatatccactggtgccagatgtaatgaattttggcgacacagctactaaacttgaacgacaaggaatataccgtgcttcggaaatatcacaatcacagtctgctgttattggccctttcactgtcataggatctggcaccaaaattgggcataacactaaaattttaaattctgttattggtgaaggatgtaaaattgggtcaaatgttatcatagagggatgctatatatgggataacatcagcatagaagatggctgtaaactccagcatg

SEQ ID NO: 29656 - DNA, 605 bp, Glycine max
aataatcatggagaatggagatttcaaggaaatgggaaagttattccaaaatcaggtagcactggctacacagagtggttcctctcaaaggatcatcttcaggtgggcgacgtggtccgatctagaaagccttccaatgcatgcagacctcaaaacatggacatcccagaaggaactgtcgttggtttagagcgaaatgcagatcacggattcgccctcgtgagggtccatggaattcatgaccctgttaaaattcatatgtcaactcttgaacgtgtcacatttggcttagtagctggtgattgggtccgcctgagggatgaaaatgagaaacactcactggtgggcattctacatgccgtcaatcgcgatggtagagtggctgttggatttctcgggctgcaaactctctggaatggaaactcttcggaactcgtaatcgcggaatcatactgcatctgccagtttgtcaggctcaaagacagcctttcaagtcctcgattcgaatggcgtcgcaaaatgggacgagcctcggccgctggcacgatttcatggattctaccacatggatgcttggttgtcaagttcccaggaatgctcccttt

SEQ ID NO: 29657 - DNA, 402 bp, Glycine max
cccgcctcacgggagacttcgaggagtcctccctggagttccagcggaagatcctcgaacgctctggcctcggggcggaaacctacgtccccgacgccatgcactctattccgccccagccctccatggccgctgccagggccgaggcggaacaggtcatgtttggcgccttggacaacctcttccaaagcaccaacataataccacaggatattggtatccttattgtgcaattgcagcttgtttaaccctaccccctcactgtcttccatgattgttaacaagtacaaattaaggggtaacattaggagctttaatttgggagggatggggtgcagtgctggagtcattgctgttgatcttgctaagggacttttgcaggtccataggaacacatatgct

SEQ ID NO: 29658 - DNA, 457 bp, Glycine max
cttggatttaaatgaaataagctatgtgtctgaggttctcagcgagcttaatcgccctattgtgtattctctatctcccggaaccagtgtgacaccagccatggccaaggatgtcagtggactagttaacatgtatagaataacaggagatgactgggatttatgggaggacgtcaaggctcattttgatgtaacaagggatttttctacagctaatatgataggaggaaaaggtttaaagggaaattcctggcctgatttggacatgctaccatttggatggctaactgatccaggatcaaatgaaggtccacacaggtttagtaaactcctctagaagaaaaaaggacacagatgactttgtggtctttggcgaagtctccccttatgtatgggggggatgtgaggaagattgatgcaaccacatatgaacttatcacaaatcctaccctgctag

SEQ ID NO: 29659 - DNA, 259 bp, Glycine max
caaaatcaaatccaaacaatgatatacccaatgggggacagagtcaggtctgttcttgatgttggctgtggggttgctagctttggcggatacctcctttcctccaatgtgatagcaatgtcattggcaccaaatgatgttcatcagaatcaaatccagtttgccttagagaggggaattccagcatatcttggtgtcttggggacccaaagactcccttatccaagtagatcattcgaacttgctcattgctctcgct

SEQ ID NO: 29660 - DNA, 407 bp, Glycine max
tcggacgcgtgggcggacgcgtgggttccaaccgttaactctttcctctctctctctccccccacctcacacagacagagattgcatttgccagtgacagtgtgagtgaacatcacagaacactggaacacatcaagcttcattcatgttcgttgctctcacataatgttacgttacagaccacttcctttttgtttcctgctcacaattttcttgtccacttcctgtctgttgtcacaccaagcttcagggacagaaaatgagggaaaggatgtagtaggcctttctcggttgtatgtatttgctgctgcaccgtttgagagctcgccccttcccttagctgctgagagaacacgaagaaaagacccccttgatggcttcaataagtacatttatggatggaatat

SEQ ID NO: 29661 - DNA, 454 bp, Glycine max
cgtagattggtttctgagcttcgtttaaaagaatacaataaagaaagctggcagtcttggtatgacaggaatggttctggacagttattgcggcaagctagcacagctgcatgcatgctgaatgagatgatatttggtctatcagatcaagcaactaatgattttgctaggatatttcataggtctactctaagcagaggagttcaggttcagtcttacaaacatgatagtgcatttcatgaattttcctggaagaagtccaaggataaaggtgtaaggagttgtttagttgagtgcattggtgggatcttacacgagtatttatctactgaggtatggaatgttccaattgatggcagaattgctgacttgcagcttaatgctgcagttgaagaagatattagcctatactttttccaagatgctgcaatgctacgtgaggttattattgatg

SEQ ID NO: 29662 - DNA, 451 bp, Glycine max
  unsure (1)..(451): unsure at all n locations
gctcttacattaatccattattatctatatgttccaacatgcctaatctttttcctttttctcttctctttcttttcctctttccatggctactcacttcaatctgcaacaccaactgttcagctactccagatccgtgggattagatatcagacaaagaacaacggcttatgccaattcaaatgcattagatgagagaaacaacaattctttgaatagtggcctgctagttggatctctgtctgtatgttacacatccttaaagaagtgctcatcattggcagcatcaactaaggctcatttttcctgtactgatgatcaaagcaaagaagcagatgaggttaccaatgttacatccactagtcagggaatgaaatttaatagggtggattgtgttgtgtggttattgcatgaatcnttcaggagctttttcgaagcaatcaactcgctc

SEQ ID NO: 29663 - DNA, 365 bp, Glycine max
ggaggcaagaattgtttgagtccaagaagtagaggcgcgaggctttgtcctatgcaaggaggttccaggaagcagtggtggtggttgtaccaccgtgagcagtgaagaaagagtgcttgggaagtgggacccactcaaaagagagagtgaagatcatggcctcatctagctactctaactctccctatgatgcctgcaagttcttgagacgaaaatgcatgctggattgcattttctccccgtatttccctccaaaagagcctctaaagttcgccaatgtgcacaagatatttagagcaagcttctaaatgaggtgcagcctcatcagagggaggatgcagtgaactcactgccctatgaagccg

SEQ ID NO: 29664 - DNA, 446 bp, Glycine max
gaatggtacaaaggacttatctttcactcgaaaaaccgccgaaggcatttcccattgaaaatatatctgtacaacatattaacatgatatactgttaaatcttgtcaaccccagtaaaagctttcaaatagcttctaacctaaaaatgtaatacagtttgtttcctccccaacccccccaaaaaaaaaagaaaaaaaaacttgtcaaccaaatccgaatccttcatttgcttcatgaatggcaagcaggaacctttcttccaaatgttgcttagatggatactctggcaaatctaattgattgaaacaggtatgagcagaaggcaagtgatcagaactcccatatgccttatgtatctgaaacctctgggcacctgaaattccttgaagagcactaaaaccctccaaaggaaccttggatgtgccagtcacaaactgcagcagtct

SEQ ID NO: 29665 - DNA, 461 bp, Glycine max
gtccaggtgatcttaataaatggtaccgtcacatttcaaaaggtgcttggcctttttcaactggagatcatggatggccaatttctgactgcacagctgaaggactgaaagctgttctattactatccaaaattgcaccagaaatagttggtgagccaatagacgtgaagcgattatatgattctgtaaatgtcgttctctcactacagaatgaagatggtggttttgcaacatacgagcttaaacgatcttataattggttggagataatcaatcctgctgaaacttttggtgacatcgttattgattatccttatgtggaatgtacatcagcagcgattcaagctttggcatcatttaggaaattatatcctgggcatcgccgagaagaaatacaacgttgtatcgatcaagccactaccttcattgaaaaaatacaagcttcagatggatcatggtat

SEQ ID NO: 29666 - DNA, 470 bp, Glycine max
tttgtccgtttactttgagtggtcaaaaacctctgcgcttctctctcaagtctcaaagacacgctccctgaaaaccctaacatctaccacttctctgagatctccgccgcaaccgccaatttctccgcgccacgcctttcctcttcctcctgggcgctgacgtcaatctcgctcactcgcggaagtgcgtacgttttcgcgccgcgacttccgccggcaaattgatatcccggagctcagccgccgcctcgccctcatctgccggagtcaccacagcagcctcttgaaactcctcggcgcgtcggtctctggcgccgtcatcttcctcgtctacgagttcgcccccggcgccagcctcgccgactgcctccgcaaccgccggaaccctagcttcaccgatctcaacacgtggatctctcggatgcagatcgcatccgacgtggcgcacggtctcgattacatccacaatt

SEQ ID NO: 29667 - DNA, 388 bp, Glycine max
gagaatttgaattctgattttgtcggggattggtcttgccatttttgtggcagtgctttggtgaattacaggtgccattgagtattttgtaatctttctttgattataattattaaattaaagctggaggaggaagagaaaagtccgtaatactttcgtcactgttatattgatgtgggcctgttgtacataaaggatgagcaaattttggcctttttacatggataggtactctgaggcatttcctgaagtttgccatttgtcaagttggatatgtatgtctattagctctgcatacttggacagtttaaactgcagtgactgtcgtggttagtttttagccgtcataaagaacaacgataatgtctagtgtgtttttcttggttcc

SEQ ID NO: 29668 - DNA, 443 bp, Glycine max
tcacagcaagtgaagtatctggtttttgagtgggtgctgtgctcctctgtgccactggtgctgccaccaaagccgatgctttcttctcttcttctcagcgcaggttctctcttctctcttatctcttctctcttcccttttctttctttatatattattgtttgccttcattcatttcttctaaattcttgtgaccatgaaaccctattagactttgttgggtggcatgtgtttctttggcataattgtcactaacccatgttttaactgtgtctccaatgatacccaaatgcaatcaaagctgtgttataagctcatcatttttttttttaatttctatctcacaccaacatttattgatttatctttgcaatatttatgaattgtggccattcttatgcctaactagttactaaagaatctgcaccatgttttaacttaat

SEQ ID NO: 29669 - DNA, 292 bp, Glycine max
ctgcaatgatgctggattatgttttgcaggggttcatgattcgttttggacacacccatgcgatgttgagaaaatgaatcagattctaagagaaaaatttgtggagctttataacatgcctatacttgaaaatttgcttgagggcttccagactacatatccagcgttggctttccctccattgccaaagagaggtgattttgacttacagaaggttcttgattctccatacttcttcaactgagcaattctccacattcaacaactataagttgcactgaaagtattcttt

SEQ ID NO: 29670 - DNA, 245 bp, Glycine max
gattatttagaatataatctatagaagaggcgcttaacagtaagaaaattggggctttaaggtttaaggaggtgttggacatggcatggtagtactagtagaagcaactaggaagcaccgaagcagttgatgctggtaaataaatgattatgagcattccgtactctctctctctatctctctctgcatacttatgccgtgtctcccactccactcttcactaattaagcgtgctcacactgcca

SEQ ID NO: 29671 - DNA, 450 bp, Glycine max
aaaaaaaagcctgctaccaccaccaatctattgcgcctcaaaaaacaactccctcacgattaacaaactcgtgcattccaccaatcccaaggcacaacagcaacaatgtcagcaaccttaacatgtaaactaggagacaacaacctaagcttaaacgataaaaacgaccaacccccttcacctcctcagcccctacaaaaatgccctgccaatatggtttcgatggtggtctcagagctaagaattcaacgaggaatagcccttccaatggtggccatgaatttggcttggtttgccaagacagccatcacaacagcatttttaggccgtcttggggagcttagtttatcaggtggagctctcggcttcacttttgctaatgtcactggcttctctgtcctcaatggtctatgtggtgccatggaacctatatgtggacaggctcatggt

SEQ ID NO: 29672 - DNA, 291 bp, Glycine max
atcctatcctatcgtagcaaagaaagaaagaaagaaaaccctagcttaccttttcaactttcaagatgctgatcttcgttaagacactcactggtaaggcaatcacccttgaggtggagagttcagataccatagataatgtaaagtccaagattcacgacaaggacgggatcccaccagaccagcaacgtctcatttttgctggcaagcagcttgaggatggacgtacacttgctgattacaactctcagaaggagtccactcttcacttggtgctccggctccgtggtg

SEQ ID NO: 29673 - DNA, 438 bp, Glycine max
cttccgctttctaaacatgtctcagttttccacctccaaccgctgaagaaaacaaaagaaaagaagcgaaacacacacacacacacacagtatccacaccgtatattcccaaaatgcatcatcatcccaaaacgacaacaacagcaacaaaactccgccctctgttcctatgcttcttcttgaccctcgcctcttccgcgcccccaatgctcccctccgacgcggtttcgttgttgtcgtttaagcgtctagcggaccaagacaacaagctcctctactccctcaacgagcggtacgactactgcgagtggcagggcgtgaagtgcgcgcagggcagagtggtcagcttcgtggcccagtccatgggcctgcgaggcccattcccgccgcacactctcacaagtctggaccagctccgagtcctcagcctccgcaaca

SEQ ID NO: 29674 - DNA, 634 bp, Glycine max
gatgatgggtatagatggcgaaaatatgggcagaaagtatgtcaaaggcaacccttatcctaggagctattacaaatgtacaacccaaggttgcaatgtgcggaagcacgtggagagggcttcaacagatcctatagctgtcataacaacatatgaaggaaaacacaatcatgatgtgccagcagctaagaataacagccacactatggccagcaatactgcatcacagttaaaatcgcataataccaatcctgagaagcataattttggcagcagaggtatgggaggaaatgaacaacagccggttgcacggcttcggttgaaggaagagcagatcacttagttttctgaaagaaacatccagtgaggaagaatttttctcacctcacttgtcatctttattttgatgttatcgtattcttttttagtctaaggcctaagttttgatcagggcctatcagtgcaaatcctaataaacaaatagttcaacactgatgcaagaggcaagggcaaaaggtttaaacaggtttgcccagtgaacacaggtttttgatgatgttgtactatttgtaccttttgtgtacattaaaagtgtaaataatgttgtctaatatagttgttcatcatttcatca

SEQ ID NO: 29675 - DNA, 315 bp, Glycine max
ggccaatctccaattgcaattgcggaagacacaaaactcgaactctgaattacttttggctgtgacagaccttgaagcaatgctggaacaaaagaataatgaaatattggatctgtctaccaatacaaaatcccagaagattactaaagagcatgatgatgccacagaattagatcgcttgcggcaaaaaattgcagaccaggatgaagaaatagacaattactacaagcaacatgaagagctaagtgagcaaataaaagaactcactttggagtatgatcttcttaagaaggaaaatgtggatatctctttaag

SEQ ID NO: 29676 - DNA, 399 bp, Glycine max
gtgtatgtctccaactggaccttccttgaaactaaggaatgggactagagtgatgtgtatttgaaaactatagacatgcccctattcatagaagcctaagcaataatcacaaaataactggaatttatatagaactgtggctaaagaaaaatatattgttcttagttcacatatctgcatcatttgtcactggtttttcaccatgtgagtgggatgatttggtgactgtaattgcactttgattgagctaattgcctagttattttcaccattttatggttggctttcactaagggtatacacaatagttggataggtgggggcacattatagaaacaaaagtcacatgatcaattgtgggcctgtatctgtgtatgacaatattttttcattttgtgc

SEQ ID NO: 29677 - DNA, 578 bp, Glycine max
acctgagcatgtggagaaagctttgaagcatgtttaccatgtggcagggagcaaaactaaagcaaaggaattggagcttttgttagcaatattgccagacaataatgggtctctctatggtgatctcaagcgaatttgtgaaactgaccttggtttaatttctcaatgtctgtttgacaaagcatgtcttcaagatcactaagcagtacctggctaatgtgtctctgaagatcaatgtgaagatgggaggtagaaacactgtacttcttgatgctgtaagctgcagaataccattggttagtgacataccaaccataatttttggagcagatgttacccacccagaaaatggagaagactcgagcccttcaatagcagctgtagtagcatcccaggactggcccgaagtgacaaaatatgccggtttggtatgcgccctagctcataggcaggaacttatacaagatttgtacaaaacttggcaagaccctgttcgtggcacagttagtggtggcatgatccgagatttactggtttcctttagaaaggcaacaggacaaaagccactacgaattata

SEQ ID NO: 29678 - DNA, 484 bp, Glycine max
  unsure (1)..(484): unsure at all n locations
cagagatttacaacttctccctattgttatgaattctttcagcaattgctacaggaatgaggatgttgaatgagtccaatttcccccttctctgttattttctttgaaggtttctctgtcctcaaactcagaattaccattcacatcataatacatcaaggaaaacatgagataaccagaataagatcctctatattacagatatataccagaattttcctactgcttcctcagttgaagctccaagtcatgagtctggctcttctaatgaatccacagatatttctactcctctaactcatgatctgggtgtttataatcaaatttcttcagatcagaatactggttctggttcctgtctttccactgttagacctgctaacattcatccacaagtctgctactgtctactgngcaaaaacagaaagccaaatgaaaatgcaagaaactgtagcaggagaaataaactttgatgatgacagtg

SEQ ID NO: 29679 - DNA, 287 bp, Glycine max
cgctcagtacatattgcagcagcatacagcagcggctggggggctgaaattgcagaactctatacgaaatgcttatgccatgggaaaggttagaatggtggcttctgaatttgaaactgcaactagggtagtgaagaaccggagtaggtgtgcagagtctggtggatttgtgctctggcagatggatcccgacatgtggtatgtagagcttgcagttgggggaagcaaggttcatgctggctgtaatggcaagcttgtttggaggcaacaccttggcttggggctca

SEQ ID NO: 29680 - DNA, 347 bp, Glycine max
agagaattagccttgagcaaagaaagggaactttcatatgaagctgctcttttagagaaagatcagaaagaggccgaacttcaaagaaagattgaggagtcaaagcaaagagaagcatacctggaaaatgaacttgccaacatgtgggtccttgtggcaaagctaaaaaagtcacaaggagctgaaactgatgtttcggtgtcaaccatagagagtttgcagttggatggttttgacgtttgatgtgatcttgtaattgtggcttttgagtggatccattattacgatttactttcaataggagtggtttgagagagaggtgtgtaaagattgttgttcgcaggaaa

SEQ ID NO: 29681 - DNA, 447 bp, Glycine max
gaacatggggatctttggagccatatacatccgataaattcaacaatgccactcttgtggctgaatcctgaagcacagaggttatttttatgacccaaggataaagtatttgatgatgttgaggatgattctccataattgattcggaggtttggtgtggtggggaattatccgaatgcccaagggaagaattatgacgaagaggcttacggtgtatagtatctggagtcctcgctgagtaatagacaaaagggtaatgttttgtgtacacccatatgctgaaaaagaaatagaagatagcgaagtatagatgtcacaagtaatgtgacacgagaagaaaacgatccaggcagtgtgtcaaatgagtgtttgtaatattgacgtgtccatgtcattcaaaataaaatgagtttcagtgcctagccactgatagcactgctatttttc

SEQ ID NO: 29682 - DNA, 327 bp, Glycine max
gtgccttacaggaatagcaagctgactcaaatactgaaagattctcttgggtatggctcaaaggtgttgatgttggtgcatataagcccttctgaagaggatgtttgcgaaacagtttgttccttaaattttgcaaagagagcgagagcaatagagtccaacaaagaagtgccagtggaagtgaagaagcaaaaagagaagaagattatggagctagaggaagacatcaaggaagccgaaaaacagagccagaatttaagggaacaaatacagcagattgagttgaagttaaatgagagtaaaaagctcttatttaccacatatagt

SEQ ID NO: 29683 - DNA, 338 bp, Glycine max
  unsure (1)..(338): unsure at all n locations
gaacaaaatgccacatgaataagggttttttgatgtgttattacttcgcttccaatcaatccatgatcccannnaacattgcatcggatttgatagatgaagctaaaaatgctggtcaacaaggtcttgcggggattttggtgtggatgagattcatggctactaggcagctcatacggtacaatacttacaatgtgaagccacgtgagataagcaaagcacaggataggcttatcagactcgctccaggatgtttatgcaagttacccacagtatagggagattgtgaggatgatcttgtcgactggtggtcgtggaaggtgaaggagatgtcggac

SEQ ID NO: 29684 - DNA, 502 bp, Glycine max
agccgaggttgtaaagcgttctcctttgttggaggattttcgctgttcctccacaaggataggctctgaaggtggagttgccttgtctgatgctttagggaattgtgcccatctgaagacgcttgatttgcgagacaacatgttaggtgtggagggtggggtttctctgagtaaagctcttaccaagcaagcagagctaagagaggtctacctaagctacctgaacttggaagacgatggtgcaattgctattgttgatgctcttacggaagcagctcctcaccttgaagttttggagatgagcggaaatgacagtacagctgatgctgctcctgcaatagcagcctgcctagcagcgaagcagtttctttccaagttgaacctctctgagaatgaactcaaggatgaaggtgccaagctgataactaaggccatagaaggccatgtccaattaaaggaaattgatctaagtaccaaccaaatacgcaaggatggggctcaa

SEQ ID NO: 29685 - DNA, 456 bp, Glycine max
gaacttctcttcaaacactcttctatattcctagtactttgaagagatattgaaataaacaacaatggccaattccatgagctttttcctgcttctttcttttctagcttttgctcccttgtgcctctgtcactataaccaagagggttacctctaccctcagttttatgactattcatgcccacaagctcaacatattgtcaagtctgtccttgctaagtatgttgcagagcaacctcgattggcggcttcgattctcaggcttcatttccatgattgttttgtcaagggttgtgatgcttcgttgttgttagatagcagtgaaagcatcaacagtgagaagggatcaaatcccaaccgtaattcagctagaggatttgaagtcattgatgcaattaaagccgaactagagagacaatgcccttctactgtgtcttgtgctgacatcttgactct

SEQ ID NO: 29686 - DNA, 426 bp, Glycine max
  unsure (1)..(426): unsure at all n locations
cgaaccgtgttgtgcccttgaaacccctctagttcacactgtaggtgaagcacctcgcgccgtgaagcaactcttggtgaaacccctatagttcacaagcacctcgcgccgtgaagcatattttggtcaaacccttgctacgcgacttaaacccctatctcccttaaacccttgctacgtcaagcagcggagctcgctccgtgaagactgtctccgtcatagtgagctcgtgtcgtgacctgctccgcgaagaactattgttgtcatcaagcagtatctccctgaaacccgtttggctccacgtgttaggtcgtggtacaggattcctcatttttgtatatgggagggttggtggaaggggntttgnncgttgggattatctcttatgtggtgcttgtttatatagctgagattgcacctcaaaac

SEQ ID NO: 29687 - DNA, 288 bp, Glycine max
cgaggtttctgcctcaatcctctaatctcctctctcccctctcataacacacgagagagagagagattgtgttgtgttgtgtcatgttaaatgcaaagtcttcttctcttcctctcgagtttccccctttcagaaacccaaggcacatgaaatggaaatgaaaatgcaaccataataacctccatttttctccctacaacccacaaaacaaaaaccaccattaacccatttctccaaaaacttgagatcttttgtgtcaaacaaccacaagtcccgcgtcgaacaaat

SEQ ID NO: 29688 - DNA, 295 bp, Glycine max
gatagggtttggatttttcgagcaatattctctctctgtcacttcacctcacacgatctcgttccgattgcacgcgttttaatgatcttcgtcttccacggcctctgatttgcctttgatctctcttgtcgcacctctctgccagaaccatcatctccgtgcagggcgaccaccaccactaccaccacgagattgggttttcaattagggtttttgttgaatcgtttctttgggttttgattctggaatttgaaaattgaagggaaaatgatggaaagaagagaggaagaagagg

SEQ ID NO: 29689 - DNA, 377 bp, Glycine max
atcggtgggcaaggcatgtcgtggtcctctggttcagaatcagaagagtcagcgagccccaacaacctaatcccgtccctcccagacgacgtcgcattgaactgcctaggacgcatccctcggtcccagcacccaaccctctccctggtctccaaacccatccgcaccctcctctcttccccaatcctcttcaccacgcgaaccctcctccaatgcacccaacccctcctctacctcactctccgctcacgccactcctctctcctccaattcttcacgctccaccgcacaaaccctaatcaccccctcctcgctccccttcccccgatcccctcccccgccgtcggctccgcctacgccgtcctcggccccaccat

SEQ ID NO: 29690 - DNA, 439 bp, Glycine max
actcgagccgaatcggctcgagggctaattctgaaaccaagggtactcttaatgatggggaagatattgtctttggaaatgcagtttttgaaatgtggaagatggggaaagataggcttgcattgccactgttaattgatctttgtgagaaggctggggtggatcttccgccttgttttatgcggctaccgatggagcttaagctcttgattttggagcgtcttccgggtgttgatttggccaaagtggcttgtacttgttcggagctgcgatacttgtccaccagcaacgagttgtggaagaaaaagtatgaagaggaatttggaaaagagggagatagaaaagggtggcttttcaaggatttgtttgctttgtcctgggaaacaaagaagaggcgtcaagcggttccttttcgacgacaggggatttcaagaaacat

SEQ ID NO: 29691 - DNA, 656 bp, Glycine max
accacctacagcccctttggactgattttcataactgggtttgtgtttgtgtttgtttttttttaactgaattatctatgtacttgtgttgatccttttgttgtgattcaaaacagcgatgttgttgttcttttagttttgttgatcatgatcatgatgatgggattctagagtcttcaattattggaagtgaggttgcttcaagtgtttttttttattgtattttttttcttctttttttttatcctaaagtctgaaacttgtgggaattttgaacatgaaaagttctttgtaagagttttgtggaagatggggtttaggaataatgcaattcaggctgggagtttggatgtgggaaagtcaaagggaaggatgcaaaaggatggtgctgagaaggaaattgggtgctgtgttaaattctgtttcattgggggctgtataccttcaagatcaaaggtggataactccataagtggcactagtgctaacagtgtggaaaaaacatctgcatctgagaaaagcaagaaggaaacaaatgctcctccagggtcctctacaacaaccagtaatgcagaaagtgtcccttcgactccaaaattcagtgaggagttgaaggtttcttctcgtttgagaaaatttacattcaatgagcttaa

SEQ ID NO: 29692 - DNA, 320 bp, Glycine max
aagcttgaataaacattacaataggcttgtctgaattcatcatgccaagggtgtaccatttggagtctcagctaaaagtttgcgtgataatgtttcagatctggaaggaaatatttccagcatgcggtgacattttgtaattttggatgttcagttttaaggtaactcatgttttctcctacccttttcatttatgatgccagcgaatataatagtaataccataggaaattatgtaccggttaatttacaatagggatgttcaagaaaatgtatgataaacaatagatggacccagtataccagttttggtatcctcag

SEQ ID NO: 29693 - DNA, 165 bp, Glycine max
gcgttccttcataaactacgttaaccatccctattcttcattactctcatgttcttcgtgactcacacatcagtttgaatcccgcattctataatcttctttcattgaaaccgctaaactaaaagtatttttttctcttcttttaaaaccttccacacaacatac

SEQ ID NO: 29694 - DNA, 486 bp, Glycine max
ttgccagatggtcgtccatttccccctctattcaacttaaaacaagagttatctggagcatctccagaacttattgataagttgatacctgaccatgtgaagcggcagatacggctacaacatgcccatttggctggatttctggaacatgatgttaagctcggcaaattgtagtctaatggagatgagttaaaagaggggtaccatcttattgtctaaattacaagtcattataccatggcagtgtaattctgtgcttgactaggaccaagacttgggttctggattgctgcagttgatccatcactccagcaagcatctatatagcttgggtactacaaaattaaagccatagacatactgggtatgtactcgtaactgggtacatacctgtacctagtacatgttgggtatccatgggtgcataaaatacttatttttcaaaaataaattaagtactgaactatgggtacaccctggtactct

SEQ ID NO: 29695 - DNA, 326 bp, Glycine max
aggaaaaggaaaaccttgtatatgtttcttcctcaagcacgccccctgggaacgggagggaggaaaccgacccatgactttctgtcactctacagtaattcaactgcccaacaagatccaaggccaccttctcaaggaagttacctcaagacccatgatttcttgcagccactagaacgggtagaaacgaaagccagtgcgaaggaagaagccacagatgaaatatcatcggtggttcaaaagccacgttcaccttcagttgagcacctcttacctggaggaattgggacttatagtattagccacatttcatatgttaataataa

SEQ ID NO: 29696 - DNA, 424 bp, Glycine max
ggggctcacccatcacatatcaacattattattcaacccctttgccaaatctcgcttcactcttcagcaaccctcctcctttgttgatgctcatgtgactctttttgtgtcccaattggagaccataatggccgccaaatccccccatgactcttcattctccttctcaaggaggtacttccattggaagaacaaggccctggatgaatctgatgacgaggaagaaatcctcaacttctcatcttcatcctcacatttccctgaagaagtcgatgacaaccaagaggatcacaatcatactcacccccaccacctcacactccaaatgccaccacatggtgccatcagcaccaagaaaaaaccccacttctccaagaagtccaagttcaagtccgccctcacggtctttaccacgcgtgtgccg

SEQ ID NO: 29697 - DNA, 280 bp, Glycine max
accattttctcactacggtaatcaactggcaaatacttggacaatggcctcagaaaatggagacaaactagagcttgctttcagtgctgttcctgatcccaagcccaagaaggattgggtcattttgtcccttagggtggtcgcattttttgccacagcatctgctacacttgttatggcattcaacaaacaaaccaaaggcatggtagttgctaccattggcaccaacccagtaacaattactcttactgcaatgtctcagcacactccagcttttata

SEQ ID NO: 29698 - DNA, 342 bp, Glycine max
ccactcttaactcaaaacacaatgacacaacaaacaacaacctcttcctcctcacattcgggcccaagggcccaggcccagaaacagagcaagaggcccagggactgcagcaagcacccggtgtaccacggcgtgcggaagcggaactggggcaaatgggtgtccgaaatccgggagccacgcaagaagtcccgaatctggctcggaacattctccactcccgaaatggcggcgcgacccacgacgtggcggccctcaccatcaagggccagtcagcaatcctcaacttccccgaaattgcagacctgctccctaggcccgtcacgtgctccccacgtgaca

SEQ ID NO: 29699 - DNA, 576 bp, Glycine max
aaacattactgatagttctcatccacaacacaatgatttccaatcccatgttaatgttactagttgtggtactgctggtggttggttttgcaaagtcagattgaagtaaggacagagaagaatgtgcagacaaactaattgacctagctagctgtgttccttacgttggtggtgaagccaaaacccccaccatagattgctgcactggtctcaaagcggttcttgaccggagcaagaaatgcctctgcatcctcatcaaagatcgcgacgaccccaatcttggcatcaagatcaatgctactctcgctattcagctaccctctgcttgccactcacctgctaatattactcagtgtgtagatcttttgcatttagcacctaactctcctgatgctaaggtgtttgagggattccaaaaatctgccaaaacaaacagctccaccccagtttcagtttccagtggtgctgagaagggatcaagctcaagtgctcaggaaaagagtggtgctgtctccacaattacaaaggcacaccacctgttttactctatcttaccattaccattattatttcttg

SEQ ID NO: 29700 - DNA, 336 bp, Glycine max
tatcgagccgaatcggctcgaggtaatttcactttttaattttcattccattttctttactttgcttttactttactgtccttctcttcgttactgcgcaaaaatcctgttcttcggattcgcgttgcgattcggtctagggtttcagttcaacgcgcactgaatccgattgcggaatttccagctctgtatttcggttgttacgtgtcgtttgaaaaatgcatgtccctgtagatccatggcgagcttctttactctctgaaatggcgaggtacaccggttagatggtatgcagcagttgtgtaaggtctttggttgttcaagctggaaccttcg

SEQ ID NO: 29701 - DNA, 274 bp, Glycine max
gctacttgtttttcttttttccttttctcccttcttgatccttcacaccttcacttgattctttccttttcctcaaaactttcaaacacccacttccccatttccttcttctgcatcctcacaatcacttcttcaaatctcccttctacaaaaaactcatttttcatcgcacagctttgggatctatcattcaatccacggtttctggaatgaaactccccgtgtttggtgttgtccttcatcatcaccatcatcaggtttaccataccttcat

SEQ ID NO: 29702 - DNA, 429 bp, Glycine max
tcaaattttggcgttcctatgtgttgatctttcaattgcagtttaccattcgtggtggacgacatgccatgcaccatgctagcctcatgcaaagcctgggagcatcaagagttctgcgtggtgcagctgctgcagcaactgctccacttgaagcaacaatctttgccagaattgctctgcgcaatcttgagtatcaccagatcgagcaagcactagcgtagatgagttcatttgtggtttacagtcccctttctcgaaccattttggacttctaatatttcacatgtagacaaactgtccaatgtgtcataagaacactagtcggtgaccgtgatgcatgtgatgtgaagcaagctataaattgacatgtttctattttccatctttggaactgcttagaaattaagatgtatttctttcctcccctgt

SEQ ID NO: 29703 - DNA, 625 bp, Glycine max
ggcgagcgactcgtcaacgggcccttcaatcaagtaaagatgcctctgcatctagtgctagtgtaattgagtttcccaacggattaccacctgccccgcctagaaaacaaaaggagaagctttcagaggtcgaccagcaactgaagaaagctgaggctgcgcagaggcgtagaatgcaagttgagaaggctgccagggaatctgaggctgaagctatcaggaaaatacttggtcaagactccagtaggaaaaagcgagaagagaaaataaagaagcgccaggaagaactggcacaggaaagggcagccaatgcactaatgcttgcatcaaataccatcagatacacaatgggtccgactggaacgtttgtgactttttctgaggaaatggggcttcctagcatattgaactccaaacctgtcagttatcccccacctcgtgagaagtgtgctggtccatcttgtacaaatccttataagtatcgggattcaaaatcaaagcttcctctttgcagtctccaatgctacaaggctgtccaggagaaggtggtggctgaaactacctgttgatgttgtcaatgatcctctatcactggcttcttccagttatatggaaccatcaatgt

SEQ ID NO: 29704 - DNA, 572 bp, Glycine max
gactttgtcacaattaaaagaaaccatcaggaccacattgaaaacaactcaaactcaagcaagcctctctcgtatactcttagcttttattccttctctctctctctctcttttcttgctaaaacacccaactatagagagtagagatacccatatatatactcttcattaatttcttaatggatcattcacataaacttccttcctttagttgtgaacttagaattatacaagcccaaaacgttgagtccataaagaccacaaaaaacctatttaccaggttatatcttccagcaggaaacaacaaaagaattcaactcaacaccaaaaaagtttcctccaatacccaatgtgttcccttttggaacgagtccttcaacttagattgttcatgtccccaagaattcttggaaagccttaagaaggaaagccttgtgttggagctaaggcaaaacaagatttttaggtcacatttggtgggaaagggtgagattccttggaaggcaattcttgaatcaccaaagatggaattcaaggaatgggtgaagatggatttggtgagtggaattgat

SEQ ID NO: 29705 - DNA, 467 bp, Glycine max
ggaaataggaaaaaaaaaaattcctgtgaacggaaattagggctctcaagttgcaatttcggttgcagattggggtggtaccgttgcaattgcaatgatttttgaagaggaaaaaaaagattcggaccacttccgaagtagttccttaaccccgattagtcatttgcatcctccaattttgatggaatatgtttaatctatgatttcgttctcttaatgctttgaagtttatctagggtttgctattgcaatttggtatcagaagattgattaacctttatctatggcccgagcacgcaatctaattgtcgctgtgggtttagttgctttcgctgcagcaggcatgacatttcccttctacatggcttcatcaaggaaacctgttattgacccaacaaagccacttccaccacaagcaacttttctagggccttacattaacacagggtcgcgtgatgttggtcccc

SEQ ID NO: 29706 - DNA, 370 bp, Glycine max
aaaaaaaaaaaactgtgaacggaaattagggctcgtaagtttcgatttcggttgcagattggggtggtagcgttgcaattgcaacaattcttgaagaggaaaaaaaaaagattcggaatactttagtcatttgcatcctccaattttgatggaatatatgtaatctatgatttcgttcttttaattcttcgaagttcatctggggtttgcttttgcaatttggtatcaatcagatcgattaacctgcatctatggcccgagcacgcaatctaattgttgctgcgggtttagttgctttcgctgcagcaggcatggcatttcccttctacatggcttcatcaaagaaacctgttattgacccaacaaagcc

SEQ ID NO: 29707 - DNA, 647 bp, Glycine max
  unsure (1)..(647): unsure at all n locations
ttgttaacaggatcatccctagctcatgagatgatgcatgcatggcttaggcttaaaggttatcctaacctcagtccagaagttgaagaaggaatctgccaagttttggctcatatgtggttagaatcagagctctattctggatttgggaatgatggtgcatcatcctcaacatcatctttgtcttcgtcatcaccttcctcctcttctgtctcaacaaagaagggtaaacggtccgactttgagaagaaacttggtgatttttttaaacaccagattgagtcagatacctcctcagcttatgnagatggattcagattgggtaancaagcaatggtcaagtatgggcttaaaaggacccttgaccatatccatatgacaggaagttttccatattaaaaattgaaaatttgaaagatatgattctctgacctatacaatggccattaccacagcttggttaataaattatatagttcaaagtttccaagatcatatagtttaactctagagaaaataaggaataaaattgctcctcttacgttgcggtcccttaatttcgtgtcaaatgtggcaccgcatgccttatatgtataattaaatactactcaggaactgaagcaatgaaagtatagaattaatgttgt

SEQ ID NO: 29708 - DNA, 671 bp, Glycine max
ctcgagccgaatcggctcgagaacgtgcctaacaagaagttgtcgtgttcttcagtgtcagccttcgtccatcacaatatgcacaagcatggctgctatttgtctctataaataaaaggcaagttatatggtgagtcctgcagcagccacaaacacaaacacacgtgtcgagtgaattcaaatcaatttaggcagaaaaatgaggtgttttggtcttgtagtgataggtctagtggttgtgcttggagggttacccttctcctcaaatgcagaattagaaccctgtttttacaagaagacttgtccccaggtgcattttattgtatttaaagtcgtagagaaagtttcaagaacggatccacgtatgcctgccagtctcgttaggcttttcttccatgactgttttgttcaagggtgtgatgcatcaattttgttgaacaacactgccaccatagtgagtgagcaacaagctctgccaaacaacaactcaataagaggtttggatgttgtaaaccagatcaagacagagttggaaaaagcttgccctggcgtagtttcttgcgctgatattcttacccttgcagctgaagtatcttctgttctggctcatggtccttatttgaaattccccttgggaaggagggatagtttaacagcaaatagaacccttg

SEQ ID NO: 29709 - DNA, 262 bp, Glycine max
cgaaacattggtgaagtcgacgaaagtctttggtgatttttctgttgccttccgcgcgttgaacttcttcccttccccgccgtccacggcggtcgccgctttactccgacggccaagctccccggaggctgttaactcgtaaataccttttcgcttctctcagcttatcacaacaatctctgattcttcttcttttctctagcattgaagaagcaggcgccttgggcttttaaatttttatagtaattcattgaagcggcaa

SEQ ID NO: 29710 - DNA, 356 bp, Glycine max
catatgttgaaatgcttaaatttcaagaccaattgcattcacatgcatactttcataaagcagctgctggagcaatcagatgttatatcgaattgcatgattctcctccaaagttgacaacagaggaagataatgatctgtctaagttgcttccttctcaaaaaaagaaaatgaggcaaaaacagaggaaggcagaagcaagagctaagaaagaggcagaagaaaaaaatgaagaatcaagtgctggtgggatatcaaagtctggaaaacggcatgcaaaacctgttgatccggatccatgtggtgaaaaattgttgcaggtcgaagatcctttgttggaagcacaaaatattgaa

SEQ ID NO: 29711 - DNA, 306 bp, Glycine max
gctacttaatgcttcggttgcttcgagagagaatcctccaggagctgatgaatttcttcctgtgcttatttatgtaaccataaaggcaaaccctccacaactgcactcaaatctactgtacatacagaggtttagacatcaatctcgattggttgcagaagcagcatattattttacaaacatgctctctgctgagtcattcatctcaaacatcgatgcaaaagccatttcaatggaggaagctgagtttgatgggaaacatggaatttgctcgtgctatgctttcgggtatgtcacctgatacac

SEQ ID NO: 29712 - DNA, 326 bp, Glycine max
tcaggagtgtgcgttgggaagaacaagttcgtgtcagcagaatgggaacatctgtgcaggtaacgccactgtgtggagtgtacaatgagaaccctcgctgcgtagtttggtctccattgatggcttcaacttcctcgtcgtctgtgggctggatcgaccacttcgaccgcttccctccttcaacccctcgccagggtagcatcaaccatagaggctgttttgctgttcacatgcggatacgcttcaccttggtgcccttccatatgccatgaagcggcttggactttctgccccggtttattcaacggagcctgtctacagattgg

SEQ ID NO: 29713 - DNA, 374 bp, Glycine max
cagcattcttcagattcaaagcccaaaaaaagagaaaaagttatggtgtctgaggatcttgggcagaaggctatgcatttgcattctccattagtactgactcctgttgtaagcagccacatatctactgctgttgccacttcaacccctgttgggagtgtgcccataactactgttgaaaaatcagttttgtctgtacctccgctatctcttgctgatcacctcaaaagtgagtggaatgttgagaagaggattctgtcagataagtctcttacaaaaattaaggttgcaagggtaaatgcagaggaagcttcagctctttctgtgctgctgtgaatcatagcctggagatttggatacagttggataagcaa

SEQ ID NO: 29714 - DNA, 142 bp, Glycine max
gtgaccccagatgagcttgatgaggaatttgacacattccccagctcaaagagccctgacattctacgttggaggtacgaccggttaagaactgtggctgggaggattcagagtgttgtaggagatttagctactcaaggag

SEQ ID NO: 29715 - DNA, 278 bp, Glycine max
cagagaattgccatatatgattacatggagaatggtaacttgctaaacctgccttatgacttgccacttggggtacaaagcacagatgactggagcacagacacatgggaagaagctgacaacaatggcattcaaaatgctggctctgaagggcttctcacatcttggagatttcgccacagaatcgcccttggcacggctcgagcattggcattttctgcatcatggttgctcacctccaataatccacagagctgttaaggccagtagtgtgtatt

SEQ ID NO: 29716 - DNA, 581 bp, Glycine max
  unsure (1)..(581): unsure at all n locations
cctcgagccgaatcggctcgagcaacgaggaagcttggaatcaaaacttgnctccgctagggaccttcaattcgtcgccgtggacgcggaggcgaagatttcaatcgccgagaaggaaagtgtggtggcggagttgctgaaatcggcggcgccggagaaagatgcggcgctgatcgaggccgctctggcgagcctggtggcgatttcggcgccgaagcggaacaagttgaagctggtgaacctcggagcggtgaaggcgatgacgaggctgttgacggaggcgaatttgggcgccgcggcggtggagaaggtgttgaagattgtggagacggcgtcatcgacgagggaggggcggagcgagatatgcgaggaggcgacggcggcgtgtgtggcggcggtgctgagcaaggttctgaaggtgtcgagcgcggcgacggagcacgcggtgacgacgctgtggagcttgtgttacctgttccgcgatcgcaaggcacaggaggcggtgacgcagaacaatggcttgaccaagattctgttgctgatgcagagcaattgtgcgccgcacgtgcgacaaatgtgca

SEQ ID NO: 29717 - DNA, 360 bp, Glycine max
gtaaagtccgcggcaccgaccctttttttcacaagaccgcattcttctcatgcctgttgtttttgccattggagcagcatgggatgcattcattcatttctggtagtgatattattttacacaccaccattgcacaacaccaatggatagtgttcatgttgtgttactctttttcttttttctcaaaggcaattgttgcttgcatggtgatattagtagttgacctcaaatgggtcaaaggatgatgtttcaagttaggtagtgtttgtgtttgattttcaaaatgtgttgtatttctgtatgttaatgatcagaaatatgtcaaactggtttaaattaatttaatttgttggagaattc

SEQ ID NO: 29718 - DNA, 284 bp, Glycine max
acggaataagaaatgggaaattagaggaaataggtttgcaattaaagaacaaaagtggattccttggaagcaaaacagaatggaggaggaacagagggttgcacaagtggaattggcgaacagcaggtgcaagtgcgtcattgatgccattaacagtttaccttgttccaccaacatcactgtctcgtgcaggcgaaccctcctcaagttggcacgtgccgagctcgctttcctcttcgccgctcttcttcttccgtgcccctcagggttgttcctgatactcc

SEQ ID NO: 29719 - DNA, 466 bp, Glycine max
gttgggtttctatcaacctgaactcctaatccaacaaacttttttttatttagaaaccaaccaagttgtgttatttctatttggtttggctatatctctatggcactagtcaaagacctatgctaaccttttcttctccctctaaatacaaattctgagattcatattcatccgtctgtgtacaaaatggcaggataggaagactgcttcttggtttctaatttcacagtggactttgctccccggagattctgccagctaaagacaaataaagatataggtgctatcgaaagggttctgcgcatggacacagtcatcctagaagattcaacaagattacatcactgagagactctgcctggtttactatttctcaagccaaaaattcacgtgatgcaaataacaggcgaatcatgttttagttaggtctgctgatctagctcctacatcatatgacaatgctaag

SEQ ID NO: 29720 - DNA, 366 bp, Glycine max
cgcttattcacccttcattaccaaaatggatattcatagtaatcatggtgcaacttctgaagggattcttgagactgtgtgggccaaaattatgagcagtgatagagcagatggaagaaaaggtgatgccgcagaatgttctaactcttgggaagaacttcctaaccttgatcgaagagaagggtccatggaaattctacaaaggcttccaagtttagggaggtggatatcaatgggagctgatttctgggaagaagttttagaaggtattattctacctaacacaagcaatacagaatattccggtagcaataacaacttggaaattggaagcgctaatgaaactcataacaacgtgcgagatgc

SEQ ID NO: 29721 - DNA, 309 bp, Glycine max
gaaaaaaagaagaacactccctcttcgtggacccgagcttcttcattagactcgagcctcactccctcttcatcgacccaagctctcatcaacacgagcttttcatcatatgcacacccttgactgttccgaacatttttcttctctcttcatctcttctctttacctcttcatttgaatctaccacagttcaaatatcgttggggctgtggtaggcttggccgaagattcatttgggagataagattctatgtgtaggtacgaaagaccagtttgatacgtggtctgcaatgctgagagaagttattt

SEQ ID NO: 29722 - DNA, 662 bp, Glycine max
ctgtctataaaacttttagttacataacataacataacataacaggtagcttcattgacttgtctcttttttttaatgttttgagttctttttctctcatggatttgattattgatactaatttgcgttatgtataggttcttacaaatgggaaatacaggagtgtggagcatagagctgtggctcatgaggagaaagctagactctcaattgtgacattttttgctcctagctatgaagtggagcttggtccaatgcctgagtttgtggatgaaaaccacccatgcaagtataaaatatacaatcatggagagtacagtaaacactatgtaacaaacaagttacaaggtaaaaagaccctggaatttgccaagatccaaaccaagaacacaaactaggaagttccctaactagttaggagaactataattagactgactaatgactgtgtgtgtagaattaattatctaccacataaaagcatcatggtcaaatctctcgattctatttttggtggaaaaggtaggcaaagtaattagttggagtgatgtaggagggtgtgattgtgggtcacatacagaagactcactgtttcttattccaaatatgtatatgctatatatctctcaatggaaactagtggcatcttattttaaaaaaaa

SEQ ID NO: 29723 - DNA, 297 bp, Glycine max
tgaagttgctctctctgtaaccccccaaacccaaaccttcattatctcaattctcacactcccatttctcccttctcttatttattattattacacacatcatcacaattttgtcaatttccccgaagaaaaaaaaccctaaaaaatttgctcctttggatccatccaggggcacaccccggatctccgattctctagatcactctcaagttctcatctttttcgtttttggcgcagtgggtcgttgttaaatacatggtttctgatctgggtttgatttaagttgggggtttctgg

SEQ ID NO: 29724 - DNA, 369 bp, Glycine max
atcatttacttcatggtgcaatttcatccgggtttatctaattgtgcatttttctgtatcaacttgttctgctgcctatctgttgttgagtgctgcatcatgattgttgcctcagtggtccccaatgtgctgatgggcataggaacaggaactggtgtaattgtcttcatgatgatgccctctcaaatattcagatcattacctgacattccaaagttcttctggcgctatcccatgtcctacctcagttttgctgcttgggcagttcagggacaatacaagaatgacatgctgggggttgaatttgatcctttgctgccaggagatgttaaagttagtggagaacaagtgctatcattggtatttggt

SEQ ID NO: 29725 - DNA, 279 bp, Glycine max
aatcattgttcattcggcgaattatcctattcaaccactcactgcctttcgatctctctctctctcctgcgacacaacatctcattctaaattcccttcaatttcatctctcacacatccatacctcctcaaaccataaaaaaaaataaaataattcaccttttcgcgttaataagtcacttcccaaatcgtcaagctattgatggtgtgatgagtctcaactctctagtaaggagcttgttggattgaaaaaggaacttgtgtgggttagcagatggt

SEQ ID NO: 29726 - DNA, 266 bp, Glycine max
gaaaaaaaattctgcttatggtgaggtatagacatctagtatttgtaagataatgccattatttgcccctttttttcggacacacacatttagtgttttcaaaatgcgttagcttggaattacctttccagtgaaacgtaccttttgttttctcttttgcgattgaattagtgagaactataactttgtttctactcaatcacgaaactattaaatgagttatagtttgtgtttaccctttaccaagctgtgactacaagtataag

SEQ ID NO: 29727 - DNA, 559 bp, Glycine max
aggtttttcctggatcaggctacaaaggtgggaaaaagtggaagtatcactatctacaagagacatgaaggcaaggaagcaaagtgcaacagagaaggcactaataatgaggaagtgcaaagaattagagtttctgccttgaagctggatccagaatattggaagaatgtaccccgtaggcattgctgtcaacttttgggtggtggaagcataaagaatggcagtatgaatatcaggattaagaagtgcagacctcatgaaacaattactatttagggatcagccatttttggttgggtgggcatagttacttagtagaattactatagagtgagtcttataggtctggccactaacatttccacccatgtacatacatagttatcaaaatattcatatagtttcgacttttaatgaataaatgtccaggacatttttcacttgtatgtatagcctcaaatatctagatattatgggaaatatgtattatttttctctccattttccatattctgacttccgtttccaatcatgcaagcacatgcttcttatgactaca

SEQ ID NO: 29728 - DNA, 622 bp, Glycine max
gtttaaaatctccttcagttccactgtccacaaatgtacttctgtcaatggatagccttccaccacaatcaattgcagcacagactacagttggaagaattgggttaagtaatattgacctgaataatgtatatgatgatgtacaggattatgttgagaacacgaggaattcttgtcctcctctgccttcagggaatgggtctcttgatcatcctttatggatccaatgtgactctctcaagtcaagtccaccacagacaagtagaaactcagattcaacctctacccagtcaccatctagttctagtggagaagctcagagtcgtacagatcgaattgttttcaaactatttggcaaggctccaaatgatttcccccatgctctccgatcacagatccttaactggttatcccacagtcccacagagatagagagctatataaggccaggctgtatcatgttgactatatatctccgcctagaaaattccgcttgggaagagctatgctacaatctagaatccagcttgagaaagcttgctgcgccaaatgattctttctggagaacaggatggatatatacaagagtgcagcactctgtagcttttctgtataatggtca

SEQ ID NO: 29729 - DNA, 524 bp, Glycine max
gtaatgctggggagcaattgacctcagagcaagtggaatctggtcatcctcctgatactgctggaccttacagagttcttcttaagcatcatgaatcagataggaaaaatgaaccaacaaattgggaggattcagagacaaccaatgcaacacatgttgatggcaggggacaaccaagaatgactgtttgggagaatgagcagagatcaaattacagaaagaatgaggagagggatttgaggacaagtactcgtggtgaagtttcttctcagtcttcagaaaatcaagtatctagttcttctgtgatgaaggcaaaatttcccgaaagttcaggaaacataaaaaaatctgatgatatttcagcaaggaaattggatggtgttgcctctgatatgctagaaatctcctcaaaaccatctgcttcaaaagatgccagcctgattcaaaagatagagggtttaaatgcaaaagccagggataattcatctgctagaattagagaggagcaaaggaataaaattcat

SEQ ID NO: 29730 - DNA, 296 bp, Glycine max
gtggatcaggtgggcttaaggttgaattagggcagccatctgggaaattgagtgaaattgaggagcagggtgggaatgatggtactgatgtgcaggggattgggcagcaaccacatggtggagttgttgggagtgtcgggaatgagggtttggtgagacaaggtcaaggtggtggaggaggagcagggaatgttaatagggttggtggaaatggtgttgggaatagtgtgagtactgttaatagtgttaatactggaggacgtggaggtgttgtcgttgttggtggtggtgctccc

SEQ ID NO: 29731 - DNA, 366 bp, Glycine max
gtgacttttagcaagttgaggattgacttgctcaaggatggtgtttctggtcttgtcttgaatggtatggggggatcggggaaaagcacgcttgctaagaagatctgttgggaccctcaagtcaaaggaaagtttgagggaaacatcgtctttgtcgccgtctcaaaaacaccaaacttgaagtacattgtagagacactgtttgaacactgtggttgtccggtgcctaagtttcaaagtgacgaagatgcaatcaaccgactcggagttctgctgaggcttgttgggaaaaatccaatattgttggtcttggatgatgtttggcctagctcagaagcccttgttgagaagtttaaaatagacata

SEQ ID NO: 29732 - DNA, 545 bp, Glycine max
aaacgagggagcaaaaattgggaagtagcatcatggggtcagaaagagagtgtcaacttcctctacctgttgttgatttctgtgatgaaaacctcaaacctggtactgacacatgggtttccgcctgtgatgttgtgaggggtgcattagaggatcacggtggatttctagcactctacaacaaggttgatccactgctctatgactctgtcttctctgcaatggaacaactctttgatcttccattagaaaccaaaatgcaacacaccactgataaacctatctatagctatgcagggcaacgccctgatattcctttgtatgaatccatggccatcgccaatccgttgaatgataaagattgtcacgagtacacaaatattatgtggccacaagggaatgaccaattcagtgaaagtgtgaattcctatgcaagaaagtggtggaactggattatcttgttaagagaatggtgtttgagagctatgaattggacaataagaaatttgagtctttgcttgaatcaaccgattatattcttagat

SEQ ID NO: 29733 - DNA, 288 bp, Glycine max
tgaagtgttaacagtacttgaagaaagcgctgtggtcatgcaagacattttgccttctgatgcatctcacgatgctcctatggagattgccccccaacatactgcaactttgactgttgtggtggctgatgatgcttttgatcaagatgttgctggctcgcttcctatgtcacctgtcaatgatactccagagaacataaaggaatttgttgagtgcaacactgatgatgatcaaggcatcagtaagggtgacgataaccaagatatgaacgatgaaactgaagattt

SEQ ID NO: 29734 - DNA, 479 bp, Glycine max
ctcgagccgaatacatatccgattgaaagaataagtagcaactctgtagcctcttttcccatcatctccttacctcctcttttttcaaattagtcctgcagaagaagatcatcatgaggcgcttaaagtcaagaacaacaccacttttgtccaagttcgcgccgttgttggagccatggccaaatgatgctataagaaaggaactataaacctgatcaggacatttgacctgaggaaaccatgccctctaggcaagtctgatgcttggcttttcatctctgctgttgagaatcaaataaggcatggctcacctcatgaaattatttagcatatcatatctgtttgatattagtataagtttttctgtttactacctctcctccttcctttcccagttgggacaatgatatgttatgtatatccttctctgctctacaacagctgcttttgtaatactacttgtatgaaagttttattat

SEQ ID NO: 29735 - DNA, 517 bp, Glycine max
caagaaagcaacaaaagggttcaaggataaagggctgcttggacaaggtgggtttggtagtgtttacaaaggaacattgccaaattccaatacccaagttgctgttaagagaatttcacatgactccaatcaaggccttagggaatttgtgtcagaaatagccagcataggccggcttcgccaccggaatttggttccgttgctggggtggtgtcgccgccgtggtgacctcctccttgtgtatgatttcatggaaaatgggagcttagataagtacttgtttgatgggccaaaaacaatcttaagttgggagcaaaggtttaaggtcatcaaggatgttgcttcagcccttttgtatcttcatgagggctatgagcaggtggtgatacatagagatgtgaaggctagcaatgtgcttctagatggtggactcaatggaagattaggagattttggattagcaaggttgtatgaacatggggctaacccaagtaccacaagggtggtggggaccttt

SEQ ID NO: 29736 - DNA, 582 bp, Glycine max
gagcaagttatcagtgtcaactgggtgggcacattcctgggaatcaagcacgccgcgaggggtgatgatcccttctgggcgtggcagcatagttgcaatggctagcatttgtggaagaattggtggcgtggcttcgcatgcctatacgagctcgaagcacggcatcgtgggactggtgcgaaacactgccgtggagcttggaaccttagggatcagagtgaatagtgtgtctccttatgcggtccctacgcccatgagtaaaactttcctcaacactgatgatgaggggattgctgcactgtattccaatcttaaagggactgttcttaagccccaggatgtggctgaagctgttctttacttgggaagtgacgagtccaagtatgttagtggccatgaccttgttgtagatgggggtttcactgtcgtaaaccctggtttgtgtgtgtttgggcaatccgtgtaggtttttaatttgtactttaagtcgtttcaagtgttttgaattacatcagccaaataatgaccaaataataaaacttttgatatattgtttggacctgtaaaaaaaaaaaaaaaaaa

SEQ ID NO: 29737 - DNA, 266 bp, Glycine max
gaattggagatgtgccgctgatggtggtggtgggtatgatgtgagaagcccctggtttagtggatttggattgattagcttagaggcctcaacagatctaccattatttgttcaattgtaaatgcattttgacatcccaaatctgaacccctatacatgctgcttgtctttccattaagatacccctgactcaatattgtgtagcacaacaaattttcaatgcacgttatttgcttttattttaaaaaaaaaaaaaagggcggcca

SEQ ID NO: 29738 - DNA, 436 bp, Glycine max
ctgcaattttctgggctttggctataataagcctctactgcaagctagattgcaatgctcaagcaccagcaactgtgccggtaaagttgccacctacaactttgccacctacaaccccaactgcaacatctccatcttccagcacgccactggcggcacaacacaaccacccacagtggtggcatcccctcccaccacgagtacaccaccaaccacatcccagccacctgcacatgtagctcccaaacctgctcctgtgaaaccatcagctcccaaagttgcacctgcttcaagcccaaaagccccaccacctcaaattccaataccacaaccaccaaaaccttcaccggtctcaccacccccgctaccaccaccacctgttgcgtcaccaccaccattaccaccaccaaagatagcaccaacaccagctaaaaca

SEQ ID NO: 29739 - DNA, 502 bp, Glycine max
cagtgttttctctccaccttttgaagaaacacaggtttcctcggaaaataacaacagtgacctaatgcaagcacagtctgagccatctctcccagtgaaggaatcttccaagagtcaagcaaaaagggaaatggtaaaaaataagagtccttctgattcaagcagcagaaaggaaactgaaagtaaaatcaattcaagcaaacagaaaaagacatctttcactggaggcaaggaaaaaccaactccaccaagtcttcccttgtccccaaaacacaatgtcaagaaacctcaaagcttaagctccaagagtttaaagaacatggcaagagagtcctctctgaaacctcatgaaaatgttgaaatcaaacctgaactagctagcagtgacaatatcttgcatgtcacagagccagcctcagaaaattcatctgaggaccctactgtggcttgtggtgcaagtaagttgtcttcaccctcaccttcatcatcagggaacaaaagc

SEQ ID NO: 29740 - DNA, 319 bp, Glycine max
ggagaataggcctttcaatgaccaaaggtacttcttggatgatgagaagctcaaggatttggggtggtctgagggcactacttgggaagagggtctaaggaaaaccatggattggtatgtcaagaatcctgattggtggggtgacgtttctggtgctttgcttcctcatccaagaatgctcactatgccaggagttgagaagtactatgatggctctgataatgtgaccggaaccgcttccaatggtgatgttaaccattctaatcagaacagaatggtggttgttccagccacaaggaataatgtgtcaccacaaaag

SEQ ID NO: 29741 - DNA, 540 bp, Glycine max
ctggaaaggagctgcaaatacactgactagttggataggaacctaacagaactactgccagctaatacatggacgattcagttacaaagagcagaatggatcaaattcatgggagcttttgcaaatgttgaagctagagccaatcaagtctatacagcagttaaggcaaactatttgtgcttggctaaaattgctacaagtaggacaacattcaagccaacggtagcttggatgaggtataaaaatggtctttggtcttttacacaggaaaagtatcaattgaagtacgtgcaagatgcaggcggagagattttgggtgccaacaagaacacttacaatgtctctgatcctgatgacttggaggaatttcatgccatcctatgtaccgtggaagtagtcattgatgaaacactaacatctgatccagtcaactacaccttttcaacatttatccaaaatctaaacgttgaagatcgttcttgtttttcttttatttcaaacacaagtctatggagatatgacaaaagggtttataattct

SEQ ID NO: 29742 - DNA, 791 bp, Glycine max
ttaatagatgacgagacagaaaaggtgaaagggtatacaaaggaaagcctggttccctatagggagagactaaaaattttggctggagtagttaatccagaggaccttaatctgtattctgccgagaagaagcttataaatgcctacaatggcaagccagttttgtcacgtcctcaacacgagttctataagggacctaactactttgaaatagatctggatatacatcgctttagctatatatcaaggaaaggacttgattcacttcgagaccgtgtaaagcatggaatacttgatgttggcctaactatccaggcacaaaagcaagaggaacttccagaggaagtgttgtgctgcttaagattgaataaaattgattttgttaaccatggccaaattcctacacttatgactcttgacgataactcgggcgtgcattagttgatcgatggggagagcagaaaagaaaagagaagagattcattgatatttatgaaagaatggggtgccaaatctatttaataaaacgagggaaaaaaaaagaaaaaagagaagcaaatttgaagaaatttgaggcttctctgatatgcaaaattgttttttttattatttatgagatgatgtaattaaagtcctatatgttactttacatgacaattttcttcctccttgtgttgtcaagatgactaattgaaaaggtgacaattgtaaaagagacatcttggattattaaagaaacaattatagattatagaacaaattatactaatattcttaaaatttgtatatgt

SEQ ID NO: 29743 - DNA, 329 bp, Glycine max
ctgaaactgagacccctcaaccaatttcattgcatataaaatatgagaacacatattgatgatagtgcatctgggaagaatcaccatcttccaatgctttggttttttgattcttctctgaggctttgtgctattcctctatctgtggcaaccatgtggatcactgtgactaacaaggaggacaacagcagctatggaatgctgaaatataacaacctctctgctctaaagtatatggttttagtcagtgccctctgtgcttgctatgctcttcttgctgcagcttgctccttggtcagatgttttgtatccaaagcttggattttctt

SEQ ID NO: 29744 - DNA, 291 bp, Glycine max
agaggagctgctccttcgtgcagctaaaaaagctggaatggatttccatgagttgctggatatccctcaaggagatcggaggaagtaccatgatgatgttaccgttatggtggtatcactcgaaggaagaatctggaaatcatcagggaagtatccgtgagatcttattcaactccctgttgtctgtatacatatttgaggtgccttgaagccagtgccatactttccaacttgactcatttttcatgggtctttttagatgttcattcttgtctaacaaaataagttgtg

SEQ ID NO: 29745 - DNA, 312 bp, Glycine max
aatctattaggtcctcaactactgctcctgacaacactggatttgggaggactatctcaaagaaatccttggatatggctattaagcacatggatataaggaacagctcaggaaatattcgttcactatcaagcaccacactctttcctcagagtattagaacttccacttccaagtctcatcgagtctcgagtgctccagcatctgttgacatgaatggaagcatgataagcagtaaaaatggagccaattttgatgtgggaaatggtattgataggaatatgatgatgaaaggaagagatgcagatgaaa

SEQ ID NO: 29746 - DNA, 246 bp, Glycine max
atctcctctaattgattcctcagttctgttctatttttcgtaaactcttcttcttcttcttcatcgtcccgaggctcagcgatgttctttcatagggttttgtcccgtgtctccaccaacatttgccgaacttcgctcctctctgcttcgcaaacaccccaacacttgtcctccttcgcaaatatcaacttacattcccttcttccccattcacccaacaaggtgattcctgttcaactcaatttg

SEQ ID NO: 29747 - DNA, 301 bp, Glycine max
gttagcttcctgactgagcaaattgcatatttcaccggcccaacagttggagggcttctgaatgcaacatgtggaaatgcaaccgagatgatcatagcattgttagcacttcaccagaacaaagttcatgttgtgaagttgtccctgctgggttccattctctcaaaccttctcttggttcttggcagttcactcctctgtggtggtttagccaatcttaagagagaacaaagatatgacagaaaacaggctgatgtaaattcactgcttttgttgctggggttgttgtgccatttgctgc

SEQ ID NO: 29748 - DNA, 343 bp, Glycine max
tgagaaagtgccttctctttcaaagaagatatattcatctatatccccactttgcacctcttcaattaatcaccttaactgattaatattctagctgatcctcttgttttttttgctcgtttgctttagggagttcctctttatatacatcaaatttcaatctatagtggaggaatgaatataatcaaataccccctcccctgcctcacaaattctgaattctccttcttggtctcttaggctgagagtggccctctctttacttgttctcttcactttcatgtcagcgttggtatatatagcatcctatatactatagcttgaaatcatttctgggaatata

SEQ ID NO: 29749 - DNA, 908 bp, Glycine max
gcaagctaactaagggatttttgcatagagacataaaaccagataacttccttatgggtcttgggaggaaatcaaatcaggtttatattattgattttggactagcgaaaagatacagggaccctaacacaaacaaacatattccttacagagagaataaaagcttaacaggaactgcacgttatgcaagttgcaacactcacatgggaattgagcaaagttgtcgtgatgatttggagtctcttggctatgttcttatgtactttttaagaggaagccttccttggcagggtttgaaagctgctaccaaaaaggaaaaatatgacaatatttgtgagaagaaattatcaactaccattgagatgctttgcaagtcgtatcctgcggagtttgctacttactttcactattgccaatctttgacatttgatcaacacccagattatggatacctgaagcgcttgttccgtgatttgttcaaaagagaaggatatgattccgactatatatttgactggaccatcctaaaatatcagcaggcgcaacagacaaagaaacaaaatcaatcatctccttcaacagcagtgcctagcagtctagaaccagtagttatggaaaagcataaaggagtaaatgattcagctcatgttactgtaacaaaaatgttggccaatcttgaacgtccaagtgcacgtgcacgtgcacgtgtgcagcctaagccatctaatgttcggaatctggatgccaagaatcatactgagaaacatggtgtgaacaatagtccatctacttcctctgccattcccaaatcctctacagaaaatgtctcaaaaccagaaaggcccacaggaacctcaaaccttggtcgtgtatttgggagtaatgctcgtgtttcaagcagctggatt

SEQ ID NO: 29750 - DNA, 431 bp, Glycine max
gaaaaaagggcttagcttaagttttgtttgattattggggaggttacttcttcttcttcttgctttcagtttgggttgctttacatcacaggataaggatattgatcgttggcacttcaatatatctaatctaagagttcactgaggggcacaatagtgtcataaaggtggtgaaggcagagatgaatttccttattatatcaatgagtggcacatttaaccttttgaaggaaatgaaacctttcttggagttatcaacataaataagtgaaaactgaaaacctgcaagtcatggaggacagtgaaaggtgtaggtttgaagaaaagtcattttcaaatggggatgtctacattggtaaaatcaagggcatgcttccccatggcaaaggaaagtacacatggtcagatggagcagtatatgaaggtgattg

SEQ ID NO: 29751 - DNA, 416 bp, Glycine max
atgattatatgttattttactcattattattcatctgaattgcttgtacatgtattgaaggttgatcatcagtatctattggatcggtacccgcctgaaacagaggtaacctggggtgatgaaccttcgttgggcgagcaacaacgattgggcatggccagacttttttaccatcagcctaaattggccattcttgatgagtgcacaagtgctgtcactcctgatatggaagaacggttttgtgctaatgttctggctatgggaacatcatgtattaccatatcacatcgtccagcattagttgcattccatgatgtggttttgtctttagatggtgagggaggatggagtgttcatcatagaagggaggactcgtctcctgaattggggaatgatgcagtgaaggctttggagac

SEQ ID NO: 29752 - DNA, 622 bp, Glycine max
gctgagtgaaattatagagcagggattcttaaataaacctaacctgccacaagattcatcattatttgtactgtcaatgtcaaaaaaagttgagctaacaactctgctgttcttggccaacactgttgtgatggcaggccatagattctattatgtggcaaagcatttcaaattctgcattcttgttcatgggagagaacttggggaatagcaacgggagagggtgtgctgagaatgatgcagatgataagaattcctgtagttatcgtatcaggccatccaatgttgtatcaccattattaaaatttatgtcctcttttttattcgttttatcatgaagactaaccatattgaggaaggtagagattgctgaagctgctttgaggatttgttaataagcattatttgtctccttggtcaaatagatgatgatggtttaccgtaccagtagaaaagggaaagcattcgcttttttaaggacttagtctgtgtatgctgactcggatgatagttagtttaagctgtaggtggtgagaatcctatcaccagactgatataagcgaatatgcgctccccttattgttttctctgatgtatgtttctgtagctccagacttttgaa

SEQ ID NO: 29753 - DNA, 551 bp, Glycine max
  unsure (1)..(551): unsure at all n locations
caaaaaccccaactttgttctccctcaggttctctcccttgactcaattctaaaatctcaataaggttctttgtttttttcttacttaataataaatttctcttcttttatggttactttagggtttgtggggttgcattgaagatggttcaattgatggagagaacatgattttggaagatcatgatgaatggattttcaagctacaacgggaattcaagaaaatctgaggtggatattcaggttttccaatccctcggtttgttatgctttttatgttcaacttatgtttttcatgcttaatttacctaggactaggagtattgtgtttcttttgtttcttctgtattggagcgctatgtttcttgtgtttcttctgtattggagtgctatgtttccctttgttaagtgattgtgtcttcttggtacttcttcagtttcgagtttcttgtagtgatttgaataacatgcaaattcaataaaagagctagtttgctctagttattgtatatttccaagttagtgcnnnnnnnnnnnnnnnnnnnnnnnnn

SEQ ID NO: 29754 - DNA, 431 bp, Glycine max
  unsure (1)..(431): unsure at all n locations
gggaggctgaggagtatgatgagacacgtgagaaacttcagatgatcagggtgaagtttttacggttggctcataggcttgggcaaactccccataatgttgttgtagctcaagttttatatagattaggactggctgagcaactccgaggaaggaatggggggcgtgttggtgcttttagctttgatcgtgcaagtgcaatggctgagcagctcgaagcagcaggtcaggagccacttgatttctcttgtacaataatggtccttggaaagacgggagttggtaaaagtgctaccatcaattctatttttgatgaggttaagtttaataccagtgcttttcatatgggaaccaagaaggttcaggatgttgtgggaacagtgcagggcattaaggtacgggtcattgatacaccgngacttctaccttcc

SEQ ID NO: 29755 - DNA, 247 bp, Glycine max
gagaagctgaggcaatctcttgttaatgaggggaatgaaactggtggaacattttttaactctgaagctgacaatgatgacaatgaatatgatggtggaaatcctgattttgatatgccggacaatgcttacatggaagaagatctaccatctttcagtaatgagcatgaatttgatgatgctcatgtcaaccctgatgaagctgtggatctttctcagactagtttggaagatctttgccgctctc

SEQ ID NO: 29756 - DNA, 540 bp, Glycine max
ttcgagcgattcggctcgactcttcaccagctatagtttttctgaactaactgcactgccactgaacacacagcaatggcagcttcttcttctcttttctcctcttcaatgcatatggagatgtttgctccaaagacatcaaagtgtccccaaaattttgtatgctgtcatagcaaaatctcctatatagaacctaattatttaaaaccagtatgctgtcctaattcaagatctttaagtatgaatatgtcatcaaaatgggaacaaacggatcgaagagatgcattgcattgccgcgctttgaaaattgagcctgcaccttccttttcggtggggcagaaatttcaatttgatgatattatagaagctcaacagtttgatagagatattctcagtgccatttttgaagttgcacggaatatggagaacgttgaaaaggattctcctggtagccagattttaaagggttttcttatggccaccctattttatgagccttctactagaactagactttcatttgagtctgccatgagaaga

SEQ ID NO: 29757 - DNA, 662 bp, Glycine max
tctcgagcgaatcggctcgaggccgtcgtgcactttgttgatgtacaggtaccgcttcagaaaaaagaagggtccggagtgagggatttcgggttcgggtgctgtcggaaggaagtgtgcgtggattcgttggcggagatgatcgcgtttgttcattggagcaagtgctcgaacctgataagtggagagagaagagccgtgtgaggcgagtgatgatgagaagcgaagtgctgttactgccatggacagtatattttctgtgctaacccattacagtgaggccacagggagattggtgtgtagaaagaggtccagcattcctgacgtgggtcttttaagcacatccttgattatttctcttggtagaatcaaacaaagctttgtattgtgagttattggaaatgtctagttttgttattactttaccgcaagctttatgcttttttgcagacccttaatttgttgtttgtatgattttgagtttccatgcagaactaatccgcatttaccagacatgcctattgtttatgctagtgacgccttcttgaaattgacaggttctaaagccgttaccttgtataaattagatcaacttcaaatgaacttctacaaatgtaaaatgaattaaattttcatctcaagttaatatcagcctatgcatt

SEQ ID NO: 29758 - DNA, 740 bp, Glycine max
gtgaagatgtagagaataatgaagcagacaggtttgattggatttgtatgggtcatgaccccccgttgatggaatccaatcaaacctgtctgtgaagatgtagagaataatgaagcagacaccttaaaatcaagtccaaacccagatgaagttgctacatctattagtgttaatgaaacctcttctgtaaagttttctgccaagtccagtttgaagacatcctcaaggcatgatcttgctatggttttcacctgcaaggtctgtgaaacgagatccattaagacggcttgtcgcgaatcgtatgagaaaggtgtagtggtggcaagatgtggggggtgtaataaccttcacctgattgcagatcaccttgggtggtttggtgaaccaggaagcgttgaggacttcctggctgctcgtggagaagaagtgaaaagaggttcagttgacacactgaatcttacattggaagatttagctggaaggaaaccttgaaagatagaatttgaccaagtgtatgttctgcaatagggtgtcactgagagtttggaagtgcaagggaggtaacaatagttggttttgtaaactcggctcttctgtctataattatgctagtaatattaaaaagcaacatattcaatgtactgtttgctttatcaattatttttggtgcctgccaaaggaatgtttttagaccatgatacaccttcatgtgcaaaatttagccaagaaaggaatttatg

SEQ ID NO: 29759 - DNA, 384 bp, Glycine max
acgagattacattggcttgggagctatggcggcaaggatgttgcagaggcgattcatttcaatcttctcaagacaaacccatcaccccattactcaagaatcttggtattctcctaccagtgcaatattaaacagttatggattccatcaacggggggtcatgacccatacaaatccaatcaaacctgtctgtgaagatgtagagaataatgaagcagacaccttaaaatcaagtccaaacccagatgaagttgctacatctattagtgttaatgaaacctcttctgtaaagttttctgccaagtccagtttgaagacatcctcaaggcatgatcttgctatggttttcacctgcaaggtctgtgaaacgagatccattaagac

SEQ ID NO: 29760 - DNA, 514 bp, Glycine max
tttaatttccattgtctttcctcctcaaaattattttcactcatcattaatatctcctaactctcaatcatcagtttcgtttctgccttctcaggatcctttggcactttcaaatggaggatgttgatgacaagctgccactgccagaaccctcttcagtaagtgctgaattgaagccacaggcagaaaccactgaagaaaatcctgaagtgataaacccacccagtagtcagtcttttgttgaagctcctatcaaccaaattaataataataataatagaatggattctggcactcatttgccagtaaccgagttctctgacttaggagtgtccctaaatgcttttgatggagcagaacaaaaccaccagggagccacagttgcagattccgaacgagggccttcggaagaagatatctttaacaggcagcaggatggtgtttctactgccactgctagtggtgatgttgataatccgatgaatctctcaacttcctcttctgaaagaaaaga

SEQ ID NO: 29761 - DNA, 305 bp, Glycine max
gcttcgaaggcgtgtgacaagaaacctcagagagcgtttcctctgtctggggtccattcacaatttcacatttcattcatattcattacttcatggtccttcaacaagctccttaatttcattctctccttccaccttttcctcacgcatcaccgtttcttttgtttctgtcttagtgtgccgtgtcccaatacatacataatagaacaacaaacacacacacataactctctctctctgctgaggtaattactgaaatccgtgcctgcttccacccttttgccgaagtttgcaaatttttctct

SEQ ID NO: 29762 - DNA, 294 bp, Glycine max
cccacgcgtccgcggacgcgtggggttttctctctctctctctagctttcggttttctctctcctcagatctctttcccgtttctctggcggttttcggaacacccctctttctcaatcatctatcttcaatcatgtcttacattttataaccgtaaagtttcatttttttctttcaaaatttgtgtaattagttgaatcctttattatttcatttgttaatagagaataataaaaacaaaaataattgatcgtggtttggaacaaaacccaattttttttttttttatttggg

SEQ ID NO: 29763 - DNA, 562 bp, Glycine max
gtagctttagctgcaccaatgccacgatcaagaagttcaaagatgcattagccaaacacaccccagacagatgcagcttgggcccaaccaaagggttagaggagaaagagctcctagctcttgctgccaacaaagatctttccttcacctactcaccaaaaccattacaaccttcacatgaaaacgaagagttggcaaccgaaactgcttctgctcctgctcttggttcaggatctcttccttcaccttcaatgaccctcaatgctgtggcctctaatgagagaaccttgaccacttctgggagatgatgtggtcagtttgtgagcaaaacgcattttctgaccctatcccttgtacagtgtagattttggtttggtgaagatgtcatattgatagtgtgtattcctcaaaggcatgtttattttaatccatgccttgctgaggttagagaaaattagaagctgtaggaaattattagttaatggtatttttttttttatgtatgagggaatcgtttcctatcctattgttgtaaaatgaatgccattttattcaccaatgg

SEQ ID NO: 29764 - DNA, 245 bp, Glycine max
ccggtaaccattacaactttggcggagtggctgcgccgctgttattaccacattccaatactacctgctacccgggtcagctccccttcttttcacttcccgtatatataagcttatataaaccccgttgattctaatccaaactcaacccgacccgaattctttgtttaaaaagagagagagaaatgatactggtggcgatcgtggcggaggtgctggaggagtatacggcgttgctggccaga

SEQ ID NO: 29765 - DNA, 278 bp, Glycine max
atgaaatcctattttcttgcaagacccgtttggataagggaaaactccagagattgctttgaagcaagatccttgcgttgaccctttcctgaaccagaaccggggggggagaggaaagaaaaggggatccaaatttcccatccatcaataaagtgagggctttccggaccttccccacccctctttccattcttccttcccctctcactccccctttttcaagaaataagccccgctccctaagaaggggcccctctctgataaggaaggaaacgaaa

SEQ ID NO: 29766 - DNA, 404 bp, Glycine max
attgtcataaggcttacgtatctgcctcaccaactagtagaatgaagcaagagcctaaggatgaggctgtggaccacatggacacaggggctggggaaattcaagatgtcggactagaaggaacacatgatactgggcaggttgcagagaatgtaaataaagatcagatggatttgtcatggattgatggctttgactttattgacgattacttgaagagcttttccgcggatgagttatttcaggtggatgaacttttggggcttatagataataacccaattgataactctgtgttgatgcaaggtttggattttggacaaatgggttttcctggagatggtaatcctcaggttgacgatactccttcaagctttatttatcagttgcaaaatccagatgcc

SEQ ID NO: 29767 - DNA, 433 bp, Glycine max
aaaagttgcatcaaattccagaagcagagagaaaactccacaatttaactcaagaagaggcggtcacaaaacacaacactgagaaagaaacgatgcgattttcttggagaagaggttaggttgttgggtgttagtgttaaatatataaagaacagaacagtcgccaacgttaacattagcaagcatcctcaaaatatgcgcacgcctctgcttcccgctgcttcatctgcttcgttcttcactctctttctcgcttagccttcactttcttctctctgtttcttctttcttctgccagcgatgccgacttttactgccatggcactggataggttgatagagcccggagcttctaagccagttgataaatctgctccaacttcaatgcctgtgccaaactcgcagaagctggagaggagtactagtgcgcccg

SEQ ID NO: 29768 - DNA, 270 bp, Glycine max
tatgaaaaggagcctggtcccacacatgctggaggccgaagcaggcgagtagagcctgaaagaacactgactgatgcacagagggatgaatttgaggatatgctgcgtgctttaacattagagaggagccagataaaagaggctatgggattttctttagataatgccgatgctgctggcgaggtagttgaagttttgactgaatccttgacacttaaagaaacccctattccaactaaaattgcacggcttatgcttgtctctgatatt

SEQ ID NO: 29769 - DNA, 279 bp, Glycine max
ctccaaccttacttttccgtctcttgttttttctttccttccttctctcatcttcccagccgccgcttcatactgtcttcactccgttgcctgtgtttttctttcttcctttatttctattcaacggatcggaacggtgcactgtgaaagggtttttgttttgtgagtgtattaaaaaatgctgcgtagaaacatccgtttgaggagagagtatttgtaccgaaagagcttagaaggcaaagaacgcttgctctacgaaaagaagcgcaaaatcagaga

SEQ ID NO: 29770 - DNA, 535 bp, Glycine max
cagtgtagaagtttctcttgagccttttagttgtgagcttttgaccgtttctccagtggtgatcttacccagaaaatcaatccaatttgccccaattggattggtaaacatgctcaactctgggggctctattatgtcattggaatttgatcaacaggaaaatttggcgaggattggggtgagaggacatggggaaatgagggtatttgcatcagagaagccagagagtgtcaagattgatggagaatctgtggaatttgattatgttgatagaaccgtgaggctccaagtctcgtggccttgttcttcaaggttgtccgtagtcgagtatttgttctgaatcatgatttggtgtccgagagagccgtgtaatgttcacataaactgacttaagtgcattaagcaaatccaccttaaataatagtgcataactttgttttatttttttgaagaaaaaaaaataatgctaatgcacgttaaacaatagtaggtttgtcctgccatgggtttcacacggaataatagatttataatt

SEQ ID NO: 29771 - DNA, 276 bp, Glycine max
ctcgagcgaacagagttgacagagaaacatcactcacagcgaaaatggcaaagagaacgctgctgaagctaaagccaagtctccacgttccgttacgtttcttccgcagctccactttggccctgacccgacccgttgccccgcttgcccgacccgaatccccctcgatatccctcttcaaaccctccaccgttcacttcccgggcatactcgcaaggcaaatggtcactgcgagatcgccacgtggtgcttcaaaaaggaacgatgaggaggagg

SEQ ID NO: 29772 - DNA, 302 bp, Glycine max
gcttcgcagggtggatctttcgggaacgggaagaatttgaagcaggatgttcactccattcccgattcgcccatgctcgacacgacgtcgtcgtttgggtccacctcttcgtcgccttcgcttgcgaacttgccgccgattagggttcatgttgtggaggatcagaaggtgttggggattgaggagcagttcgcgcagatgggggttggtgtggggcagaagcctcagcagcaggatgagggttttgttttgctatcttcgccgcctcccccgccggttcccgcgaccctcgccgccgtggg

SEQ ID NO: 29773 - DNA, 335 bp, Glycine max
atctgttccaaaagcaacccaacatcgtcagagttcacgccctcagtctcagagagtgacaaatcagaaggttttggagattaaggatcaaattattagagccagagcatacttggggtttgctcctccaggcagcaactcacacttggtgaaggagttgaagctgagaattaaagagatggaacgtgctgttggagaagctactaaggattcagagctgtcaaggagtgctttgcagaaaacaagacacatggaagcttcactgtctaaagccaactgtgttttcccagactgcactgctatggcagctaagctccgtgcaatgaatcataatg

SEQ ID NO: 29774 - DNA, 307 bp, Glycine max
cgcttccgtctcgttcggttcaaccacaaaccttcctctgaatcacttctcttactctgcaacaacgtcgttttccttcttcttcttcgtcttcttcttctttgctcacccggctcagttcgcgctctcagtaaaacgcgctcaagtgtcgccgttttctgcaaattcagctagggtttcactctcgccgcgatctctcatcctagctcgccgagttcgggttctaatcgccgcgtctaagttcactgtttctctgaatcgaagaaaggacttcgaatttcgctgctttcagttagtagctggtaat

SEQ ID NO: 29775 - DNA, 508 bp, Glycine max
ttcactgttcacaatttttttgggtataatcctcttcttccctctttcaatgttctctttctctatgcacaaccctgcaaaatgaacctcttctttttcctcaaacccctctcgtctctcatgattctctcctacatcatcctcttctttctccttgtaagaaacacctcttgtgatgcggacccaaattatgtcgcatgtccacctaaaacctgcgccaacaacaaccaaagtataagctatcccttttacatcgaagaaacacatgaacctttttgtgggaaccctggttttgccatctcttgtggcccaaatggttttccaatcctcaatctgtctaatacccattacatcattcatcagatattctacgaaaatcagacccttcgagtgtccaatgctgcgttttcagtttcacggtcaaacaccaccaattccaaaggttgtcttcctgttcctcttactcataatctcactcttcctagtacccccgagttcgatattgctc

SEQ ID NO: 29776 - DNA, 248 bp, Glycine max
caggacatcccagaagtgtttgataaaattaaagtttaaaccatcaggcccagggcatttgtcccctccacagccccacactgcttctttaatctcttgatcagagaaaggggtaatcagctggtcactttgcccttgagagatagttttaaagtgaaccccatctaaagtaggtctagattgcagttgttcagagaatctattctggaaaaactcaaaaaggcttgatttctcatcatgttcgagaa

SEQ ID NO: 29777 - DNA, 281 bp, Glycine max
aaccttctccaaagtctctctgctcttgttggtgtcactttctttctcctatgcaacttctggcttcaaccatgagcatgcttacccaccacaatcacaagcagagatgctcacaagaaaccttaacctattcccaaaggacccagttaccattattaaaggtgattttgatagttttgtaccaggaaagatagtggagaagaagttctcgcttcttggtcattctgggccttctattcaacaccttggtcaacatgctggcccatattcccttcctcatt

SEQ ID NO: 29778 - DNA, 323 bp, Glycine max
cgttaatgacttttacctacaattgaaaatgatagatacatattaaaaactttttacctacagttaggaaatgtaagtagaagttaatgacttttacctacacattatacatagtaggtaaaacctatagtgacagacaattagccgtcactatacccccccctcaaagttgacggaggaaacgtccgtaggacaaagtctatcatacatttacctacggattttttatttatagtgacaatttttgtctgtaggtataggttatatttcttgtagtataaactttatccctatgtcacataattgacccaaattccacattt

SEQ ID NO: 29779 - DNA, 342 bp, Glycine max
gtcgtggtcgcgttgtgatttcgtcacaatcgtggacaagtgcggccaatatggttccaattgcagttgcatggcagtcgcatacaggtaaaaaatcttgatgttgcagacggatatttaaaaccttgggggttggtgatgcataaagacactttgaggacgttcccttgaagggtttgatagttttaggtgtcttgttgataagtttaagttgaatgctgcatcatgtcatgttgattctagaacagcttgagcttggtgcttgagttttcttttggtctctgactttcatgtgaagggtcagaatattttggatgtaaaaatggctctgaatttattttg

SEQ ID NO: 29780 - DNA, 266 bp, Glycine max
gttgattgatgaggagcgtgatgcagaggagcgtaagttggaagaggaagccagagctcagaaggctaaggaggaggaggctgctgcattagagtttgagaagtggaaaggtgaattttcagttgatgatgaaggtaccctcgaagaagtgcagggtaatactgaagacttgctaggcaattttgctgaatatataaagaagcacaaatgtgttcccttggaagatcttgctgcagaatttaaattgcgtacacaggaatgtatca

SEQ ID NO: 29781 - DNA, 218 bp, Glycine max
ctggacagaggacttaagttatgctgggatcaggcattgaactgttcaaggcctattagtatgtattgtattaatcatctgtatcattttagtctctgttgacaatgtcttcgcaacagtttgtcgaagtatgaattcaaattctgccttgtagctgaacattttttgaggcatatgttgtgattggtcatcctcttaaatacatttattcaacatgt

SEQ ID NO: 29782 - DNA, 434 bp, Glycine max
ttccaatgtagcttatggaatgtaccctatgccggccatgaacccaagtggggtctcgtcaaatggaccaacaatgccatctgttgtaatgttttatccttatgatcataatactggttatggttcaccagcagagcagcttgagtttgggactttgggaccaatggggttctcaggtgtcaatgagctgtcacaggcaaatgagggaactcaatctactggagcacatgaagatcaaaggtttcgtggtggtcacagtcaacgatcttccccagatcaaccctcctcacctcatgtctcaaggggtccctgattctgcggtcaggtcaagtggccaggaggaattcttgaaagaggaggattgatcctcttcattctaggactgggcagggcatgtaaccggggaatactatctgtccatttcatggcattat

SEQ ID NO: 29783 - DNA, 350 bp, Glycine max
ggaggatggtgtttatatacccactgatgttaaggtcaagcagatgaaaggtgccaggcccgattgtgttaccgtccagaagaagctcagtagggatagggttgtaaccgcttatgaagtcagggataagccttctactcttaaacccgacgattgggatcgggttgttgctgtttttgtgctcggcaaggagtggcagtttaaggattggcctttcaaggaccatgttgaaattttcaacaaaattattggatttttcatgcgttttgaagatgatagtttggagtcatgcaagactgtcaagcagtggaatgtcaagattatctcatgaagtaagaacaagcgacatc

SEQ ID NO: 29784 - DNA, 307 bp, Glycine max
acgaagcggacacgtcctgtgtcgcgaaaaggaagtcaaacaggtagccactgatctcggcgtcgatggagaacggcaacggcctgtctcctgcgagcttggcctccaccgatctcgacatcgatggagaacggcaacgacgtttggaggtaggtgtagttgcggtggagaatggtggtgacatggttcctatagaggccccactccatacccttcgtcctcgccttcttcctcttcctcgcgtagatctcactacggctccaatgtgcgtcctactcctatgcgccccctcactcctcccactcag

SEQ ID NO: 29785 - DNA, 482 bp, Glycine max
catcacacatccatcagaaacatacacaatattctctttcaaatggcgcacaacaacaaaatcaccgagacgagttcgggaacgaccagagggcctatgatgtccgccaccgcgatctcgcggtggggaaccagttcggaagccgaactgccatagaccccgtggcgaactacgcttacgggaacatagggagtggcgggtacggagcgccacccacaggagaaccgtatgctggccctaactatgcagcctcggggctttgaatacagtactgcttatggcactattggtgctgctcccgtgtaaggcgctccgactgaaggccatggaaccgctgatcgcggccgtggtgacggtgaaaggaacaagaatatggacatgaataggaacaggaacatgggtagggatcagaataagaagtgaagataattaagttctagtactttaatttatagtaacttatactactagtgctatatata

SEQ ID NO: 29786 - DNA, 747 bp, Glycine max
gagcgattcggtcgagctcgaagtgatgattgggacgagggatgggaaaacctactggaagtagacaatcctgacgaaagagaagatagaagactctgtttttgttcaccctttgcatctttgttgggctgagattttaagaaaattcataagcctgtcaaggtttactgatgtgctgagactgattgatcaatcatcattaaaacctaatgctatgttgcttgatgaagatgatgccagtagcttaacccggatagcacttggcattgattgctttctggctttaaagatgacattattgctgccttacaaaacattacagttgcagtgcctgggtgcagttgaggatagcacaagacaaggcatccctcaaacaaggagcaaagattatgagttattaattctcattttatcctctgggattctcacttctatcatgattgactccacctatggtactattttctcttatatctgctatttggtgggaaacttatgcaatcaatgtcaacaagctctggtgtcaggtagaggaactaacaacaatgaagataatgagaatcagttgcttcttttcacaaggatccttttcccaaatttcatatcagaacttgtgaaggctgatcaacatattctagccggatttcttgtcacaaaatttatgcacagtaatgaatcgctcagtctcttaacattgccggggccagtcttaataggtatctgaaaatgcagctacacatgctacag

SEQ ID NO: 29787 - DNA, 399 bp, Glycine max
gacagtcttatctagtgcttttacatttgcagctgggagattttagatagctcataaaatcgtatctggaaagccatggaggttgtttcgcagcctctgtgcacaattcttacccccacgcgcaaacactcacttctcattccacaacaaatccccaatccttctaaacattttcccttcttatcctttcgcgccaccactctctccacttcttcgcgtttttctcctccacctcttttgttcgcgacgccggaaaaccaattgagcatcggggaaggagagaacaccgatgcaagtgattgggcactacaagatttttattccctgaggaaggatgttgaaattatgtcacagcgtgttggagagattagagaatcttctggtctacagctattggag

SEQ ID NO: 29788 - DNA, 496 bp, Glycine max
gaactagacaagagatacctgatcctgttgctggatttggtgaacctggtggtcctccaacgcaatttactttcccttcagttccccttgggttctggtagtgatcttgttcctgggcctgctgctggagtgtttccttcaaggggtggtcatggcattggtggaagcatgcttgtagggcctaatgacccccgttggtttggtggtgttggtggtattggtggagatcctgcttttcctggaggattgccgagagccagaaagaaacgaggttagcgagacaacctcggcgtagttgtggccttacctcaacccccctccccaaaaactattctttcaaaacgactacggtgttagcttcagattcctttaaatagggttgcactctaactcacacagcccatagcaagccgctttattcctccttcgatatgcaattagcacgatggcgaaacttgttgtctccgaagactcacgctattccctctcttatgca

SEQ ID NO: 29789 - DNA, 263 bp, Glycine max
gagatcgcaaaggacaagcgcggttggatcttcgatcccatagcacccattattgttggatgcaattggaatacggcgtcgtttttggtttggaagtgtttaccgcgtgttcgtttgtgaaacaattctctgaactactgattaaggcagctagtgattatggtgctttgacagcatcagtggcaaatttttagtggagaggaatgaaagaggatagggtcatgctgcattttgatttttgacaggtgtaggctaggggaggc

SEQ ID NO: 29790 - DNA, 262 bp, Glycine max
cctatcaccctctctaaaacaatcccatattctcttgtctatttgattgcccttgtgttccctttacaatttaaatttcttttacttgttttaatcattttccattcacaacacatatcatcatcaacatgcctgaggctcctggagactccaccaaagactatgttcttgaagagaagaacaagaaaattttggacttcatagaggatgtgaccaacaacgcagatgaagtccagaagaaggttctctctgagatcctgtc

SEQ ID NO: 29791 - DNA, 439 bp, Glycine max
gaaatcagcattattttgttaattactaaggattgtacaaaattattattattattattacaactttaatctagggaccagggataatgttggcacaattcaggtatgttccctaaatgaaacgatgactgactcaaaagggggagggattatgagattacgtacacttggatgaggataagacagtcggtgtccttttactgggtttgtttgagcagtttcgggtgctactgcactttgggcaaaaccaatcctcctcagggacagctgttagtggaggatcgcagcaatcgatatgggtaccgattccacacccgacggaaccactttcatcaccacaaatcagcattacatctcctctatcccgggatccacatactttgcaaattatatcatcatcacgggaatcttcaggagcaacgagttcttcaacaatctc

SEQ ID NO: 29792 - DNA, 515 bp, Glycine max
gggcggacgcgtgggcaaaattggtaaagattgtgtgctccaatgccatgtgtcggatagaatacacaccagcaacgcgagtcacgaggaagaatctgaatctgttactgttgcgtgtaccatcccttcttctcctctcttcgcgacacttctttaagttcttcttcttccctgttagttttattcagcatccaccacttccaaacttctacaaagaagagaaaagaacaagggattctcttcatccaagttcgctagtaggacatattgtaatggcaacagtggaagcatcccatgaagctatggctacggtggccaacaaggcaccaatcactgctgagagaaaggtccctgaggacttggacagcaaactccccaaaccatatttgcctagagctttgagtgcccctgacacagagaatgtgaatggcacgtggggccacaaacacaacgacatgtccgttcttcagcagcatgtatccttcttcgaccttaacaatgatggtgtcgtctac

SEQ ID NO: 29793 - DNA, 404 bp, Glycine max
tctttctccctccttcaaattcacggcgcgtcacgatgcctcttcaaatttcgccccaaacaccaccgaaacagcgtggcacatgagaacacaccacactctacccgactcataatatttataaatctcttcctttccgtacccttattcggaagaaagatcgaaccacctcgattctcttcttcggaggttgctaccgaattccctttctctctcattttctatgctaacgtagagatccagaaaccatttccgaaaccacatccctatttccctctgtttccgcgattaagatggagggaaaaactgaggatgaagtggtggatattgagagtgcttctagtggttcttccaatgatgattcagatgatgaggaatctttagttcctgaaatagatgatgga

SEQ ID NO: 29794 - DNA, 507 bp, Glycine max
aatcaatctcctcttctcttccggccatggcctccttgctccgctctctccgccgccgtgatgtcgcttccgcctccctctccgcctatcgctcggtaccatgtccacctcttctatgcttccttctttttctttattttgaatatacttgtgctggttactccatgttacctaggttttctcgatttgatcctattatgccttaatccagttatgtcttgcttttgttcggattttggctcgagttgtttagaattttagtcttctaattttcgtaattgattttctatttctagtgttttagagtggggttttaataccaaaagcgttaagccgttgctgtagtagctcaagattttgctagatcattgtgaagtcacttagtagctactctacgatattgcttttattacttctaatataagtttttcatgggtcacttttctagcttctataattgctttatcgtgcatctaaccttcctatgctctttaatcctggggactt

SEQ ID NO: 29795 - DNA, 327 bp, Glycine max
taacaaaggaaaaaaaaaaaaggacaagaaaaggctagggacaaagacaaccatggaggaaaaaaggacagcaatcacaaacaggcaaggattaaagaagaaaatgcacccattaattagcagcttaagcattggcggcgatggtgggattgccgggctttttgtgttcggtggagccttggcccttgcgggtttcatggcagttggttcttttgcgagcaaaaaacataaggcaaagggcacccatgatgatcacctacctaagcctatacctaaaccctaacaattgttattggaggaacacgggtgtaagactgatcatgaaga

SEQ ID NO: 29796 - DNA, 287 bp, Glycine max
gtcagctttactttggcttgctgtgattactagcatatcactactaattgctctcaacgttgggggatccagtctcttcaatccctaaggttggatcagtagatataattagatcaattttcttttatccgctatttacagtgttcgtatattcgtgagtgcttctgatggagaaaagcatctaccggcggcgcatatttttggcttcattttgtgagagctacaaattttatttcagcttaaatgtgtgtattacttgtctatatccaagcattttcttatacccg

SEQ ID NO: 29797 - DNA, 266 bp, Glycine max
cttaatatctttgcttttgaggccaatcacatctctgagtcagtctcagttttaccttcaccagctcattcttcttctatcttcttctgctatatatgctcaacctttaaagggtatttctctctctctctctcaactagtttgagtttcattgtactttgatatcactgcagaagtacatgagactcttaaaagaggggtatgctttaaagaccagaatcagaagctgattaaaggagagaacctttccaagacatggctatgtt

SEQ ID NO: 29798 - DNA, 323 bp, Glycine max
ggtacttgtttgtgccttattccctctgattctggaacaagttcccgttctttcttatctttctccactgttttattttctccctgatctccctctccctctcttccagtcctatttgttcttctgacagatactcttttaccttcaccagctcattcttcttctatcttcttctgctatatatgctcaacctttaaagggtatttctctctctctctctcaactagtttgagtttcattgtactttgatatcactgcagaagtacatgagactcttttttgagggtatgctttaaagaccagaatcagaagctgattaaagg

SEQ ID NO: 29799 - DNA, 219 bp, Glycine max
tgaagctccagaaagggaatttgtggttgcaatttagctgtgtgggtttgctttacaaaattgtttagtgaactttaattatgtgtttactttgttatgtttatatttgacccactaatatatttgtgttataaaggttgtccatgcccccggattctgttaacttgctagtttgtacattgcagaaattatagatcatgtaattttctttcttctttc

SEQ ID NO: 29800 - DNA, 347 bp, Glycine max
gcagatgtatcaaatggaaggtttacttttgaatctctgacagcaccaacaggcaaccgactacattttccagcatacgacatgttcttaaaagaaatggacaagtgcatacgacatttgcagaaacatgcacaccaaatggggttgaactggctgaggatgaatatatattacatgtagatggaacagccagcacacagagagtagttcggcacattggaacaacaagttggcctggtaggcttacactgaccaattactctctttactttgaggcttccggagtaataaggtatgaagatgctctcaaaatagacctctccaagaatgttgagcagagtgttaaa

SEQ ID NO: 29801 - DNA, 357 bp, Glycine max
gagctttattactgggaaacctgtatttggtactctcgttgctcttctacaaaatggcacaccaatccttggcataattgatcaacctgtgttaagagaaaggtggatcgggatagcaggaaagagaacctcactgaacggacaagaaatatctacacgcacttgtgcggacctttctcaagcatacctgtacaccacaagcccacatctgttcagtggagatgcagaagaggcattcattcgtgttagaagcaaggttaaaattccattgtatggctgcgactgctatgcatatgcacttttgtcttctggtattgtggatcttgttgttgagtctggtctgaagccatacgattt

SEQ ID NO: 29802 - DNA, 223 bp, Glycine max
tgcagggcgttgctataactcaagaaaattctttgctggataacactgcaagaattgacggttggttagctagatttccaatgtttgactgggtgggaggtagaacatcagagatgtctgcagtgggcctgcttccagcagcccttcagagcattgacataagagaaatgcttgctggtgcagcattaatggatgaggcgaataggagtactgtgataaggaa

SEQ ID NO: 29803 - DNA, 239 bp, Glycine max
tgaaggtgctagtggagaaattgctcttacagcagctggtggattgaggcaaattcctggaataaccgagacctttgaaaatgctgcattgattggaattcattatggtggaaatttttatgaatttgtgccatggaatggtgttgttaactgggaagttactacttggggttattggtttatgtcagcagacaatggcatatatgtggttgaatgagatgcaacaactgaggatccag

SEQ ID NO: 29804 - DNA, 276 bp, Glycine max
cctttccactcattctcttcttgagcacactgatgtggttgtgcttttggacaacgaagctatatacgatatctgcagaagatcattagatatagaaaggccaacttacactaacttgaaccgtctgatatctcaaattatctcttccttgaccacttccctgagatttgatggcgcgattaatgtggacattaccgagttccagactaatctcgtgccatatcctcgtattcacttcatgctttcatcttatgcccctgtaatatctgctgcaaa

SEQ ID NO: 29805 - DNA, 423 bp, Glycine max
catgttactagtgcctttcatttccctcctcttctcaacgcattatatatttattcaccgacctcgggtttcgtgctgcgttttctgcttttcataaaaccccatttcttttctctctatctctaagccaaagctcgaagcttttcgccatttgagatctgggggtggagctttttcccttttctgggttgcttgcagcattttcgccgttagagttaagagacaccaaaatatgggaagcaagtggaagaaagccaaggtggcgctcggtctcaacctctgcatgttcgttcccagaaccttagacgacgattcgccgccgcacacggtggtttccgagcgcctctacgacgccactcttctctctccgggcaactggagcaccagctctttccgcccaaccacaccggtttcctcttttca

SEQ ID NO: 29806 - DNA, 614 bp, Glycine max
ccagttactaaaaagggctactggcagattgaaatcttgttaatgcctggaggtggttcacatcttaatgccaacaacctcaaatatggagttcaacagttcaagcctgttcctgctggaactcctacagggtttggaaattttgctaacccaactggatatgccatgattactcctggtgtggttgggggtgcaacggctttagaggattcatctcgagtcaagtacaaagataatctttatgtcccaaatcctcaggctgagacatcagaaatctggttacagaatccaagggaccttcctggcatgcaatctactccatactataacatgccagggcaaacacctcatgcagcttacatgccatcacacacaggtcatgcttcctttaatgcagctgcagctcagtcttctcacatgcagttccccggcatgtaccacactcctccacagccagcagccatggctagtcctcaccatttaggaccaccagccattggcaacaacgtcggagttggggtggctgcagctgctcctggggcacaggttggcgcatatcagcagccccagttgggccacatcaattggacaacaaatttctgaaatgggataac

SEQ ID NO: 29807 - DNA, 350 bp, Glycine max
cgtgaagtaaggttaagtctgttggtggagatagagaagcggaagcaagctgaagaatccatcaacaacatgagaagccaatgggaaagcattaggcaagggttatatcaagcaggaattattttgcctgcatatcttaatgccactgctgaggatgagcagctgacttctgatcccgtggaagatctatgtcaacaagtttatattgctaggttcatatcaaatgccattggaaaaggaattgccagggcagagttggagacagagatggaagctcaactagaggcaaagaactttgagattgctcgacttttggatcgtctccactgttatgagaccatgaataggga

SEQ ID NO: 29808 - DNA, 913 bp, Glycine max
ctataggacaaaagagaacaaacaaaaacattggatggcaacgacaactagaacaactttcctcaaacgacgcagcatctccgcttccgccgaatctccctccagctacaggatccgcttctctccgataatggactccaacgagtccttcccttccagcttctccaagtttaactccgccctcaccgcgggcctcttaaacccaatgtccccccctcccgacaagacccgatccagcccaaccctcttcgaaatgatggctagcgagcccgacgttcaccaccgccccaccacccacatcccaaaccccaccactaccaacgctaaccacaagccccagattcttgatcgccaggccctcatgatgcagcgtatttccgagctccttggttctcgcagccccgggaaccagttcaacgaccccctttccagcgacatcaagctcactctcagctccaaagacggtatcagtgtttccatgaacgttcatcgccaaatcctcgttgctcacagtaggttcttctctgtcaagctctccgatcgctggaccaagcacctgcagcagctgcagcgctccccggtgccctacgaagttgaaatcgccgactgcgacgatgttgaggtttacattgagactttgaggttgatgtattgtaaggatcttaggaagaagctcatgagggaggatgtctcccgagttctcggcattttaaaggtttcagctgcgattgggtttgatgctggggttttgtcttgtttggagtacttggaagcagcgccatgggcggaggatgaggaggagaaggtggcatcgctcctgtctgagcttcgtcttgaagcagttggagctggggaggttttgaagagggtttcgactggtgttgccaatggaaatgaagaggggagtgataac

SEQ ID NO: 29809 - DNA, 295 bp, Glycine max
ctgttcctccttgttttgagtctctgcagtctgcgatgttcttaaaatttatgtctaggtcattttttcttgtacataatccaataaatgtgcatagggatgaggataccgagtcagatgatgatttgctggaaaaccagaatgaacagcagatttcaagtgatacctttctgacgaaaccttctgatattgtaactgttacatctgatgtggttgaaatcaatgatgttttatccttgcattcttctgtcaaggttaccaccagggcagctggtcggaatggacaatataggaa

SEQ ID NO: 29810 - DNA, 518 bp, Glycine max
aacctgccgtgaggcaaactcgtccgagtctttttactccttccatgagtagacctagtgttatttctgatagcaatttgagccaagaggagaaaaataaactggagaaattgcatgaaattagggtcaaatacttgagactagttcataggctgggttttactacagaagaatcaatagcagcacaggtgctgtatcggatgacacttgttgcaggcaggcaaagtggtcaaatgtttagcgtagagtctgcaaaggagactgcttcgcgtcttgaagctgagggaagagatgattttgatttttctgtaaatattctggttcttgggaaagcaggtgtgggcaagagtgctacaataaattcaattttcggcgagacaaagaccagcattaatgcttgtggtcctgctactacttctgtgaaagaaattgttggggtggttgatggagtgaagttaaggatttttgacacaccaggcctcaaatcttctgcattggaacaaaatttcaatatgaaa

SEQ ID NO: 29811 - DNA, 326 bp, Glycine max
tacttgtgggccaaggctgttcttctcacatctaccacagtagccacagctggtcttacaattcaggtcccattggctgccattgtggataccttgactggcaatgctccgcgctttatggattaccttggagcgatagctgtcatgattggcttcactggaatcaacattccttctgatacttttagcaaatccacagaaactactgtggcattggaaaatgagaacttgaatacaaggactgaagagcttactttgtctataagccaagattcagttgccttatcattacatgtggtacatgggagaaccctttcttaaggggt

SEQ ID NO: 29812 - DNA, 273 bp, Glycine max
gaaggatctagatcttgctatctgacataaaaattaccagcatggcttacactgcagttgccatgcctacatctccagcagctacctctgcgactatggacattgcaaaagagcataatggtcttcgccgctcgcaatccagcaaagaactatgcacacgttccattatgcggaggtcttattctgacaaccacctatgttgctccatcaatcgcatacaagccacatcagtgccgccaaaacttaagagcaatcgatcaatgggcatttccc

SEQ ID NO: 29813 - DNA, 523 bp, Glycine max
acgagccctctcctccaccctcttcacttccccacccttccaatccttcaccgtcctccttctagaagcctcccccacccccttcctcaattcaaccctaaacccaaaccctttctacaaacccatcaccaaactccttaacctttccaatcccatcaacgaccccgagagcgacacgttcaaaaccctcgacggtgttaccgttgttgggtttgtgttgttttttccgaactattcgacttttctagggaagccagggttttacgtggaagacctgttcgtgagggagtgttacaggaggaaagggtttgggagaatgttgctgtctgcggtggcgaagcaggcggtgaagatggagtacggaagagtcgaatgggttgttctcgattggaatgtgaatgcgattagattttatcaagagatgggtgctgaggtcttgaacgagtggagggtttgcaggttgactggggaggcacttcaggcttatggaggtgctgattagaatttaaaaatgtttcttttt

SEQ ID NO: 29814 - DNA, 307 bp, Glycine max
ctatgctcacattgaggccggtttgtctgcactgcagattccccctgagtataagtatgcaaaggagcttttcaaggtgtgtgatgctgatagggacggaaggatcgattaccgcgactttaggcggtacatggatgacaaggagttggagctttaccgcatatttcaggctattgatgtggagcacaatggctgcattctccctgaagagctctgggatgctcttgtcaaggctgggaggtattctggtactactactttgttcattgtgttttgtgcctcgtggcttgtaagttgtaattattgc

SEQ ID NO: 29815 - DNA, 348 bp, Glycine max
ttcgaaatggctgaggtagaaccaatatccacctacgtagacttcggggagagagaatattttgttgcggatgaaagagggtacgattacttgctgtacaaaatggctgaagaatttctcttcacatccaagggaagaatcttggacaatcgtctcaaactcaacaaggtcgtccgggaattgcagtattcaaaaagtggtgttacggtgaaaacggaggatggttgcgtttacgagaccaattatgtgattttgtccgttagcattggcgttctccaaagcgacctactagccttcaatccacccttacccggatggaaagtgcaagcaatcgataaatgtgatgtg

SEQ ID NO: 29816 - DNA, 477 bp, Glycine max
atccggatctgtgcattttgatgctgtgaatgagtattcatgctcagaaacggaaaaagataagcccagtggtcaagtattggtttttgatgcaaacacaaccaaccttcattacaacggaatgctgcagatggggctggatggattggttgaaaatgaggacccactgacacttcccttcttgtgggagtaggtagctaactaagtggttatgtctttgttgggaaatttttggattcaaaaccttgtgagtgtactccaatgattaaagcttaaacttgttgaagctttcaataagggtcctttgtggctgtcaatcttgttgtggtagcccaattgattatgcggcggatgatgaaatcgattgtatgccgataactatgttctttcagttgtcttgagatcagtttgaacagttcagaaattattttctttagtgaaagattttcaatttcattgagattttagttcatgatt

SEQ ID NO: 29817 - DNA, 394 bp, Glycine max
gaagaagagaatttggaaagggaaagattcaggattgcagacacgacctccgttggtagctgcaagtcggaacacagcctaaacacaaattcactggtcacagtgttcatctctctcctgcgcccttcctgcgactgaacgtgggaaccgcacaaacacaacttgcattgatggctgtggcctaatttccttccttttccccaatcaaaattcaaaaccctaactatatccttcgattgattttttgttcattaagttgctgctagctattaaattgtgagagtcagagatgtcggaaaaattctcggcagcacttcggattggagatctcaacgatttcatcgctccttcgcaggcatgcatagtctccctcaaaggattgaaaaagaatgat

SEQ ID NO: 29818 - DNA, 398 bp, Glycine max
gggcaagaacggagaccatacaatacgaattctagaccttatgatatgaacgcggttcctgatggttggttagactgcccaccacatgggcaagaaataggatgtataatcccttcaaaggttccacttggtgattccttcaatgattacatttcaagtcaaaaatatactcccaagcaagcaattcatcaacaaagagtcttaggtagagaacttggtttagtgattgatctgacaaatactactcgctactatcctgtatcagattggacaaaagaagggattggtcatgtcaagataagatgcacaggaagagatgctgtacctgatgatgaatccgtaaaattcttttgtgataagatattcattttaggttctggatttttgctcccaaagaa

SEQ ID NO: 29819 - DNA, 413 bp, Glycine max
cttgaagcaaatcttcccctattccaaagtcgaatgggagcattgcttttcctaatctctgctttactttctcggggactggacttggttcaaagtgacagggatgatcccagcctaccactggttactgcaccttttgggcatgcctcccaggaaattgtgaacctactgctctgtggggaggctgttcctaatgtgtttgatggaaggatggatttaggaggaggaatgtttgtgaaaggtatatccggatatgtggaagttggatttctgactctattagaatccctgaatctttgcaaggttgctcagtttctgaaatccccatagtggcctatatgggttgtggggagtgaatcccattacacggtgctgtttgctcttgaccccagcgttcaaaatgagaatgaact

SEQ ID NO: 29820 - DNA, 367 bp, Glycine max
tcgggttaaagaagatgggtccctagtttctattgcctagtacttaagtttcattttttttttttttgttaatacaattttcttgctaggaaatagtatcaaaatattttcatctattacttttaaattttaattgaatgtgcagattctaccaaattttttctcaacagagaaaaaccacattggaactatacgcatagggtttccaaccagcttcaattgcaaaggtcaagagcagacaaggtagaagataagctaaaagaagagcaagaaacacaacggatttctttcaaatctgaagtgaagaaggcggatggaaatgatgggattagcaaatactcttctgatgatgaagattccttggata

SEQ ID NO: 29821 - DNA, 521 bp, Glycine max
cgacaatatttataataataataaccgcaaaattagcattcgatactgataaatgatagtctaaatatatttatgatgaatattccgaacggtgataagtggaccttcccattaagcagatcctagatcagtcacctccgtgcaattctgtgccctgctcccaacaataacgccctccccacagcactagtatgaagacccaaaaccagagcaacagtgccacctacagccacccacttccagtctatgccattacccttttgtgcggtattactcatggcttgcaccctatcttccatgcaagacgcaggctctgaggaatgcatgtttgcgtcagaagtaatcttggttgttttacttgccatcaatgcacatcttgataaagaagcctctgttttcctagcactctggtaagctctcattccagaatgcaattttttgacagctccccacattccatgccggactcccaacttcgcaacatctttgggaatccccatgtcttcataatgtagcagggt

SEQ ID NO: 29822 - DNA, 254 bp, Glycine max
ccaaagtaaagaacgtggatcacacccgtattgaatgttaatgtggacaggtcagaaagggcgtacagctagcaaaacaaaagacggttgaatcttggtagttgtggtcgtgacaggcactcgggctgacagccatcttagtgaggtagtatatttcgttgaagtagcgggtctcccccatctggtacttctcgttctagtcaacgaaggaacaatctttcgaggaataaccttttatgtagttggactaccag

SEQ ID NO: 29823 - DNA, 256 bp, Glycine max
tacgcaattgcggtgacatgatgtttttattttggatttaccgcaattacggccgcatcagttgcattgtctgcaatgtcaaggatggccgagtaacaacaaccgtgattgcaactgcaatttagaatcatgttgcaaagtcgcattttcctttgaatgcatttctattgtacattgagtgatctgtagaaataacttgacttataataactgtaggatctttctgtgattcaagatcttgatttgtttttatgaa

SEQ ID NO: 29824 - DNA, 289 bp, Glycine max
gctctttgtgcttataactattaatgggtggtcgaaatgcaaatgctcctcagagagttgctctcccaacaccatcatatggttcagcatctatgggcatttcaaaaccttatggctcagcatcttttggcgcttcataaaccctatggttcagcatcctttgatgccccaaaaccttatggttcagcatcttttagcaagttcaaaaccttctcatgctgctagctttgagcacagtgccccttcttattatgacaacacggaccctgttggcacagctcctcctgcc

SEQ ID NO: 29825 - DNA, 412 bp, Glycine max
tctggttctgacttcccaagttcagtacatttatgacatcaatctccggggggttgtttggttgctgtttgttgttgtagctgtttatgtgatctgagtctagtccattcccttcatcagaaatatataaaacattgcctgttagggaagagatcctgagagccctccttaattcggatttgatcggcttccacacttccgacgacgcgcggcatttcctctcctgttgtagccggatgcttggccttacctacgaatccaagcggggatatattgggattgagtactatggtaggactgttagtatcaaaattcttcctgtcggtattcagttgggtcagcttcaatcggttttgaggatgcctcagactgaagaaaaagtttgcgagctcattagacagtattgtgataa

SEQ ID NO: 29826 - DNA, 283 bp, Glycine max
acttactgctgaaattgataagctgagagctgaagttgagaaggctgaaaagagtcttgatcatgcgattcctggtgatgtgagaagagggttgaattcagttaggaagatctgcagggagtataacatttctggagttcatggtccaattattgagttgctgaattgtgatgaaaagtttttcactgctgttgaagttactgcaggaaacagcttatttcatgtggctgtggaaaatgatgacgagtcaacccagataattagacatcttaattcacagaaa

SEQ ID NO: 29827 - DNA, 579 bp, Glycine max
cggctcgaggaaggaaccaatctggatggaaaactggaccaggcagatctgctaatagaatatttgaagctttgtgaaaaatatcccgtgccgtggagaatgattcgttctcatgttcataaattgttgggagactggttcagccttcagccacacatcagggaggaacttaacaaacaatctaaactgacttttgagtttctttatgacatggtggatcgacttaggagtacaggtactagaattccactttacaaaaatactgaagtggaacttacagcaggcagttacccagattaacacagctgcacgccaacatttggagttcaaagttaagccagaacctcaatgaaatatcttatgcggtagaggtggtgcggccagccaaagctagcatgattgcacctcatttagatacaattttgtagtgattagaagtgagaatagttcaaatttctaatctatgtgctgtatttgtcttcattcttatggcaattgccaattgacagtgttgtaccctattaaaacgctgatgtttgctcagagcagataaatttatgttattaccttgaacgtttc

SEQ ID NO: 29828 - DNA, 281 bp, Glycine max
ggctcgagagacaatgaccagaagggttatggtggagcaaaagacagcattggttctgtggaccacatcactacaccacttgttgtaaaggccaatcttaaatcagaagatgtgacacaagacaatggccacaagggttatggtggagcaaaggacaccattggttatgtggaccacatcactacaccacttgctgtaaaggccaatcttaaatcagaagatgtgacacaagacaatgaccagaagggttatggtggagcaaaagacaccattggttctgt

SEQ ID NO: 29829 - DNA, 297 bp, Glycine max
gcgtacatgagctctcagtactcctcgcgaggcttgatgaatggtaagatggagaattcattgaggacttgaatgatatgaattctaagaatttccagagatgagcttccctgcctgctaattttacagatcatgaaaatctgttgcatagtaacactccaagacggcctagttatatggctccaactgaatctacaaaagctaagctaagaggacatggacaaggctctccaaggtctgttaccgattgggcatatgtaagtagtgtcacccggcggctttcactttcgtcttcgc

SEQ ID NO: 29830 - DNA, 509 bp, Glycine max
  unsure (1)..(509): unsure at all n locations
agatgatcgcagtgggtatagtatggggcgccaccaacgctatcatgcgccggggtgcgctactctgggacgaagctctcaaatcctccgcaaagccaaatccgcactcaactctgtgccaaaagatgcgcatctccctcggaaactgggtgaagcttctctccatttggcaatactcgatccctttcctcatcaacctctctgcctccgccactttcttcgccatcctctccgacgccccgctctccctcgccgtccccgtcaccaacgccaccaccttcgccgccaccgccgtcttcggcatcctcctcggcgagcgcacccacctcccccgcgctttcttcggtaccgctctcatcgtcctcggtctctgcttctgtattcattcctagcttttctacaatctctattaaatcatttttttctctctcttaatttttctgttcccttagttccgagactcgaattcttccatttgcaaatttctgtattggacaatntatttattc

SEQ ID NO: 29831 - DNA, 257 bp, Glycine max
ctgatatataaaatgctggattgtttacgtgaaattcagtggaataagaataattaaacatttggataatattaaataatgtagtagactatgaaaagcatctagttccaccaaaaggcgagaacattgaactgattcggaacggaagtccaccaacccccacgtgaaataacttactcaccaactgctgtattgaaaatataagttatagatccgctggagtttggcccggtggaaacgtgctaggttcacaactc

SEQ ID NO: 29832 - DNA, 408 bp, Glycine max
ataaaatattatttaacaattttaaattaaaaagaaggggaaaagcaaagaaacaaaaacaaggcaaaaacctgagttgcggaggaaagaaacataatctggaattcgagaagctaatcaatcgtttgcggttgctttgttcctcctctcgcagatggttaggggaggaaggtttagcggcaaacgcaatttcaggaaaagggttcggtcaaaggagggaggttctgatgattcggacgacgactatgtcgtttcagatgaaggtagagaggcatccgactattactgctcctccttagatggatgcgcatcagaggagggttttgatagttttatggaagcagaggaggaggaatttcgaagagtgaggagtttaaatagatccaagtcagaaaagggcattgctgg

SEQ ID NO: 29833 - DNA, 550 bp, Glycine max
tatcatcaatattcttgtcaattgcctctacatgaaagacctgctctaccaattgacccaagagctagtgatggtatgaatggatatctctggttgtacgaaaggaatgtgctcagaaccactgtatcctctcccatcaagggattgcaagacattgagtttaatcaagttttaaacattacttatctcaatcctcgtaaacatagacatattccaaaacctccggatggtgtactaatgccaaaaaagatattaaaagccattgacattaaaccttttcctgtgttatggcacgaagacaatagcggtcggcgacaaggcagggaaagacaacaagtacatggagcaatggctggccctcaactgggagaagcagcacatcgtcttgtcaagaactcccttaatattaaatcaaataacatgccgtatggatcaccggagcagtttccaggccatcatgcaatgaaccggctcagatcagctggaccttctggatctgggaaatattatggtgaggacacaagcggttattacggacaacattacaatc

SEQ ID NO: 29834 - DNA, 398 bp, Glycine max
cagaggcatgatgggaaattgtggaacttgaacaattaccgtactgatgttattcaagcccttggaggagttgaaggaattcttgaacatactttattcaaaggaacatattttccaacttgggagggtcttttctgggaaaaggcatctggttttgaggaatctatgaagtataagaagctcaccaatgctcagaggtctggtctaaaccagatacccaaccgaagatttacactatggtggtcgccaaccattaaccgagccaatgtttatgtgggtttccaagtgcagctagatctgactggtattttcatgcatggaaaaataccaactttgaagatatcccttattcagatattcagagctcacttgtggcagaagatccacgagagtgttgt

SEQ ID NO: 29835 - DNA, 583 bp, Glycine max
acagacttgacccctgaaagagttagacctgctatcaacaatactcttcaagaactccaacttgactaccttgatctttacttgattcattggccatttagattgaaagatggtgccagcagaccccccaaagaaggagaagtgttggagcttgacatggaaggggtgtggagagaaatggagaagcttgtcaaggaaaaccttgtcagagacattggaatatgcaatttcactcttacaaagctagataagctgatgagcattgctcaaattatgccttctgtctgccagatggaaatgcatcctggatggagaaatgacaagatgcttcaggcttgcaagaagaatgccatccatgttactgcttactctccactgggctcatcagacggtggaagggatctgatcaatgatcaaaaggttgataggatagccaataagatgaacaagaatccagggcaggtgttggtgaagtgggccatccagagagggacaagtgtcatccccaaatcaaccatgcccgataggatcatggagaatgtcagcgttttcaattgggaacttccagaaagagactttaaga

SEQ ID NO: 29836 - DNA, 259 bp, Glycine max
gtactctctgcaatgcagaaattgaaactggttctttgatccctaatcatgctcttagagctgcagcagccgctgtcaagcatgaggacgatcggaggttatttcgtaatgccgctctccgaaagcggcggaaagaaatgggtgaccaaatggattcaatgagaagagtgaatagggaaaatggagattttaatgctaccgatggacttcagcggggcgtacaatatccattttcggtaaatgagaaagttgttattaa

SEQ ID NO: 29837 - DNA, 321 bp, Glycine max
caaaacccagagccaagtacgaggaccaacaaactcgcgtgcttcaggcctcgctctcttacgtcttaaagttggggtggacagaagctgctctagttgcaggagcaagggatgttggtctttcaccatctatcgttggatctttgcccagaaaggaagcaacactggtcgagtatttcatggacggctgcttacaaagacttgttgataaaattgactcagatgagagtttaaaaaatttgacaccaagtgactgcatctctaagcttatcagatttcgtttagaaatgcaagctccatatatatcaacaggccccagct

SEQ ID NO: 29838 - DNA, 625 bp, Glycine max
ctctaattcttctcttttctatcatggaataaggaaaggagaaacaaacaaactgtaccaattccccccaaagccttgtctccgttccaaatcatcaatcaaatcctcaactctctgactccttttcatccaatccttaaaatcgtcagtggtctttttaatgtacaaggaattatcaaaaaataccaaatttccctacatatctatctaagttgtgtgtgagagactatgtaagggatggtatcagctacaattaggcgaattgtgtcgccctgttggagaccatctgagggtgaaatttctagtaggcatggagatgcaagtggacgtgctaatggtttgttgtggtataaagattcaggaagacatgcgaatggtgaattctcaatggcagttattcaggcaaacaatttgttagaggatcaaagccaacttgaatccggccccttgagcttaactgagggaaatcctcaaggaacttttgttggtatatatgatgggcatgaggtccagaagctgcccggtttgtcaatgaccgtttattcaataacatcaagagtaagtttttcttctttcttcatcctgcaacacaaattgctatttctggaaataactttagaaattg

SEQ ID NO: 29839 - DNA, 531 bp, Glycine max
aaaaattgagtttcaagtgtcactattaaacccattgatcactaaaatatccagttgtgtgcaagattttttttcttcttattttacatcaatgctgcattcggtattgggtctcaaaccctattatcaggaaatttgagctgcagatttacatttatctttacattatctattgggagcttgacaatatattcctatgcacatatcttaatgtattatctatccgtttactccatctggctagtttttgttactttcctggtttttattatcatgtatgtaacagtatagtagatcattctagaatgatacactacgaacaagtcactgcccgtttatccccttgtttgttttacctcgttttttgtattcgtttttctcgtttgtagttcagtgttaatttgactttgtagtttggcatgttgaaacaattaatgaagtatctgattcaaaagttgtgtttgggtttttgttttctcccactctaactcaattgcagagattgcaacctctaaaaactaatgaacaatc

SEQ ID NO: 29840 - DNA, 401 bp, Glycine max
attgcagcagcagcagcagcagcagcagctagcttctaaaagaatgaagttagaagtggaggtaatctccaaggaaatgatcaaaccctcttctccaacccaggaccatcttcgtcactatccactctctttctcgatcaagtctctcccatggtgtataaccctatggttctcttttactcttgctacggtatcactcaaactcaattcaccatttccgaaaagctgaagaaatctttgtctgatgttttaacccatttctaccctcttgccgggcgagtcaatgggaacagtactttcatagactgcaacgacgagggtatcccctacttagaagcaaaagtgaagtgcaaagttgtcgacgttattcacaaaccagttccaggagaactcaaccattt

SEQ ID NO: 29841 - DNA, 326 bp, Glycine max
tgtttatccaacatttgtggctcttccttaccttcatcaaagcaacggtcgtattatcatcaatgcatcagttgaaagttggttgcctatgccaaggatgcagtttatatgctgctgcgaaggcagcattagtgaacttctatgagacactgagatttgagttgaaagatgaggttggaataacgatagccacacatggttggattggaagcgaaatgacgcggggcaagttcatgctggaggagggtgctgagatgcaatggaaggaagaaagagaagtgacgggtggaccagtagaggagttcgcaaggttgatagtatcaggg

SEQ ID NO: 29842 - DNA, 272 bp, Glycine max
gcaatggctatagcaagttaacaaatgggatacactcaccattgttgaaagcagcagcagcacataatggaaataatgggttcaaatcttccaatagttccttaaatggtgtatatacaagtccaactaccaatggggtgtgttgatgggaggagctgttaatcaatcatctgggttctttccttttttgcttacaaatgtgggtttgatttttctccaatgacagttttgtccacggggttagcttgtacagtttctagtggacttttagc

SEQ ID NO: 29843 - DNA, 347 bp, Glycine max
atagatttggtatttggttacaagcaacgtggaaaacctgctgtagaggcagcaaacatcttctactacttgacttatgaaggtgctgttgatctggaaacaatggaagatgatttgcaaagagcagctatcgaagaccagatagccaactttggtcagactccaatccagatatttcgtaagaaacacccaagaagagggccacctattccaattgcacatcctttgtactttgctcctgattctattagtttgacttccattgtttgtaatacaagtcaatattcatctgctatgctgtatgttggtctgatggactcgaatattgtccttgtggacgagggtct

SEQ ID NO: 29844 - DNA, 308 bp, Glycine max
aagaagagaagaatggtggtatgaatatgattaatgattatgaagctcagctcataggaagcattttggaaacgaaacctcgtctcggctagacactgactaacaatggcggctgaggctcagcttcctgaccacttcaagtgtccgatttccctgcaaatcatgtccgaccccgtcatcctctcttccggccacaccttcgaccgctcctccatccagcgctggctggacgccggccaccgcacttgcccaattaccaaactgcccctccctgcacactcctccctcatccccaaccacgccctccg

SEQ ID NO: 29845 - DNA, 249 bp, Glycine max
gaaagccaacatgggagagacgcgatgctgcttttcggaagagagatttatattagttgtgcatttctgtgcccatgaaattccattgatgttttagcttcctttgctgacacattttagttgttgtctgttctatgagtgaaacttggatgattttccttatactgtaattgctagtagtctgccataggaatttgtttgtgcctgagaggattgcatgtatgctggtaagtttttggcttttgcatg

SEQ ID NO: 29846 - DNA, 613 bp, Glycine max
cacagacaaatgccttttctccttcaccagtgtttggtcaatcatcagccaatcctttctctagcacagcacctaattctaacccttttgcgcaaaagagttcacctttttcttctggatttggaacttcggctgctcctgccttcagttcatcagcttttggttcttcaacgtcagcagcagcaccttctctttttggctcatcgccatctccatttggagctaactcttcttcaacacccggctttgggcaatctccatccctgtttaatactgctcctgctcaggctacatcttcaccatttggcaatagcatttttggcaacacacagtcatctccattatttagttctgcagcccctacaggtggacagacaggttcagcttttgggcagaatacctccccctttggacagactactacaccttcttttttcaatcaagcctgttcagttcaccttcttctgggcttgttggaagtattttctcatcaagtgcacctctcacttctaataatctgacaggttttggtcaaacagcgccatccatttcaacaccttttcaacctgcacaacctgctcagtcgagtggtgcttttggctttagcaacttt

SEQ ID NO: 29847 - DNA, 501 bp, Glycine max
cttgcagacagtaaatttgaggagttcggaaattttggatcatccacacactcagatttgtaatgaaggtcgtcagaatgcattatcagagatcttggagatattgacagtggtatgtgaaactcacaatttacctctggcccagacatggattccctgtaagcatcgaagtgttttggcccaaggtggtggtgtaaagaaaagttgttctagttttgatggtagatgcatggggaaagtttgcatgtctacaactgacatagcattttatattatagatgctcatttatggggttttcgtgaggcctgtgttgagcatcacttacaacaaggtcaaggggttgctgggagggcttttttgtcccacggcatgtgcttctgttcaaacattacccaattctacaaaactgattaccccttagttcattatgctctcatgtttgggttaacaagctgttttgcaatatgtttacgaagctctcatacaggaaatgatgatta

SEQ ID NO: 29848 - DNA, 436 bp, Glycine max
ctgattgacaaaagatttctcattggtaaatgggatggacacagacacatggatagggtgccagagttcatagctggtggttcatacgggacccctccttacaatgaaaatttccataaatatcttgtttcaaagattcctatcaaaccacttgatttagatacaacaactgcattattgcttgactatttcccagaagaaggtcaatggaaactttttgaacaaccacaaaacatggaaattgcttcttctcatactgaaactagtgaagaggctgggcccaaggtgaaggctccctcatctgcaaaatcttctaatgcagagcaatatattgaaccactatatgtaatattggatactgaaaagcaacaagaacctgtcaaagagttcattacaacagacacagaaaacagaatgactgacataagtgatgaca

SEQ ID NO: 29849 - DNA, 409 bp, Glycine max
cttcagaagcagacacagctgcttactttggagcatcaaatagatgctgtaaaaactgggactgtagggattgccaatgattactatggcttagatgcttctgctgccaatttcggtggaaaacctgggagaaggttttctgaatttccaatgacgatatgtcactatttcaacaaaggattctgtaagcatggaactagctgcagattctatcatgggcaagttgtccctgagaatttctctcagatgtatggaaatgatgctattagtgaggatcaggtgatttcaccggggtcactggcacagttagagtctgaaattattgagctcctaagaacaaaaggtggtccaatgtcaattgcttccctgccaatggcatactacgataaatataaaaaggtactgcaag

SEQ ID NO: 29850 - DNA, 447 bp, Glycine max
gagaggtcaagatattgaaagcacttactggccatgagaatgtggttcagttctataatgcttttgaagatggttcttatgtgtacatagttatggagttgtgcgagggtggagaactgctagatcggatattggccaagaaggacagtcgttatactgaaagagacgcagcggtggttgtaaggcagatgctcaaggttgcggctgagtgtcatttacatgggttggtacaccgggacatgaaaccagagaattttcttttcaagtcaaccaaagaagattcacctttaaaggctaccgattttggtttgtctgattttataaaacctggaaagaggtttcaagatattgttggcagtgcttactatgttgcacctcaagtgttaaaacgtgagtctggtccccagtcagatgtgtggagtattggtgttattacatacatattgt

SEQ ID NO: 29851 - DNA, 251 bp, Glycine max
ggggaagctttcattgaatatatcaatgcccgagacttttatctgaagcagctatgttccactctcaaagttaagccagaagaagtgacaacaaggatagaaaaccttttagaggagttaagggcagtgagaaatgaaaattctgctgttcatgcaaaagcagcaatctacaaagcttcagtcattgcaagcaaagtaatgttggtggggaattcaaaacagtacagggtactggttgagtgctttgatga

SEQ ID NO: 29852 - DNA, 826 bp, Glycine max
ctactccacacatcattcaccactgccgctgacaattttttcagatttgtacactccctcgcttctcagaaccccttcctcaacaaagttctctctctccccgccgaatttcacaccttatgcgtgcagattcggaagcaaaggaacgtggggttggtgtctagtcataatttcgctgccgttttgcccgggggttcggtggcagggctagtggtggctaacggggttctcaatttcttgaacatttacaacactttgctcattgttaggcttgttttgacatggtttcccaacactcctccttccattgttagccccctcagcaccatatgtgacccatacctgaacatattccgtggacttattccccctctgggaggaacgctggatctctctcccatcctagcattcttggtcctaaatgccttcaccagcactgcttctgcactccctgctgagcttccagtcacagaacaatccaaacaaggccttgcagcaccattgcactccactaaccttactgcttcacagaagaaatggttgacacggtttcaagggaacaggtcaaggacatctggtgctgatgctaaatagaacatgggagagtttatttgtgcctctgtgtctgtttattaatttagatacgttccatcccgattatgatagttctattctaggcaacacaatttttgagcttatgattccagagattttagagttatggagtttgctgttgaaagctcaaggctcaagcttccacagtcctattgtgttttttcttttaatcctatggtcttcttagtcaataaacttaaggtccttattt

SEQ ID NO: 29853 - DNA, 233 bp, Glycine max
ctaggcagctgtcatatcatgaatttggcagaagggaaaagggtagatgttttcagtgtggccaactatttggtcttcatgcctaggtgcctcaaagaaagtatgataatcgtgattttgacgtgaaaaggggagattgttatttgttaaaaatggtaatcctaggaggaaggacagtgggaaggatatggctactatcagatcttggttccccaatttcaccattgtggaca

SEQ ID NO: 29854 - DNA, 331 bp, Glycine max
ataaagagctggtgtttatgtcaagggatgagattgatagatgttctccatcaagaaaagatggtattgatgtacttcgtgagagacacttgcgctactcttactgtgccttccttcaaaatcttgggatgtggctcaacttgcctcaaactaccattgggacagccatggttctgtgccaccggttttttgttcgacgatcacatgcttgccatgacagatttctgattgctactgctgccctttttcttgttggatagtcagaggatacaccgtgtcctttgaataatgtgttgcaagcatccagtgagatcttacatgaacaagattt

SEQ ID NO: 29855 - DNA, 439 bp, Glycine max
aattgccacttatgtcaataatgtttttgaggatgtcagaaatggatgggttctattagaagttcttgacaaggtttcacctgcatctgtcaattggaagttggccacaaagcctcctataaagatgccgtttcggaaagttgagaactgcaaccaagttataaagattgggaaggaactaaacttttcattagtgaatgttgctggtaatgatattgtacaagggaataagaagctcttattggcatttttgtggcagctgatgaggtttactatgcttcaacttctgagaaatttgagatcgcactcacaaggtaaagagattactgatgctgatattctaaactgggcaaacaataaagtgaaaagagcaggaagaacttctcaaatggatagtttcaaggataagaatctttctggtggcgttttcttccttgag

SEQ ID NO: 29856 - DNA, 436 bp, Glycine max
gagaatttctcgctctgcctctttttcctacctgcaaagggagtcattcccctccacaaccacccagaaatgactgttttcagtaaacttcttttgggtcaaatgcatattaagtcctacgattgggttgattctgaggtctctcataatttgttgcaccaaccatctcagttcagattggcaaggtcaaaagctaataatgtgttcacagcaccctgcgacacttcagttctgtatccacaaagtggaggcaacatccatgaattcacagctataactccatgtgctgtgcttgatgtccttgggccaccttattccaaagatgatggcagggattgctctttctatagagatcacccttatactgcttttccaactgcagatggagaaagtggtaaggtgaaagaagagaatgatagttacggatggttagaag

SEQ ID NO: 29857 - DNA, 242 bp, Glycine max
acaaaaatggtgctaacttcaatttcaatagtctcttcttcatcttcattcctctcagattctccttccacttcttcccctaccgccagaatcagaccattcttcttccattcctccaaccgtgcccctccctttgtgttccccagagcacaccttcccagtgctaccctcagagcctcttcttcttccgtttccacgccgcatgaaaatgggtcgccggaacagttcttgaagagcaattc

SEQ ID NO: 29858 - DNA, 416 bp, Glycine max
cgtcgatctagaatgtgtgtgggaattagggcttcacatagatatttgcttccagatggtgtagttctgaatgttagcagctctggggcaacttactttatggaacccaaagatgcaatagatctgaacaacttggaagttaggctttcaagctctgagaaggccgaggaaagtgtaattttgagtatgcttgcatctgaaatagcaaattcagaatcagatataaatcatttattggataaaattcttaaggttgatcttgcttttgcaagagctgcatatgctcaatggatgaatggggtatgtcccattttcagcttaggtaattttgaaggccgtgattccgttgaagatgatgatgataccttggtcacacaagaggatgacgatgatatttcttatggtccagtggtgcg

SEQ ID NO: 29859 - DNA, 313 bp, Glycine max
gccatcatacatccagcgcctccgttgtaaggtcaactttgaaacactgatctttgtttcacatatcaaggaattcggaaaggccattgttcatcgtcttcgccaccctacagaagggactgactatccgctggaggaaactgataagtttggaaaacagcaaactgggaagtttgttgtgttgcatctgcgttttgacaaagatatggcagctcattcagcctgtgattttggtgggggtacagctgagaaacttgctctagcgaagtaccggcaggtgctttggcagggaagggtattgaactctcaattc

SEQ ID NO: 29860 - DNA, 279 bp, Glycine max
aaaaaaaacaagttagaaggagactccacaccagtaggccttatcaggaaaggcttttgaatatggctgaggctcggagggagattgtcaccgccttgaaatttcacagagcagctatgaaagaagcaagtgaacagaagcagcaacagcaacaagcccaagaacagcagcaaaggccatcagtatctctccagccatcccagttcccaagttttgaccaagatggaaaatttaagtctaggagaaatcccagaatttacccagcatgcacaaccaaat

SEQ ID NO: 29861 - DNA, 257 bp, Glycine max
agcgaaaagataggtacaatgcttccatatgttcgctgcccatttcggaggtctatcaacagaggacttggaaacaggagatatcttcttgaaagcaatgacttttttgctcttagagatttgattgatctttccagaggagtctttgctgaatatccgtttttggaactggtctgataaatctctctctgccctatggattttcatgatggagccaatgtagtatcttcatgcacattgtgtatcgaggaaaatca

SEQ ID NO: 29862 - DNA, 346 bp, Glycine max
aagagatgtacaccatctcagcttgcattgtcctgggttcatcaccaaggaaaagatgtgtgccctattcctggaaccaccaaacttgagaacttcaatcagaacattggggctttgtctgtcaaactaacaccagaagatatggcggaacttgagtcccttgctgctctagatgctgtcaagggtgatagatatgcggatgatggtttatctacgtggaaggactctgaaactccaccactttcttcttggaaagctgcatgatgaagtgcattgcttaatgcttatacatgtgatccttaaatatttgatggtgctactttaagaaacagattagtccgaggga

SEQ ID NO: 29863 - DNA, 505 bp, Glycine max
tcttcatgaatggaggtctttcaccaggacttgttttagtagtaataggaacaagacactcggggcattgtttaagcttaaggggaaagtttttgagttgttcaaaatctccaatggaaatgatgaatgttctccccacaagggtgatgaggctcaagacgaacgagggttggcctcgttcaaggaaaagattattggagtggttacatcgggtggctttgaagataaaaggcctgcaaaactttctctccaggagcttctgcatttgctctctttgttcaatcaagctggcatttattttaatcaccgtggacgtcacaagattgaagatacgcttgacgccgatgatgaatagtgcaccctgctgagatgcttatcaactgctttgtgtttaacatcatcatcggtttgttttttttcactagaaagcaagcatccttgatttgatgatattttgagaaatagtagtgcacaccaaagcaaaagtgagagtatgaaaaatgag

SEQ ID NO: 29864 - DNA, 340 bp, Glycine max
cgttggtgtaatgagaagggagacaccacctgtgagatatgccaccagcaattcaagcctggttatactgctcctccaccactatttcagtttggacgtattccaatgagttttaggggaaattgggagatttcaagaagagacttgaatagtactcatttggttagcatggtccccactgatcagaaccttaccacttctaactatgatcagtattcagcctctgctactggaagtttgatttgctgtcgttcaattgctgtcattttcatggttcttctgattttaagacatacacttccccttgtaatcagtggaaataaggagtattctttcccac

SEQ ID NO: 29865 - DNA, 483 bp, Glycine max
ggccccagttggaacccacttccggagtccaaaccccagagaacgtagccacaagggcaaaacccttccccccgccatggcacgcgtatcccggtcctcccccccgcgcctcctctactccctctgctgcaccactgcatcgcggtcaccggcgtcgtccctcatcggcggcgccttccatctccgccacttttcagccgggaacgcggcgcgcacgaagccggacaaggagccgtggtggaaggagtcaatggagcggctccgcaacatcggaatctcggcgcacatcgactccgggaagacaactctgacggagcgggttctgtactacactggtcggatccacgaaatccacgaggtcaggggcagggacggcgtcggcgccaagatggactccatggacttggagagggagaagggaatcaccattcagtctgctgccacctactgcacttggaaagattataagattaacattattga

SEQ ID NO: 29866 - DNA, 396 bp, Glycine max
ccgcaaaggagtccattagaagagtaaaggatttgcctcacgaagggctgcatccaatgttcatgaatgtgttggaaacaggggagttaacggcacttgcatttactgagcatttgaaaaagtttaggccaaagcagaccattttggaagctgaaggggaagcagctaaatcagagcatcaacagggcccttctggccaatgggccgatgtgatgaaaaggcagaagagccattcatgagaatattataaatttggttcgtgaacagcagcagtctaagagtaataaggaaaaggaggaaattcaatcagaaatcagtccttccatggagaaaggaagaaaagcacgtggttctaagaggaagccccaaagtttcaaggatgaggatcactatata

SEQ ID NO: 29867 - DNA, 506 bp, Glycine max
tgtatcgcgtggagaaactataagcaacttgtggagactactgtggagatagcaaacaaagttggtgttgcagatattgttggtagaattgtcgaagatcttaaagatgagagtgaaccttataggcgtatggttatggagactattgagaaggtggttactaacttgggggcatctgatattgatgcacggctggaagagcttctgattgatggtattctttacgccttccaagagcagaccagtgacgacgctaatgtgatgcttaatgggtttggtgcagttgtaaactcacttgggcagagagtgaaaccatatcttcctcagatttgtggtactatcaagtggcgattgaacaacaagagtgcaaaggtgagacagcaagcagcagatctcatttcaaggattgctgttgtcatgaagcagtgccatgaggaacaattgatgggtcatcttggtgttgtcttatatgagtatttgggagaagagtacctgaagtcttagga

SEQ ID NO: 29868 - DNA, 514 bp, Glycine max
caaccactttgtgtcaaagaccatcatggagaagatggttgatgaggtttttgctttcttcaatcttagagaggaggagaagcaagagtatgctggtaaggatgtgatggaccctgtgaggtatggcaccagctccaatgtttctatggacaaagtcttgttctggagggattttcttaaaattgtggtgcatccagaatttcactcacctgacaaaccacctgggttcagagagtcatcagcagagtactgtagaagaacctggaaagtgggaaaggaactactaaaaggaatatcagaaagcttgggattggaagccaattacatagaggatacaatgaacctagattctggttggcaaatgatagcagcaaatatgtatccaccttgtccacaacctgagcttgcaatgggaatacccccacattctgatcatggcctcttgaaccttctcctgcagaatggggttagtggtcttcaagtgcttcacaatggcaagtggatcaatgtcggt

SEQ ID NO: 29869 - DNA, 364 bp, Glycine max
ctaccagaagaagctccagaacattggagaaaactacatccgattttcgcgaagcaacgcaacgacggcgatgggagcgtccacttcggcggagccgagagtgtcggcggagcagaaagaggcggaggccgtcacagcctccaccggagctctccccctgcttcagaaagccttctccaagctcgctaatcccgagaccaacgccgttcccttagaaaatctccagcaatgcttcagtttcggtcgcgaaggtcgaagttattccggaagcaacgtgccagattcgtttccggtgttgttagatcacttagcctcatccctagttgatcaatttttcgtgcctgacaaagagggaataatttgg

SEQ ID NO: 29870 - DNA, 360 bp, Glycine max
acgaggtttactctcctttcctcttttccattgacatcatcaccgccacaacgaccttggtttcgtggcaaccaccgccatcacctattacatcctttacggaaagtgcgtctccaccatggactttttttgtcgagatcgaaacccttggggacacagacacgcagaatgagaatattgcgcgtcttggactgtgatggcggacaggccctttgccaacgactatcgtatctcgtcggagtcgtatgtttacatggcaatagacttgtcgctccgccggaggcgttttacagagaagttttgtcagcaatgaggccgaggatcgtgccaaggatacaaaggaggacctccttgctggct

SEQ ID NO: 29871 - DNA, 375 bp, Glycine max
ctcgagcgtctattgattaattaattaattaattaatatatttattttcttcttataacccttcattgtatcatcaaatctctattgtttctctttctctggcttggtgcagctacaaccgtgtctacctctgctctatctcagttctcaagagttcagactgtggttacactcaggaaaatgattcaaaattttcagtatacttctgaagttcctacctttggtacacatgtatgtacatattcttcagctgtgattggaaggtcatatacacaaaacggggatgctgagagatgtgctgtgtctctgaaatccataaggttatgtccttgctatcactgccctgcttaatacttggtaatagcggagcaaaaa

SEQ ID NO: 29872 - DNA, 535 bp, Glycine max
  unsure (1)..(535): unsure at all n locations
cgcacggcaagttccgtgccacgttgattaacgtggcaggtgtagcagtagcaaaaagaccagcgcatgcacatataacccaatgatatagtagtatatttctatgccttatcttttgtgttcaatttcaaatacgctcatcacataacaattgcagtgatggggtaccactattattactactacggaacctacctttactttcttcacacacagacgaagccagatgaatgtcttgcccatttgccctggatcttgatgaagcgagggtgaagaggtgctggtcagagattgaagtgattttggatccaaatgtttctaaggatgcaggggaatggggaaggattacttggggaacagaagagtcatgtctaccattttgccaattaggatattgggccctcacaatactgcaattcacagaagaagacccaccttgagctgctagctgcaccgcccaaaaactttggtgctgttgcttataggaaactgtcgaactataatgacttccacgtaacggngtaccataataatg

SEQ ID NO: 29873 - DNA, 260 bp, Glycine max
ctagtacttcatcatcttccacaaaattatcctcacatcactcccaagttcacaacactacacaaactagccaggtctaaatttgattgaagatggttggaattggggttccaatatgcgtgcaatgtggcaacaccagcaacccttgccggtgcaaggtggtggggccaacgctcgggttcctggcgtttgcggcggcagcggtggttgagtggccggtgggggctctcgtgtattgctttcgccacacaaagggtcgc

SEQ ID NO: 29874 - DNA, 275 bp, Glycine max
cttctccttctcttcctcgctctcgtcttccttccctttcttctccggaaccacccatatgaattcataacccgatgcttccatcccgcatgcaatctcgtaaagctgtttatccggaaaatagcagagggtcccaaaacttatgtacaccaccgagttgtctcgcttggagtcgagccaactcaggcactcgttcgcactcaccacgctcttctggcccctctctgctttctccagagcggttctgcgaacgagggacgctgggccaaggtgcc

SEQ ID NO: 29875 - DNA, 579 bp, Glycine max
  unsure (1)..(579): unsure at all n locations
catagaatttcatccaagtcaaatgaactcgtgactattgaagaagaggactacatggatgatggatccattattcatttgaaactgagcattgattctaataaaggagaagcagttttcgattntgctgggacaagttctgaagtttatggtaattggaatgcgcccaaagctgtaacagctgcagctgtcatatactgtgtccgctgtttagtgaacgttgatattcctctcaatcaaggctgtttggctccagtgaagattcttattccagaaggctcatttctctctccaagtgatactgctgctgtagtaggaggtaatgtccttacatctcagaggataactgatgttatattcactgcatttcaggcctgtgcttgttcccagggatgtatgaataattttacatttggggatgatacttttggttattatgaaaccattgggaggtgaagtggggctggtccttacctggatggaaccagtgnngtacagtgccacatgacanatacaagaatgactgatcctgagatatttgagcaaagatattcagtgattctgcacaagtttgactta

SEQ ID NO: 29876 - DNA, 511 bp, Glycine max
accagtatgcacccatcgaataccaatactaatatcttccatcacttaataaatcgaaagaaaaaaagagcttcttcttcttcttctctgcatcatcacaatggctgaagtacgttcacaacaaccccagcatgttcaagtccacgcaagcacaacacacacaccacaacaataccgttattaccaaggtggcgccaaaacacaacaccatggcggcgaaggtggcggcgttatgagcctcttcccggagatatccctcacgggctcccaactcctcgccctcctcgccggcgtccccctcggcggcatgttgctactcctctccggggtctcgctcatcgccagccttgtggggctggcggtggcgacgccgctcttcattttcttcagcccggtgctggtgcccgccgccttcgtcatagggatggcggtgaccgcggtgctggcggcgggcgcgtgcgggctggtggggctggtgtcgttctcgtggctggtgaactgtctccggcag

SEQ ID NO: 29877 - DNA, 588 bp, Glycine max
acgaggccatttgtgcatcacaaaaggagtccaatgccacggcaaggctgctgacccggttggaggtagtgagctcaccacagaagaagaaaagtctgtcgtggttgttaagaggctacatcaaaggcggccattttaacgaggcggcagagactatcatgaaaatgcttgaattgggattctatccagagtacttggacagggcagctgtattacaaggtttgaggaaaagaatccagcaatatggcaatctagatacttatgtcaggctctgtaagtccctctctgatgcaaatttgattggaccttgtcttgtacatttgtatataaggaaatataagctttgggttgtgaaaatgctctaaggcctatgtatggattgatagaaaggaacaaaatagtatgaaatgaaaggggatgatacatggttccattgtttggattgcttaaaataggatgaaatggaatggaacattaaggaatatacattccattccattaaacacccctttttcttcccttcaatttggtgagtataggatggaaccatctattcattaaactctattatgtaacatcgcaaaaaaa

SEQ ID NO: 29878 - DNA, 451 bp, Glycine max
cttcacgcgtccggtgcaggggttctttggtgattcctggcatattatgtgaaggagcttcattaggtgaatttcaaaatggagctcttaccagtagcacaaaaaacttataacaataagtggggttaaattctctaatccatgctaatccatttcattcacatgagatgactttaaatgtttggctggttttgtgtggaccggtgctttgttggatcctcttgccaagttgggttctacagtgcaagaattcagtatacttccctaattcatggtattttgcaaaggagcttttcgcttagaaccagaactggagctctcactagtagcatagcactggtttatatgcagagggttgaattcttactcccatttaccatgttacacctagaacgttgatgtttgagtacaagatctcttttaaatatatgttactatggtccgatctact

SEQ ID NO: 29879 - DNA, 253 bp, Glycine max
atccctttgatcttctccgaactatattagcttctcagggtgaaccaaaggtatatcccaacatgaggtctgcattcatggatatcgtccatactcgtggattccaaggcttgtattctggattgtcgcccactctagtggagattataccttatgcaggcctacaatttggcacatatgatacatttaagcgttggggcatggcttggaatcatagatactccaacactgctgcagaagataacctctctag

SEQ ID NO: 29880 - DNA, 338 bp, Glycine max
tcactgctgtagtgcaagttctatccttaggagtatgaacattgccgcaagtcgtagattctgatatagtggtacatgaggcaagtcatgcagatggacatcttaatgttgtagtcgtttttccctcattggaggctgctatcaaacaatctagggccgtagagaagggtattctcattgctagagctaccactgatgacttgaaggaggaaggagtcactggctccggtttggttataacggaactactgaagccacttaaaaatgcagtcccttggtttcaagaaatcttcacatgggaaaggccaataattactcttgctgttcttgctgcatcc

SEQ ID NO: 29881 - DNA, 371 bp, Glycine max
ggaaatcctttgtcttgtgctcgatggtatagagcacaagtattcagcttcttctcctacccagaaaggttgaagttagatgagaaagaaattaacactagtgatttttggaagagacaaatgattattgccagtatgcataagcgacctgccagttttgggatttatgtgcctgccaaggatgaagctggcattgaagggggccatatcagaaggggaaaggtctctcggcttgtcagtataaaaaatgaagagaccactagcatatgttctgacgaggactttgtctcttgtgcaaatgatattcaaaatagagaggatcctgatttatctgacaatgaagctgaaatggtagatttgataaatagagt

SEQ ID NO: 29882 - DNA, 257 bp, Glycine max
gtggaggagagggagaatgagaaggagttttattgtgtgctgtgtaagaagaagtttaagcgtgagaagcagtggaagaaccatgagcagtccaagaagcataaggagagggttgccgagttcagggattcgattggtgatgaggaggatttggaagaagaagaagaagaagaaggaaaggagggtttggaaagtgaggaggatcaggttggggtgaatgatgagattgataatgggattggtgatttggaggcaag

SEQ ID NO: 29883 - DNA, 239 bp, Glycine max
gtttcttatggttttaggtactattggggcagttggggaaggcttggccacccctctagtgttgtatatcagtagccgcatgatgaataacattggaatttcctctaacatggatggaaacactttcatccataacatcaataagaatgcagtggcttggttatatttggctggtgcctcttttggggtttgcttcctcgagggttattgttggacaagaacaagcgaaagacaagcgg

SEQ ID NO: 29884 - DNA, 528 bp, Glycine max
gcaacatgtcccccttttgttaggattaaggaagatgataaattgattcaagcagaaggtgtggattctctttcagaagatgaacttcgggaagattgtagagagcgaggcatgcttgggttgctttctgttgaagaaatgcgccaacagcttcgagattggctggacttatctctgaatcactctgttccatcatctcttttgatactttcaaggtcatttactgtgtctgggagattgaaaccagaagaagctgtgcaggctacactttcttctctccctgatgaggttgtagatactatacaggttacatctttgccctctgaggattctgtctcagagaggaggaggaaattggagttccttgagatgcaagaagaacttattaaggaggaggaagagagagggaggggtgttgcaagcaaggatggaaatagttctagtcaagatgataaggccctgaaagagatgaatatttcaacagcaaaagaggctcaccaacttgctagagacagagcatttgaaaac

SEQ ID NO: 29885 - DNA, 261 bp, Glycine max
caactactaaagcgatcgaagaagggaactaaaaaccaagccagtgtctcactctcaccccagaaactcattgttgtgtggcacaacaaacttcaccaatgatgaatgccctcacaagctcttgttctaaggccatggtcgagaccctaggtcccttctctcccagagttcccctttgtgtttctgatagacccgaattctgcttcacccttcgttccaaaaatgagaaaaagggatggaatttattgctcctgaaactgg

SEQ ID NO: 29886 - DNA, 999 bp, Glycine max
tctcgagccgaatcggctcgaggaagctgtccataaatcaactagttcagaaaggatgaggacccttaggtctacaagttataccagaaaggtcaacactgccagccttcaggaacacttacctgtgctgtatccagaagttgttctatctgtagaggtttaccataatgttcgaaagggtaccaagatccaagagttgttagttcttggaggtcagaccttaactgctctgagggacaagattttttgctcaacggaccaggtgatgcacaaagctgggcagcatgatccttctggttattttctcatcgaagatgtattctgtcccgatgtccgggatccgtctgctattgatctcacaagacctatactggattggctcagagactccaaggaggaggcccaaaagaaatgggaatatattataactggggaactgcagaagaaacaaaaggcaatcatgggtgagaaatctgcatcacaattgcctcattttagatccattgagatgcataagatacgtttttgtgacttaagctttcaacttggtgctggatacctctattgtcatcagggtgactgcacccataccttagtgatacgagatatgaggttaattcaccctgaagacgttcataatcgagctgtttatccaataatcacgtttcagttgaagttgcgttttcagaaatgcaatgtttgcaaaatattcagagctacaaaggtcacggtggatgacaaatggacaccagaaaacccttgttatttctgtgatgaatgtttttccctacttcaccaagcagatgatggcactctattatatactgactttgtagagtatgattacaaccatgattaattgctgttagccttggaagaacacccacaggcaactaaagttctttacaataatcttatagaaaattgttttttcattgtgtattgaattctgtatctttggaaattaaaatctataatgaggtccacagggtaggagat

SEQ ID NO: 29887 - DNA, 273 bp, Glycine max
ttcgctgagaagacgacagatggggggattttaaatataaacctgctagaagatttctctgctatccatggcaaacaaagttaagcttgcaactcctgttcttggtatgggctgcagtgatggcaggccacaaagctactattggggaggaggttgggaaaatttctccatttgcccttgtttatgttagaggactaaggattgaaagagggaatagaataataggaaggggtagggggagaatgattcagaaaatgaagtcctgcagaaatc

SEQ ID NO: 29888 - DNA, 461 bp, Glycine max
catagctcaggcacaaattcttggtagctcaaattgaagcgccggtccacggttggcaccgtcacattctccgcaatgaatttgttgagcagcgaaatttcgtccaaaatttggggcctcaaaatgtagccgccgtccttggctttgcacaaaacattcacaaaacgcttcatctcaaatgactttccggggatgaatttgttctcctccagcggccaaagctttgagaaagtgcccaattcctttttccatctggcatcccgaggagtgaaaacataggccgggtcgtccatttccaattcactgatccaaagaaagccgatagataaacagagcgtaggcttgctttgagcactctaatttcttcaaagtaacaggtccggaggcacgacccggccagttaaggacaggagcgcatcgccggcagaagggacgagccgaccggtgcacaccggaggcgg

SEQ ID NO: 29889 - DNA, 454 bp, Glycine max
gtgtggtcggtgattgaagctgtgcggctcgtagttggaccttgggttgggtcgatcggtccgcctccggtgtgcaccggtcggctcgtcccttctgccggcgatgcgctcctgtccttaactggccgggtcgtgcctccggtgctgtccctgttaatcattactccgatcccgaaggccaacacaataggatcagaatcctgtggtgttatcccatgctaatgtatacagagcgtaggcttgctttgagcactctaatttcttcaaagtaacagcaccggaggcacgacccggccagttaaggacaggaggagaagtggccagcaagactaaccagcataccttattggttgacaaattctcaagttggagtttatggaaaacctgcccctgaagattttactgctgattatggacactggacacgtatagtgtccaagtcttatcttaatgg

SEQ ID NO: 29890 - DNA, 251 bp, Glycine max
actgtccctgttaatcattactccgatcccgaaggccaacacaataggatcagaatcctgtggtgttatcccatgctaatgtatacagagcgtaggcttgctgtgagcacgctaatttcttcaagagtaacagcaccggaggcacgacccggccagttaaggacaggagcgcatcgccggcagaagggacgagccgaccggtgcacaccggaggcggaccgatcgacccaacccaaggtccaactacgagc

SEQ ID NO: 29891 - DNA, 849 bp, Glycine max
aacaaatgtttcaacacattcataagataactgtttttcataatctgcaactgactccacttcagtacttttctgaatcaggggaccaacatgtaaagtactctggtcatcatgaaaggaattggtatcgccacttgaagcatccgccttattagcttgagcctgtaatgtccccatgttgacggtgaaaggacttacaactctatgcctagtagcagtacgcatgcgctttgttggtattgacccaacatttacactagcaggtctttttccaaacagcatggatggttgatttccagttgcatagtgtacataaggcaaatcagcaccagcatcaccacacctaggagtgtaagccttcaaatttttatgtttcttctgcgcagattttgatgatttgttgccctcatagacactgggcatgtaataagtgtcggtttctccttcttcctcatcatatgcattctcttgagacccaaactctgctgcagtatcatacacagacatttcaatttcctcatgaatgctactcccagttttctcgaactgtaggaaatgagattcgatagcttttctatatgtttccattgcagtaggaggaacttcatagaaaagattttcttcattaagatgctcatcccatgacatatctacagtgcttgagtcaaatatcttttcaggtgttgttggtgcttctgcttgagaggaaattccctgagatctattagcatctaaaaacctcaaagcatatgcatgcactttaagtgcagcatgttttgcaggattttgtccctccaaaaatttgcttgtctccatattgctatttcttctttgatccctcaaagcttc

SEQ ID NO: 29892 - DNA, 258 bp, Glycine max
tttgttgaattcttcactgcaggagacttgattctcgagactacggtattgtctaatcctgatgcaagtcttgggttgaaagaacttttccaaaatcatgatatgagtgataaagtcctaagagcacatttttctgaagcgttacaattgtccaagccactacttgttcagatactgctcagatgatacctttagcagggggaatgatccaaaaatcatcatgttgggttactgtatcaatggatgaagttttgttga

SEQ ID NO: 29893 - DNA, 498 bp, Glycine max
cgaaatggtaactcgcagagcattctccaagatttgcaagatgcaacgcttggatcactcttatctgctttgatgcaacattgtgatcctcctcagaggaagtatccattggaaaagggtatacccccaccttggtggccaaatgggaatgaagattggtggtcacagttgaatttacctcatggtcagagtcctccttataagaagccccatgatttgaagaagatgtggaaagtgggagtacttactgctgttataaagcacatgtcacctaatattgcaaagataaggaggcatgtccgccagtcaaaatgcttgcaggacaagatgacagcaaaggaaagtgcaatttggttgggggtattaagtcgagaagaagctctcattaggcagcctagtagtgataatggtacatctggaataactggagtgccacctggtgttcctgttgagaataagcaagcagctactagtagtgctagcaactatgatgttgat

SEQ ID NO: 29894 - DNA, 229 bp, Glycine max
tggcagttggaatcacctggagtcgctcaaaaaagaattccaaatgaggtttctggctggtcatccagagcatgaagggttggtcaagccagtgagttcactctctccaagcttctgtgattccttatcagatacaccattgtgcttggttttaggcagtgaaggaagtggcctttcagaaaaatccctgcagacatgtgagcttgtgagcattgcaatgactggagaa

SEQ ID NO: 29895 - DNA, 304 bp, Glycine max
caaaatggaaagaagctaccagatggcttgtcggaggaggtacttgaaggcttgcaatttgtagagaatgaaatgggagccattcttgggaatcctttaaaacctcttctcctctctgtgcgctctggtgctgcgatttccatgcctgggatgatggacacagttctcaacttaggattgaatgatgaagtggttgctgggatggcagcaaaaagtggagagcggtttgcttatgaatcttatagacgtttcttagacatgtttggagaagccgtaatggacattccacactcgttatttgagg

SEQ ID NO: 29896 - DNA, 376 bp, Glycine max
gtttgatgctaaaataaaattccgattccgccgctaacaaaccctaataaagcttaattagcttggactgttaacttgactcagcgcaccacaaccccagtgtggttcccggaaccggaaggtactggcttggctaggttagttgcagcagcaacaccacacaacagccaaggtagggccagtttgaatatttgctcaacacaagcgtttactagggtttttttccgctgaaaagtacgtgtcccattcttgtcaacaacgtggcgcgcttcttaacataagcacttgcaatggcggattcagagcgaatccaaaattcgtggatggcttcggatcaaactgcaattgaaatgagcggcgagggcacaggttccag

SEQ ID NO: 29897 - DNA, 372 bp, Glycine max
ccggtcccacatcatgttgggcgtccatctcaaaccatggtagaagtggtgattatgggagcacagaaatgaaacacagggtggaaggtgatgccaaaggcaatcaatatcctgagcgggaatctctaccatttaaggaaaactctcatgaagctcaagacatggtgaaatttcgatttgataatggtgaaaaagagcacgaaagcaatgctggagggactgaaacaaaagaactgactgaattgaaagacagacataatagcagaaaccttgatcaccgagaggatgcatttagccggcctcctcagtcagccattaagaaaattgatactgacaaagtaaaggctgcattagaaaaacgaaggaaagcag

SEQ ID NO: 29898 - DNA, 421 bp, Glycine max
tttgcgatatctgtgaagattaaaaaaggttgatagcaatggccgaaatatatacctctgaattttattttttttctgcttccgctgtctgtggtgcgagtgggctcacgtaactgggcccggtgggcttcaggtggggcctcgagcccaagcctttcgatatggcggcggaagaaggagatggggaaggaagggctggtggtggccaaagagctgaagaggctccggtcggacccggtccggctcgaccgcttcatccggtccagcgtctcccgcttgctcaagtccgacctcgtcgccgtcctcgccgagttccagggacagaaccaagtcttcctatgcaccaagttgtatgatatagtccggaaagaaatatggtatcggccagacatgtttttttatagggacatgcttatgatgc

SEQ ID NO: 29899 - DNA, 344 bp, Glycine max
gcgaattttcaccgatagttttagatttgtagcgtagcttgtttgttcctccccttcctcctcgttctgtttcagtgattattaatgctggtgcgtgttgcggttgctgcagtggtgcgagcgggcacccgtaactgggcccggtgggcttcgagtggggcgtcgagcccaagcctttcgatatggcggcggaagaaggagatggggaaggaagggctggtggtggccaaagagctgaagaggttccggccggacccggtccggctagaccgcttcatccggtccagcgtctcccgcttgctcaagtccgacctcgtcgccgtcctggccgagttccagagaca

SEQ ID NO: 29900 - DNA, 480 bp, Glycine max
ggaagaccatcctctaccatcgaaatccctcacgaacgccaccgacataacggccgccggacccctgactccgatatctccgacgactatcgccgtcgccgcagccctagctacgactcatacgaccgccacacggagcgccaccgccgctgttcggaatcgcccgagcacagaagccctaggcacaccaacggaactcacaacgacaacactctgcctaagaaattcggccgccgaaacggcgcgtatctggatcgcgaccgcggggattggcagcgttccgattccgagtcagacgaggagttgaagggtttgaactacgaggaattccgaaggctcaagaggcagaaaatgaggaaatcgctgaagcactgcatctgggacgtcacgcccagtcctccgaggcgcgataacgaagatccggaagattatagcaaacccgatgaaatttctgatcgagacgacggcgctgggaagatc

SEQ ID NO: 29901 - DNA, 517 bp, Glycine max
tggacttccaaacttggaggagttggttatcaagagtatgtgtgatttgaagtcaatatggcctaatcaactggctccaaattccttttccaagctgaaaagaattatctttgaggactgtgaaggctttgattatgtctttccaatctctgtggctaagaagcttcggcagctccaatctcttgatatgaagcgctgtgtcataaagaatattgttgaagaaagtgatagttctgatatgacgaatatttaccttgcacagttatcagtagatagctgtgataatatgaataccatagtccagccctccgtgctatttcagaatttagatgaattggtggtaagtgattgtcatggagtggtaaatattataacgccatcaagggccgaaagtttaccaaaactccgcattttaagcataggtagttgtaataagctagaggaaatttatggaagcaagaatgagaatgatgcaccattacgtgaaatttattttatgaaattggagggattatta

SEQ ID NO: 29902 - DNA, 342 bp, Glycine max
ccctgatcttcttctatcccccaccaccgtgcaccaccatctctccaccgcaggcaaccgcaccacgttaccgctaccaccactccactatgtcgccgtcaccgaccaaggtcacggcatctccacccacccctttcacaaaatatatagcgttacgaaatggggccccagttggaatcgctgaagatatgatgctccggccagatttcgacgtcgaatacttcgatggtgatgtcagatctgcagtcaatttctgaccagagatctgtgcgatgcagtacattgcctagatggtgcaggacatgccttccaccgacgccacagttgtcgtgaagtaacggc

SEQ ID NO: 29903 - DNA, 287 bp, Glycine max
attcaaattgctatgacatgaagtctgcaaaaaatattaacttgaatgagatactttcaaatgcttcatccaacaccttagtttcccagtcaggtctgggaatcatggatggagaacagaagcatgaggagcagcttgcagtgttgccttggcttagacccaagacaacatgtaagaatgtggcacaaaatgctggaggtctagatggtttccaacttgcttcttcatctaacaaagatgaatctggataggggtctaatggagaatgtattcacaatgtaactaca

SEQ ID NO: 29904 - DNA, 335 bp, Glycine max
gcagcagcagcagcaagcatatattgaagtacgactaacaccgtctatatatagagagagctatgggacaagtaacacggacacggagacataattcttcacacaaacgttgtcttgggacaccttgtgcaatgtgcataaatatcccatttctcttattcacctgatttctatgaacttcaataataattctgataccctttgacgtaaatagatcaacagcgtgccaaaggagcaagcttttgtgtgatggagcagaaacacgtgttgttttcagcattgagtgttggggttgggctgggtgtgggacttggattgagcacaggacaagctgt

SEQ ID NO: 29905 - DNA, 430 bp, Glycine max
aaggacttgctggaggaggattttgtcaaaaagaaccctggttgggtggaggaattgaccttgatggtcaagactaagcaaaaggctgaaatacaggctttgagcacttttggttttcagtatctgtcagaagtgtatgtgcccttgaagttgcagcagaaagattggctttgacctgtgaataatgtagtaatatctaagaattaaaatggtggttatgccactacttagcccaacagcttagtcatgctatagtatctctgcaagttgcaccagaatgtggtaaatttttaagtatccttcattgaaaaattgttaaaaaattatgttgatcgcctgtttttcagactgagtttataattgtcttattgttcttgcttcagttaacagggaactgggtttattaaattataaaccccaagtgcttttg

SEQ ID NO: 29906 - DNA, 711 bp, Glycine max
agacctgctccctaggcccgtcacgtgctccccacgtgacatccagaccgcggccacggccgcggcctccatggttaagttcgaccctgtgacacaatcctcagactcggagactccagagtcttcggagctgagcgagattgtcgaacttcccaacattgaagacagcagcgttgactcgacaccggagttcgtcttggtcgatgttgttgacagttgggtgtttcccccaatgggaatgggttcagagggaatcgagttctgtgccgctttttctgatgagttatttccgcaacagagttttattggttccgagatagagatactacccatttgggattgaatggtgagtgggattcatgtgccttttgctcgcttcacgtgggattggcaaatactagcattcatgggctgttttgctgtcaatggtccagggccacttcaatttactctctactgtgtctgggcgcactatatttttcacactgttacttatggttatagttagttacgccttagcatttagcaagttccattgtcttcaacttcaatccctttcttccttccttccttccttctaccgggtaatttcctctgttttatacaagtggaaccggaaaatatgggaatgcctaataaatttttaccacattaccttactgtacggaggaactatagggttttttaagaatgttcccaaattttccaact

SEQ ID NO: 29907 - DNA, 429 bp, Glycine max
cccacgcgtccgttcaattccaaccatgatagtaatattagtacctctgttttgcagaggatgagatggttcgctcaacaaggtgaggtgattgatactataagggcaaaacgcaatgactgttgaaaagagaattgttttggttgggattagaattgatggctatagcagacagctcctcaactgggcacttgccaaagttgctgagcctggggattgtgttatagcagttcatgttgttaaaagttcggattatgtttccaaaaacaagactctgatagatggctatttagaagtttatgaaggcctatgtggtgtgaagaaggtaggtctcaccggtcaaatcttcacaggaagctccattaaaaacattcttgttagagaagctaaaaagcatgctgccctggctctagtggtagggggtcgagc

SEQ ID NO: 29908 - DNA, 271 bp, Glycine max
tacaaacacaatcattgaacagtgtcagtgttaaaaggcaccgtttcctctgtttttgggagagaaaaatataaacagagcaaaacaggggaaagcagagctgaaggtgaaagatggtgaatgagcagagaatacaagaggaggcaaaggtggcggcgttggagtgcagcggcacaatgagtggacccctcgtcggagctgccgcctccgccgggactcgccgacgccggagggcggaggctatgcaattggttctgagggcgttatgcat

SEQ ID NO: 29909 - DNA, 683 bp, Glycine max
gctacagcggcttgatctcagccagaataacttttctggttcctttccagatgaggttggaacacttcagcacttggagattctcaagctctcagacaataagctgtctggatatattcctgcagcattaggcaatctgtctcatttgaactggttgttgatggatggcaattatttctttggtgaaatacctccccatttgggttctcttgcaactttgcaaattgcaatggatctcagttacaataacctttctggaagaataccggttcagcttggcaatctcaacatgcttgaatttctctatctcaataacaaccatttggatggtgaaattcccagcacatttgaagagctttctagcttattggggtgcaatttctcattcaacaacctctctggtcctattccttccacaaaaattttccgaagtatggctgtaagcagctttattggtggtaacaatggcctctgtggtgcacctctcggcgactgcagtgatccagcttctcgctctgatactcgtgggaaaagttttgattctcctcatgctaaagtagtcatgatcattgcagcttctgttggaggtgtttcactcattttcattttagttattttacattttatgagacgtcctcgggagtcaattgattcctttgaaggcactgagcctccctccccag

SEQ ID NO: 29910 - DNA, 339 bp, Glycine max
tggcactactgttgaaggaatttgtggctggcaaactgaagagatctggactagattgtatcctgatgagccctacaatgctgatttggttaatcttctcccagaggatatctctaaaaggatttctaagcttgaaaaatacatctagtatgatttgatttcagctgctaagaggcagagtccattcttttaccaggtatcaagaacgcacatgacaaatgatctctttatcaaggaagctgtggccagatacaaagggtttctgcatctcatcaagagaaacaaggaaaagggtataaaacgcttttgtgttccaacatatgatattgacctaatctg

SEQ ID NO: 29911 - DNA, 409 bp, Glycine max
ataatcatcctagcgagagccattcaattgaaaagatcacaacagtaaaatatgaaccatgttgagcatatcgcttatgacatggtcatgatcactctatccatatctctcatcgttcttgccatcatcctcttccttgcttgcaagaagaagcccgttgaatccgaagaaacacttcccgtgaagctttgtgctcgtgcataccccttgatggaaatcgatgctgccacagatggcttcaaccacaggagaatcattggccagggtcgcttaggaaccgtgtatgcagggacactagagcaagaagaacaacaacttgtagccgtgaagcgtattcacccctttcttgtgttgagcaatgcagggtttggtttctcatccgtgttgaagtggctctccttggctcaac

SEQ ID NO: 29912 - DNA, 263 bp, Glycine max
tacaaagagggttagaacaacttaacacagatgggtcaaaatcaaaacatgttgttcagctttccattttcgtagtgggattcttctcttcttgctttctccagtgtcatgaagaagagttcttcatcatcattccagaacttgggatctttcccaagtccaggggcaccctattatagggagagaaacattaggagccaaaagggttggtgctcagagagagtttcaaattcaaagctttcaactagtgctagtagcataag

SEQ ID NO: 29913 - DNA, 258 bp, Glycine max
  unsure (1)..(258): unsure at all n locations
gtnatactcatgagcttgatgtccctataatttgcacaattttgtatatcccccttgttcttatagattggcactaacgtgcttctcctccattcctccggcatgcgtttgcacctcataatttcgttaaagagttcggtgagccactccagacctctatctccaagagttttccacacttcaataggcacaatgtctggccccaccgccttaccattactcattcttttcaacgcttcctttacttcctgtttctga

SEQ ID NO: 29914 - DNA, 259 bp, Glycine max
gtatatatgaagaagaaatacgcaagaatgggaggaggtgtcgaaaactccaaaagtagatggccaccaatggagaaagtatggccaaaaagagatcctgaaagccaaatactcaaggaactactacaggtgcactcacaagtatgatcagaattgtcaagcaacaaaacaagtgcaaagaattcaagaggatcctccattgtataagaccacctatttgagccaccacacatgcaatgacttgctaaactatgaaatc

SEQ ID NO: 29915 - DNA, 293 bp, Glycine max
gcccgcaaatatttgtggcaacagacaagcatccagcgcagatccaccacgtccgcaaaaatcacacaccgcttccctgtcccctcccctctctcacatccatttcacatcactctacactaacagacaaacagtcctccgctgctcgccaatcctagggttccggtgacaatgctcccctatggttccattccggaggccgcggcggcgctgggccgcaacctcacctccgcggaaaccctctggttcaactactccgcctccaagtctgattacttcctctactgccacaa

SEQ ID NO: 29916 - DNA, 257 bp, Glycine max
gtgcttggacctacaaagtacaccaaactttcacagccaccctatccctcctcacattcttcattggataccttttgactaggattgccatggcagtgcctcatgcctgtgtgagttgttattatgtatgctatgctgagactccggagaatagattgtttgataaaacaattaaggatcgtcaggccttgttaaaaactggccgtgatgtggttcctacgccaaggggaattaggaggtatacaaggacctaattg

SEQ ID NO: 29917 - DNA, 256 bp, Glycine max
acactagagagaactagaaaccataaaccattccacaccttcatcaaacacacaaactcacagaaacacacacacatagagtgagacagagagagaggcatggggaatcacaggtttaagttatcagatatgattccaaatgctgggttttacaagctgagggacatgggtaaaggaagagattcaagaaagcaaaacacaacaccctctaggaaaaagaagcaaacttcacccccttcaaccacacattcatcaa

SEQ ID NO: 29918 - DNA, 316 bp, Glycine max
agacgacagaaggggggattcgattcgagaaattcgacgttttcgaagaattggaaactggaaacttcacttctgttcgaattcagaggttaattctcgttaattagatcaatcatgagaactcgaaatgccgattccgcttccaaatccgcaacccctaagaagacgccgccgccgccgccgaggacaatcccctgcggcaaagcgcaccaccgccaccaaaaccagagccacaaagaagaacgaggtttcgcccgcacccgattccaacccctatcaatctcctctggagcaggaatcgttaggcagtgctagc

SEQ ID NO: 29919 - DNA, 552 bp, Glycine max
tggacgcgtgggttctcaacctatcctagcacattagttccttcccttaacaaattaagctaccgagcttaattgactgggtttcggacctctccttttaacttcgatcacttgaaataactcattccatagccatatgtcacgatggactcgcacatgcagctatgttccctctcatgtcttcccctactacttctacttctctcaggaaacatgggtatgcaattaagcgaggctcgcttgcaacgccatgagatgaattattattctccgaaaacgttgttcgtttttggggactcgtatgttgataccgggaactatagaataaatcaagctggttcgtcgtggaaaaacccttatggcgaaacttttcccggaaaaccagccggaagattctccgatggaagagttctaaccgactacattgctaagtatttgggactcaaatcaccagttccctataaatttaggaaagtgatgcagcaacatttgaaatacgggatgaattttgcatttggtggtacgggagtgtttgacacatcctccaaaaat

SEQ ID NO: 29920 - DNA, 931 bp, Glycine max
cgttcgcgttggcggacgcgtgggcaaagccgcgctatctatcttctttcctccacctaaccagatcaaccctaatcctatatatcatatcgatcttactactcctcatagcttcaatttgaggcctcacgaatgaataaggatttgggcatttgagagagatcatatggagaatactaagatgatgggggtgaagatacaggactatgcttctaatatggagagtaataattatccattctttgatttctctgaagataagggctctttagggtttatggagctattgggtgcgcaagactatagtcctctccttgatttccctctatcgtcacacgtgtcagggcctcaaacctcttctgttaaggaaccacctgagactaagaaagagtgttccgaggtaactaataacaaccagcaacctgcgactccgaactcttcatccatttcctccgcgtccagtgaggttttctatgatgaacagaataaaactgtagatcaagcacctgaacaccaaaagacaaaggaacagttgaaggctaagaagacaaatcagaagagacagagagaaccgagattcgcgttcatgacgaaaagcgaggtggatcatctggaagatggatacagatggagaaagtacggtcaaaaggccgtgaaaaacagcccctttcccaggagctactatcggtgcaccagtgtttcatgtaatgtgaagaagcgtgtggagcgatctttcactgatccaagcgttgtagtgacaacctatgaaggccaacacacacatccaagcccagttatgcctcgttcaggtgtctccgctggatacgccaacaacttcggttcagttttgccaccgggaaactacttatcccagtatcagcactaccaccaccaacaacaacaacagcatcttgtcaacacattgtcctct

SEQ ID NO: 29921 - DNA, 612 bp, Glycine max
cccacgcgtgcgcccacgcgtccgcccacgcgtgcgcacgaatgaataaggatttgggcatttgagagagatcatatggagaatactaagatgatgggggtgaagatacaggactatgcttctaacatggagagtaataattatccattctttgatttctctgaagataagggctctttacggtttatggagctattgggtgcgcaagactatagtcctctgcttagatttccctctatcgtcacacgtgtcagggcctctaacctcttctgttaaggaaccacctgcgactaataaagagtgtcccgaggttactaataacaaccagcaacctgcgactccgtactcttcatacatttcctgcgcgtccagtgaggttttctatgatgaacagaataagactcttctagaccaagcagaagaagatgatgatgaagaagaaggacaacaaaagactaagacacagttgaagcctaagaagacaaatcagaagagacagagagaaccaagcattcgcattcatgacgacaagcgaggtcgatcatctggaagatggatacagatggagacagtacggtcaaaaggccgtgaaaaacagcccctttcccagga

SEQ ID NO: 29922 - DNA, 404 bp, Glycine max
taaacatctttcactatctatcttcttttcatcatcttatcagatcaactctaatcctattttacatattcatatctatcttactactctcatattttcaatttgaggctcacgcacgaatgattaatgatttgagcatttgagagtgatcatcctatggagaataataagatgatgggtgtgaagaaagaggactatgctgccaatataggatcttcatccctcccttcttgtaataattatccattctctgatttctctgaagataagggctctttagggtttatggagctattgggtgtgcaagactacaatcatctccttgatttccctctatcgtcacacgtgtcagtgcctcaaacctctgcggttaaggaaccacctgagactaagaaagagtgttc

SEQ ID NO: 29923 - DNA, 287 bp, Glycine max
tgatgttgaaggagaaggagaggaaggagcaggaattgagggcattggcgcagaaggcacggtctgaaagacttggaggggagagaattggggttgtaccagccgcgccaccagctgtggcggtggatgaggacgatatgagagttgattatgagcatgagaaggagaatccgagggagagggatagggagaggagttttgtgaaggagagtagggaggagaaggaggagaggatgcagcgcgagataattcgtgaggagaggaggaaggagagggagagggagagg

SEQ ID NO: 29924 - DNA, 315 bp, Glycine max
gacaaagcaaaagcaatagcccttagaagaagaccctcttcctctcagggaatgggcggaagatggagaaccctctcttcgttctataaccgcataaccacttctttttcttattcttccaaaccccattttccctccttcaaccgctccatctctctcgccgccgccgcaacttctgaaatacccgacccggatcaattcgggttcgtagacccggaactcgatccctgcgtcaaaatcccagtcaaagcttatttcctctccaccaggtttagccactccaaacagacgggaaatgggtcgtggggtcagtgc

SEQ ID NO: 29925 - DNA, 335 bp, Glycine max
cttgtttagaaattggggaatggatttacatgttccagtaatgcccagaaagggtcacctacttgtggttcaaaatttcaatttccttcaaatgaatcatggcttgatggaggcagattatctcaaccatccaacaatttctggttcagaatcccctgatcatcaaaagaacttatctgtttcaatggtagcaagtatagatgcagcaggaaatcttcttcttgggagtagccgtgaatttgttggtttcaacaccaatttggacgagtctgttgtcagttacatatggaagcgagttggagaattctttcccaaattgaaaacacttccacttt

SEQ ID NO: 29926 - DNA, 381 bp, Glycine max
cagcaacagatttctgaattgcaagaagagaagaggacattagagagggagctagcaagggtaaaagtttcaaccaacagaattgcaaatgccgtggctaatgagtggaaggacgaaaatcataaggtcatgcctgtcaggcaatggctggaagaaagcaggattatgcaggcagagattcaacggttgaaagacaagctagctatatcagagagaacagctagggcagagtcccaattgaaggataaactgaagttgaggcttagaacactagaggaaggcttaaagcatttctccagttatccaatcactttgaatgtgtcttatgcatctccaaaagcagaaaagtctaacatactagcttccctaacaaccaatggt

SEQ ID NO: 29927 - DNA, 413 bp, Glycine max
ctcattctgagctgcaggttgggtattacagctattcatgtagcatggctgagttcattgtgaaggatgaagtcagaaaaggtgttactaataatcctggaattgcagctgggctagtaagaatgcattttcatgattgctttattagagggtgtgatgcatcagtgcttcttgattccactcccttaaacactgcagagaaagactctcccgcaaataaaccaagtctccgaggatatgaagtcattgataatgccaaggctaaactagaagcagtatgcccaggaattgtttcatgcgctgacattgttgcatttgcagcaagggacagtgtggagtttgctcgagggcttggttatgatgttccagcaggaagaagagatggcagaatctcactagcttcagatacaaga

SEQ ID NO: 29928 - DNA, 534 bp, Glycine max
ctgaaggtagctgcagccgagaggcttcgtatatcaatggaaaggatagccttgttgaaggcagcccaaccacgacccaagactccaaaatctgatgacgaagatgaagaggaggaatatgacaataataaagacaagataagatgcgtgacagaagcacgaagaaaccaaaggggccatcaactctatcgaaactaactgctgaggaagctgaacatcaagctcttcaagcagcagtactacaggagtggcatatgttctgcaaggatcgaaccactgaagttaattaactattttctttgggtctttgggtttttcttttccagggctttccaaaaaatgtacgagtgtattctttgtaaaaaaattttctctttttacatatacgaattaggtagaagccaaaatttgcccaaaaaacgtttgagtgtattttttgtgttgcctttcccccattttcaaaaaattgctttgtacatgtaccgtgcggctattgatctgctattttatttttgagcatttgttgggaatgtt

SEQ ID NO: 29929 - DNA, 430 bp, Glycine max
tgaacaccagaagttaccctttgcctccaaaaaccaacctaaggtatgtttctgctttgagtttgaagcaaataattcatgcaattctgtgactgacaggaagcgaaaatgaaagagattgtgactgtccaagttggtgatttcgccaacttcgttggttctcacttctggaactttcaggatgagttgcttgggttggctgggaatccctctgctgattcagtcttcaagaatcaggatcttaacatggatgttctttatcgtactggtgagacacagcagggtatcccttcatatactcctcgcctactttcaataaacttaagaggatcccttggatctatgagttcacgtggtacgttgtatacggaggttgcttccacaacaccagatgttctcacctggactggtagagtttccacccaagcct

SEQ ID NO: 29930 - DNA, 326 bp, Glycine max
ctatggtttagttacatatcgggagactgctttgctatatgatgaccagcattctgctgctgcaaataaacagagggttgcaactgtagtagctcatgaactagcacaccagtggtttggcaaccttgttacaatggagtggtggacacatttgtggctgaatgaggggtttgcaacatgggtgagctatttagccactgatagctgttttcctgagtggaaaatatggtctcaatttcttcatgaatctactgagggtcttaagctggatggacttgcggagtcccacccaattgaggtagagatcaatcatgcttgtgagattg

SEQ ID NO: 29931 - DNA, 639 bp, Glycine max
gttttccagactaaattagcaaaagttggagttgctatttgctgggaccagtggtttcctgaggcagcccgagcaatggtgcttcaaggtgctgagattctattttatcccaccgctattgggtctgaacctcatgatggaagcattgactctcgtgaccactggaaacgagtaatgcaaggacatgctggggccaatttggtacctcttgtggcttcaaataggataggaaaggagattattgagactgagcatggaaaaagtgagataacattttatggaaactccttcatagcaggacctactggagaaattgtttcaattgctgatgataaagaggaagctgttcttattgctcaatttgatttggacaatatcaaatccatgaggcattgctggggtgtattccgtgataggcgtcctgatctatataaggtgcttttaacattagatggcatcaatcccgtccagtgatagataaacattttaccttgtaattgttatagaatgttacctggaatggtttaagcctttacaaacttccagagcaattatttactcaccaagaagtcaagaataagggataacacaaatgtataatctgctaatttcatctaaaaaaaaaaaaaaaagggcgta

SEQ ID NO: 29932 - DNA, 500 bp, Glycine max
ctccaaagcttccctcttttttcttctcttattgattgctcaaaacccaatgctcggtatttaaactcccacactttgcaccattaaaacagaaaaaaaaaaaaatcagaaaaaagacttataaggaataagtgatggagagaaggaggcaggaattgcatgtgcttggtaaccaaaaccaaacaaagccttaagagttcatttttgggatgatgcgttttctcggagacagcatcaaaatccaaaactgttatttttttttcgtgatctcttacttttctgaacgccacacagatccaatggcagagctgctactaatcacatgcatctcactacttttcctcattcaatatcaaaactgacaaaaaaagacaattgagaaggctattctgttcaaccccacagttttcagtttcagttttttgtgtgttgttttgtgagcgtgtgtgtaacaaacagttacaagtacagaagaaacattcccagtacgctacctagct

SEQ ID NO: 29933 - DNA, 643 bp, Glycine max
ctccgtggcattttcgtctttctgtaatttgttcttccctctcacactgttattctttctttctcttactttcttatgaatcagtctcatctcatccccaacaaccacacatgcaacaccatcagatgatgttgagtgaatgctactaccctttaaggtttttgacttcatagctggcgaatttcttgcactttgcttggtttttgtctcttgactgcttgtgttcttcggttgggatgaaagatgatgaagacttcggtttgattttacaataataggatattggtattcagtgaagttaacatttgagatacagaacacgagaaaagaaaatttggtgtaacttttctgatttgttggcctgggattgtagaggagtttggttgaaatctgatcagggttattgcttactgattttcgatggattcaattcaaaataaagtttattactgctgtgtttctaagggtaacaatgtcctgtatgtgtatggtggtggagaccaacaagttgtgaatgttgcagccttgcgcttggagagggctcctcctttccacaggtggtattttgagacaataggtaaaaggacttttggtttttttatggaagatgggtatgtttacttcacaattgttgataaaggtc

SEQ ID NO: 29934 - DNA, 287 bp, Glycine max
ctcgagccgttgatattgaaaagcatactttgacaacaagttctggaaaacttctgaagtatggttcgcttgttattgctacaggatgtacggcatcaaggtttccagagaaaattgggggaaacctacctggtgttcactatattcgggatgttggagatgccgatgcactaattttatcgttggagaaagcaaaaaaggttgtagttgttggaggtggttatataggaatggaggttgctgctgctgctgttggttggaaacttgatacaacaatcatattccca

SEQ ID NO: 29935 - DNA, 332 bp, Glycine max
cttcaaaccttcgtcgccgtctcgaagtcgccgtctcgaattcttatttccgatctccgatctccgacgaactctcctttgaatttgtttctgggtttgtagaggaagcaaattgctgcctttttcaccacctcattttctattcacccatgctcatgtccaaactttccggtgagttcattggtgtgatgggtttttggttttgcccctaaattttgcaattttagttttttaggttatgcttttggggtttaacatctgcgccgtgactcgatgttgacgatgatgatcatcactgcgctcattactgccataattgcgggactttgcat

SEQ ID NO: 29936 - DNA, 610 bp, Glycine max
gcaaaagttgcttcttgtgaatctgacgttgaaggatctcatgctaatggcttttgtgacttgaattggctttcctctggcaatgctatgaatgaagaggatgttttccaaaggtaccttacaatgacctcaacaaatgaggccaacggttggtatggaggtagtctcctcggcgatcaagatgaaagcagtgagatatataaacattatgctgagttatgtcagggacctgccttggaacttttccaaaatgaccctgagaaggagcaacactatgcagatgctttaagcacgagttcatatgaaattgttaatgatgctgtcgttgcagcagaaatggaagcagctctaaaggagtatgaccaagttggtgctgaccttgggattattcccaaatcttgtaaattctatgttgatgatccgagctggctgacgagatggttaactggggacgaaaaagtaccaaggatatgatgggtcattgttttgacatgtgtaatttgaacacttatttctgtaccattttaactcgcagctccttgtacgaaagtcattgttctaagttttcttatcaatcccctggccttagaaatttgattctttttttgtt

SEQ ID NO: 29937 - DNA, 246 bp, Glycine max
aaacattcctaaagaattggagggccttcatgagcaatactcgtcaacttgccgattgtttgagtaccaggaacttgtatcggccacatcgaatttcttgcatggaaacttgatcgggaaaggtaggaagcagtcaggtttatagaggctgccttcctgatggcaaggaacttgccgtcacgatcctaaatccttctgatgatgtgttgtcggaatttcttctggaaatagaaattatcaccacct

SEQ ID NO: 29938 - DNA, 558 bp, Glycine max
gtactatgcaaatcagcaattgactgaaaagagtgacgtgtacagttttggagttgttctgctggaattgatatcaggaaaaaagcctgtatcatcagaagactatggtcctgaaatgaatattgttcactgggcaagatctttaattcgtaaaggagatgtgataagcatcatggatccttctcttgtggggaatgtgaaaaccgagtcagtttggagggttgctgaaattgccatgcaatctgtagaacaacatggtgcatgcagaccaaggatgcaagaggtcattttggctatacaagatgcttctaacattgaaaaagggtcagaaattcaactgaagttatcttcttcaggtggttcaaagccacagtcttcacgtaagacattacttgcaagctttcttgaaattgagagccctgacttgtcaaatagttgcctcccctcagccagataatttttcttttctcttttttcatatcaaggttgggttttgtacattacttaatttcatttctaatatgttaatactagtgacactcactgacttgtgacggt

SEQ ID NO: 29939 - DNA, 547 bp, Glycine max
tgccacaataaaccagcgaaaagtcatggaagatatcgcggcaatatttaagaaggctgacaaagacaattcaggaactcttactgtcaaagaatttcaggaggtattggctgatatctgtgagagataccctcaggtggagctatatctaaagagtcaacagatgcacaacattgctgatttgttgaaagggtccaaggaagatgttgaaaaagaatctattgaactgaatatcgaagaactcaaaaccgtactctctaaagtggattcccagatgaaatttcttcctgctacagcgcaggttgcatctcagcaaggcacctacctggccaagtgctttaatcggatggaagagtgtgagaaaaacccagagggtcccatcaggttcaggggagaagggcgccatcgcttcaaaccctttaggtacaagcatttaggtcaatttgctcctctaggaggagagcaaacagctgcacagcttcctgtggattgggtttcaattggacacagctctcaatggctgtggtattctgtctatgcaagtaaa

SEQ ID NO: 29940 - DNA, 372 bp, Glycine max
ctcagatctgatttcgcacaattttatgcttgtgatatctccccttctctcattatcattgctcgcacgatgatagatatgccatgagagataatagggcagatctgatgatcgtttagcaaagatcattataatttgaatttcagctgcgttcatgaagcaatatgaagaaccaacacggttacgtgccacctgcttacatacctttggggccgtcggattcagaggcagtggatgtctctctgcttcagcgttctagtacaatggatcaaaccaaatgcaggctcagtggtcttctggaatctgtgcttgttgcgatgatatgcagagttgttgtattggttgtctttgtccttgctttctctttgggaa

SEQ ID NO: 29941 - DNA, 580 bp, Glycine max
agcaacaccacaaagcgtaatatatagttatggcactcttctgcttgaccttctcagtgggaagcatatccccccaagtcatgccctcgatgtgattcgtggaagaaattttcagatgctaacagattcttgcttggaaggacaattatccgatgatgatggaactgagttggtacgctcggcatctcggcgtttacagtatgaacctagagaacggcctaatccaaaatcattggtagctgctctggctcctctccagaaggaaacagaggctccttcacatatcatgatgggcatccagcatagtactacttttgcttcattatctccacttggtgaagcatgctcaagaaaggacttgactgccatacatgaagttctggaaagtcttggctataaagatgacgaaggagtggcgaatgagttatcatttcacatgtggactgatcaaatgcaggacacattaaattgcaagaaaaagggagatgttgctttccggcagaaagattttagactggcaattgagtgctactcgcagttcatagatactggaacaatggtttctccaacagtctatgca

SEQ ID NO: 29942 - DNA, 716 bp, Glycine max
cgcaaaccctactagccaggtgtcggttatagggaacttggtgtctgctcaagttgttgcagaaattggctggaaagagactgcagttttaatgttctcactcggattggtatattatctaattatatttgtaacgctgtatcagcgtctgacaagtggcagccagttccccacagtgctaaggccaacttacttgttgttttttgctgcaccaagcatagcaagtctagcctggaaatccatcacaggtgcttttgtcaccccatcaaagatgctcctctttctgtctttattcctgtttatgtctcaggcttgcaggccagccatgttcaagaaatccatgaagaggttaaacgttacatggtgggcgtattcattccctttaaccttccttggactagcttgtgctgaatatgctcaagaggtgaaaagtggcatggcctcttggttaatgctggttatatgtatggtctccgtgctggtttttattgctttgatgatcatcactgtactcaaaattgagaggctgttccataaaaatgctccgattatgacttgaaaatgaaatgtcattcaactcaaaattgagtggctgaaaataaaatgctccattatagcaggccggcacttctctcttgtgctctttaattgattagtaagaagattaactgagccagcacaagggtaaaaatggaaatggaatttatcccgctgtc

SEQ ID NO: 29943 - DNA, 397 bp, Glycine max
attacttgaaggcagtgattaaagaaacttttcgattacatcccccaattaccatattggccccaagggaatccacgcaaaatactaaggtgatgggctatgacattgcagctggcacgcaagtaatggttaatgcttgggcaattgcaagagatccttcatattgggaccagcctgaagagtttcagccagaaaggttcctaaatagttcaattgatgtcaaaggacatgatttccaactgctcccatttggagcaggaaggagggcttgcccaggattaacattttccatggttgtagttgagctggtaatagcaaaccttgttcaccaatttaattgggcaatacctaaaggagtggtgggggatcagacaatggacataactgaaactactgg

SEQ ID NO: 29944 - DNA, 251 bp, Glycine max
cgacattacgagcagaggagattccagaagaagagaaaaatcttggtcctcatgatcgtctaattcatgtgtaccatttcaataaagacgcggctcaaaaccaaatgcaaattcaaaactttggggaacctttttttctggttatacatgaaggtgaaactcttgacgaaattaaagtgcgaatacaaaagaaacttcaagttcctgatgatgaattctgcaaggggaatttgcatttctatcatggggcc

SEQ ID NO: 29945 - DNA, 302 bp, Glycine max
gtcttatgattttctttgtcgtaaatcgattcttcagcaattattatcatggaaggaaattcgggttcggatcctgcgcgtcctcttctggctaatcgtgacaataactccgccgagaacggtggtcagagaagccggctcagtcgccggatatcggttagctcgctcagagcctctttcacgtccaagcttcccgacaaggtccgttctggccttgactccgagtctcccttcgacgttgatctctcctccaccaccgccttaagcaaaggggagaaagagtactatgaaagacaatttgc

SEQ ID NO: 29946 - DNA, 2313 bp, Glycine max
cttgtttgtgaacatggcgaccattattctagaaaatgaccctcttaactggagccatgcagcagattcactcaagggtagccactttgaagaagtaaaacgcatggtggcagaataccggaagccacttatctctctgggtggcggggagacactaactatatcacaggtggctgctgttgctgttgccaatgccaaccataacttgcaggctaaggttgatctctcagagtctgcaagggcaggcgttgacgccagctgcgactggatcacccaaaacattaacaaaggcactcccatttatggtgttaccaccggctttggtgctgcctcccacaggcaaactcaacaaggccttgctcttcagaaggaaatggttaggtttttaaactgcgcaatatttggctaccagacagagttatctcacacactgcctaaatcagcaacaagagcagcaatgcttgtgagggttaatacccttcttcaaggctactcaggaatcagatttgaaatcctagaagctatcacgaaactactgaaccacaatgtcacccccatcttgccattacgtggtacagttactgcgtctggtgatctaattcctctgtcctacattgttgcattgctaactggtaggcgaaatagtaaagctgttggaccctctggagagtcacttaatgctaaggaagctttccatttagcaggtctacattctgggttctttgagttgaagcccaaggaaggtgttgccctcgtaaatggcacggccgttgggtctggcgtagcttctactgtgctttttgaggcaaacatattagctttattgtccgaagttctatcagcagtttttgcagaagtcatgcaagggaagccagaatttacacatcatctaatacataagctgaagtatcatcctggtcaaattgaagctgcagctattatggaacacattctagatggaagctcttatgtcaaagatgctaaactgcaacagccagatccattgcagaagccaagaaaagatcgttatgctcttgtaacttctcctcagtggcttggtccacagattgaaatcatccggtattcgaccaaatcaattgaaagggaaataaactcagtaaatgacaatcccttgattgatgtcacaaggaataaggcactgaatggtggtaatttccaaggaaccccaattggagtttcaatggataatgcacgtttagctgttgcttcaattggcaaactcatctttgcccaatttactgagctagtcaatgatttgtataacaatgggttgccatcaaatctttctgctggtagaaacccaagtctggattacggtttcaaggcatctgaagttgccatggctgcttattgttctgaacttcaatatctagcaaatccagtaacgagccatgtgcaaagtgctgagcagcacaaccaagatgtgaactctttgggcttaatttctgctttgaaaactgtcgaagccgttgagatattaaagctcatgtcttcgacttatctggttgcactctgccaagctattgacttgaggcatttggaggaaaatttcaagagtacggtcaagaatactgtaagcagagttgcacagaaaacattaattacagaaggcaaagaagaaattaacccatttcgactttgtgagaaagatttgcttaaagtggtcgatagagagtacgtattttcctacattgatgatccctccaatgttacgtaccccttgatgccaaaactaaagcaagtactttatgagaaagcacacatcagtgccattaatgacaagaatgtgagcttgttgatttttgagaagataggagcttttgaggatgaattgaagtctctcttgccaaaggaagttgaaaatgcaagggtagcttatgagaatggcaatccagcaattccaaacagaataaaggagtgtaggtcatatccactgtacaagtttgtgagggaggagttagagatagggttgctcaccggagaaaagaatctctcacccgatgaggaatttgaaaaagtatatacagccatgtgtcaagcaaagattgttgacccaattctggaatgtcttggagattggaaagggtctcccatcccaatataattaatgtgtaggagtaatctgccgatgtttgacaataactagcaggcaacttcttttttcatgatgtttgttttaggatttgatttgaataactaaatagttaagagaaactagtgtggatttccagtgtacgccttatctatacaactaaatcaataaaaaaaaacgaatacgtcattcctttagtt

SEQ ID NO: 29947 - DNA, 383 bp, Glycine max
ggtagtggcaatgatgaaggcaatcgtagtagaaggtatcgaccctattagggatagaagactgataaatgcgatgtggcttatgccccccaactgtcttttggtggtgagggggctttgggaacaagggacgtgtaattcgtttgctatatatcgacagaaaatccctcttcacaatccctatcccataaaaggggggaaaagaaaaatataaagagaaagttaggtttaggaccagtgatattctattgaactgtttaatgttggtgtctactgctgttagatgagtcacagcagagtaattgccatattttctgcttgtaatgcttcttggaatttttttattgacaaccagtagaaaattgtgttaatttgggttcggc

SEQ ID NO: 29948 - DNA, 464 bp, Glycine max
catttacaaagaaaaaagcacacatgggaggttgtttttcttctaagccatccttcacaatcaacaatgttcgtttggttcatctgagtggctatgtggaggattttgagaatccaatttcagtgagccaagtcacaggcacccctccaaagcactttgtttgtacctcagttcagcttctttcctcttgctcaaagccattgaatggagacacacaactccaaccagggaatgtgtacttcatgctaccatactcaatccttcaagctgatgtttctcctgtggacttggcttcccttgctaagaggctcactgcaatagccaaaactagaagcaggaggcttgagggcaaaaagtcttcttccctcaaagatggttccttttcaagcaatgtttggagttcaccttcaaggagtcctggcaggcttggtggtgtggttgagcaaattggcatgccatatgga

SEQ ID NO: 29949 - DNA, 991 bp, Glycine max
atccagaggtaactgtccttgatccttcggatgcaatccaacatttacacaatcggggatccatgctgcaagatgtgttggatctgaacttatctgattgtcatggcaaggttggtgttccacgtcagctagttatcacaaaagagaaagacccctctagtatcccttatgaagtcactaaggctgggatgaagttgccattagttgcaaaaccgctagttgttgatggcactgcaaagtcacatgaactatttcttgcttatgatgaattctctctttcagcggttgaacctccactggttctacaggagtttgtcaatcatggtggtcttctctttaagatttacattgttggggaaaccataaaggttgtgaggcgtttctctcttcctaacatcagtaagcgtgaactatcaaaagttgctggtgtattccgttttccaagagtttcatgtgcagccgcttctgcagatgatgctgatctagatcctaatatcgctgaacatccaccaagacctttattggagaggcttgcaagggagctccgtcatagattgggactccacttgttcaacatagatatgattcgagaatatggaaccaaggatgtgttttacgtcatcgacatcaactactttcctggatatggaaaaatgccaggctatgagcacgtatttacagattttctacttagcctagtggagagtaaatgtagtaataagaaacttgctgcctaaactagagcaggttagtagatgcattgaacagggctgttcttgctggtggctttcttaaaaatttatgcaaattagtatggaatttcaatgaagccaccaaaatgttcaaaaaggtcgaaatagggtctgtctaatttctccctctcaataatgagcgaaaaggcctttattgtaagttatactccatgctcatatccaaatcaatgaaagttttggtggtgctaaataactgctaagatttaaatttcattagt

SEQ ID NO: 29950 - DNA, 622 bp, Glycine max
caaaagttcacccccaagcactaaattcctctaccacttgcaagcaagagacgtttaccctatggatgaaatctctggtactgaacggaaagggatgcaccgtgtttgattcaaatggccaaattgcataccgagttgataactacaactgcaggcatagagatgaagttcatctcatggatcaaaatggcgatattttgttcactatgctgaaaaagcaatataagttgtccaggttttgggagggttatagatttccagttccaggaacaaggaatgaccacaaaggaccatgctttcgagtttcaaaaacttataagatctctagagggggttcaacctatgaagttgaacttggattggacaaaaatcaaccgtatactcataaaatagaacgcaacacttgcaactcagcttgcaaaatatctaacgagcttggagtggtagttgcagagctaaggacaaagaagtctccttgtggagttgatttagcagatgatgttttcccaatggtagtggagccgaatatagatctttctctaattatggggcttgttgtagcctacaatcttatcaactgtaaaatttaattagcactttggaagcaacagtttgcacaatt

SEQ ID NO: 29951 - DNA, 450 bp, Glycine max
gtcgattctctctttattggcaatatggcttcaaacccagaaacatacaagccctatgggaagcaacccgttaagggacaatggaccactggcctctatgattgttgggatgacccctctcattgttgcttcacatggttttgtccgtgcatcacctttgggcagattgcggagatagttgatggagggacaatatccaaaaatgcagcgtgctgcatttatgttgactcgcatgggacgaaatggctatatggtgccacttacagatccaaattgcgacgactcttctcattgtcacaggaaccctactctgatccatttcttcatggttgttgctgcatttgtgccctcacccaagaatacaaagaactcaaaaaccgtggaattgatccttccattggttgggaaggtaacgttgagaagtggaagagggaaggcgtagatcctcca

SEQ ID NO: 29952 - DNA, 376 bp, Glycine max
attcattgatcaagttgtatgcaaaaattgacaacctggaaaaagcacaagaagcatacaagttgcttcaattatcagaagaaggtcctaatgtatattcttcaaactgtatgattgatctttatgtaagcaatctatggttggccaagcaaaacagatatttgataccttaaagaaaaatggaggtgcaaatgaatttacatttgcaatgatgctatgcttgtataagaagattgaaaggtttgatgaagccattcaaattgcaaaacagataagaaaattgggacccttgacagagttaagttataacaatgtgcttgacctgtatgctactgctgggagacccaaggaagcaatagagacttttaaggaaatg

SEQ ID NO: 29953 - DNA, 661 bp, Glycine max
gattctgcaggctcttttacgcaatgcaactgatgccatgagggagtcaagggttcttgagatcataaatacgatggagccacttgcctatagaaagatggactttgaagaattttgtgcagctacgatcagcacacatcaattggaagcacatgagtggtgggaagatattgcctcaactgcttttgaacattttgagagagaaggcaaccgtctgatatcagttgaagaactagccagagagttgaatcttgggccttcagcttattcagttctcaaagattggataagaaatactgatggaaagcttagtttacttggatatacaaaatttttgcatggtgtgactctccgtagttcaaacccaagacaacaccggtagtcttgggccctttgacatacaatttgaatttgaatatgcgggaaaaaaagtagatttagagattctttttggattttttcttctttcatttttcttttatggggcaaaaaaagaatatgtataaatgaatgtgttagcaagtcaatacagggactgtcgagtcaattatatgccaaatccttgctcctttggcctatttcgcaaatgatatgtttgccatgggtctgatcccatgaatattcattaatttgtgaatgcttttaaagattacatatagtc

SEQ ID NO: 29954 - DNA, 320 bp, Glycine max
aaaggcgtaagctagggaaaatgttacaagtctggcatgtcacctatgtacagctagatatgccttttaaaggagagtttacacaagcctcaaaaacttcaaacaataagaaaatatgtttcaaaatataccaacacattctcgcatgggtagaagagcatacttattggatagcgtttcgatttctcaatttgggatttgaattggagctctactctgtccatgactattgcatggtatactggtatatttatgttgtgttgatcaagctcgctgagaagaaacatctccgcatggcaatgagcagtgactctgctaag

SEQ ID NO: 29955 - DNA, 490 bp, Glycine max
gttgagttttcttttttttttaacagactgtcaccgggaaatcagattacctggagatacggttcaatgtttggtagagcaggacacctctgtcctgtctggtacactcagactattgcaattcccatcggttttagaaaagggtcttgcaaaagtgatgtctttgaaaaataaatttggtggtttgtttaatcagatgacccgcatgtttggcatgggtgatgattttggagatgatcaaattcttgggaggcttgaaggcatgaaggatgtaattgaacaagttaataagcaattcaaagatccggacatgacaacctttgtctgtgtgtgcattcctgaattcctttctctatatgaaacagaaagattggttcaggagcttacaaagtttgaaattgacacccacaatatcatcatcaatcaagtaatctttgatgatgaagatgttgaatccaagttacttaaagcaagaatgaaaatgcaacag

SEQ ID NO: 29956 - DNA, 391 bp, Glycine max
acgagcacaacctcagcgacgccttccagcagcgtttcaccaaaacccccaccctcgtcaatggcttctccaatctctacgccatggaggtggatcctactgttgagcatgaggacatgggcggcgctgatgggatggactccttgttctccgagctcgccggcgcgattcccgggattgacgaggccatgagctttgctgagatgttgaaattggtgcagacaatggattattctgttattgtctttgatactgctcccactggccatacactcagactattgcaattcccatcggttttagaaaagggccttgcaaaagtgatgtctttgaaaaataaatttggtggtttgtttaatcagatgactcgcatgtttggcatgggtgacga

SEQ ID NO: 29957 - DNA, 595 bp, Glycine max
acgagcccaattgtgcttatatttagaaacagatacaagaatttcatgcaccgtgcttatttctgtgacactgttgggttgaatttatgatatgcttggttgctacttgttgatttaatttcatatgattatgttttttttcttctccaaattggcattttaactgaactgagtactgactatggtttatggtagatgcttattatattctaccaaaaaaaagatgcttgctataagagacaattgtccctgatttgaaacttccattcttgtggtaacagttgtctccactctaattatgagttagaaagagatgagcaataaagtattgggtgtccaaacgttgtaacctgtgttttctgacctttgcagcatttattcctctttaactgcatgtgttgctttctattgagttggatctatatctattaactcactagagcagaaataagcttgattgttgctggcatgttgcaaataaaattgattcctgcaagttgccatgattgtttatacaattttaatgtctctgtgtattttgattgagatcctagatcatttgacatgaatgatattaattttgataacttcctcc

SEQ ID NO: 29958 - DNA, 789 bp, Glycine max
ataatgataatgctgagtttccaactgcttgtaagttgtaatctgtaattaaaagcatttactctaacaaaaagatagtgtttccccgagttatcttcataattggcaggttggctggtttagttttgatcctgaggtccatattgaaagagagcagatgtgctgctacctaactcgtactacaagtacaactcatcagataatacaagagaacttacacgagactcccacttatggaggatgggttgaagccaaaggacctagatactgtccctcaatagaagataagattgtaagattccaagataaagagtctcatcaaatatttcttgaacctgagggtcgaaatgtgcctgagctctatgtgcaggggttctcaacaggtttgccagagagactacaattacctttgctgagaactttacctggacttgagaactgttcaatgttaaggcctgcatatgctgtggagtatgattatttacctgctcatcaatgtgctaggtctctaatgacaaagaaaatacaaggattgttcttctctggtcagataaatggaactacaggctatgaagaagctgcggcccagggtattatttctggtatcaatgctgctagacatgcagacggtaagccagttattgttcttgagagggagagcagttatataggaacattaattgatgatctagtaaccaaggacctgcgagaagccttaccgcgtgttaaccagccgctcagagcatcggttacttttgagatctgacaatgctgatagccgtctcacac

SEQ ID NO: 29959 - DNA, 433 bp, Glycine max
ctatttttagtcatcacggtttctgcccacaatatggtataggagtgttgatcgacaaatctctcataaagattgattgccttggtaacgtgacattgcatgacttgattgaagacatgggtaaagaaattgtccgaagggaatcaccagaagagcctgaaaatcgcagtaggttatggtgtcctgaagatatagttcaagtcttagaagaaaataagggtactagtagaattcaaatgatagctctggattatctcaattatgaagaagtagaatgggatggaatggccttcaaggagatgaataacctcaaaacacttatcattagaggtggttgctttaccacaggtcccaaacatcttccaaatagtttaagagtcttagatggcggcgatatccttcaccatctctaccatttgattttaatccgaag

SEQ ID NO: 29960 - DNA, 692 bp, Glycine max
cctactacattttctcgtactccaaacaacaccaagtttccaagcttatccgtcaacaagaatccaaactccgatgccttcttcttcttcctttctgtttctcttcctctgttttttcttcttaccttccgcaccttccgacccgagagcccagcgagccgcgctgctgtgcacgaaccgcaccgttttatccctctcccggcgccaagtcttcgtcgcgaacttcctggccgcgatggacgcgctgacccctctcaccacctcgcacggccacggcgccgtctttaacggctcccaaaacgccaccgttttcgctttcggcgagtgcatgagggacctctcgcagaacgactgcaacctgtgcctggcgcagtgcaagacgcagctcctcgcctgcctccccttccagagaggcacacgtggcggtcgcttgttcttcgatggctgctacctcagtctcctacttcaggtacgatgactacaacttcttcggcgaaactcgaagcgaccaagacaccaccgtgtgtggaaataatagtagtaacaacaattctaacagtgctgcaaatagtgctactaacagtagtagcggtgtttataaggcaaatgctatggccttggttcggaacctgagtgggttggcgccgaagaacgatggttttttcgttgggtcggtggagagaaagaacgtg

SEQ ID NO: 29961 - DNA, 624 bp, Glycine max
aaataattgagatgaccctcgcacagactggacaacctatgaatgaaagctggaaacagattaatgaagaaattagggaagctgaaatgtctagttatggagtagtcatgaattcttttgaagagttggagccagcatatgcaacgggctacaagaagatcagaggcgataaattgtggtgtataggccctgtgtctcttattaacaaggatcatttagataaggctcaaagaggtacggcctcaatagatgtgtcgcaacacataaaatggcttgattgtcagaagccaggaactgtaatctatgcatgtcttggaagcctatgcaatttaacaacaccccagttgaaagagcttggtttagccttggaagcatcaaaaagacccttcatttgggttatcagggaaggaggtcattccgaagaattagaaaagtggattaaggaatatggatttggagggaaagggaccaattgcttagaagccttctcattccgggatggggcgccctcaaatattaatattatctcaccctgctattggagggtttataacacactgtgggttggaacctctaccttagaagcaatatgtgccgggggtgccaatgcttacgtggccccta

SEQ ID NO: 29962 - DNA, 350 bp, Glycine max
tccggggattttgttaacctatccgctgcgtccgccgctgatgctgtgtttggagacttggtattttcaggtgctcgtgctcattactggcttgcttgataaccctcaactctctcttgattctatctcagtttgcatggcaataacagggttgacgatgcatattggaattggatttaatgcagctgcaagcgtgagggtgagtaacgagttgggagctgagcatccaaagtctgcagcattctcagtgattgtagtgaatatgatatctttcataattgcggtgatagaagcagtggtggtccttgcactgcgtcgggttgtaagctatgcattcacagatggtgaaa

SEQ ID NO: 29963 - DNA, 399 bp, Glycine max
gtccgaataggtctagtttggagtacaagttgttccttcaacgttgccaaagataccgtagtgctcatgatggtatattggtcaatagcttcatggaattggaagaagaagcaacaaaagcaataacccaacatgctaaagggaatgggaattgtagctaccctcctgtgtatccaattgggcctattacacacactgggcctagtgatccaaaaagtgggtgtgaatgtttattgtggctggataaacaaccacctaattcagttctttatgtgtcatttggaagtggtggcacactctgccaagagcagatcaatgaacttgctttagggttggaattgagtaggcacaagtttttgtgggttaatttgagggcaccaaatgatagagcaagtgcca

SEQ ID NO: 29964 - DNA, 265 bp, Glycine max
gaacaggatcttgcctttgtcacccaagccaacaaatcaagatgcatatttgctcgctccaaatatgttgaggtttgacgatgtcactgccactaccctcactattattttcggttctgaagaaccctctggtgaaattcttgctggttacaccttgtggcatcgcaaagttgatgatgtggactatcccatggacccaacttgcacctcgctcttaccaaatagaaggttcagtgtctcgggcctaattccaggtacagaatac

SEQ ID NO: 29965 - DNA, 259 bp, Glycine max
aggaagtcatttactctaagctttgatgagaagcatagagatgtagtaatgaacaagtacattaaccacgttctaagcacttaccaggacatgcagacagagcagaaaaccatcaagatccattccattggtggaaggtgttggcagaagagtgacttaactcatccagcttcccttgactcgcttgcattggaacctgagcagaaacaagccattattgatgatttgaatcggtttttgcgacggaaggagtttaaaa

SEQ ID NO: 29966 - DNA, 601 bp, Glycine max
atcacatacaccatacgtaattcatatttcgaaggtgtgcttgttataagtgtccagtgctaaattcatggccaccgccgccaccgaacctctcccttccaccaccgaaacgcctccggcaccgcctccaccgaagcaacccccgcctcccgcgccgcaacctccggcggcggcggcagtgaagccggaggctccattgcccgattcgaaaacttcggcggaggcgaacgtaatcgtggtgccgagctactctcggtggttctcgtgggattcgattgacgaatgcgaggcgcgtcacctccctgagttcttcgaatcggcgtccaagagccctagggtttacaagtactacaggaactccatcgtgaagtacttcaggtacaatcccacccgcaaaatcaccttcaccgatgtccgcaaaaccctcgtcggagacgtcggttccatccgcagagtcttcgatttcctcgaaacttgggggctcatcaattacatccctcttcgtcgctcaccaaacccttgaagtgggacgacaaagagaccaaatccgattctgcctccaacaccaccgaatcttcttccgctcccgccaaagaaaaca

SEQ ID NO: 29967 - DNA, 277 bp, Glycine max
gggcgccgtgctaaaatcatggccaccacagccaccgaacctctcccttcctccgctgaaatgcctcctgccccgcctcctccgaagcaaccgccgcaaccggtggcggcggcgtcagcagtgaagcctgaggctccattgtccgattcgaaagcttcggcggaggcgaacgtaatagtggtcccgagctactctcgttggttctcgtgggattcgattgacgaatgcgaggtgcgtcacctccccgagttcttcgaatcggcgtcgaagagcccta

SEQ ID NO: 29968 - DNA, 369 bp, Glycine max
  unsure (1)..(369): unsure at all n locations
accagatccatatctgagcataactagttctatctgctagttccatcatttcaaatccaaacaaaattgtgttggttcgattctgccaataaataataaaatattgagctttagttctagtatgtgttgttctctaaatttttattctatataaagagttcaagacatggactagtgtaagttgtagtgtgagtatctggtaacaccttagaagtcctggttgagtataaaatcactgtgaaatcaatacaaaagaagacattttatccattttatacccttaattgtaggaactctgttaatctcttcatataaataaacatggtaaaattgtcctaacaaaaaaaaaaannnnnnnnnnnnnnnnaa

SEQ ID NO: 29969 - DNA, 390 bp, Glycine max
acgagagacaagatgagtagcaacatgcctgcaaaattgttgctcacaactttgtacatcctcttggtgtttcttcctatccacatgtcaccacatgatgttaacatagacacacacagtttcaaaagtagtaggagtgactagtggccacaggagcaaaattggtggtggtggctcagccaaaggttgcaacaacaacaacagcaacagcaaccaattggacacaaacacaacaccatgtcaaaaatcaacaaccattcaagcagttcctgcagcttcttcacctccccttgtatttgcagaccaaagacttgaagtagtgtatccaacagtccaaaaattcaagtccaccatcacctcagatccactaggagtgaccaaaacttgggt

SEQ ID NO: 29970 - DNA, 265 bp, Glycine max
atcagctgtaccctccatcaaatatcattgcagcgaaaatttcgcagaagtatcttttttctctctctcatccgcgccccaaatcttagggttttcacccaattcaattcctggaactctcctcgattcgattccacatcccccccccccctgatgagatttgtgtgattggatcgtacgatggcggcgccgaggaatgtgacggcgacgagggacgaagagaagggcgaggaagacgattcgccctccgccaagtagcccaaat

SEQ ID NO: 29971 - DNA, 272 bp, Glycine max
agctaactccagcaacaacaacaatagaagaggaagaactaggaattccttttgttgttgttgttgttgttgttgtccttgcccctctcctcttctttgatgggttccgaggtctccaaacaggttgagagacgaaaggcgatccacacagagggaaaaactctgtctgatcttagaaactctggggaagattaccctggctcagattatcatccctcagacagaaaaaaatggatgtctgagctcaaccctgagaaagttgtgataaaaca

SEQ ID NO: 29972 - DNA, 1031 bp, Glycine max
attcccttcatctcaaggcgttctcttgggatcatatcaggcctaactggtgcaggtggaaactttggttctggtttgacccaattgatcttcttttcaacctcaaggttttctacttccactggtctctcccttatgggtgtcatgattgtgtgttgcactcttcctgtgactcttgttcacttccctcagtggggtagcatgttcctccctccttcaaaggatgtcaacaagtccactgaggaatactattacaccgctgagtggaacgaggaagagaagcaaaaagggttgcaccagaatagtctcaagtttgctgagaatagccgttcagagagaggtaagcgtgtggcctcagcaccaacaccaccaaacacaactccaactcatgcctagcttctccactttgcactctcattcatgcgccttcagcgtatttttaaccattggatgaagatcagacaattgaagttgatcgaacgagataaaatatgagtggtctgatcttcatcagacggttttaaattgctgaatgtgggtgaatgtgttgaagagtgaatggagtgattggggaatccggatcccaagttttaaggccttagggtataactactgcagtagaaaataccaccaataatgaggaacaacctaaagggaatctcaaattgaataagttacttttttattttaaccaaaaaaaaaagttgaaatactagtaatgtttcttgcgcttattttggtgtaatgtttacaccagacttacttatacgtgggccatacatatatatatgcaagaatcaatttatgattatgcaaaagaagtgatgtaaaaaaataataatgtactgtgttttgaattttggtgtgcaactgatgatatatttacatcatcttataatatgtacacatcgaatattctggcgtgtacgatgggagcaatataaagaacaaacttcagattcaggatgggtagttgttaattagcaggtgaatgatatcactaattcactatgaataataagtcaacgcag

SEQ ID NO: 29973 - DNA, 480 bp, Glycine max
acaccgtctactgagtttaaacgagcccagaaactaaagcagaagcttgagggcagtcatgttgcgcgggttgtgcttattcttctagctatagtgggaacttccatggtcataggagacgggattcttacaccgtcaatctcagtcctttctgcggtaagtgggatcagtacatctttaggtcaagatgctgttgtggggatcactatagcaatcttggcagtcctattttatgtgcaacgatttggtacagataaagtggggttcgcattcgctccaataattttggtgtggtttttattcattggtggaattggcctttacaatttatttaaatatgacattggcgtattacgtgcttttaatccaaaatatatatatgattacttcaaacggaacggcaaggaaggatggatatcacttggtggagtctttttgtgcataacaggatccgaggccatgtttgctgacttgggtcac

SEQ ID NO: 29974 - DNA, 689 bp, Glycine max
  unsure (1)..(689): unsure at all n locations
ttaggcccaagatgacagttcggatattttcagaaattatggcagtggcttttgtcgagataatacttgatcaatgcttcacgttccttggtatgaagtacacatcagcatcatttgcgtctgctgtgatgaattctgtaccctccattacctttgtactcgcaatcatttttcgattggagcgcatgaacttgaaggagctaggatgtttagccaaagtgattggcactgcagttagtcttggaggtgcttttctaatggcactgtacaaaggtcctgttgttaacattgcaggctcatcggctagccacgtgggacagcctgagaatgtgaacgacccttctggcagtcactggctcattggtgcatgttttctcctcataggttgtgctggcttctcggctttctacatattgcaagccataacattgagaaagtacccagcagagatgtccctagccacctgggtttgctttgtaggtgcacttcaaagcagtgcagttagttttttcatggagcgtaacagccctgatgtctggtctctagcatgggattctaggcttgttgcttatgcatactcgggaatagtaacatcagcaatccaattttacgtgcaaggcatggttattaaaacgacggngccagtgtntgtgacagcatttaatcccctgcgtatgatcatagtcacg

SEQ ID NO: 29975 - DNA, 514 bp, Glycine max
atccaccccaacctcattttgctcaacctggatatcccccaacaagtgcttcccttcagaaccctccaccaggtcttaatctcatggtccgaaatccgaaccagtcgcaattcatccgcaaccatccctacaatgagttgattgagaaactggtgagcatgggattcaggggggatcatgttgcaagtgtgatccagaggatggaggagagtggacaggccattgatttcaactcggtacttgacaggttgaatgtgcatagctcggtgggtcctcagagaggaggatggtcagggtgatgaagaacttttctgaacagttactttgtctaccaaactaaatactctgttcaaaccctcaaaatcattgcgtgttttattatgcatggaataaaagttttatgtaatgagacggttttaccactgtatgtaaaaatgtcttgagatgtgaggattatctagtatttttatgcagaaaatgcctcacttgctcttttctacataaaaaaaaaaaa

SEQ ID NO: 29976 - DNA, 377 bp, Glycine max
cgagggtgctaaggatggaaagggtagaggaaggcaggttattagtactgcaagaacatgcaattgcattttgattgtccttgatgcaattaagccaataactcataagcgtcttatcgaaaaagagctagagggatttggtataacgttaaacaaagagccaccaaatctgacttttaggaagaaagacaaaggtggactcaatctcacctcaactgtcaccacaacacatctagatcttgagactgtgaaggctatatgtagtgagtacagaattcacaatgcagatattactctcaggtatgatgccactgctgatgaccttatagatgtcattgagggaagtagggtgtatataccttgtatctatgtggtga

SEQ ID NO: 29977 - DNA, 279 bp, Glycine max
gtgcaaccgaatctgatgcgttcttccactccgaggatacgacatcaccactatctcgctctcgttgttaccatcctctttcaccgccttttcttcaaccactaagacattttcaccctcaacgttcccgtattctgaatcagagacttccctgaagttcccctttctgtttaccgataacaactcgaaggaagtctccatggagcggacaaccgagccgcccggtagcgcacgcccgacgtcggaggcagcgtagactcgccaggcgccgaacttgga

SEQ ID NO: 29978 - DNA, 309 bp, Glycine max
aaaagatgtggctttgaaggttttgcaaaacaaggtgtcaactgtccctatcatacattcttcttcagaggatggttcatatcctcaactgctacatcttgcttccctatccggaatactaaaaggtatatgcaggcattttaagcactccttgagttctttgcccattcttcaacttccagtggcttcaatacctttgggtacatggatgcctagagttggggaaccaaatggtcggccactagcaatgttgatgccaagtgcttctctcggtgctgctttgtctatgtttgttcaagccaaagttag

SEQ ID NO: 29979 - DNA, 430 bp, Glycine max
ctcgagccgctcgagccgattcggctcgagaaaagttcacaagctcagtcagatacagtcattcatacagatcctccttttaaggaagttccctgtctgcagctacagcctctgcctctctgcctcagtttctgtgtaactgattgctgtttttcagtttaaactgagagatggaaccacaacaagaaatggagtggaatgaggcccaaaagattccaataagcgtggaccttcgaggtcgtagcaaaaaaacagcttcagttccttgcaactgttgataagaaccgtcacctctatgacggtcctgcccttgacagagctatctataggtacaatgcttgatggattcccttgcttgccaagcattccgagtctccgatttttgaagggccattggtagttcctcttgactgcgaatggatttggcact

SEQ ID NO: 29980 - DNA, 427 bp, Glycine max
tcgccttttctttctccaaccaactttctcttctcctattccctcctttcctattattcgtttcctataagttactattatatcttctctttctgctttcgcgcgctcatgtcagaagacaaagtagaatgaaatgaagtctttcgattctgtaactggttttatcttgccagacccaaagaataggttgctcctttggagtgtcctcctcgtggtttccttgatttctggtgcttatttcgttggtaatgcattctttgcaaaggaatacaaacaaagattagcacgatgggggctaattcatacaatgccacattcaaaatttaatgcgtgcaagagacaatgcttgccttttggaagtgaggcattgcctgaaggaattattgctagaacatctaacttggaaatgcggcccttatgggactct

SEQ ID NO: 29981 - DNA, 488 bp, Glycine max
  unsure (1)..(488): unsure at all n locations
ctctcagactcctctttaggaaggaaaggctctctcacagtggtttgtgccctaaacaccatcttcggctgcttaacagccctgtccccaaactactggatctacgtcctcctccgcctcctcaccggcttcagcagcggtggcgtcggcctcactgccttcgtccttgccaccgaaccaatcggcccaaccaaacgtggtgcagcgggtatgtccaccttctacttcttctccggtggcattgcacttctctcaggcatcgcctacatcttccaaacatggcgctatctatacatagcttcctccatcccctccttcctctacatcatccttgtccttccctttatctccgagtctccaagatggtacctcattcgtggcaaagttaccgaagccatgaaactcatgtccaccattgcttcttccaatggtaaacaccttcctgatggtgttctccttgcacttgacaacgaaacatcgnccacaac

SEQ ID NO: 29982 - DNA, 278 bp, Glycine max
gtgagtggcatgtgccccattcagatggtgcacctaggtcattcatgttagatctttgatttcttatagaaccagcaggcttttccggtttcatgtgtttatgctggtactcctgtgccacctgttgtatcatttagatagttaagattagtgtctttttcatgtgctgaggcgtttctgctgctgttgtatcattgtttcacgaggatattctgcaatatttttttgtaattatgcctgagtgtgagcaaagtaaattttttcctatggttgcaggt

SEQ ID NO: 29983 - DNA, 575 bp, Glycine max
gtggctgtattatattggacccaaccaaagaggtagaggagaaaatgaaagcatacatcaatttagtttttccaaatacaattgtttcagtcctcccagagagatcatcgcaggtgggtagtgagcctatggcacatggaatcatgacatctgttacacagggtgctatgtcagtggatgattatcttcactgcctagatcgagggcgtgctgctagtgcaagattgtcggaatttgtgaggaagaacatagggccgaaatctacatgtgaggcatctaaagccgggtgattttccattcattttggatggatgtagtttacatatttgtctgttttttgcctgcaagggttggggaggatgggatttctctgcaggtagtgtcgcatatctgtcccattcatgaaaattattgttggtcgataataaatttgccaaagccaaactgacctcctggtttggttagttctttagtagaagactatttgttaatatatttgtgcatttgattacacaaaaatgttactaaaaattatttgatttttataatatatttcggtcataaattattttttc

SEQ ID NO: 29984 - DNA, 473 bp, Glycine max
gctttactcaaaggattttttattttatataaccgaggggtttgctataatcgaaagcggggtaaattgacctaaggtaaggtgtgtgaatgcttacatacatagattaaggattttaggaccaaagagggagtcatgaatgtgacaaacaaaccaaacccatatggttccaccaatgggtttcagtctctgcttcaacaaaatgggtgggaacagggatcatctagactcagacccactaagctttaccctgcaccaacggctcgctaccaggacattgttcgtgatgcaaacctcttctggggaacgcttcaagcttttcacaaaacacttggcaccaaatataagatttctactgtgggaggaacgccacttgatctacatcgtctttttgtcgaagttacatctcgcggtgggattgaaaaggtgattgttgatcgtcagtggaaggaagtgattctgaccttcaattt

SEQ ID NO: 29985 - DNA, 406 bp, Glycine max
atatgagaggttgcctttggatgaagatgaatctatgcagatgcaacaagggcaatcatcagctggtgatggtagcggtgaccatggtggtggagttagtaataactcttttccggatccgtcttccgggcttccattcttcaatttgccactaaacatgcctcagttacctgttgatggttgggctggcaactctggtggaaggcaatcttactgatccagagtctttgggggcacaaaggtgagaagttgaattgatctcatatatattggtcttctctaatctttcctctgaatattgcttgtgaagaagtactgattttgctattgaagaaatcgttttgtttggctaggtttgttgtaaggacgatcagtttctaggaacaactgtaaaacgttttctctt

SEQ ID NO: 29986 - DNA, 293 bp, Glycine max
ccttatcgcaattctgtttctaattaacgtcttcttgcgtttgtgttcattatatatcttatttttctttattatttttgtatttttgctgaatctttccacgaatcgtatgagatcacggtgatgactccataaaattcaagctcaacagaccggaatgcagagctttctctctttcgggagattgccttgcgtgtcgataaccccgctgaactgagtgatctcttctgttttttgtttctgttttgtttttattattattgtgttcgttgaaatttttgtttctctgtttc

SEQ ID NO: 29987 - DNA, 569 bp, Glycine max
gagctctgaacaacctttttctcctgtctgggctttttctgatgctgaagatgagaggcaaatcaggattgcagcttcaggtaatacatatacaacaactgaaaatccaattgaaaatgatgacaacaaaaaaaactgtgccaccccttgtagccatgacagcttcagaaaatccagatggttattgtctgatcaaggaaagaatgacacaagcgcttcgccacttcaaagagttgactgaacagaatgttcttgctcaggtttgggcacctgtgaggaatggaaatcggtatgcacttacaacttcaggccaaccatttgttcttgatacacatagtaatggactccatcagtatagaacagcttccctgatgtatatgttctcagtggatggagagaatgatgagatcctgggacttcccggccgagtttttcagcataaaattccagaatggactcccaatgttcagttttattctagtaaagagtatcagcgcctaaatcatgctcaacattacaatgtccgcggaaccttggccctgcctgtgtttgagcttgcaagacagtca

SEQ ID NO: 29988 - DNA, 522 bp, Glycine max
  unsure (1)..(522): unsure at all n locations
cccacgcgtccgggccagtactctcctgatcaaatagatcggttagattcattgtacaaaacacttgtacaacaatataagtggtcttctgctgttaagagaataccactagattttctacaaggtggccaatttcgagaagcagcagacagttatattaggcctctcctaaccaagggagttccatctctgttctctgatctatcatctttgtacaatcatcctgggaaggccgacattttggaacaacttattcttgagttagagcgttcaattaggatgtctggccattatcctggaaggacggacaaagaacccccttctactcttatgtggactttgtttttattggctcagcattatgacaggcgaggccaatatgaaattgctctttctaaaatcgatgaagctatagaacatacgcctacagtcattgatctatattctgtcaagagtcggatactgaagcatgctggtgatttggttgctgctgctgcatttgcagatgaagctangtgtatg

SEQ ID NO: 29989 - DNA, 454 bp, Glycine max
gtgaaaccaggtcctcaggctaagaagcttgaagggtctgtttctaaccttcttgatgaccagaactcacagaccaatcagtgccagtgaatatacacgagaataaaagcattttaggaagttgtgcaatctaagcaccacgattcatcgaccagtagaagttgccttttgctgaaatcacattctttggtaaccaaaatgtaatatcaatcttggagtcatagcagtgtttgtgagtgttgatagccacacatcagagttgcactggggaaggggatatatatttgagctttgaaggcttgatatttgtagtggatcctccaataccttcaatcagtgggaggatattccctcctgcttccattttcgtcatgtatgttctgtatgtgtcctcattacctagggattctgaatgatcagagcagaaagttcattctttttagaaatgattgtc

SEQ ID NO: 29990 - DNA, 374 bp, Glycine max
  unsure (1)..(374): unsure at all n locations
gcctgcaggttctgaagatggatatgctaaggttgagatcctaaatgaacagcatcaagatttaagtgcagccaaagtatcactcggtgtgctgggagttattcacagattactctaaaactagaacccctcttcaagcgatccatcacttatgtggaacaagatgattcagatttgggagaccaagctgctgcttttggagatgcacatgagtttggagatatactgtggtacccaagtcaacgcaaggttctctatcgtgttgatgatcgtgtcncaactaatacatcgggaaatggtctttacgacattatttctttccgtcccactccttcaaatacgtcggctttcataagaccagagagggtattcca

SEQ ID NO: 29991 - DNA, 299 bp, Glycine max
attaactagtactcgagtgttggagggttcatttctcggataggaagtggatgtgagagtgacgaggagagccaccaagcagatctgcttcaggttgccaactattagctcgctttcatagtgatagaagaaaattggtggattggaactaaacattgtttctgttggaaagacaaatacccactgatctgtctttattcgcttctgagatggaagaagagagccaaataacaaagggaaaatatgctgctgatatttcttccataaaagaagcacatgccagaataaaatcattggtt

SEQ ID NO: 29992 - DNA, 257 bp, Glycine max
gctctgttctccttgatcctcatgaatgttcatcagcaagggccagttcatctagtcagtctgacaactcttgtatcgagtgtcctgtttgtcggaggtttatctgtgtggactgtaaggttccttggcattcttctatgagttgtttagaataccagaacctgccagagaaggagagggatgtttctgacattaccttgcatcgtcttgctcagaataaaaggtggaagcgctgtcagcagtgtcgtagaatgatt

SEQ ID NO: 29993 - DNA, 323 bp, Glycine max
ttctattttccggtccggtcgaaaagataaatcggaccggaaaaaaaccgatcttctggccacggactcaaatattgagacgaagagcggtgccattaactactcgtctagaccgcggcacagcacgtcgagcttgaacgacgtgtcgttcgaggagccagtctcgcgaaacagcgtgtcggagagcgaaccgcccggtttgggtggcatgatgcggttcgcgtctgggagaaggtctgagtcgtggggagtgggtgatgtccgaagacacgtggcacagtagtattggatgaagataaccgttcggcgagggcaaacacgaa

SEQ ID NO: 29994 - DNA, 274 bp, Glycine max
gtggaataatgggtatctgcatatccgttgcagaagaagctcatgatgatgataatgtgacaatatttgaagcaagaaaggttctaaatgggagtcagagactttgctctgtttactccaaacagggtagcaaaggactcaaccaagatgctgcctctgttcatgagggttatgggatggaggatggaacattttgtggagtttatgatggagcatggagggaatggacacaaagtgagcaaaatagtaagcagtcgtttatcttccctcatac

SEQ ID NO: 29995 - DNA, 377 bp, Glycine max
atacatatctattgttttcagtaatggtggtggtttcacttttagcataactttgagaatatgacacgctgattagcattgtgcacatatatatgagttgcagaagcgaatatgctctatttggaaacgccaattggagttggattctcttactcaactgatacttcctcttatgagggtgtgaatgacaaaattacgggcaagtttttaatgttcacccgtctctacttgacatcaccaactttctacttttttagtcgtcccttgaaataattctcaatttcattggtttgaatggtgattggtaaataaccattagatgcaagcattttcacatggctaaagaaagagtttctaaaggaagatcggggtcaact

SEQ ID NO: 29996 - DNA, 274 bp, Glycine max
cacaaacatttactaagatcaatccacacactccatcatcacgcatcaagcaattccctatagatcatggcgccctctccataaccccaccacccacttctccccattgccattaattgcacattcccacaacgatgatgataaaatgaggaacattgttaacaataataataataatattcattcttcagcagggagaatggtgctcaacatggtttctgagaacgcggttatagtgattgggagaagaggctgttgcatgagccatgtggta

SEQ ID NO: 29997 - DNA, 341 bp, Glycine max
cttctaaccagtacacttacatggagcccccagggcctccaccacctggcagaatgacttcttcagaatggcttcgttggtacagagaaaattacaaacctgaaaggtctaacaataacatgcaacccactcatttgaatactcctggtcctggaaatcatgtcaacttcctctaccatgatacttacaggtttggtcaatttgatacatggaacaacaacccccctttgtcttctaaccagtacacttacatggagcccccagggcctccaccagtgcagccaggttttttgtctgcttttcgtgagcacaaaggcagtgtctacaacaattttcaaaga

SEQ ID NO: 29998 - DNA, 282 bp, Glycine max
gtcgaaacaatcttgtttctgctgctgataatctcttggccaaagccagagagtagaatcacaccaacatggatttgaccctttctctttctccttcttcttcgtctttagttacctcgagacttggttactcttcctccttggccaccaactctaacgctaactcgaggactgctagaatcagcacccgtagaagtaaggctctatcttgcaacgctttgttcggattgggcttgcccgaactcgccgttattgccggtgttgctgccatcgctttcggac

SEQ ID NO: 29999 - DNA, 863 bp, Glycine max
  unsure (1)..(863): unsure at all n locations
nngcggccgcttcttagaacttagttgtgatccnncccgggctnngcaggaattcggcgacgagtcctatgtnntcgagtagcccannacctacaannctgcatctatttagtgcctgnntttttgatttctacnagtggtncttccaaangaaaaccatctccgtttttacagcaaacagnttttaagaatttgagaagtatncttggnntgagtgccatcagtggattgaagagnttggagcnagctgcttctcttggactctgagagaaatgcatccgctaatggttcctcattgttgcaatctcttcccaaggtcatgacaaatgtgcacgacttttttgttcacgtggctgcgaaggtggagagcattcatcagtacattgaatctatgaaatcagcatacctagctgatcagcgtcgacggggggaggtgaatgatccatttttggaggcagatcgacgagaaactgcaagacaagaagccgcctcaaaaagagttcatccaacattgcatttacctgcaaattcacaaccctcaactcaagttgctgggttgttttccagttcagggactcaagcagcattgactgccccacagacatctgcagcaacttcatctttgtcatcaggaagtggattctctctttttagcacaccatcttctgctccatcgtcttctatgttgtcatctttgtttacaacaccaactcctgctccaggacctcaaacctcactttttggttctacatctgtacctggttctgcatcaactccctctctgtttggtaatactactccattgtttagtacaactccagctacaaattcactcttttcaagtccatttgtttcaggcgctg

SEQ ID NO: 30000 - DNA, 592 bp, Glycine max
  unsure (1)..(592): unsure at all n locations
ccaataaatatactgccaatgctatggggagttaagttctataatgattttctcacccaagctggccctaatggcaatgttcaatcagagctactcttccgaaaggataaagcaacttttacttttgataagggttgggcttttcctcgaagggtctacttcaacggtgacaactgtgtaatgccaccacctgattcttatccgtggttacctaatgctggtgctaggcaagaggtttccttgttttctttagtgatagcatctttggtagccttggtattttatgctcacgcataaagtttcaatctgtggtacacttagccttgtaatagaaaattttcagtcagaccagttttgactcatctgtgatgtcaatttggtatttgaagcatatgggaggatgacatccaagattagatcacgtgtcccatgatttgttccaagaggatttacattggtggtagaatttgctattgtcctttgtgtttgttgtaattcaatgatgtacgtatcgttattatattgtaaactgtaattataataaatatacccaaccagataaaacgtgnnnnnnnnnnnnnnnnnnnnnnnn

SEQ ID NO: 30001 - DNA, 564 bp, Glycine max
tttttcaagaatgtctctataagatttgctcgcagagcagatgtaatgccacccattcctatggagacaaagcatcatccatcatcggttgatttgctgctaattaaaccgacttattgctgaaacttcgaagcagaatcttttgcagtttcttcagcatgaatttgtaaatatcagtaaatcttatgctgaaagattgataggagaaatgggtccagacttcggctcgaaaatgactgtgaagtctctaacttcacagcaattagtacggattcatcaattgcttcgtcaagccaagtttgatgatcctagtggtcattgtcttagccctgctggtgaatacaatcttcggttaggaattataaaagagctgcacccggacatggttgcaacttattcaggcagtgctcaagtttttgaaggtcacccattcattgtggaagctggagtcagtgtaggtggaaaaaatgtcaaacaaggtctgaatatatttcgatttgccaatagaattccactactttttgagcaaggtgctgatgttgtcaccagaactgcacataaaag

SEQ ID NO: 30002 - DNA, 399 bp, Glycine max
gtgctaatgagcacaaaagagaacttcgattctacaattcagagatgcactcagctgcttttgcgttgcctgcgttcttgaagagagaagtgagtgtgctccgtgatctctcccttcagtagcaatgcatgatgattgcctattgtaacccctaaataagaaattttgacgacatggtcattgacaagtgtgggataaataggaatctggtgtgattaattttaggtttaccaattatgtgtgttgtggagtctgattagctaggttaatcttagtcgatttcagatggctttctcatatctagtttacaatgctatattatttaggttttttaagcacatactcctaagacgcgcattatcaattattaaataatacatggaaagaatttgcgatggg

SEQ ID NO: 30003 - DNA, 281 bp, Glycine max
ctcgagccgattcggctcgagattctgtatctggagggagccatgagtgcacctgcggcatgcctccgctgactcctgtccgccgacccaacgtccctctccctcttgccgctgccctgcctccgcgccgcgcgcgaagttccccgattacaacatcagggagtacaccaaacgacgcaccgccgatgcgtttcgccacaacgccactctctccgacccgtctccaatttccaccgccttcgcccacggcaagtcacagctcgccgtcgttaaaccacagg

SEQ ID NO: 30004 - DNA, 416 bp, Glycine max
ctgattagttcattgtcagtgattatggggatgctgaagcatgttcttcttggactacgtgaaagaatcgcttcaagctttacgtgtgaactattaccctccttgcagcacacctgagcaagtgctgggtttgagtccacactctgacgcgagcaccatcaccttgcttatgcaagatgatgatgtaactggcttagaaattcaacaccaaggaggatgggtgccggtgaccccaataccagatgctctagttgtcaatgttggagatgtgattgagatctggagtaatggcaaatacaagagtgtagaacacagagcagtgacgagtaagaaaaagagaaggatttcttatgcattatttttgtgcccacgagatgatgtggaaattgagccccttgatcatatgatagatgctc

SEQ ID NO: 30005 - DNA, 408 bp, Glycine max
cacatcacagctattccactaaatcactattcaccatctcttcttttctttcccttcactcccaacaaaacaaatcaatggaccccacaccctccttccaccgccgatcctcctcctcctcctccgaccgcctcctcggcccctaccccttctccccctccccctcctccgccgcctcctcctccgccgaagaactcaacgaagccgaacttttttgggccaccgattcctctgaatcggaaccccaacgcccaacgcccccaccaaaatctcgcctccgcaacttcgatcgccccgtggattccggaatactcgtcgtgctgagggaaaccgaatcccgcggcggcctgttccgcggcaagtcccccgttccgacctcttcgcggatgacgattccgtcgcttccga

SEQ ID NO: 30006 - DNA, 434 bp, Glycine max
gttgtgcaaattggactccatgtaatcaagccaaaaagtagcatggatgatattcgattcactgatcccttataaaccaaccttttttaaagaaaaacatattgttggacatgggagtttcgcagagaccattgtgcagatgcagaaagatttggtgtcacttgattcattgcaaccacttttaaaagggtggagagtggtattcattgcttcaacctctagactaaaagataatgtcaattgggattcaaatttgatagtatcatcccggatgagtagcactgctggtgtctaaggcaggtttgcttgatttttttttccctgtgtgctatccctactagtaatgacaagaaaatgtcaaaaattattctttgtgaaatatatatgttttgacaaatatgtttgaaacataatgtgttgaagaggaatgctaa

SEQ ID NO: 30007 - DNA, 546 bp, Glycine max
  unsure (1)..(546): unsure at all n locations
actgatcatatacttttggtagaagacagatagaatttcaaatatagtggattacgtnatttcggaaaatgaatggaagcatgtagtggtctctattgatatttgatttcaaatggaacccaatagaaccatttgttgtgcaaattggactccatgtaatcaagccaaaaagtagcatggtttataaggatcagtgaatcgaatatcatccatcctactttttaacgaaaaacatattgttggacatgggagtttcgcagagaccattgtgcagatgcagaaagatttggtgtcacttgattcattgcaaccacttttaaaagggtggagagtggtattcattgcttcaacctctagactaaaagataatgtcaattgggattcaaatttgatagtatcatcccggatgagtagcactgctggagactaaggcaggtatgcttgataggtttatcccagtgtgaggtcactcctagtgatgtcgtagtacttgtcaataatcatgcgaagtgatagatctaggtattgacaatatatacataacac

SEQ ID NO: 30008 - DNA, 321 bp, Glycine max
caaggtgattcaactatacccaattaactagccatggaaatgtttcccttgttgccttactttctcttatcatcccttgtttttcttctcacattcaagctattattttcccaaagaagaaaacacaaaaaccttccaccaggtccacctcctcttcccataatcggcaacctcaacctcctcgaacgccccctccaccgtttcttaacccgcacttcaaaaacatacggcgacatcttttctctctggttcggctcccgcctcgccgtcgtcgtctcgtcgccctccgccttccaagaatgtttcacgagaaacgacgtc

SEQ ID NO: 30009 - DNA, 280 bp, Glycine max
cggagaacgagaaaaaaacggaaaagaaggaaaacgtggccccttccgtttcgagcggaagtggaaggagttccaagaggtgggttttcttgagggatttcctaagaagcaaaagcgagggaaggagtaataacaagttctggtccactatttccttttcccccgccgccaaggacaagaagccccaaaatcagggaaatgggccgcagaagcccaagaaggtcgccggaaagcccactaacggcgtcgggaagaggcgcgtgccggcgtcgtcgccgca

SEQ ID NO: 30010 - DNA, 467 bp, Glycine max
gttcaaggttcacgagttacttctgactcctgaaattttccaaacaaacacatcaatcaacactggaagagataaaacatggctctgctggcattgaacatctcagtgtgttgtttccaacagcagcgttcccccactctcttcaaacccaccattaccaaacaaaccctctccctccccaccgcttccgctttctcttcctcttccttaactcaactcagcgtgggccaatatttacccgccaactacggcgattgggttcccaaccccgacccggagcttcgcagaagatgcggcattctgctccatccgacgtcgtttcgcggcccctacggaattggcgatcttggcgacgaggccttccgtttcatcgactggctccaccactcgggttgctccgtttggcaggttcttcccctcgtgccacctggcagaaaggccaacgaagaaggatccccttactctgg

SEQ ID NO: 30011 - DNA, 388 bp, Glycine max
gtcattctatcatttcttgtcagccagtattctctctatggctatgatgctgcagcacatttaactgaagaaaccaaaggtgcagacaagaacgggcctattgcaatactaggtagtattgggatcattacagtatttggatgggcttacatcttggcacttacattcagcattcaggattttggttacctttatgatccaaacaatgagactgctggagcatttgttccagcacaaatactctatgatgcattccatgggagatatcacaattctgctggagcaatcattctactatttgtcatttggggttcattcttttttggtgggctttcaattactacaagtgctgccagagtggtttatgctttgtctagagacaagggag

SEQ ID NO: 30012 - DNA, 284 bp, Glycine max
ctaacctatcacacaacatctgattatacttggttttttcctcggtcaccattcttgcagttcctgaagaggaacttgaattttatcaccctccaattcacctccctcgcgaatttcaatctcatatcttgtcttccttcctttcatcactactactcaacttaatatataggaagctagctgttagtcctctactgcttgcatcacttcaaattagcaacaaacttaagcccatcaaaattattgcaattacacatatataaagatatatattggaattctcc

SEQ ID NO: 30013 - DNA, 281 bp, Glycine max
agcaaagtattttccaccagtccccaaaagcgaaaggcatcttccagtgaacaaccgggccgttgtcgccgacaatggcggccacgccaccccctccgtctttctcgcttcattcaaacaaaccctctcactctcactctctgcttcgcctctcttccaacgaaaacagaacctttttctctttcaattcgaatctgaggtgcgagatcaaaggcttcgagagccaccgtggctggaccatcgagcgcgtctccgacatgagcaaagactccgccaattct

SEQ ID NO: 30014 - DNA, 596 bp, Glycine max
gaagaatatcccataccgcgcgaggatcgaagacgccgaaagagcctggcaggaaatatggagctgggggcccagaaggagacctccgacacagagatgactgagaatccagattccaagtccaatggcagaaggaaccaaaggaagtagagccatgaatctcaattctcaaagctaaaggtaccaattcctggataagatacactattggaggggccatttttgcattcttttgagcttctgagtttggataactgccacgtttgacatcaaagacatgggaacaggaacgagttactttgggatggtttgtacacctatattttgttgttatagcatagatgtagatgttagaatgtagatgattgtgtattagtatgggactaaaaagatccttacactacactagtgtgtacagctcattgctattcatacatgccctttgctttttatttgtttcaccactcattaggatcatgaaggaattaatgttttcttgtggaagatgacatgaaaattttaccaaagcatgaaagacagaaaagatgtgcctattgtctataaattgcagtgaggaatatcaagattattatggt

SEQ ID NO: 30015 - DNA, 249 bp, Glycine max
gcaaagtggtcatggcttggggagtggccttgtggtcacttgctacttttcttaccccttgggcctctcagacctccctcttggctctacttgccgtccgtgctttgcttggcgttgctgaaggagttgctcttccttccatgaataacatggtcgccagatggtttccacaaaccgaacgatccagggctgtaggaatctcgatggctggatttcagcttggatgtgcaatagggctcacgctttctc

SEQ ID NO: 30016 - DNA, 303 bp, Glycine max
ttctgaagatgctataatccaaatgtctaagattgatgatatgacgaaagaggaggtagataatttccgtgaagtggttgatactctccatgcaaaacataaagtctatacagttgctattcaaaattctattaatgagtactcacaagatcaatctgagattaaaacgccttgcaggtgagcttgatgagattgtggctgaactagaggagagtagaagaaaactagtcaatctggaaatggcaaaaggatgcagcaataggaatgaattcccccaaagcagatgcagtgaatggaaacctg

SEQ ID NO: 30017 - DNA, 499 bp, Glycine max
atctcaccaaaacattatctgattcatctcagcattaatgtcagcaacatctaaagaaggagagaacttaagcacaaacgacagggccaaccgacacccctcaactccttcatcgcacactaaaaaatgccctttgaatgccaattttgtgaagatggtggtagaagagctaagagtccaacgagggatagcccttccacttgtggccatgaacttggcttggttcgccaagttagccataacaacagcttttctcggccaccttggggagctgaacttagccggtggcgcactcgggttcagttttgctaatgtctccggcttcgctgtcttgaacggtctaagcggcgccatggaacccatttgtggacaagcacatggagccaagaacgtgaggctccttcacaagacccttctcatgacaaccctcttgttgcttttggtaacacttcccttatctttcttgtggcttaacgttgacaagattttgattcttttt

SEQ ID NO: 30018 - DNA, 452 bp, Glycine max
agaaaatcgccacagcctaaggcagggagtcctctgtggagtgcagggtacttgagggataactggatcaacactgatttgccatcaaccaagtttgagagcaacatgaagcatttgagtgagcagcaacctgttacgccagaaaatacttctacagggtggagaataccgttacgcctgtggcggataaccccgttctgtgtgtgaagcctgtcactgagcgcattcatggctttgcaaggctcttcattagtcagtgcttctccaaagggtatgcagatagactgcagattttttctacggatttcattgaccaggatttcgttgatgcatgcgttggactcacacgtgccaggcgctgagggtagagcctgaaaattgaaattatctctcttatgctcgtaactcttcttgttcatggttctgtctcttttatgtagcagtgtagctgg

SEQ ID NO: 30019 - DNA, 503 bp, Glycine max
aatctctagtagtatcatataatgctgaaattgatgatgatgtgacatcttttgataatcaaagactcaaggatccagaagttgtttgtcgttcttattttccaaagtcaaccagattcctgcaagcatcaaaccattctagcccttgtcttctgcagcatggtgaaccttgtactgccataaatgcaggttctgtatctgctgatgatagagttcgagatgaatctatgttacatgcatccaatatattatgtaatggtcaccctgaaaaattggtcagcagcagctcctatggtctgcttcatgatgaaagaaatgggcatatcattcaaagattagttggtgaagcagttaattctggacatgatattgctagggataaaggtgaaagtagtataatttctaatatattgtccatggactttgatacctgggatgactcactaacatcacctcataatttagcgaacttgttgggtgacaatactgataaccggtctggt

SEQ ID NO: 30020 - DNA, 288 bp, Glycine max
cagatcattaacgtttataatcaggagtatgagagtggtgcagcattctggcctgatgtccatttccgtatcgtgatggcactgcttgtctcacagatagttctgatgggactcctcaccaccaagaaagctgcttcgtcaactccttttctcgttgtgctcccaatactaaccatatggttccataggtactgcaaaggccgttttgaatctgcatttgttaaatttcccttacaggtatgtcaatttgtcttttgtgattagtaattctttgaacagtttgcattg

SEQ ID NO: 30021 - DNA, 354 bp, Glycine max
atgaatatgattatgagatggaagggagtaccttctttggcttcttcctaagtcctaaccttgacgaggccaattccattcattttgatgtgtctctgttttcaacaaacgttcacaacaacacatttcgccgtttcaaatcactacttaacaccggggcacatagagagagagagacatcatggtctcttctaatggactagctacgagtcagccacttttttcttttggattgatttctgatgtccaatatgctgacattcctgatggccgttcattccttggtgttccacggtattatagacacagtcttctcatattgcagagagcagttaaagaatggaactctcatca

SEQ ID NO: 30022 - DNA, 282 bp, Glycine max
cgacttcagtggtcaactccagagaccttccctttccgccgaagaactgttccttggcggaaagattagacctctcaaacccctttccccttcgtcgaataaaagaagagagaaaagggttatcgaagaatcatcatcactattatcagcaccacctccacaacgtaagctaggtagggaaagagcttcatcattttccatttcctctgctacccctttaaaaggtcgcagaggaagtggaattcaagtcgtgtcttgtgatgacacgtcatcacaagggga

SEQ ID NO: 30023 - DNA, 315 bp, Glycine max
ggacaatttggatttcctctgcagccttcttttagtgatcctatttacatgcaatatcatcaacaaccttttgtggagggatatggtgtactgctcatctgctggcacctagagccagtgttggcggccaaattggtccctttgattcccaaaaaaggcccaatagtggtgcttacttggatgacaaaaaattacataatcagaaaactggtgctaatttgaattctaatagagatgggctaatacaccctggttattttggacacccttcaaatttgggttttgtaccccagtatgcaagttcctcactttgta

SEQ ID NO: 30024 - DNA, 602 bp, Glycine max
ggatcactctattcgattaagcgaagcacgtgacgagcctaatttacgctttacacccctacacttcccacaatttgttcctggagacgacgccgttccatcacaccctcagcggtcagagcatggcggcggaaccggtgagtgacggcggacccgcggcggagaaattgatcagcgggagagaagaatttggtgattcgtccaacttgttcagcgcgattctagcaatggtgctgtggctgggagctattcatttcaacatcgccctgatcctcctcgccgtgttcttccttcctctctccaaatcgctcttggttttcggttttctctttgggtttatggtgcttcctatcaacgagaagagcagatttggccgaagattgtcgaggttcatatgcaagcacgctgtgcaattactctccgatcacgcttcacgtagaggatatgaaagcctttgatcctaaccgtgcttatgtttttgggtatgaaccacattcagttttgccaattggcatacgttgcattggctgaccacacaggtttcatgcctcttccaaaagttaaagttcttgctagcagcacggtgttctacacaccatttt

SEQ ID NO: 30025 - DNA, 508 bp, Glycine max
actctatctgcttcaacgttaccactactgtaaacgaaaaaagaaagaaaaaaaacacttctttctctgtcttactgttcactctgctgtgtaccaaaaccaaaaccactcacaaggtgccactaatctgtcaggttatttcaagataccatttttctggtgtttggttcccgagaaactgtttagaatatagaatcaaggaacagtagaaggccaccaaatcatttcaatttttttcttcaatctgtgtcagcacccttgttttgcattcttcttctagcggctgcttcattatttcacacatctgtgacttcaattgggattgtactaatggaatcttggagttatgtccccgaagagaaaggctatttgttttctgatgaaatggatttttcacttgatgctttcatgagaagtagaaaagcattggttgaatgggacaacacatccaactttgttgagaaagatggatttaattcagacagagaggtagttagaagcatggaat

SEQ ID NO: 30026 - DNA, 258 bp, Glycine max
atcagttgtcaggaggtataaaaggagtccccatcccaatagtagctgtgtgttgggctcaccaatacagtactatgatttcaagtggactgaaaccgaagcacttcaacaacgttcattcgctcttcaatctttccaaatcccaacaacccccaaatccaattatagtcccatgctgccgaaccagcaccaacaataacatctcttctccattctccattcgtttcaattcgcctttcccataccggagcccaagat

SEQ ID NO: 30027 - DNA, 421 bp, Glycine max
ttgatacttgtgatcatcgaaagtcactgtagtctattttgtctacaaaatatctggactgacggagtagaaacaactgcaccacaaggggattggggataatttcaatacgtctagtgtttgcaaaaatggaagaagaaagtgcgttgaggccgatggacgctgagcaactgagagagcaggctcataagatggtcgacttcattgccgattactacaaaaccatcgaagacttccccgttctaagccaagttcagccaggttatcttgggaagcttttaccagattctgcacctgattctcctgagtcattgcaaaatgttttggatgatgtgcaggaaaaaatactgccaggggtgacacactggcaaagcccaaattattttgcgtattttccttccaacagtagcattgctgggtt

SEQ ID NO: 30028 - DNA, 273 bp, Glycine max
aggaaaggcaacgtcgagaggaggagctgaagggccgatcctcaaaaaaaaagggcaagatgctgagcaatctatacttaaccgggccagtagtccccaaactggtggaagcatgaagtcaatgaaggaggacaagaaagtgaaggaaaaggacaaatctggcccggcagagaaagaagggcaagaaagctcaagtttaaagactgctggtgctgaaggagaaataacagcaggatttttattaaagaaaagtgcaaaaactaatggttggag

SEQ ID NO: 30029 - DNA, 362 bp, Glycine max
ccctgggctctgagctggagaggatcatgggctcagttcgcttgctttatgtcattattttggtggctacaagcaatgccatattccatgttctcatagcactgctggtggcgcacaatcctttacttacatatgattacctcatgaatgagtgtgcgataggcttctcaggagttctattttcaatgattgttatagagacaagcctgagtggagttcaatcaaggagtgtgtttggattgtctaatgtgcctgccagtggtatgcattctttttgttggtagtgttccagcttctcatgcaaaatgtctcactacttggacacctttgtggcattttatctgggtttgcatatacatatg

SEQ ID NO: 30030 - DNA, 529 bp, Glycine max
  unsure (1)..(529): unsure at all n locations
ggaaatgagagaagaaaaatggagattgaggacacatcgaatggagtatctatttcatttcctcttggtttagctcttctcgttgccttgttattgttcctttgttgcttcttttgctgctgcttgcactgggaaaagctccagcctttgtttccattttgtatggttatcgacactcggcctcagacacaagcagacttaactccccctcttcacaaacctggctttcctgtcttgatgatgaggcataaccgatgtgagagcttgccggtgctgatgccaggagatgaggttccaaaattcatagcactagcatgcccatgtcagcctccaacaaatgaaatgatcacaatccatgtgcagaaggcagcaccaaatgatttttgcagcggtgcttaaagggacacaaattaattataaattaaagccttaattaattaaaataccaagttgcaattagcaaaccaatctcaattctcaagtccctcaaagaagtttcagccatcgaaacacanacaattgtggatag

SEQ ID NO: 30031 - DNA, 730 bp, Glycine max
aaagaatggcaatgagcataggcattgcatgaggtgttcaattcttacacacaggaggggctccgggcatatatggcaacaatttaaagattgagaacattctgttggatgatagtctcaatgcaaaagtcagtagatacaacattccattgccatccaagattgcacatattgaacaaaatgccaccaatcatattggcagcacaaacgatgcagaaaaggaagatatctatcagttgggtattattctacttgaagttatcactggcaaacaaattacatcctcgagtgaaatagaggagctgaaggaagagctggagaatggttcatcagaagcaacatcagtaattagaagcgcaattgatccttcactgaggggaacttatgcatatgaatcaatgaaaactgcagttcagatcaccatcaactgtctctccaaggtttctagccagcgcccttcaatagaggatgttctttggaatttgcagtacgcaatgcaagttcaagagtcctggaccagcagtggaaacctcagcacaaaattgtaaaccacacttgtcaataaaaaaaatgcttgcttacatttccatatgttcattatcataatgaataaaatgttgatgtacatatgtaatttctttcataaggccccaaaatgcaatttggcctgcatttttccatattattgttgttactaaggttttataatactttgaattaggttcctatc

SEQ ID NO: 30032 - DNA, 730 bp, Glycine max
cgcaaataagttctcagttatcagcccttcctattgtgttcctaactctcttaacctacaaattaacacagagaaaggtgttacttacaacgtaaagggtaaccgtgtattttacataaaagatactttgttcacatttcacggtcgtcgcgtgttatgtgatgataaaggaagccccatcgtcactctatacaagaagaatgtgacattgcacgggcaatgcaaagttttcaggggtaatagcaatggtccctctgagttgctcttttcggtgaagagatcgtcaataatcccgagtgggaagatgattagattagatgtcttccttgaaaacaagagaaaaggaagcatgtgtgattttagagtcatcgttcgtggaagtaaaaattcatgcactatttatgccggtgaatctccaactattgttgccaagatggagaataatggaggcttcaaagtcttggtctatcccaacgtggactacgcattcatagtgacactacttatgattattgatgacatcaaagattatgatgtgttggtaaatgcgacggtgagtggtgtcctaactgtggcgacggggggtatcttacctattctgacattgtttgagggagaaaatttagaagaagaaaccttagatggagaaaacttagaagccgaatacttacaagaaggagaaaacaactcaggtggagaaaacttagatggagaaaacaacccagaagga

SEQ ID NO: 30033 - DNA, 710 bp, Glycine max
  unsure (1)..(710): unsure at all n locations
cttctatcattggagatgctgtttcatatatgcatgaacttcaagcacaagccagcatgctgaaggctgaggttgaaggacttgaaacatcctcattgaactccaaaaattaccaaggattgattgaaaaccccatgagaggtcaaatgatcaccaacaagaagataatccagatggacatgtttcaagtggatgaaaaagggtttcatgtgaaaataatgtgcaataaaggagaaggtgtggctgcctcattgtacaagtctctcgagtctctgacaggcttcaatgttcagaattcaaacttgaccacaatttctgttcgcggttttctacttacattttcattgaatgcgaaaggccctgagccagaaattaacctgcccaacttgaagttatgggtgactgaagcttttgtgaaacaaggctttgaattcataccttttttttatgcttgactctttcaatctaggggtaactaattaaggtttgcgttaaagagccagtgtatgtttgaataaaagtttgtgaagttaagtttgtaaccctagttagcccaagttttgtttttacaaagttgggtttcttgccaaaaatttgatgggctaatgtattttttgggggtaatcaaaatgtcagtaattaaaatccgtttccttttttnnnnnnnnnnnnnnnnnnnnnnnnnnnnnnnnnnnnnnnnnnnnnnnnnn

SEQ ID NO: 30034 - DNA, 422 bp, Glycine max
aaaataagttgtttagagatatgcaagagaagggacttgagctcatgtctaaggggaaaatggctattgtctttctcttgaatgacaaagagcatcaggggagcatttctgactctaacaaggttgaaaatgaagcaattgacacttcggtacttcacatgtttcaaaaggtcaaagatcatgtttctgtgcctttaattttggtttcctcagcccaacaaattcagtcttttaggaatctgtttacaagcaacaattacttcgcatttgactctgaaaaggtatggtttttggaggaagagaagctgccagtaattagcagtttgcccaagggacagaacaaatataagattttaatgaaatcaccttgggaaatactccaatctccagttggatctgggggacttattagcttgttttca

SEQ ID NO: 30035 - DNA, 376 bp, Glycine max
ctatgccaaagttggaggaatcaccaaagtagagatgaattttcttgagttggatttcctctttggtttgggtttccatttaaatgtgaccccaggcaccttccaagcctattgtgtccatctccaaagagaaatgttgttgatccaacctctaaatttttcagattccaccctaaatttaggacaatcactaaaggctcacttgtgcttcaatgaggatgaatgttctcatcaaaagcagaaacaacaacaacagctagctgtttgattccttgcattttctcagtgcatgtgtagtatggttgactagttgtaaatgtagtgattctattacagactggcaagtaaaatacttttccttgtaaaaaaaaaaaaa

SEQ ID NO: 30036 - DNA, 379 bp, Glycine max
tgaaaaactctggcataggtggagaggttaatcacttgcggaaggagcctatggatatagccatgaatgcaagaggtaactattgtagctctcctggctcttctgatgctgctactgaacatgagattttgctcaagagtgaagaaacaagaggagaatcagttgagactttgaactcttgtgagttgagctgcagcaaccattgccttggatttatgcataataatatgctgccagataccaatctaagaccaaatcctgaggcatctattgcaaagaaacatactgaggaagtaatttctgaaatcctaggactatgtcaaggcaagtgcttgaagattagccatggtcagtcaccaaatgagcaatttagaagaag

SEQ ID NO: 30037 - DNA, 436 bp, Glycine max
cttggcttcttccacgtacaacacaatgtgctatgcatagtttttgaaactctgtcatcagagttgcgtaatctggaggtccttgacataagttttaaccctttgacaaatgacatcctgccatccctcgggggattcacatctttgaaggaactatatctgtcttatattgatttggactcagatcttcatattcaaggtttatgttcatcattaaggaatcttgagatccttgacttgtccagtaacaatttcaataatagtgatattacttctgctcttagtggactttcatccctcaagtttttagatttatcaatttgtcaattgacttcaagatcaatttttaatatatcaagatttacttcattgaagatcctcgacttatcttataacaagttggataaaagtattcagtgacatcaagattttcatg

SEQ ID NO: 30038 - DNA, 298 bp, Glycine max
ctcgagccgctcgagccgaatcggctcgagctttttctctccttctatgatattataaccatcttcactccattgcctcaaatattcactcacctcactagctactcactcatcaatcacttatcatattcttcactctctttgcctctcaatgtggttttttcaacaagggttattattaggtgaagatgatgatggtgcatcctcgtgatcaagtaggtggagagacacacaagaatttggtggagccaaacgtggcagcttctaagaaagctagaaattgtgcatgcatggtaag

SEQ ID NO: 30039 - DNA, 290 bp, Glycine max
cctgtatcttcatgtttgtctaatttttctaatttgtcaatcacatcatattctactcctaaaacagtgtctaacagtacagatgtccttggggtcaagttatcacatccctggtctcagtcagcctctctaccgttgaagaaatcatcaacttcccttgccgaacggagaggtaacttgtcaaaatttttgaagttgccactaatgaatgataagacacaagtaacagataaatcgtcaacttctcatgctagtcgagaatatgacattcttgttaatgggcatgttag

SEQ ID NO: 30040 - DNA, 367 bp, Glycine max
accaggtttcaacctttagtcgacggatcctccaatctacctttctttataggagctgctcctccttcttctgctcctccaaccatggacaacaacaacagcaacaacagcaacaaccatcaccaccttcagttctcacccatctttgatggccgcttgcaactttgctatggcgatggaacaaggcagcattctgatcacaaggggaagggaaagaactaagttcccccgaggagcaccacttttgttcctggaattgtggtctttgtttttttagtagctgcaagctgtgtacccagcttggtttctgcaaaatggaggataagttgttgtcatcaagtgttggtgtttcttcttggatcattta

SEQ ID NO: 30041 - DNA, 423 bp, Glycine max
ttgccttcgcgtccgcccacgcgtccgcccacgcgtgcggcacagcacagcactcttcaaccatcaatcatccatcgccttcttcatttcaccaccgcgcgcacaattgcaattacatttccaccccccaaatttccctttcagaagaaaaaaccaccaccacctcacctctgatccgtgcacctcacgtgcccatggctcctgctacctccgagcgcgtggagttggccaggctctgcgcctccaaggactggtccaaagccattcgaatcctcgattccctcgtttctcattccaacgcaattcaagacctatgcaaccgcgcgttctgttacagcaaattagagctccacaagcacgtgattaaggattgcgacagagcgcttcagcttgaccctacgcttcttcaagcttatattctca

SEQ ID NO: 30042 - DNA, 399 bp, Glycine max
  unsure (1)..(399): unsure at all n locations
gttaattttccttgtgggatcattttgatttcacttatgctgctgaggaacagatcaagggcagtgacaaagccaggtttgatggctgatcacggcacccagaattctccaaatcaaaactatgctaaaactattccttctctatttgggtcacccaaattcagagatttcaccaacaagtgtctctcttcaggtactgaggccttaaggagcccaacttcaattcttgatgccagagcattatccccttttgccattggaagcccattctcaacccttccaaacaaaagctcctcagannacagnacaagggacnaacatgattcaaaagggggcaatggtcttgctcttgttggtgctctcaaagatgaagatacctcaattagtcacaattctgaa

SEQ ID NO: 30043 - DNA, 685 bp, Glycine max
gcgatctataaccacgatgctgaatttccttaatttttctcttctattgacgctgatggggcttctgtggaagcctgccattcgcaggatctgatgttcggttcagtgtggacgcgttcgcattcaatctccattctacctttaaaacaatgctgccgtgaatcacaccaccaccgtctattcttctgggttcgatctgctatgtacggatgcagatgatactgtgctggagctgccttgtgttccaataaaactgtttgtcaaaagcatagattacaagttgcagcaaatccaaatctacgaccctcaaaattgccttcccagggaactcataaaactcggcaattcctctgttgctccatttaaattccaatcatttggtgggaataatgtttccttcttgcgctgcaactcaatgtcatcatcatgcccaattttgcaactcgcatatgatgaaggtgactttattgatcctgaaataatatcttgcaccaaggtgagtgatgttttctccgtccagtggcaagtgaataattacttggggaacgcggtggttatggaatggtccaagcctgactgcagtacctgtgaagcacaagggcataaatctaaatacaagaatggtactcaaggtgaaactgaatgtttcatttgcccaacaaacaggatttcaacatcaagtgtt

SEQ ID NO: 30044 - DNA, 435 bp, Glycine max
cctacgcgtccgatcacagtttgcactcacaccaggcggctttcatcctcgtagttcaactggcacaccctttaaagataggcctgaggctgcaaattaaagcatttacacaatcacacgatgctgaattttcttaatttttctcttctattgacgctgttgtttcttctgtggaagcctgcgataagcaaaaacgggtgcacggataagtgtggacgcgttcgcattcaatttccattctacctcagaaataatagcaaattgaatcacaccaccaccgcctattcttctgggttcgatctgctatgtacggatgcagatgagactgtgctggagctgccttctgttccataaaactgtttgtcaaaagcatagattacaagttgcagcatattcaaatctacgaccctcaaaattgccttcccagggaactca

SEQ ID NO: 30045 - DNA, 363 bp, Glycine max
cgagtaccagcttttgttgctatgcttggcacccgcagacaaccttttcctgcgtttggatttgacttagttcattgctctaggtgtttgatcccgtttacagcctacaatgcctcttatttcattgaagtggacagattacttcgtcctggtggatattttgtcatctctggtccccctgttcagtggcctaaacaagataaagaatggtctgatctccaagctgtggcaagagccttgtgttatgaactgattgctgtagatggtaacactgtgatctggaagaagccagccggagaatcgtgtcttcccaatgaaaatgaatttggtcttgagttatgtgatgattcagatgacccaagt

SEQ ID NO: 30046 - DNA, 497 bp, Glycine max
agccaattggatcggaacctgttgcagggcaccaacagagcgtgccctatttggtatgggattttgtttatccatctgcgcctggagggattgacaaccctatgatcaatccaatggttactggggcgcctagcttggctggacttgggtgttctaagattctggtttgcgttgctgaaaaggatctgataaaggatagaggggttgcgtactatgaggctgtgaagaagagtggctggcaaggtgaagcggaactgttcgaagtggagggcgaggatcatgctttccacatccacaatccacaaacccagaatgccatgaaaatgatcaaacgcctctcggattttctcctccactaaaacacataccctgaggattctgagttttaatgtctcatggatgtaatctaatgtaatgcttcaactctgcttattattattaagcaaataaaatttggaaatcagaagccagcgtagctggcctagttcgtgtgatct

SEQ ID NO: 30047 - DNA, 255 bp, Glycine max
gtgaccaacaatcaagcattgacccccgcacttttaaagtacgaggaccaaattatttaaaggccaagaagaaagaatttgcttcaaaccatgctgcatattacccatttggtgttgatgtattcttatcgccacagaaaatagaccatcatagctcggtttgtggaacttcctgtgatgagctcttcagggaaacttccacccatactagtagtgaatgttcagattcctatttaccctgccacactttttcaa

SEQ ID NO: 30048 - DNA, 260 bp, Glycine max
tgtatcaataaataataagtatgtgttgtgtttgaagttttaaaataaagtagtcatggcccccctttgcaaattcaaatgttctaggatttgttccgggtgttttaagcggtggttgctttgtgtttggttggtctcttatagatatgtaatttggatcgtcaatctcggcttataaatggaatactattggtgttatgtgaataagaagcttatgtcccaaaaaatatgaataacccccttgttgggttccttcgtcc

SEQ ID NO: 30049 - DNA, 331 bp, Glycine max
gcaagctacaaagatgaggtctcagatacatcttttgtggggaaccttgttgtatgaacgttctgttgtggaatataagcttggccttcccacatgggaggaatcgtttggaggttgcagtcgaaaagtttgaactagctgggacttctgcaacggatattgctttcattgtaaagaatcactgctcaaatgaaacagcacttgaaggattcaaaattgatgagatagtacaggcatggaatgagatgtatgatgcccaagggtggcagtttggtgatccatcattccgacttgaaccattgtttcgtcggcgtgttcctaaactccatta

SEQ ID NO: 30050 - DNA, 274 bp, Glycine max
gcttacaatcccttcttgtaggcgagggggattgcatttggacagaaaaatgcgtagctgttttgataaatttagctacttctcaagttggaagggaggaaattgtatctactcctggactcattggtgcattggcttcgatattggacaccggtgagctcatagaacaggagcaagctgtctcttgtctcctaattttgtgcaatagaagtgaggaatgcagtgagatggtcctgcaggaaggggttataccagcattggtttcaatatcagt

SEQ ID NO: 30051 - DNA, 433 bp, Glycine max
tttttgtcgcgtggggaagagactccgttacaggggcgtttgaatggagtagcaacttttattggttgagttgggcttactgtagctgtttagggcttgctgccctcttgggcagatacttttccggccataccaaagatatagatggaaatgttgaatttgttgctggaaagactagcgttagcaatgcaggagatgatgtcatcaaaatttttaccatcgcaggcacaattgtggtcgtggcagtccctgaaggtctacctttggctgttaccttaaccttggcatactcaatgcggaaaatgatggcagacaaggccttggtacggcggctatcggcctgtgaaactatgggctctgccacaacaatttgcagtgataagacaggaacattgaccttaaatcagatgactgtagttgaggcatatgttgg

SEQ ID NO: 30052 - DNA, 253 bp, Glycine max
aaatcattcgttgtagttgattcagcgtgaagttgtagatttgggaattaagctataggcactgcagctagagtggctggctacgtgttcttgaccatataaattaactacagagcttttgcgcctcttattcatccaagtatactttctctacttcatattttgtccaagctaattctttagcttttttttatggttaatgattattgcaaagttggctttttcttctgtgataattgagtctgattgattg

SEQ ID NO: 30053 - DNA, 349 bp, Glycine max
cattccgttactatataggcagggccaatccgacaccaattttattcttcctcacggagacagctcgaaggaatttgattgatggctgtaaactgtacttcctcaattcgaatcccaattcagaaatatggatcatttctcaagtaccccaacaaaaaattgatgtccaaacgcagctatgtcccaatgaaaaaggcatcggtactgaggatcacagcatccatcaagaacaaggtttatgaagatcactcccagggcataatctgctaccaagatgagtttggagaaatagtttgtgaagggtatgatgaagggccttgtttccaaagaattccagagacgaccaatc

SEQ ID NO: 30054 - DNA, 263 bp, Glycine max
ctttcaaagtatttgcttttattttttggtgaaaaagtgtttatgcttttgctgttgtacaagatgagtgatgagaatggcgaagaacctcgagaaaaccgtccggttccacgcttgaatgaaaggattctttcatctctgtctaggagatcagttgctgctcacccttggcatgatcttgaaattggacctggagcgcctatgattttcaattgtgttgtggagatcactaagggaagcaaggtcaaatacgaacttgacaa

SEQ ID NO: 30055 - DNA, 309 bp, Glycine max
cctcgagccgaatcggctcgaggcaattcccatctcatggccatctacaaacaataatcatcacgctcttctccttgtttcaccaggaataggtcacataatccctgccctagaacttgccaagcgtttagtcactcacaaaatcatttccaaactcaccttcttttatggttcaatcaaaatctctactccatcaaaagctgagacacaaattctccaatcagccataaaggaaaaccttttcgatctaattcaactcccccctattgatctctccatccatgttagtcctcatgacaccttagaaac

SEQ ID NO: 30056 - DNA, 464 bp, Glycine max
gtcagcacaggctttaggcggccatatgaatgttcatagaagagatagggcaagactcaagcagccatatagccctcagaatgaaatcctaagtgttgatcttgagaaaattaccacgcaacccctgaattcagttcagatttcttttacttctttgggttacttatacccatcttctcttggtgtattgacccataataacactaaccctaattctgatccttattctcatgctcctccttcaccttccaaggttttagtctcatcaatcaataagagaggaagagagaaaccccagattccgctttacaaaggatgtcatgagtcttctcctgatcttccttctaaatccatgtcaaatttaactgaagacttcagattttgttcacgtaggctcgatcctgaagctggtgttgagaaaaaattgaagggattggattctaggtgtgggagtactgagggag

SEQ ID NO: 30057 - DNA, 410 bp, Glycine max
cttccttacatcacagctttcatggcgctcttcttcgtcatcatgatggatctctctctcagaaaatcattatcctcttctgcacgcgcataacttcctcgaaacgcttcgtttcgctatacacgcgccaattgccgctcacatctcgtcctctgaaaccatgtcgaattggatctcctccaaacttaaagccgcagagaacattctccaccagatcgatcagcaagcggctgaatcgcttcgcaagaacgaggattttcggttggaggaaccgagcattgatgctcccttcaaatcagggagcggcgcgtctctgaaggatcaattgaagaagaagccattagagagcaatgagtatcgaggaaaattgcgcagtgatcccaattttgatgggcttaaagctacagcaa

SEQ ID NO: 30058 - DNA, 286 bp, Glycine max
agaacatctttctagaaatagacaacgctagtttccattgaaattgtcaggtggaataaaaagctagaaaaagaaacaaggttttccccgaaaagggaatagaaatgcatgaatcttcaatgtttgtttgattcttccgatttaatcctcctcgtcactttctgatcttttcttagatctttatttcttgttctccttgtcttctttcgcgacaacaaacctctcccttttctcttttccaaacactttctcccatctttgatcttgaataagaccttcaaattct

SEQ ID NO: 30059 - DNA, 1572 bp, Glycine max
catcatcatcgagttctccgaaaagaggaaggcattcaaatttgtttcttattcttggaattgctattggcataatcttcattgctatcatatctgtacttatattctgtttatgtacgtttctgtcaaaagcaaagacacctccgatagaaactgaaaagccaaggacagagagtgcaatttcaactgtgggttctcttccccacccaactagtacacgatttattgcttatgaagagcttaaagaagcaacaaacaattttgaaccagcgagtgttcttggagaaggagggtttggtagagtttttaaaggtgtcttaaatgatggtactcatgtagcaattaagaggcttacaaatggagggcaacagggtgacaaagagtttttggttgaggttgagatgcttagccggttgcatcatcgtaaccttgtaaaactagtgggatactttagtaatcgtgactcatcacaaaatgtactttgctatgagcttgtccctaatggaagtttggaggcttggcttcatggtcccttgggaatcaattgtcctttggattgggacaccagaatgaagattgcgcttgatgctgcaaggggactttcatacctgcatgaagactcacagccctgtgtaatacatagagacttcaaggcatccaacatattgcttgagaacaattttcatgctaaggttgcagattttggtcttgctaagcaagcacctgaaggcagatctaattatttgtctactcgtgtcatggggacatttgggtacgttgctcctgaatatgccatgactggacacctacttgttaaaagtgacgtttatagctatggtgttgtcttgctggaactgcttactggcaggaagcctgtggatatgtcacagccaactggacaagagaatcttgttacttgggctaggccaatccttagagataaggaccggttggaagagattgctgatccaagacttggtggaaagtatccaaaggaagattttgtacgtgtttgcactattgctgcagcctgtgttgctctagaagcaaaccaacgacccacaatgggtgaagtggtacagtcacttaaaatggtgcagcgcgtcacagaataccaagattctgtgttagcctcatccaatgcacgacccaacctacgacagtcctctagcacttttgaatttgatggaacatcttcaatgttctcttcaggtccttactctggtctaagtgcctttgacaatgacaacatttctaggactgtggttttctctgaagatctttgtgaaggacgatgaaaactgagaaaacttagccattcataatgttttctttctttcccatttttgtgagcactttgcaagctttcaaccaaaatgtttttttaacctcatgaagcataaggcacataatttttccaaatagatttaagcattttgttggtgagtggaagggtaatatgattgtaataattgcttgtataaatagaacaaaattcgttagcagattagttatttaaaaagatgagttgggtaattgcttgtataaatagaacaaaatttgccaaaccgg

SEQ ID NO: 30060 - DNA, 502 bp, Glycine max
attctgtctcttatgggtcagatgatgaagcctaggaaaacagagatcactgacaagttgaggcaagaaattaacaaggttgtcaaccgatatattgatgaaggtgtagcagagcttgttcctggagttctattcattgatgaggttcatatgctagatatggagtgtttttcgtatttaaatcgtgctttagagagctccctatctccaatagtaatctttgctactaatagaggaatatgcaatgtaagagggactgatatgaccagtcctcatggcatacctgttgacctgttggatcggttggtgatcattcgaacgcaaacctatggtcctgctgaaatgatacaggttctatggccttcatctttctttcaaatagatttcaaaatgttaagcattatgtgtttggatatacaaacatacatgcttcttaattgtgggacagattctagctatccgtgctcaagtagaggaactggttgtggatgaagaaagttta

SEQ ID NO: 30061 - DNA, 406 bp, Glycine max
gggaccctgtgattgatcgtgagaaggacttggtgttgttgttggaggagaagggtgtggttgtggtgagtgattttgatgaagaagggtgccatggggtggagtttggtgatgaatccaaagcaaaccaactcattcaggtagtcaaacgttttgtttcatgaatccaaggatagtacaagctcatgatttttctcttttctttttgagatcatcctagtatgaaccttatgttagttcttgtcttgtgcttacctttcctcttcatatatggttgatagagttattatcttagggaaatgctactagtacttttctttccaggcatctaagaaattgcagaaattgtctgaaaagtgagtcatgtaatggaaaagtgatcaaactaataaattaaatttatagg

SEQ ID NO: 30062 - DNA, 454 bp, Glycine max
caattccgttacattattaaacaactcattttcactttcttccttaatctccctctctattttcgtaataccaaacagtctctaagtgaggggtggaggagagtatcaaaagagagaaaataacatttatttgtagcaatattttgaaaatgtaattatacagtatagagcttaaaaagaaatggtagttccatgtcagaaattatgcaataaaatctttgactaggttatagagttggttttggtgcttacgagcacgaacctcaatcccatgacatcccccttggtcaaaacgggtgtggttgtggtgagtgattttgatgaagaagggtgccatggggtggagtttggtgatgaatccaaagcaaaccaactcattcaggtagtcaaacgttttgtttcatgaatccaaggatagtacaagctcatgatttttctcttttctttttgagat

SEQ ID NO: 30063 - DNA, 755 bp, Glycine max
gaagctaaattactaggaaaatctgctcctcttgactttgttcatgacaaattcaagaggagcagattgaagctaaattactaggaaaatcttcttttgagattgagatacaccaaagtctttgtggcgatggtgaacgtgtctattgtgaccattgtgctacttcaattattgaccttcatagaagctgccccaactgttcctatgaactctgccttagttgttgccaagaaatacgtgatggaagcattacaccccgggctgagctgaagttcccatatgtaaataggggctatgattatatgcatggaggggaccctctacctgtgccttgtgatttagagacatcagaaggtcatattgagccgtctactgtgtggaatgctaagagtgatggaagcattagttgtgcgccaaaggagttggggggttgcggtagtgctgtattggagctgagacgcatcctcccagatgggtggatatctgacttggaagcctcagctcgcaatatgctgaaaatttgggaaattgagcacacaactcttcagcaaaaagaagcagtatcaagcttcacctttttgagaaaggaagctattagagaaggcataaatgacaataacatatactatccagagtcaagtaacactcaaaaagaagggctgctgcttttccaaaagcattgggctaatggtgaaccaattatagtccgtgatgtccttaaacagggaacaggtctgagctgggagcccatggta

SEQ ID NO: 30064 - DNA, 400 bp, Glycine max
ggagatgttgatcttcatttgattaattacatacatcatactctcaaagaatttttaaacaataatttgatcataggtagatggcatccatctgtgaaagtatgggaaactgctgtaagccggcatcatcaatggagtgggacggtgaagactggagtgatttgacgtccaagaagacgagatcaagcaaggtgtttgaagaagctcatactcatggtcatggtcattggttgaatttagggaaagtgcagaaggaaaagcttatggaagcactaagagtttctcctaatgccaacgggaaggtgaagataaagatttcaaagaaagagttggcagaattgttggagaagcaacaacatgttaataagaagcaagtagggagagcttctgcagaacaagt

SEQ ID NO: 30065 - DNA, 507 bp, Glycine max
gggaggaaatagggagatggcaccacacgttttcatctcatctttctaacaaaatgggaaacacttaacaaaaagagggcaagctacatctataatgattgaagaggtgtatacatgaatgcttctgggtaagaggctagtaattggaagaatgtttctcaagttttggggcttcagccattccaagcacacaagttcctctcagagaaagtatccaacaataatagaagagctgtgtcatcaattttctctggccgatcttaggaaatcaacgaacaactttgatccaaagagacaagttgaccttagagcatttggtatcaaagtatacaaaggttgtcttcaacatgatgatggttctgattatacagtcgccgtaaagcgatttaatgtggaaagacggcagtcaagcacgggaagagttcaagaacgaaatagagttgctctgccagcttcatcaccctaattgtgtctctcttataggattctgcaaccacaaagatgaga

SEQ ID NO: 30066 - DNA, 490 bp, Glycine max
cggaagcaatctggtgggaagaaaaggagtagaggtgatttttttggtaaattacaggtaatcaaggagtggagcaatgtttctgaaatgttttggctgcacaagttcatctcagagaaagtatccaacaatcgtagaagagttgtgccatcaattttctctggccgatgttaggaaatcaaccaacaactttgataaaaacagattaataggatgtgatggaattagtgaagtatataagggttgtctccaacataatgatcgttctgattatacagtcacatttaagcgatttattgcagaacgttgttatccaccactggacgacctgttcaagaatgaaatagaattgctctgccagatgcgtcaccctaattgtgtctctcttataggattctgcagccacaaaaatgagagaattagtgtgtatgagtacatgtccaatggatctctagatcgataccttgaaggatctatagatcgacattta

SEQ ID NO: 30067 - DNA, 257 bp, Glycine max
aattggcagaatgtctctcaaatgttttggcctctaccgttcaagttcatctcagagacagtatccaacaataatagaagagttgtgccataaattttctctagcggatcttaggaagtcaaccaacgactttgatcaaaacagagtcattgacattagagcatttggtatcaaaatatataaaggttgtcttcaacataatgatggttctgattatgcagttgcagtaacgcgatttaaagtgacagatattcaag

SEQ ID NO: 30068 - DNA, 461 bp, Glycine max
cttggaggcttccaagaaaaaggatccgatcctcaacgcttgtctaatactcatgttatcgtagatgacaccggaaaaattataagctcttatagtaagatacacctgtttgatgtagatgttccgggtggaagggtatacaaagaaagtagttttacagaatcaggcaaggatattgttgcagtagacagtcctgttgggcgtttgggcctcagtgtttgctatgatttgagatttccagagatgtaccaattgctgcgtttccaacatgaagcacaggtactactggtgcctgcagcattcacaacagtaacaggtgaagcacactgggagattcttcttcgtgcccgtgcaattgagactcaatgctatgtcattgctgctgcgcaagctggcaaacataatgataaaagagaaagctacggtgacacattaattatcgatccatgggggacaattgt

SEQ ID NO: 30069 - DNA, 532 bp, Glycine max
aagcgccccgtgttcaaggtcctcccgtttgcagatcgcgttccgcctcgtgtgccacgcgtccaccgtcggcgggctcatcggcagctccggctccatcgtgtcgcagctccgccgcgagaccggctgcaaaaatccactgcgaggactccctctcctccgccgaggaccgcgtcatcctcgtcatcggctccctctcgccgcgaaagggcctcctgctcggcgacggcggcgaggtcgaggtctcctgcgcgcaggaggccgtcgttagggttttcgagagggtttgggacctcgaagccgagaaaggcgttaattctaacagagctgttaacggcgaggttttctcgaagttgctagctcacacttcgcagattggtgccggtgttggcaaaggatggtagctcataacggccattaggaacaataccggtgccactatcagggttttccgtcctaccgctatgcgccacgcaaagacgaagagttagttcagatgcctggtggaattctggctgttaactaagcgctg

SEQ ID NO: 30070 - DNA, 344 bp, Glycine max
gtgccacgtcaagtggatgaacacatgtttataacttttgggcttagctttgacatatgtcgcagtgatacaggagtttgtcctgggccagtacccttattttctgcaaacatgaacaacgagtcctttgtgttgccacatggcaaaggggtatcaatgcttgaagcgtttttccggaacgatgttactggggtgtacactagagattttccggatcagcctgcggttgtgtttgactgtaccaacccaaacataacgtcgtcgccagatacacctcgtgaattcctaatcgcacctaaatcaacgaaggtgaagacgttgaagttcaattcaacagttcagat

SEQ ID NO: 30071 - DNA, 536 bp, Glycine max
ggagaatgatgacgacgtcccagagcttgttccaggccaggattttgagacagctgctgaggagaccaaggctgcttcttagattgtgccatcgctaaatatctcctgtgttttaattttttcttcttcttgattttccattttaagtatttcaggtgtttggttctcctgtcatatactttaaacagttcaaatactctattaaatctgctttccttcatctaactaggtatcaagtttttgactgcacctgtcatcctaaacaccgtttcagtttatcagcattattcgtggttcggtagttaatgtaaggggtattcaattcctgtcccgtctcactaatctggcttgatttgaagttagttttgatggatttgagttctaaaccaacgtgtttttggtacgagttggttatgatttgggtcatcataacctagtttgaagttgcaatttagtccctgaaatgtacacggtttcatgttagtttctgaatttaaataaattaaaaacttcttgtttgttattaaaaaaaaaaa

SEQ ID NO: 30072 - DNA, 288 bp, Glycine max
gaaatgtcttgcaatggacagaaaaatggaaattacagcaactgttttaagatctttctctgatatgttttatataatccatatcattttccaatttcgtactggattcattgctccctcttctcgagtatttggaagaggtgttttggttgaagatgcttgggcaatagcaatgcggtacctatcatcatacttcttgattgacattcttgccgttcttcccctcccacaggtggcaattctaattatcattccaaagttgagtggctctgaatcactgaatacaaa

SEQ ID NO: 30073 - DNA, 643 bp, Glycine max
ctaattcagaagctttagtaaaagaaatagttgggcagacatctggttacatgcccagggatatatgtgctttaattgctgatgctggtgccaacttatttcccagaaacaatgctaaagtagacaaagatgtacatgatgatgtaggtagttcccttagttccaagatggcagaggacaacaatcacgggaaagtttcacctcagattactggaaaagaagacttgttgaatgctttggaacgatcaaagaaaagaaatgcatcagcattgggtactccaaaggttccgaatgtgaaatgggaggatgttggtgggcttgaagatgtcaaaaaatcaattctggatactgttcagttacctctcctgcataaagatctattttcatctggattacgtaagcgatctggtgttcttttgtatggtccccctggaactgccaaaacattattagcaaaagctgttgctacagagtgctccttaaattttcttagtgtgaaaggtcctgaactgatcaacatgtacattggagagtctgaaaagaatgttcgagacattttccagaaggccagatcagcacgtccatgtgtcatcttctttgatgagcttgattctcttgcaccagctcgaggtgcctctggaga

SEQ ID NO: 30074 - DNA, 349 bp, Glycine max
cagggtttgaaagatggtgaagaggagtttttcactgtgaaggagaaggtaggtgaggaggacaaagtagatagtgatgacaaggaacttgaggagaagctggatgagtattttggtggagatgtagaatcaaatgaaaattccaagtttctaagaagctatttcatgaacaaattgtggattgacaagagtgggaagaatttgaatgttggagaggatgaattgcaagaggattcagagggtgagatagagctccagagacaaggaggattagggttccggattccaggaaattccaggggatagggtgttgggtcaggcccggaaggtgaagggatcattgaggaag

SEQ ID NO: 30075 - DNA, 299 bp, Glycine max
gccaagaatgcctctaaatatatccttacagaataaaaaaactgtgtcttcgtcttgaagcatggaagatcatggacagaaccaaaggaagaggcacaatgtatttggtgcgtttgtggataaatcacttggttacccatcttctggtgcagatgaccatgaccccaagaagcttaaacccaattctgaagctcctttatcaaccatagaccaacaagtccctgcattaccccttcccaatatattggtttctgcatttaaggagaacaccacagatggtgtcaaatttcaactgtttg

SEQ ID NO: 30076 - DNA, 395 bp, Glycine max
cccacgcgttcgaatccccatagctgcctgctccacaccacaatacatcatttagcaccagaaaaaaaaaaacacaaaaatactttattccgataaataatagaaattaaaaagaaaaatgtcttggctcttcaagtccaaccaccccgacccagaatcttctaatctccacgaccgcaccgttatccactcgtcttcgccgccgcatcccgccgccgatcgccacggcgtcaaggacgacatatcgcatattttccgcggcgtcgccaacttcctcgctccgccgccgccgtcttcctcttcttcttcttcttcttcttcttcctcctcctccgccggcgattcctcctcctcgcaagctctgaccggaatccggaacgatctcgtggagatcg

SEQ ID NO: 30077 - DNA, 852 bp, Glycine max
attccactaggtcttgctagaactccccatttttcatcacaaacttcaaacatggcttcgacttttggtgctcaacctggacctgttgctggatttcagtcgattattccaaatcaacatgtttctgtgcaagcaccaccaccaagacaggttttacagtattcgcatatgactcagacaagtcctttgggtcacattgggcccccaagaaaccctgtacagaatttgtcaactccaacaaatgcttcactttcatttcctgttactttaagccaaccaacgccaataggacaacatcagacatctgtgtcttcaatgcatctacctatatctggtatatcatcaccaccgatacctaaccagccattgacccatcttggtgtctcttctggcctgaacgaagcccctgtcactgttaaaatgtctgttggtcccagcaatatggggccagtggttccacctgcaagacctgtttctctacatcaacagccagatgttgcatttaagccaccgcagtcaaatatgtcaatgattacacgatctgccacctttcttccacatcaagtaggaatttcccctggacaaccatcttctttgagatcaatgcctgtaccaatacgtgcacctacacatttatctgcaaaccatttatcaggacctgtttcatttccttcacgtggaatatccccttcacttccattgcctcagcaagcaggaatacctaatcttgcttctggagttgctccttatcacacccatgtaaaaccaccagccttggggacatcaaaatctggaaattttacttttcaatcacatctgcccaatgcagactatggtcaagtgttttctgga

SEQ ID NO: 30078 - DNA, 257 bp, Glycine max
catctacaatccccaccaacccctttgctctcacttctttacttacactgtactgagtacatcaatcaaaatcttgtctttcacaacaagattcaagttcaactatgtttagatccatgactactcggagagggtatgaaagattaggtaaagaatctgccaccactgcacttttgcatgaggggttcaagaggagcacaagtttgccttcttggggatccaattcttcaagaaaaatggctcttggttccacctat

SEQ ID NO: 30079 - DNA, 501 bp, Glycine max
ctctcgcacgtgcgcaacaagtttgtttagtcttcgtcctggtctactctcaactcaagtctgaaaacacaaaacctaaacgcacagcactttgtagttaaccaccctccaccgagccgtcgaaccacccccgtctgccggcgtcgcacctcgccaccgacaaccagcgtcggcgcaccactgcaccagagcagtaggccgtcgcagtcgcacgcggcaaccaccagccaccaagtcttcgtagcagatctgtgctttggctatggaaaattcagagaaggtggtcgctgtgatcatggtgggtggacccacaaaagggaccagatttcgacctctttccttcaatattcccaaaccgcttttccctttggctggccagccaatggttcaccatcctatttctgcttgtaaaaagatacccaatttggctcaaatatttcttcttggattctatgaggagcgagaatttgctctatatgtctcttcaatctcaaatgagct

SEQ ID NO: 30080 - DNA, 457 bp, Glycine max
cgccgttgtgccctcccgtaagaagatgaggatgggctcggcggagtggaggccgtcgctggggtcaatctcggaggatgttacgccgccggcgccggcgctgagggatagagagagtccccggaaaggtgaggtggcctccgctggaagggacgcgaagaagaggagcgccggtggtggcggaactgccaaggttcggcaccggagtttcagcaacgcttattacgggtcagcaccttccatgccgacgatgataccaacattctctccgacgccatttatgttctaaagtctaaacattagacttgaatttataatagcaaatgtgtatatatacgtactacttgaattggggttaaaaaaaaagcactgtacaagtgtcattttgcattgtgaatgcaactgtagcctttttttttatcactccattgtttataaatgaatacatattcttcct

SEQ ID NO: 30081 - DNA, 593 bp, Glycine max
cttatctatctagaacaaacaaaaatgtttcgggttatcaagtcaaagttgtgctctgaccgtacctttgacaattaataatctcttgcaacctgttccatcttcgctgtccttaattcttaagaaacataacatcatcagcttccccctccaactttggttaatttgatccataaagaattagaccatggaacacttagacatggtgagtgaagtgaagcaccaaagaatcaaaaccaacgggatatggatacacgtggcagagaaagggacaggtccactagttctgctgcttcatggcttcccagaaacatggtatgcctggcggcaccagatcaatttcttggcccagcatggctatcatgtggttgcacctgatcttagaggatatggtgactctgattctcctattgatcccacttcctacactatgcaccaccttgtaggtgacatcataggtttgcttgatcattttggtcaacaacaggtatttgttgttggatctgattggggagcaaacattggatggcatctgagtctatttaggcctgacagagtcaaaggatttgttgccctaagtgttccttactacc

SEQ ID NO: 30082 - DNA, 264 bp, Glycine max
ctttttctgagcaaaacattcaccttttggaattattaggttatctttgcatccgattttcaatggagaccccatcatccaccagaagagtaacaagatcacaggctttgtctgcttccaatgatgccctcatcacagtttccagaaagattgaagattctgaaaagaacgcatcaaagtcaaaatcaagggtgcaacaacaagaccaatccgcactaatagacataccaaatgattccccaatcgtgggacttgcgaatgggg

SEQ ID NO: 30083 - DNA, 274 bp, Glycine max
gcacttcgtgtgactaagggaatacaagacaccaaatctgattctgccaaaaatatgctgcctaacacgactgttgattcaataaccaaggaagaatctcgtcccccatcgccagttcccagattaacaaagacagaactcatctcatctgctttgaaacgccttggtgagcttgaagagaaggttgacatactgcagtcaaaaccaaatgtcatgccatatgaaaaagaggagctgctgaatgctgctgtttatcgcgtggatgcattggaag

SEQ ID NO: 30084 - DNA, 519 bp, Glycine max
aattcaagcaaacttggctgatgttgctgccacattcatcgggattattcgagccctgaaagagaaggaatcaaagcttaaagcagcgcaaatgcacatatatgtcagaagaggtggtccaaactaccagactggtttggcaaagatgcgtgcattgggggaggagttgggagtaccaattcaggtttatggaccggaggccacgatgacgggtatctgcaaacaagctattgattgcatcatgtccgaagcataaagaagattaatttttgtctcatcatgtttcatttgtgaaactaatttggtggtgttttgatggatatattgatataagtccataatctgaaccaaagcaaagagtaataaggtgaagatgatagatgttacaagcctgaaactgttaaattcttatcttttcttcctattgtgattttattgttatattttgactaaacattataaaaatccccaatagtatccgtgaaaaatgtaatcttagttggcgatttttcctcaaaa

SEQ ID NO: 30085 - DNA, 326 bp, Glycine max
ctccgttgttgtgaatcaatggcttcgagctctgcggcggaaggagtatcaatggacgatgattacgaaaccttgattgcaaccaccgacgtggagcttctgaagagagcgtggcgcaacgagaaggcggccccagagattctccgctacgaatctaaattggtttcccgcgtcaacaaagtcattcaactcatggaagaaattgtggaggaaaaatccagtggcggtactgatcctctttcggtgtctctatatcagatggacttggatagaactctctttttgttaagatcctatctcaggattcgcatccagaagattgaaaa

SEQ ID NO: 30086 - DNA, 724 bp, Glycine max
gttttccgggaacaattttggggctctttggccgggagatggtaagccgggtctgtggttgaattcaatttccaggatgggagcagtgtacactttgattgcgagagaggaagagattttcattcaagagagaaaaaggaaggtgggagtagcagttgtgcctgatctcgagagaaatgaagatattgagttggtattgccaccggtgttcgattactgtagaaaggttttggaggcgggagatcaaatagttgcgagggatttgtactgggaagctgtttgtgagggtggtagcaaggcggaagagttgttgctggagtctatagagaaaaacccgtttgttggagagccatatgtggtgctgagtcaggtttatttgacagaggggagatttgaggaggctgagaagcacgcagagagaggactgaagcttctgctggaatggggatgtccgtgggacaagaggacttcttgggaaggctgggtggcctggactagggtcttgctcatgagggcaaaggacaaatcttggcctcagacttcatggggcatcctcaatttgggtcttgtaaactaataatgccttatcatctacttaatgccatccatcccccgatcatataatattctactaaataagccataagtacaaggttagtgcatcagaaaaaggctttcaacggtgttatatctttctagctagtactatattttttctcttttt

SEQ ID NO: 30087 - DNA, 368 bp, Glycine max
ggagtgtccaattgagggtgaacaatgctgaattggctcaaagatctgcaccagcaatggaacatggtgggaagttacctagagtctcaagcagtccattgctcaaaacacttggatctcaaatgggtgcccaagagaacaagaattcagcaattcatcaggagcaaggagaaattggaaggggccaatccccaggaggaatccacaatttctgagcaagccccaaatggggaaattggggtgaaaacttcacaggatatgatgaattccaggaaaagaaaagcttcttcgaaaggcaaagccaaagaaacttcaaactcttttaatcctaccaagggtgttgaaggtagtgaggattcaaattcaaa

SEQ ID NO: 30088 - DNA, 477 bp, Glycine max
gagagatgtgagattaacgggtatgtgataccagccaagagcaaagtcatagttaatgcatgggcaattgggagggatcctaactattggattgaagctgagaagtttagtcctgaaaggttcattgattgctcaattgattacaaaggtggtgagtttcagtttattccatttggagctggaaggaggatatgccctggcatcaatcttggcattgttaatgttgaattctcacttgcaaatttgcttttccatttcgattggaagatggctccagggaatagtccccaagaacttgatatgactgaatcctttggcttgtcactaaaaagaaaacaggatttgcagttgattcctatcacttaccacacagctgcataattgagtgtcattaactctttatcataaattgaaaatctcagttagttatatgatggagaaaatttgtttggacttaggaccatggacatgcaatct

SEQ ID NO: 30089 - DNA, 556 bp, Glycine max
tctctaaccattctcttgaggctgcaaaggttgctgtcacgtcgtttgttagaagtgcattttctcatcttctacaagacatctcagattccctcttacaaatcctgaaaaaggaaggagcagaacagtgcactcttgatgttgttcttgatgcaagtacaaaagcagttcttcaaggaggactgaatgtgttgctggactttcgcaaaattttagatgatgactctgggatcctagttagattaagagagttaatcattgattgggttcaagaaggacttcaagacttttttaggcaacttgaggatcagttccttctgttttcgggaagaaatcattcatctattcaagtacacgctttggcagagggagctcaaggtgataaagcttttgctggccttgtcctagtgctggcacaattgtctgctttcattgaacaaaccgtcatcccaaaagtcactgaggaaatagctgcttccttttctggtggtagtgttagaggctatgaatctgggcctgcctttgttcctggagaaatatgtcgaaaatttcggtc

SEQ ID NO: 30090 - DNA, 619 bp, Glycine max
aaacgcatcttgattttatttaaaaaaaaaaatagaaaggaagggaaaatcgtaatattttgtcctttttttattttatagaaacaattggtgtgaaagtagcagcatattagcggtgcgtgattgattctgtagcgacaaccgaggaagcctctacccaagttcattccgttgacctttttttctaatgatggcggaatcgggcgaggaagagatagttggtaaacctgtccaagagctgctgttgaatcccgaaaatctaccaaaaaattacatctacgaggaaggtggtgctggatttcgtgatgctcttgtgccatcacaggatgatgatattccggtgatcgaccttcatcgcctttcatcttcatccatctgcactacaagagcttgctaaactccaccatgctctccattcatggggctgcttccaggcaataaaccatggaatgaaaagctcatttctggacaagggtgagagaagtttcaaagcaattctttcatcttccaaaggaagaaaagccaaaatgggcgagggaaccggaccatactgtaggatatggcaatgatataatatattcagaaaatcaaaggcttgactggactgacagagtttacc

SEQ ID NO: 30091 - DNA, 192 bp, Glycine max
ctttccgcatgccaccatattatacactggtcttgcgatccctacccttcattggaacgtttggcgattgctgcagataccaatttccagacttttgaagctgcatatccttatggtgttcggaaacttctcacagagaactcagctgccacaaggaatatattgcattcggtgcttctaaaccaaaggaag

SEQ ID NO: 30092 - DNA, 305 bp, Glycine max
gggacaggaaaatctagccttattgctgctatagccaactacttgaagtttgatgtgtatgatttggagctaagctctatgtgttctaactcggaactcatgcgagtcatgagggaaacaaccaaccgctccatcatcgtcatcgaagacatagactgcaacaaagaggtgcatgctcgaccaacaacgaaaccttgttcagattcagattcagacttcgaccgcaagcgtgttaaggttaagccttacaggtttactctgtcgggtctgcttaacaacatggatggtttgtggtcaagtggtgg

SEQ ID NO: 30093 - DNA, 275 bp, Glycine max
gtctgcttcaaatcttccggatggtgctgggcgttcttttgctacgcctctctctggttctattcagggattgcacaacattcatgggagctttaatgtacccaatatgcccagtacactcacgtcaagaaactcaacaataaatagcgttccaactgggggaggagttcagcaaccttcggcaagcctttctagtggaagatttgcatctaataatctaccggttgctctgtcacagctatctcatggaggctcccatggacattcaggagtca

SEQ ID NO: 30094 - DNA, 307 bp, Glycine max
  unsure (1)..(307): unsure at all n locations
ctctcactntgacttccccgcaaattgagtcccttgaggtacaaggttgtagctggattagggtccctgaaaccaagcatttgaggaatctttccatatccaacagtgcagggagagtgtatatggttgattttggaaatctttcagctctggagtatctgtgtatgagaggaatccagtggtgctgggatgccatttgcaaaatgctgagattggcaagtaaggtgaaacacctctatatgaaggttgaattcactggggactatgatgcacttcaaccctttccagagattgattttgttgactt

SEQ ID NO: 30095 - DNA, 294 bp, Glycine max
aagacaataatattttcctgttgaattcaggctccccccttcgttctctttcggccaacactctaccgatcctctcttcagtcttcatttctctttttttctcttcatatcttcctttctctttctctgtgtagcttctttcgttctctttttcactctctccctctgcctttgaatttctgtattttgcaacatggccagcgacgaagcatggagaacctctgaagagcagaacgagtcaaacataatcggcactagcatatcgcccaacaacgtggaatctgggataactga

SEQ ID NO: 30096 - DNA, 412 bp, Glycine max
tgcatcatgtcgcggtgtgaccactaaaacgtgtcatgttcaaagaatgatcctttaatccttcatgaattgcatatgctgattcagtgaatactttggtaaggctagcctattttttcggagaactgataaggctagctttgccacaaagagaaggccaccacacacacacacacatataaactgtgaagttatataggttgtcatagtgcttaaaagctaaaagaggtttttatgacattttggcaactgacacaaactagttacgcccctttaagcctcagggtgcgatgtaatcttgtatcatttttgtactcccctaattttacagaacaaaatgtaaacaccaatgatattgtaacttgcttagtttgaaactgctgtcagctaaatattactatttgttattacc

SEQ ID NO: 30097 - DNA, 553 bp, Glycine max
tggacgcgtgggtttttaacgatggagttcagttcatgacagaccctattcttagcaagatttagatttttaactaatttatgtgttggaggaagtttataaaaaactttaggaaatttgtatctaaactaactcgatacaattttctaagttttactcacataaataagttcggaaattagactgcggaaggtgggggaataaatccaaataccaagttgctaatttactcctttgaaaactatgcctcggttcagtactataaataaatttgttgtcttgtcgtacacaaaatgtaagtctttgttgtagtgcaagttgcgtgagctaaataacgtgccagtcttaaaaatttaagtctttgttgtagtacaagttgcgtgagctgaataatgtgccgcacctttttttttgttggagatttagaccgttgattattatgtgtattctgcaattgaatagatatagagaaagagacccgggggttgaaaacttgatatccatgacaatcatgtgatatatatatatatacacacgaaaaataatactacct

SEQ ID NO: 30098 - DNA, 267 bp, Glycine max
cggaaacagttttcgtcgttcattcatcagctgttctcttcgtttttctgcctacaatggatgagaattcagctacatatggaacccatgaggtggttttagatgtaaacagggacgtctctagaacaactcaagcttcacgctcttgtgtcaatgtttctttcttgcagaagttggtagctgaggtggtaggcacgtatttcttgatatttgcagggagtgcttctgtggtggtgaacaagaacaacaaaacgttgtaacacttct

SEQ ID NO: 30099 - DNA, 410 bp, Glycine max
tagacatgaaagacttgccatattgacagtgttattacctaggggaagccttttcaaaaatgtgcacaggaacaatcagacattagacatcagaaggcgcctaaggatggctcttgatgttgctagaggaatgaattatcttcatcacagaaatccaccaattgtgcatagagacctgaagtcttctaacctgcttgtagataaaaactggactgtaaagttttttgtcaggttggagactttggcctgtctaggttgaaggatgcaactttattaactacaaaatctgggagaggcacccctcaatggatggcccctgaagtcctaagaaatgaaccttcaaatgagaagtctgatgtgtacagtattggtgtcatcctctgggaactaatgactcaatctattccatg

SEQ ID NO: 30100 - DNA, 354 bp, Glycine max
ggactttacccggcatgtatcaagtatttaatgtcagcttttgatgtgccagaggtcatggcagtctcccggagcaatatttgcaacaatggattagagtctatttcccgagggggtgctgtaatatgttatgcttccgtcttcctttatttttgggtcttctcgacccctgttgtttccttggtgtttgggagctacttatacatttgcatcaactggcttcacttacactttgatgaagccttttcgtctcttcgaatagctaattacaaatcattcacacggtttcacatcaattcggatggtgatcttgaagtttatactttggctgttgataaggttccaaagtaatgg

SEQ ID NO: 30101 - DNA, 577 bp, Glycine max
ttccacgcgtccgcaaatgtagcacatactactattgacaactctgagctattgtacaagagtgataaacctgaggttttagcagcagttctaacgtgtgaagatttagaacagtcaattttgtctcaagttggtgaaaatggctcatcacgtccacagcccattcaggacaaagattttgatgcaaaatctgagcagttgactccagttgataatcatgcatcccaccacctcctttctttgttacagaaaggaacctcacacaatgatatggaactttcatctattctagattcttcagacaaggtgcctaatactgaaggagtcactactggcaatgttcttgataatcccggagaagcaaatgttgatgtttccaattcatcaaagacattgacactggaaacactttttgggtcagcttttatgaaggagcttcaatcagttggagcacccctttctgttcaaaggggttcagttgcatctgcagggcctgatgtttcacaggctcttttgtttcctttccctacctcagacaatgttcaccctcctacaggtgaacttacgctgaacaggc

SEQ ID NO: 30102 - DNA, 427 bp, Glycine max
cgtggcggcggctttggtggtcgtggtggcatgagggatggaggtagtgggcaaggtgggcgaggtgatttctttcctggtaggggcaacacgggtaggggatccggtggccctcgtgggggtcatgttggttggggtaggggtgaacgtggtatggatgatcggtacaacatggaggggcgtggacaaggtcgtggacgtggaagatttgacaatagaagagatgtttcttccaaaggtagaggcagaagtcatagtcgtagccctgaaagagtcagaacatgggattatagcagaagtagcagcagaagtcgtagcagaagtagaagcaggagttggagcaggggccgtagtcgaagccgcagctggtctcgtagtcgtagtcgtagctatagccgtagtattatgccacgtcgtaaccgcagtc

SEQ ID NO: 30103 - DNA, 276 bp, Glycine max
ctcttgtttttttcttttcttgattctttgcttgtttctggacaatgctatcaagatcttgcttggggctatggaatttggtatcagtggatgattaccacgcgctggctagtcgcgctccgcggctggtgaatacggcggccggagacttgccgggagttagacatcgacggcatggagaattcgggatccgacgacgccgttgcgccggcgccgctcgagcggaggatcgtggtcgcgaatcagttaccgatacgcgcgtttcgcgaggggaag

SEQ ID NO: 30104 - DNA, 518 bp, Glycine max
cccacgcgttcgcccacgcgtccgcttattaatgtaacattttttttgcttttagttttgaattcctctgcttcctgctttggttctgtacacttatcaagcaaccttaacatagctaataaggcccgaatcttctatggtacaagtaaagtgttttttctatgaagcattaatattctcactgcatgcggaagtagcttagttatggctgcaaagggacagaaatttgtgaggtttaaggattggcagtcactttcttcttcaagtattgaacacaatgattcttctaatggtggatttctcaaaagagaagttcaaccaagcctaagttctgtcagtgatggatcaataacaaatttgtcttgtcggaaccatgttcttgatccacagggggcaacacttcagaagtggaacaaaatttttgtaatcacaagtgtgatggcaatctctgtggaccctcttttcttttacatcccaatgattgatgacaagatacaatgccttgctttagatggaac

SEQ ID NO: 30105 - DNA, 394 bp, Glycine max
  unsure (1)..(394): unsure at all n locations
gtaactaaaattaagcatgaaggtgcatcagttcgcacgtggattctgggagcacgaaccctccctcacactcgggtgcaaacgcttacgcccccttgcccccaagctttccaacaccgacaccatttctccacctcatcatcctgttacaaccttcgacctcaagagcttcatcaaacctgaaagtgcctccagaaaacttggaattggatcctccgatgataatactaataagagagacccatcttcaccccagggccaggctgaaacgcatattccaggagggacacggtggaatccgactcaagaacaaatagggatattggagatgctgtacagaggagggatgcgaactccgaatgctcaacaaatagagncagatcacagcacagct

SEQ ID NO: 30106 - DNA, 244 bp, Glycine max
gagagagctagaaggagctaagggagattctagtttcctttgtatggaagctaagcctgtggggctcactgaggtgaaaattggtgaagaatatgagattgtcgtcaccaatccagcaggcttgtacaggtaccggctaggtgatgtggtcaaggttatggggttccataattcagctccagaaataaagtttgttcggcgtacaaccttcttctaaccatcaacatagacaagaacacagaga

SEQ ID NO: 30107 - DNA, 299 bp, Glycine max
gacacacagaaagaaagagagagatagagaaaaaaaagcaaagcaaagaaggttcacgttcacgttctgttctgttctggttcacactttcacgagcctatcaccgactctctgcacctgcaactgcaacttccaacttcaacttcaaccactgcaagcttagctctgaaagaaaagaaaagaaaaagaaaatatctccatttggtttggttggtgaaagttgaaaccttttcacgagctcaagttggtagtaacttttttaacttggcggtctctttttttctacatcgactctcgtt

SEQ ID NO: 30108 - DNA, 400 bp, Glycine max
gggctttgtcagcaggccaagcttatgaggtaatgaacaatgcagggttccttgattctaacatgatagatgtacttaatgacaacaaacaagtctctttaccaacctgccactactttgatggtcctgcaatctccgagtatggagccctcagttgttgctttaagcaaaattcaagcaagttctgaattccgcaaactcagagaagctgcaaaaaccatcacaaagcaaattggaggacaaacacatcaggtcgctgcaaaagtagatgagtatgcaagaggcatgatcagtgcttctggctttactctttttgaagagcttggcttatactacatatgtcctgtggatggtcataacattgaagatctggtcaccatctttgaaaaagtgaaagcaa

SEQ ID NO: 30109 - DNA, 336 bp, Glycine max
gctctcaggaccatcaaccttctaaggagaagagtccttggattgatgagattgaccagtttccagtcgatgttcctagggtatcttccatttaaacaatgaattttttaaatatttgtgtatcactatcagcattaggtggtagctgttggactggtgacattctcctgcaaagttgttgtaatacattgctaatttcggagtactctaggattttatttttaggacacaacttagaatgcgatgcaattctttagatgtttttgatatattctaataagaattgaaagttttacctcggtaacttgtgttgatatttaatgcaaatctttatta

SEQ ID NO: 30110 - DNA, 284 bp, Glycine max
aatgggcgacaccgtgagtttgcccaacttatcgaccaaagtagtagctattgctgcaggggaagcacacactctccttcttacaggggatggacgtgtttattcctggggaagaggaatactgggacggcttggtcaaggttctgaacatgacaagcattttcctgttgaagtcaagtttggatcagaagaagacagcgtaagaatagtgggaattgccgctggtgcttatcatagtcttgctctagcaggcttctccacagatgtcgataatgctcctggct

SEQ ID NO: 30111 - DNA, 466 bp, Glycine max
ataggtatatcttcatatatggaggtagcgacaagtggacccgagaattcactgtggcagtggataaaattaaaaggcacgatacaataaggagggcagatgcaataatagactattaccatttaggaaaggatgaccccaagatagttcctcgattctggattggcttagaaggcaaaaggcaaaggagccattccgagattttggactgtgagatccaagaaattatcaggtctctgctctgcctcaagcaggatacacaaggatgggccattctgagcaaagggtccaatgtgaggattctgggtcacggccaacctatgtatcaaactgtggcagattttgaaaagtggaaagaaagagtgcttgtcaaagaaggctttgacattgcattccaagaatattatgaccacaaccgtgatctacctgctcctaaccatgtgaattaacacttgggatgtcctag

SEQ ID NO: 30112 - DNA, 632 bp, Glycine max
aaaatctcctgctagaaaaaacactgacatgacaccagcaagtaacatttacagctttggtgttatattatttgaaatggtaactggcagactcccttattcagtggacaatgatggctcacttgatgactgggcttcacactatttacaaggggatcagcccctcaaagaaatggtggatccaactctagcatccttccaagaagaacagctcgaacaagtcgatgctttgattaaatcttgtgtccatcctgatcaaaagcaaagaccaacaatgaaagaagtttgtgtgagattaagagagataacaaaaataacacctgatgcagctgttccaaagctttctccactttggtgggcagagcttgagattgcttctgtagatgcaagctgaaatcgctaattcgggttgtaagtatggagttcttaccatcctcatcctttttccatcggtgaaggcacagaaaatgtattcacctgtagattaatacatcttgtgttaattatagaagagtggcaaatcacatgtacataagggagataaaagaatgtgattttttcttttcttttcctggggtgcttcgtttggttatggtttatgaaattacactaacaaaaaaaagtttcacatc

SEQ ID NO: 30113 - DNA, 279 bp, Glycine max
ccgtaacggaatccgaaggctcctcttctgctacctcaacgttgccgtcttgggttgacggacgagctcgtggtgctaaaacgattggaaccaccgaaacgacggctcaggtgcatccgaggctcttcactcgcacgctgattgatagagcggtggagaagcatggagtgaaggtggagattgcgaaattggaacggttggttgtggcagaaggacgagttggatcggtggtgcttgaaggaggacgagttttggaagcggattctgttgtgttagcat

SEQ ID NO: 30114 - DNA, 602 bp, Glycine max
aaaatctgtttctggccctccacaaaagaagagggcattccatatgagtgcacacgaggattgtctggatctggatgatgatgcttatccaaatggagctgtcgcttctttttctcctgttcagaaagaaatgacaaactccactgctgtgatggagaaaactacttctggtactgaagcaattgcagaggagaatccatcagcattatctgtaacagggccacctaaaagttctacagcgcgatggtgaggctcatgttgggactgccgatgagtctagggttggtgagaaagttgatgcatctacctctacgacatcagctatccttgatccaaccttcaagccatttacatcagctacacaaacaagttttggttttatcaagcctgcttcaccaagtggatccattggtaaaccttcctttacttttgggaataaagtggtttcgtcgacggagtttatggctcctggtgctccatcaatggagataaccaaatctggtccaatatttggattggaaaaagttgtttcattaagggagcctgttgctgatggtccattggttgactttggctccaataaaaatgttaacaaggttcca

SEQ ID NO: 30115 - DNA, 708 bp, Glycine max
ttgacgcgttggctgccaatccaaatattcagtacgagagaacgggccctgagatttggagggactcgggagagaaaattgatgctttggtttcaggaataggaactgggggttcaatagcaggagctggaagattcctcagggagaaaaacccggatattaagctgtatggtgtggagccagctgaaagtccagttttgaatggaggacagccaggtaagcacctgattcaaggaattggtgctggtatcattcccaaagttctggatgtaaatctcctagatgaagttattcaggtttcaagtgaagaggctatagaaactgctaagctgcttgccttgaaagaaggtttgctgatgggaatttcatcaggagctgctgcagcagcagcaataaaggtggggaagagaccagaaaatgcaggaaagctcattgttgtgattttccccagttttggagaacgttacttatcttcaccactgtttgaatccattaggaaagaagctgaacaaatgacatttgactaaggtgcataaatagcttaggttagtacgcactgagtactcgttaagcaagcactactgtcggtagtgtggtctaaaataagttgaataacatttggattgacacttcaagcttcaatttttatgcaaaagttgttttcactcatccaaatggaatcaaatcaaaatagtttaatttttatgc

SEQ ID NO: 30116 - DNA, 556 bp, Glycine max
gtgaagaggctatagaaactgctaagctgcttgccttgaaaaaaggtttgctgatgggaatttcatcaggagctgctgcagcagtggcaataaaggtggggaagagaccagaaaatgcaggaaagctcattgttgtgattttccccagttttggagaacgttacttatcttcaccactgtttgaatccattagcaaagaagctgaacaaatgacatttgactaaggtgcataaatagcttaggctagtactcactgagtacccgttaagcaagcactattgtcggtatagtgtggtctaaaataagttgaataacatctggattgacacttcaagcttcaatttcttgcttatgaaaataacccaacattacttatatgggatttcaaaagttgttttgcactcatccaaatagaatcaaaatcaaaagtgtttaattttatgtgttcataatgtaaaaaagtttgtactatcaaccaatcagaaactaggataagtataactgtaaaagtcagcaaacttttcacacatgacagtttttgattgaatgacggtat

SEQ ID NO: 30117 - DNA, 439 bp, Glycine max
acgaggttgaataacatctggattgacacttcaagcttcaatttcttgcttatgaaaataacccaacattacttatatgggatttcaaaagttgttttgcactcatccatatagaatcaaaaccaaaagtgtttaattttatgtgttcataatgtaaaaaagtttgtactatcaaccaatcagaaacttatcacacatgacagtttttgattgaatgactgtataaaatttcattagactgtcaaaaaaaaagctatcttcattatatcaaaactgttacacggtggcattcttgtctaccattacaataagaacacacggaaacttgataagttatcttgcagcttgatcttagatgcaagaacgcatattgttaaggttctctatcggacggagggacttctagtatgacaaggttggtgctatagacgagtactcc

SEQ ID NO: 30118 - DNA, 393 bp, Glycine max
actcacggaattcggctcgagaaagatcatgagcactttgtttgtcgaggagaacaaatacaagcagcgggtttggattcgtggaagtcgaccggaggaagaggagatatttcaacttacaatggttcagaaggttggaggatgctgggatggttactggttaacagagtctctgcttcacgatacggatacatttgccggtggattagcatattgaaagtcatctaatgcaggaatcaggctcgtgaggttccactgtcaaaagcatgaaatgatctgcattcctgcaactactatcctaatctgtaaaatttgtgtacatatgtaagaaattcagctgttaatatgtgtatataattggtcctcgctaatcaagtgtagacattcttgtaa

SEQ ID NO: 30119 - DNA, 337 bp, Glycine max
ttatcatttctcactagctgatcttgttatctactatactttatacactatattgcatattgatcagtcattattgcatattaatagaatggaatcacgtgggtatttgttttttcttctccaaggcttagtgtttgcagcccttgcaacctcagctttctcacaattgtcacctaactactatgactactcctgccccaatgctttgagcaccatcaaaagtgttgtggaggctgcggtgcagaaagagcaccgtatgggtgcatccttgctacgcttgcacttacatgattgctatgtcaacggttgtgatggttcagttcttctagactccaca

SEQ ID NO: 30120 - DNA, 560 bp, Glycine max
ccctctcgtgtttccacgcgtccggtgaagcaacagggttacgaagcaagtagtagcaattagcaatggcgtacatgagcatgggggaagctcataggaggatcacggagtatctgaatcgcttttccgacgcgatttcttcccaagacggagctacgttcaagtctctcttcgctctctcttccaactccccattccttctctctctgggcgacgcgctcaacctcttccaagaccccaacagactcatcaagcaatccgacaactattcccagttcgcagacatcctcgtccctctcttccgatccctcctaaactaccgccagaacaacttgctcgaagcctataacgctttcgaaaaaaccgccaatgcgtttatccaggagtttcgtaattgggaatccgcgtgggctctggaggctttgtacgtcattgtttacgatattagggttcttgccgagaaggctgataaagaattggcttccaatgggaaatcccctgagaagttgaaaggcgctggctccgtccctatgaaattttttggcacccttgcgggaaaa

SEQ ID NO: 30121 - DNA, 273 bp, Glycine max
cttttctcactaaccaaacatgaatatcaaacccatcatcatcctagctttcttaatttccctctctttaacaaacgtcgtcgtttcagctcgactctttcccaacgtctcctcctggctcaacgcccacgcccctactggaggcgcgtgggatgcctttctcaactttaccggttgtcaccgcggcgacaagtacgacggcctcgccaatttaaaatcatactttgaacgattcggttacttccctcacgcgccgccctcctcgaatttctc

SEQ ID NO: 30122 - DNA, 507 bp, Glycine max
cttgcattgatggcagccgctatgttggggagttcaaatggggagtcaaacatggacttggacagtaccatttcagaaatggggacatatatgctggtgaatattttgcagacaagatgcatggttttggagtgtatcaatttcagaatggtcatcggtatgagggggcatggcatgaaggaagaagacaaggactgggaatgtacactttcagaaacggggaaacacaatgtggtcattggcagaatgggattcttgatgatcctaaaagacataatagtcctactgggtctccatgtgctgtggaccatgccaaggttttcaatgcagtacaggacgcacattctgctgctgagaaagcttacaatatggcaaaggtggatgacggggtgaataaagtagtggctgcagctaataaagcagcaaacacagccagagttgcagctgtaaaggctgtgcaaaataggatgcaccataataatagtaataataaatgataataaccca

SEQ ID NO: 30123 - DNA, 425 bp, Glycine max
ctgaaactgaattcacttcttcatcccgtttatggcctgattgattagcttgtgattatagtttagatgacttgacctcaaaaattggtaaaataacttcacctgttgcattgaagcagtgacctcgtgttgagcctaactactatatggttaaaaaataaaaacacttctgtgcttgattgtgtctatttcgggctctaaatcctatcattgtagaaataatgattcttgcaagtaaccagtatgtgaaactagattatatattgtcatgacattgtttctaagttctgcacaacttgtttgatattttatgatgctgtgtggggaatcaggtggcgataacatcttatagtgatagttctataactatttgtatgtatgtatgtatgtatgtatgtatgtatgtatgtatgtatgtatgtatg

SEQ ID NO: 30124 - DNA, 540 bp, Glycine max
atccaacgaggttcttgggatgatgtttttaaggttgctgttgcactgtacataataggcacattggtctggaatatcttttcaactggagagaaaattcttgactaaagaatgtaatgatgatgtcaatgaaggtgtatgctacataagccgtacaagtttaaaaggaaaaagaaagaaagatggaacaaaatcaatgaccaaatttgtcaagcgcttggaagcgtaaaagcagcctgcagaaatcgaagagagcaaccatcaaagtttttgatcaaatagctgaaagcctttacattttatctagaaatcttggattaactaggcaccttttgcaaatgtcttgtcccatgatctaaatggtttctgtatagatggtggataatgtccacttatataactcaagcatacttatgcttaaagttaaaatacatgttatatggccaactctgcttcttcatcatacatggctgagaaaattggtcgcacagttttctgattcaatgtcccctaacaaaagacatcagtatatttactttt

SEQ ID NO: 30125 - DNA, 573 bp, Glycine max
gttatatctgaccccagtacacccaagcctaatccagatccatttttatacattcttgaaggaaagtctgatcattactttgaaatgcgagatggggttattcatgtatatccagatagggatgcaaaagaagagctttttcctgttgctgatgcaactacatttttcactgatcttcatcacatacttcgagtcatagcagcagggaatataagaactttatgccatcataggctcaatcttctagaacagaaattcaatcttcatttgatgctaaatgcggatagagaatttcttgctcagaagagtgctccacatcgagacttctataatgttagaaaagttgatactcatgtccaccattcggcatgcatgaatcagaaacatcttttaaggttcataaagtcaaagctgagaaaagagcctgatgaggttgtaatatttcgagatgggacatatctaacattggaagaggttttcaagagtttagatttaactggatatgatctcaatgttgaccttttggacgttcacgcagacaagagtacttttcatcgctttgataagttcaat

SEQ ID NO: 30126 - DNA, 459 bp, Glycine max
gctcaacagaaagcagcagcctatactcaacagcaagctgctgctagcttgggtggtgcggtcaacgcagatggtgctcatgaattgagcttgaaagaagtcattgaggctcatgctcagcaacatggtttgctattcaagattaaacctggtagaatgcacaatggtcatcaaatatatgggtttggtaatgtcagcataataatagattccctaaatcaaaaggtatatgcccagaatgaagaaacgtggtctttggaatcacttcaaggcttgctagagttgcataataaatcccttagtaaaagacgctgaattcagcatttgccaaatgtgaagtatctcaattgtcaggcagttcaacttggaggtttgttgaaactaatgctcaggaagatgtctttgcagttgaaaaatccgccattcgactccagattggttgctggtcccaatggaggg

SEQ ID NO: 30127 - DNA, 489 bp, Glycine max
gttaatatcgcttgtcagccattgctgctactcctgagaatggtgctggactcatgtttgctccatcttatattgatgttgtggtcaaaagtcccctgttgaatattgaatgttcacaagctttggtcaatagtcatggtgcggcatcctgccaggagaaatgtggcccagttgtatccgtgactctggtgagacaggttgataaacgcaatgatgagagaaagacaattagcttgaccaccgagagtagtgaatttctgttttcagatgttattcctggaaaatacagccttgaggtcaaacatagttcccctgaatcagtgaccttggaagataattggtgctgggaacagagcttcatagatgtaaatgtggtgctgaggacttagaaggaatcctttttgttcaaaaaggctactgggtcaatgtgatctccactcacaatgttgatggttacctgactcaacctgatgggtcaaatgtgaattt

SEQ ID NO: 30128 - DNA, 330 bp, Glycine max
ggaacaagagagtgatagaagtctcacatggaaagaagagtccaacatctcacagagagaagagccctttgataaagcaactttagtatgtccagagcatgaagtaaaccactacgattttcatatcgtctacagtgcttcatatagagttccagtcttgtacttccgttcgtaccgtggtgatgggcaacttttgccgtttgatgaaattgaaaaggaccttcctggtcactctgcgaagttacgatcagaatccaaatggacatttatatctcatgaggaacatccatatttgaacaggccatggtacaaattacatccatgtgggac

SEQ ID NO: 30129 - DNA, 414 bp, Glycine max
acgagaaaagtagaaaactacactcttgaggtccattctcaatcttattaatatatttttgtgtagatgaagatcaacaagagaaggtgttgttgtgagttgtgttgttatggtaccttccttcaaccacaaaacctctctccctctaccacccattctcttctctctctctctctcccgtcctccatctctcaccttctcaatctcttcaccaccaccatcatcatcattatcttctccaatctctataacctcgaaatccctcaaaacctctccctcaaaccaaatgaaatgacccttttgtgagaacattttttccccccttaagaaaaggtcaaaggctgcaactttttcttaaccaatctcacatttttttatttttcaacgtattttggccaggtttggttttctggg

SEQ ID NO: 30130 - DNA, 770 bp, Glycine max
cagctaactattagtgactataatcgatcaattttcaattttcaattgtgcccatcttcgttgctgccaccatgcataggatcaacaccgcaaggtccattttttctgctgttttcagaagcaaatctcggcctcactctgctgctttctccacctccttgctcttcgacgaaactcagacacagtttaaggaaagtgttgctcaatttgcaacggaaaatattgcccctcatgcttcgaaaatagaccaaacaaattatttcccaaaggaggtgaacttatggaaaagcatgggggaatttaatctccttgggattactgcaccagaggaatatggagggcttggcctaggttacttgtatcactgtatagcaatggaagagattagccgtgcttcaggatctgtaggtctttcttatggtgctcattcaaacttgtgtatcaatcagctggtgaggaatggaagccctgctcagaaagagaaatatttaccaaagcttatttctggggatcatgtgggagctttggcaatgagcgagcccaattctggttctgatgttgtcagcatgaaatgcaaggctgatcgtgtagatgggggctatgtacttaatgggaacaagatgtggtgtactaatgggccagttgctcaaacattagttgtctatgctaaaacagacataactgctgggtcaaaaggcattactgcattcatcattgagaagggaatgcctggattcaatactgcccagaaattggataaacttgggatg

SEQ ID NO: 30131 - DNA, 608 bp, Glycine max
gcaccagctcattagcatcatcatagctcgacttttgttactacctattattggattgtttattgtaagagcagccgcaaattttgacttactccctgttgatcctttatttcaatatgtgctggtgatgcagtatgcgatgccaccagctatgaatattagtacaatggctcagctgtttgaagtaggaaatgaagagtgttcagttatcctcttgtggacatatagtgctgcagccatagcactcactgcctggtcaacattcctcttgtggctactatcttaaggcgtcttcattcctgatttcactgcctaaacacttttatacagaaacacatataatggctgtgtgactgacaatgttatacaacaattttctttcaccacttttgttctagtcaaggtcacatataacccatgccacacaacatagaagttaggagactgaagtgattggctttctcttcccctacaacacaagacactgccattcagaaattaagtatctagcaattccacccatgtcttccttttcggcaaccttctacagggacaaattgtattttaggtactgaaaaaagtttgtgttttatgtagttctccattgg

SEQ ID NO: 30132 - DNA, 252 bp, Glycine max
ccttgtgaagttgaagggacacctcacccacccgaaacaccatccattctcagccaccaccctctctctcaaacccttagtttccattctcaagagtgaagctcttccaactatcgatacatagacatatctcttcagaacccactccctcacttctggaatctagccataaaaatcataaatttccctctttcacccgaatctctataccgtatccatctgaatccaacaaattttcccacaaatagaaag

SEQ ID NO: 30133 - DNA, 314 bp, Glycine max
aaatggtagaggagttgatctcaaccgaaattggagtgtagattggggaaaaaaggagaaggattatgatccatatgaggagaatcctggaattgctccattcagtgagcctgaaagtcaaattatgcggaaacttgccatatcttttgaaccgcatctatgggtcaacgtgcactctggaatggaggctctttttatgccttacgatcataaaaattcaacaccagatggattgccattgcaacggatgaaatcattgcttgaagaagtaaaacatcttcattgccaagagcgctgcatgattgggtctggag

SEQ ID NO: 30134 - DNA, 426 bp, Glycine max
tggaatggaagcaatactctcgttacacatcatccttttcttcttctttcactgcttcgatgctctgatatctctctctcattcaggacattagtttcttcctcttttttgctcggcgtttgtattcaagtgaacgtgtatcagacatgaaaatattcagtggatggcatcgttttgtttttggtcttcctttgattttcctccttactcatttgttttctgtcagggaattgcacacaaactcaaaaatggaggaaccccgcaagcaactaatcaagaaattggatcatctggttcttggccctgctgctggacaaggcttgtcaaatcgtttgcaatgccaagggacaaaatcacttaataggatccattcttctaacagcagatcaggtgtagatggaagtatcacatttgtcactgtcttta

SEQ ID NO: 30135 - DNA, 443 bp, Glycine max
tatcgagccaagcttccctcttttttcttctctttctgtttgttctctccataaaattccagaatttaaactctcacacaaaaaatcataaacaccccaaagtagcagtacgtgttgcactagtaacatcttttttatgggaatatatgcttttttttcctgttgaataaaattaaacaagaagagggagcagatgcaattcagttaccctgacagttttcagatcaccacttctttttttggctttgtgtctcaaattcttcacaaacattcccagaacactaggattctttttttttttttcctaaaaagaacgctgaactgaacctcaagtgcaacaaggacttatgctgctgagaaacagatcaagagctgtgacgaagccaagtttgatgggagatcagagttgcaaaagaacaatcatcccttctctattttcacca

SEQ ID NO: 30136 - DNA, 481 bp, Glycine max
cggacgcgtgggattgcatctaccaaaatttgcatattccaaaataaatctatctatcacatactcatggcttccctatatcctccacccttttccattgcaaccaataataatacttccaccccagctgccaccggaacccatgtttctacctcttgttccatccccttaatcagaaatcacaattccaatgccccaaaagttgcgaagtctagagtgtcatgcaaagccacaaagggtggtgaccaagaaaaccaatcaataaaaaacatcaacaaagacacccaagaagaggcctttatgtttgacagaagaaatatcctcattggcctaggaggcttttatggtaccctaagcaatgattcattgtcccttgcagcacctatctcccctccagagataaccaaatgtggcccacctgaccttccctcaggagccaaacagaccaattgttgccctccaatttcctcaaacatcatag

SEQ ID NO: 30137 - DNA, 401 bp, Glycine max
aggtatggtcgaatcgtggattaattgttcttctgattgagagcagaaataagcaaccatcaaatgggaaaagaatatatgaacaaagaaaaaaagggagattcataaatatattttcctcacacggtttaaagcaactgatgatggtagtatactaattcatgagagacagaatcttggtaattggtatcctcagcttaaccatgaccgtcaaattaattaaacacctttttcttcttcttttatttggttctttgtgtccattagaattatgcgtaaataactagcagctaccttgtctttctctactcctttattttattttatttgttttcttctcaaaatctcaattgtggttttgatcgatattatatacagctatatacgaattagaatcctgg

SEQ ID NO: 30138 - DNA, 416 bp, Glycine max
cttcaaataaagaaaaaacagaagaagcttctgctccctccatttccatttcccagaaacttgcacttgctgcattcatcttactggggagaatatattagcgtttgtttctcttagtcttattcagttcaaagtgttgctgcgtttgaagatgacggaggaacacgagaatggcgccaacgcaagcgaggaggaacaggtcataggcccgggcccggcccctcgtgcccggcccaagcgaccccttcagttcgagcacgcctacctcgacgccttaccctctgccaacatgtacgagaaaagttatatcgcaccgtgatgtggttacgcatgtcgctgtttcagctggcgaatttttcatcactggaagtgccgatggtcatttgaagttttggaagaaaaggcctattggtatt

SEQ ID NO: 30139 - DNA, 328 bp, Glycine max
aaatacacaaggttatttgaaattgaacatataaaccaaatgagtactaaaaagaacacatggaagtctgtgatcttgatcctaagttgttacaaggttaagtgttccttggaggaatcagagaaacaggttttgaaacaaggttctttccagaggttatgtctatcagatgtgagcaattcaagctccactcaggccattgaagacatttcaatttcatttgctggctcaaagctctatgcattcacacttgaggagctaagggaagcaacaaacagtttctcatggagtaacatgctaggtgaaggagggtttggacctgtctaca

SEQ ID NO: 30140 - DNA, 288 bp, Glycine max
taaacaccactttcatctccctcattcattcaaacacaacacaacacaaagtgtcacaaacacacactccaaaactcagatctcgcctcacctctcttgttctcgttcccccaccccactccctcattttccttcctctacccccatttttctctaaccacccctcacacacttcacttacacatagagagagagaaagttcggtgcttttgtatagaatcatcaccccattaccctgcattcaccatttcatgcattgattctatctgggatctctctcaaaagaaa

SEQ ID NO: 30141 - DNA, 240 bp, Glycine max
ctgcgaaagagtgtgaccttggatccggttatcttaaatttcggttggagcagccacttcattttggtgcgctgcgacaacacaacgtagataagacatcattgttttgttcagattctgcgcgttatttcattctcacacataaccacattctgcatgtccaattcttgctcttaaatatctcatctctcacttccatccaatcccctttttgaaaacgccagaatcattcattcaatc

SEQ ID NO: 30142 - DNA, 405 bp, Glycine max
tgattaatttggaaatgctctaccgaaacatgcatgctagtgtgaaagaaaagctaatgaaaagaaggatcaaggcgattatagatgaatgcctactacaatcttcacaggtgaaaaattagtacatataaaagtaagaagtgaaccattctggtcaaaggattgcacatacaaattaataagctaattgtctccaaattattgtctttattttgtgtccgtgagaatatttttgtaagcctctcgtgtgattgagttctgtacagagttgagcaccaactggcattgatttttatgccataaatgtttagtatgccatatccatgagtagttgtatccgtcctcttgttgtagtatgacttactccctactctccttattcaattgaagctattcttggttgtt

SEQ ID NO: 30143 - DNA, 528 bp, Glycine max
caatgccagtgttcccgaaatcgtgggcggcgattctgttatcattcgataacgttggggtgtggaacttgaggtccgagcttgctgagaatcgctacttgggacaacaattgtacatcagtgttctacactcctgagcgttctctgagggacgagtacaacatcccggagtacgcgttgctttgtggcgtagtgaagggtctgccaaagccagagccatatcactgatgttgggccactatgaagggcctatagactatatatatatatgccatcagaacgtggagttctttgtgtggtgatctttttttatatggaatagtagagaagaagaataataacgtagggccttggggcatccagtttgttgaccggattgtggtcaactcgtttagaaatataagcaatttgttcttgtttcttgtttgtgggtgcatgaatcctacaattttacatttaaaaaaattgtactacttttttcttaaactgttgttgatttttcataaaaattattcatttgttgtcaaa

SEQ ID NO: 30144 - DNA, 494 bp, Glycine max
aattttccacgagtatctttaccaggctatgattgatttaggtctcgagaatgaattgctagagtatgggggtcctgacctgttgccatttttgcaaagtgccggtcgtaattctctacacgaggttcgtgctgtgacggccacaacttctccagtggggcaatcaggagcacctatgtcatctaatcaagtcaagtactatgaacttttggcacggtattatgtcttgaaacgccaacatatgcttgcagctcatgcattgcttagactagctgaaaggcgttctactgatggagttcctactcttgaacagaggtgccaatacctaagtaatgcagttctacaggcaaaaaatgcaactaatagtgatgggttagtaggttctggtcgaatttccattgacagtgggttcctagatttgcttgaagggaagctcgctgttctttggttccagataaaaatcaaagaagaactagagtctatggcttccaggt

SEQ ID NO: 30145 - DNA, 675 bp, Glycine max
ccgcaatgatgaagtgtttctcggtgtccttatcctctttatgggttctccttgctctctgttctctcagtgtgttatcgcaaaatatatctcagagtggcctacagcaagctagcctcccaccaagaggttggaattcctatgattgcttttgctggacgatttctgaagaagaattcttacaaagtgctgaaatagtttctcaacgtctcaaggctcatggatatcagtttgtcgtggtggattacctctggtataggaagaaagtcacgggtgcttatcctgattctctcggatttgacgtgattgatgaatgggggaggatgctccctgacccaggaaggtggccttcttccgtaggcgggaagggattcactgatgtagctaatcgagtacatagcttgggtttgaagtttgggattcatgtcatgagagggataagcacacaagctgtcaatgcaaacacccctatccttgatacaacaatgggaggtgcttatcaagaatctggtcgagtgtggtatgcaaaagacatagcaatcccagaaagggcttgtgcatggatgtctcatggtttcatgagtgtaaatacaaagttgggagctgggaaagctttttttgaaatccctttatgagcagtatgctgcatggggtgttgatcttgtgaaacatgat

SEQ ID NO: 30146 - DNA, 307 bp, Glycine max
aattgctgcagtccctaaacaacgacaaactcttatgtctagtaaatgatcagcttcatcaagcaccaagaaccttcacacccatcagccttgttgcaaaaccaccagtattctcagtatgatctcttagccttccaggtgtggcaacaaggatctgccaggggtttgcctgcatccgtttctgctctaacgcaagtcttgtccctccattcacgacttgaacaccaatggtagcatgatacttcccctgtttagtggcttctgcagcagcttaacaaacctcccccgcgtccgcgttcgcgtgggc

SEQ ID NO: 30147 - DNA, 270 bp, Glycine max
gggattgaagagtaaacataggatccacgatcaactcgattttatacttttgtttctatttctctggaggcagctagctagggtcatactcatggggagcttgaaaggagacagtggacatgccaatggcgaaaatcttaccgaagctcttttgccaacacgagatgcacaacaacaacatcaaacagacgacgaggaacaaagatttggtgacaagctctggcttgaaaccaggaagttatggctcattgtggggccctctatattcag

SEQ ID NO: 30148 - DNA, 518 bp, Glycine max
caccattccagaacaagatgaatgggtatacagtgatggaaagtcgacaacttgtgttgcctttatcctttctatgtataaagaggctgaagtttttggtcccattgctaattccattcaagtaaccgagttcaccattcgcgatgcatacatgctcagaattttcgaggacaaccaaacacgcctaccaagttggtgcaacaatgagaatgaccggattccattctgtcagattcttggtgaatacaagatggaactgcctggctataacaccttggagccatatgccaacatgaatgagtattgcccttctcttcctccaacttatgataggccttctcgatgttagatccatcttcttccatcgtttctatcattttgaattgcctgttaaatttaacttaaggcatcaagtactttggtgttctaaaattgtctataaaccattcaacacggcattgtgtatctacagcttgatggtcaactataaaaaaaaacacagtacaaaattgatattt

SEQ ID NO: 30149 - DNA, 259 bp, Glycine max
gatctatatatgcatgaacactaataatagaagtctaactataatttttattatttggccaaatgaacatgaccaaagaattagctaaaacaatgccccagctagattagattggttatatcctgtattatataattcaattaaacagatttattattcaagagaaaatcagcatttcttctacagtactgagatttcctccaagagtattttatatataaatcaacattttgaagaagcagctgcagcagaaagaaat

SEQ ID NO: 30150 - DNA, 415 bp, Glycine max
cttggtacagtaatagtaaattgtcgcagcctcttttttcaccaccatcgattacatctactaaagtaaactggctcaattgggattctcatgaatgccttaaattatctggaaattgacagtatgacgactcaaatcagaacctggagactatgatcagtacagtcattggtcagtatggactcttacctgtttcaggagttatctccaagcttaagtctgagggacatggtcatgtttttacttctgttttctatgcacaatctggcattcaccccatgttgagtccaataccagtctgccagaatgagaggcctccctttcccacaagtacctcctcccagtccaatcctgacagtcactgctcagatcaacctcatgactgttccaatgatgctacttgtcttgatcaaaa

SEQ ID NO: 30151 - DNA, 293 bp, Glycine max
ctattgctaacttaactctcaagcttagtactgaatgaagtttattctttctctaatgagtatcatactttataccctctttatctcttctcttgtagtttccatagcagccgacaaaccatccaattcacagtttcagtccctcagtcatgaagaaaccatagtttccccaaatggagtctttgaacttggttttttccctctgggaaattccaacaaaagctacctcgcaattcggtacaagaactattcggatgaaacctttgtttgggttgcaaacggttcctacccaa

SEQ ID NO: 30152 - DNA, 422 bp, Glycine max
cattaatggctgattttggtgactattttgggttgcttttcatttggctagcctccatcttcattttacgtgtaatattattcacaaagtctcgcatcaagtcacgtctacccccaagtcctagagccctccctgtgttaggacacctctacctcctcaccaagctcccccaccaagcattccacaacatctcaatacgttatggtcctttggtctacctcttgttcggttccaagccttgtgttcttgtttcatcacccgaaatggcaagacaatgcctcaaaacccacgaaacatgtttcctaaaccgacccaaaagaaccaatttggactacatcacatacgggtcttcagattttgtgctggcaccctatggaccctattggagcttcatgaagaggctttgcatgactgaactcctc

SEQ ID NO: 30153 - DNA, 258 bp, Glycine max
tttgttttgttgttaataaaaattttctcttctttctttctctcttgaagttggaaagaaaggcaaggagagaaagagaaaacaaaaaatggtagtttccagggtggttgtttttcttggtctcattcttgcaacccttgtgtcattggcttgctcccaatccgctgctccggctcctgctcccacaagtgatggcacctcaattgaccaaactgtagcgtatatcctaatgttggttgcattggttctgacttacat

SEQ ID NO: 30154 - DNA, 480 bp, Glycine max
caaatctccttcaccttccaattttcctccattgtttgactgccagattattatcacctttccaggacccaaaataagagtatgacatgatgagaccaaccaggtttgatttaatttattggaaataataacaataatattaaataatgcgttaagcatataaagttttggcataaatagggtggttgattgaaggttccttctactactacttcttcttcttcttgtcttctctagctaccttatcatcataaaaacactaaacgcccctctatactctctctaccttctttcttgtatccgtcttaatttctgtcgctatggcttcggatcacaccatgagctttcattcttcttccttacacgaagaggacttcgatgatgatgatgatgatcacctacacccccacccccacaacttgtcgaggctctccgtctgcactagcagcacctttggcgacaacgaccatgttgacaatc

SEQ ID NO: 30155 - DNA, 375 bp, Glycine max
tgatggaagaggtgtcgatgtttacattgccaagggtgctggcatcacggtgcagtttgtgaagaacatcatcatccatgggatcaaggtctttgacatcgtgattcgtgagggtgggatgatcagagattctgagacacattatggtttcaggactaagagtgatggtgatggcatttccatctttggtagcagcaatgtttggattgaccatgtttccatgagaaattgtagtgatggactcattgatgccatcatgggatccactgctattaccatctccaacagccatttcacagaccacaatgaggtgatgttgtttggtgccagtgacagttattctgatgataagatcatgcaaatcaccttggcatt

SEQ ID NO: 30156 - DNA, 445 bp, Glycine max
ctcagatctttcaagttcaaggccatgaacatgatgttcccatttcgcacccacccattcacaatcgctggtttccagagggttgctgtccattaatcaaccttcccttcaaacatcacgacgattttataaacagatatgatacaccgttgctgagagagagaatcttccacttctcagcagagtctattgcaaaactgaaagcaaaggctaactcggagtgcaacacaaccaaaatctcatcgttccaatcattatcggcacttgtttggagatgcataactcgtgcgcggcgcttgccgtatgatcaaagaacaagttgcaagttgtccgcaaacaacagaacaagaatggaaccaccactgcctcaggagtactttggaaactcaatttatacactgaatgcaggaaccgccacctcagggaaattgcttgagaatggtat

SEQ ID NO: 30157 - DNA, 485 bp, Glycine max
ccttcgctttcggagacaattgcatatgacttagttttggaagttgcaatgaaaatccagggatttcagcaaaggaatttattgttgcacggttcatggaaatggttgttgacatagtttgcatcttattatggggtatctgagatatataccaagctgcgatatctatcttatgtcatggatgtggctacacctacagcagactgccttaacttggtgtataacctgctagcacctgttatcatgaagggcaatagcaagacttctttcagccaccaggagaaccgaatactaggagagaccaaggatcaaattgaacagatacttacacttgtttttgagaattataaatcacttgatgagtcttctttctcgggcatcatagaggttttcagaccagcaacgggtcaagcagcaccagccttggaacctgctgctaaactctacaagcttcttcatgatatcttatctcctgaggctcaaat

SEQ ID NO: 30158 - DNA, 470 bp, Glycine max
catatatatatatatatatatatatataacacaaactattagcagtagcgttatagtaggagttgcataaaattttctctttcatgaaaatggcgcgtggcaagaatctgttcctccaaattctgtggtgtttttccttgatcggtcttagttcccaagcacagaattacacttttgttgtgagagaggccaagtatacaagactctgctccacaaaaagcatattgactgtgaatggagaatttcccggaccaactattagagccaacagaggagacacaatttttatagatgtttacaacaagggcaacttcaatattactttacactggcatggggtgaagcagccaaggaatccatggacagatggcccttcatacatcactcagtgcccaatccaacctggaaggaaattcacacagaggttgatttttactttcgaggaagggaccatatggtggcatgctcat

SEQ ID NO: 30159 - DNA, 307 bp, Glycine max
ggcactttagccggccaacttttctttggatggcttggtgacaagttgggaaggaaaagggtttatggctctcaactcttatgcttatggttctgtgttccgttgcctcggggctctcttttggccacacccccaagggtgtcatggccacactttgtttcttcaggttctggcttggctttgggattggtggtgactaccctctatcagctacaatcatgtctgaatatgccaacaaaaagactcgaggggcattcattgctgcagtgtttgcaatgcagggttttggaatcctggctggtggaat

SEQ ID NO: 30160 - DNA, 724 bp, Glycine max
acgagcagattttcagtcctgaaaatgctgaggtctcagatctacgacatcatttatccaagcgcaggaagggcaatggtttgaagtctgttgtcggtcatgattatgcccatgagggccatggtgaggaacaaagtcgtcggcccttctctcggaaggattcacttgagttacctctgaatgagagcgttcctcggtaaccgcttccgaggtagaataaaacttccagcaaatggtgacggtgatcacccagagagggaagacgggggaagatttaggaacagattaccttctggaaggttgccagccactcaccatttgtcacctagagagggaagggtccatgacagaataagaggaaggttgcaagatgatgagaggagaaactccaaggatcgattgatggggagagaactaccgggtgataggagtgattttgctgcgccaaaaagtctttctgaacttaaaaatgggaggaacaccgagaatagggagcaacaatcactgggaaggagaagaagtttaagggacgatcacccacaatctgacgatgattttctgtttgaaggtccaaaacctcttagtgaaattctgaaggagaagagaggagctggagctgattcagactctgggaatggcaaatcatctgacaataagaatgtagaagttacccatggctcggatcctatgtctgttgcaaacacacaaaatggagtgctgtctg

SEQ ID NO: 30161 - DNA, 495 bp, Glycine max
gaagcatattcaaatacaatcaacagtggtcactcctgttttgctgctatgactagtgttttggtgtttggcttttgtgtaacagtaagcttggttctagcacttggttctgtttctgctcaaccaacacgggctttcttcgttttcggtgattcgctcgtcgacagtggtaacaatgacttcttggcaaccacagccagagcagacgctccaccctatggcattgactacccaacacacagacccactggacgcttctctaatggcctaaacatccctgacttaatcagtttggggcttggcctagagcctacactgccctatttgagcccgctactagttggagagaagctcttaattggtgccaattttgcctccgctggaattggcattctcaatgatactggaattcaatttttgaacattatccacattcagaagcaactgaagctattccacgagtatcaggaaaggttaagtttacacattggtgcg

SEQ ID NO: 30162 - DNA, 362 bp, Glycine max
ggcaccatgaggaatgttcctgtgggggcaggacggcgaaagaacaagaactctacctcgcattatcgccacatcactatctccgaggcccttcaagcagcaagaattgatgctcaaaatggaactcatcttccaactttgaaaggcaatggtagagtcctcagctttggattagatgcacatgcacctatttgtgattccatggcatctctcatgaatcttggagagaaaaaggctcttaatggcacaagaaatgggtttcatcatggctttgaggatcaaagactccccgttccttgcaaaagtggggaaaatggtgatgactcttcaactacatcctccattacaatttcaagtcccaa

SEQ ID NO: 30163 - DNA, 525 bp, Glycine max
ttctgaatgtgctcgttgtttagaaaaccctaatctgattcaattccagcatggctcaaaaacaaaagctgcgcccttctcctctggacgagccacccaccgcttcctcttccgattccgaggaagaagaggagcaacaacaacaacaaccatcctctcagcaacacgaagaagaggaagaagaagtttcctccggagaagaagaggaagcttcctccgaagaagaggaagacgaaaatctccccccaccacccatctccaaaaaccctccaccccctcctccctcaaaccctcagccccaacccacttcctccgaatccgaaaccgaatcgggttccgaaaccgaatcagaaccccaccccactcccgttaaggtcaaacccctagcctccaagcccatggaccaggcccaaaagcccaaagctcaaccctccccggcgccgccgccgccaaaatcggcatccaagcgccccgccgagaacaacaacaacaacgcccgtgtcgccgaccccaaacgcgcgaaga

SEQ ID NO: 30164 - DNA, 544 bp, Glycine max
gcaggacgatgagtactcctccagttgttgagcgcgtttcagaatgcttcatcaagccgcagcactccaaccatgaatcaaaccaaatctgctacttaacaccttgggatattgctatgttgtctgctcactatatccaaaagggccttctcttcaagaagccctcatcaccacttgttagtcacaataatttcatagagaacctgttgcagaagctcaagcactctctttctctcaccctcttccatttctatcctttggctggtcgccttgtcacccaccaaacccatgaccctcccttctatgctgttttcgttgattgcaacaacagtgatggagccagattcatccatgcaactttagatatgaccatatctgatatcctctctcccgttgacgttccacccattgttcaatcattgtttgaccaccacaaagctgtcaaccatgacggtcacacaatgccgttgttgtccgtccaagtcactgaatttgtggatggtgttttcataggttgttccatgaaccacactcttggtgatgg

SEQ ID NO: 30165 - DNA, 725 bp, Glycine max
gtacaacttgaagataagaaaccatcaggtcaaggaccaccaaagtcaacccagacttctacaaaagcctcctctaccaaccccccaacacaaaaacctgctgcatatcgtcctccacatgctaagaatgcatctgctattcaggcagagttgtttggagagactcctgcagaaccactgagcaagaatgcattacgaaacaagaaaaagagggaaaaacagaaggagaaaaaggcttctgatgccagttcttcgtgatggaatcaatgttcttcctaatgcattctaaattgcttttcgactactgcactcgtgcacctgaaaatttgaggcttcaggttttgctttactaggttttaattgtattatgtccctggcaaccaactttgggaagttttgatttgctcagattttgaggttgcttgaagtcgtgttgtaggtttatgctttcagctgggatataaaaggtgggagaagataaatctctttctcatgataaaagaagtattcattgtaagagaagtgaaattatacgttggtcacaaacattcttttgtttccggttgggatataaaaggtgagagtagaagataaatgcccctttctcctcccgataaaatatgtattttttgcaagagaaatggaattataagtagggtgcttcacacgcgtgtacgtacatgcacacacgggcataagagtatatggacaagaagtgtagtttc

SEQ ID NO: 30166 - DNA, 514 bp, Glycine max
gcagcaaaccatgttggcgaaaatttcttagcaatgctaaggaagtctgtcttgatgcctaaatcagcaatggcatttactattgcggcatcggtgttagggcaagtaattggttcaagacctgagaggtacaggctgaaggcagttgctgcaaaaaaggtgtctataactgaaacctctggtgttggtcctctcctgttaccagtggctactacaaaagacaagcactgtggtcatgctgtggattggaaagcagtttctcttcagctggcagcaacttcaccaacggatgtattttgttgatgattaatctgttgtgtgtgatttgtctctactgttatccgagtgggcaattagttaccacttgttcggtgctcccatgtcactctgaatgcctcagttggcagtaataaaagtattgatgttttgtcatttagatttttttttctcatgttcaaacataataaataattaaagaaaaagccaataccaacctagtgtcaggattcgcttt

SEQ ID NO: 30167 - DNA, 336 bp, Glycine max
ctttcgtttccctcccgaaaatcctcggcatcttcatctccttccaagaagggcttcttcaggttgttctcttcaactttgttctccttttttaactctatttcggattttggatggagcatagtgaaaagctcaattgttgaagatgatgagacacccataaggagtggtgaggaaggtgttgagtctctgccttgtgtgatatcaaacatatcctttgatcttgatcaagtgaagaaaatcaagtccaagctaggagtgacagtaaacgatgtaattactggggcaattttctatgggattaggctgtacatgcaagagattgacaataaggca

SEQ ID NO: 30168 - DNA, 414 bp, Glycine max
cggctcgagctcgagccgaatcggctcgagggcatgcactctcatgcctgcagaatttgttccctatcatcagttggttgacagattacaaagcctccatgttcaaagatgacctcttggctggcttaactcttgccagcctctgcatacctcagagcataggatatgctactttagcaaaagttgctcctgaatatggcctgtataccagtgttgttccacctcttatttatgctatgatggggagctcaagagaaattgcaattggacctgtagctgtagtgtcaatactgttagcctctctggtcccaaaagtggaagatcctgttgccaatcctaatgcctatagaaatcttgtctttaccgtgacttttttcactggaatttttcaaactgcatttggtgttttcagat

SEQ ID NO: 30169 - DNA, 511 bp, Glycine max
ggctcgtggaacctcaatctctccgagcagcggtccatttctctcccggaacacccataagatttccggcacggcgatggccgctgttcgcctccttctcctcctcctcttccctttctcctctctctccctttctgaaaacgaagcccttctcaacctcaagaaatcattctctaaccccgtagctctctcttcctgggttcccaaccagaacccttgctcctccaggtggctcggcgtcatctgcttcaacaacatcatcaacagcctccacctcgtcgacctctccctctccggcgccatcgatgtcaacgccctcacccaaatccccactctccgctccatcagcttcgtcaacaactccttctccggcccaatccctcccttcaaccaactcggggccctcaagtccctgtacttagcccacaaccagttctccggccaaatcccctccgatttcttctcgcaattagcttccttgaaaaaaatatggatctcaaacaacaagttc

SEQ ID NO: 30170 - DNA, 512 bp, Glycine max
gattgctgatgtttccaatgctaacggatggggagatgatgacccaaccatctttgagatgacaatcgttgcaaccttacaaggggaattccaattgacaaatggctatgggccaaataaagctccggaaattatgaaggaacattggaacacttttattgttgaagatgatttcaagttcatgaagagtcatggattagatgctgctagaattcccgttggctggtggatagcaagtgatccatatccacccccaccttatgtcgggggttccttgcacgcattagacaatgccttcaagtgggcacagaaacatggattgaaaatcattatcgatcttcatgctgcacccggctcacaaaatggctttgacagcagctctacaagagatggttctctagagtggggaaaaacatatgaaaacatcaagcaaacagtttacgttatagacttcctaactgccaggtatgcaaaaaaacccgagcctttacgcagttgagctcttaaacgag

SEQ ID NO: 30171 - DNA, 529 bp, Glycine max
acagggagtcgagtagggaccatgaacgtggtgatagtcgtgaacgagggcgagaccatgatcgtaggagcagagatcgtgataggcattatgatagagatcgtggatatgatcgcgaccgtgacagagactcagaccgcacccgctcctatgactcaagaagccgtcggaggtcacgctctagatcccgagagcgatctagagattatgatcgacataggcgtcatgatcgatactagcaattgccatgaatcttatgggtatgagaaaatgtctagtttaggtgggtgttgaacctcatgttggacaaataattttgcaatttcttctgtgttgaaccgtttctcggatgatggatgtaactcgagctttaggtgtcagctaaactaatggtttgaatgttgcctttgccagacattaaatccaatttgtaatctgccttactttggagcagttcttgctattgtgcttaaaaatagtagtttgattggattgccatttaaaaaaaaaaaaaaaagggcggccgccg

SEQ ID NO: 30172 - DNA, 267 bp, Glycine max
ggaactgttcctttaactgaagattttgcatatgggcatgtcttctacaagttaagacagacaagtgatttgttttgtatttgagaacgcaaagtaactgtttcgatgatgggaaaagcatatctgcctgtctgcccttagagaacaagtcttgaatagatttcggtaaattaaaaatgctcttgctgatcctcttttggaatgattaataaaacattacattattgtatcttctacttcgaccgccgttgtggacaaaatttgtaa

SEQ ID NO: 30173 - DNA, 330 bp, Glycine max
tattttcattgcacagagacacatgagaggtcaactctaactttttctccctcaatttcagttcttctacgttctaaccattcgcaaaacgccttcgttttaatcttacatcctcgttagtcgttagttcttacgcgaaccagctgaatgcacggcaacgtcggtcacgtgaccaatggcttctcatcaattcctcgacaacttcataattcccgatcacattctcgtaccgggctcctccgactccgaggttgaaaatgtcggtgacgtgcctcactgtccggtccttgttttcgtcaactccaagagtggcggtcaactcggcggaca

SEQ ID NO: 30174 - DNA, 476 bp, Glycine max
cccattccgatttctgagttctgagagactcaaaagttcagagtggtatgggcagtgttgtgatttggtccagaagataacaacacgacactacactcgtgccgttttccttgccttcaaacaaggattggattatattatttatcttgcatcatacatatggcaaccgctcccttcattcacgcgcgctgtgcttactcgcctagaatttccaatcgcaacaacaagcctagttcgcaacaaggccccttggcttcttcgtcttctcatgcttcctcctcctctccaccctccagttctagcttctctcacccttctggtacaaacagtggacaaagacaccagggccttagagctcaagctatgagtactgtcacacttggaaattctattgctagcatagggaatttgaagaacgatcctgatcatctccttgttcttgttcatggtatcttggctagcagactggacttatg

SEQ ID NO: 30175 - DNA, 413 bp, Glycine max
aaaatatgtttgagttttaacgggaattcctacattttgatggacaaaataagaaaaagaaacttattactttagaagtaaaagtattatttaactctctcaagaagaaacatatatatgaaatttgttattatgcttttgcggctcgagctctctctctttggttttgtacttggtcatggatattgaggtggagatctggtttaatgccctttgtggataattaattgcattagatttcgggagtgactgattcttaataattgacgtcatacgatgctctctctctgctatgttggtttttctttttcttgctttatcaggcaataggcatggtggaataccaatttattaatactttaatttaatgtcctgttctttgtttcttgagtgctaattaacgtccacctatt

SEQ ID NO: 30176 - DNA, 251 bp, Glycine max
gagccttcgaagttagtgggcagcaagagctcaagacatttcgagtagaaacagtaacgatgcctcagttgctgtcactgctgcattggaaacatgctgagccataaaatgagctgatgcacgagtgagcccttatcgattaagcactccagtgggacaaattattttccagtttgaaagtatcatcagttggttcatccccataaaccacattgaggaattcatgcatggttggggcttgctttgtaaca

SEQ ID NO: 30177 - DNA, 655 bp, Glycine max
  unsure (1)..(655): unsure at all n locations
ccctttcgttctattttcacaaaggaataaaccatgtgatgaaagaagttgaaattggtccctgcaagttgacacttcaaaagcttgaagctaatcgttcaaccctgtctgagatttctcatcactattgtgatcttattgagcggcaattgagtgttcctgggttatcttccactactcgtttgggtttgacacaccaagtaatgacctgggagttaattagagttcttttttctgacagagaacaaaaaggtcaagtagaatctttgggtgctgacaatgaggaagatatgatgcaggatataaaggaaatttgtcaagatgttgaccgagaagcactccctctaatgaggagggcagagtttagttattggctgcgagagagtgtttcctatcatgttcaaaatcaaataagctctctaaatgattctgattatctgcagcatatatttgtactcctgactgggcggcaactagatgaagcagtgcagctggctgtgtccaaaggagatgtgaggttggcttgtttgttaagtcaggctggtggttctactgtgaatcgctctgatattgcaaggcaacttgatattntgagaaataaaggcctggattttagtttcattgaaaaggacagattgagactctatgaattgct

SEQ ID NO: 30178 - DNA, 252 bp, Glycine max
ggtaactggaattcagaaccacagtgaaaacccgaatgacgatgggagtgaactactaaatagcactactgccagaggtgctgaaagctggacagaatctgagattgcaaggcttcaacagttgagagctgagatggagacaaggtatatgcaaagtgggtgttcagaagaggttatgtcggaggaaatagctaccaaaatggcttgttttggttacgaaaggcgtgctgtggtcttcaaagagaaatggga

SEQ ID NO: 30179 - DNA, 569 bp, Glycine max
ccaaatatcaggaatgctgaggttttcttgttttctctgtgtatggggggaatcatgtattacctggaacacgagccagagaccatggccccatttcttcggggcctgatccgtcgcttccttgccagcagaatcagcaatccaagcccacctaatcggactgcttcctacacatacctgcaagctcttgatggcataacgaaaccaacattacaggagaagagggatactgaatcttccgaaaagtacaaccttgaatctattcctgggctttaacgttgtttttttgggttgggtaggttaataggttatcttgtatcgggagccagattcaatatttggctccccatttttttattgattgctaatgaaggtgctctcaatgttaggtgttttaaagcttttataattatgtgagaaagtaaataaataaaaagaacatgatctgatgatgtcttcaaattaagtgcggaacaattgattgacacgatcatattccggcagataaaggtgccataaaagactacccataacaaaaagttcaaatcgacagttatagattttattct

SEQ ID NO: 30180 - DNA, 510 bp, Glycine max
  unsure (1)..(510): unsure at all n locations
cttacgcgtccgcccacccctccccaaaaaaaacaagcagatatataaattaatcaaatactacttcgtgtgggggtgggaaaatgggccactctgaggaaaacagtgatgttgctgccaggcagaaggcaatcgatgattggcttcctgtcactggttcccgaaatgccaaatggtggtcttcagccttccacaatctcacagccatggttggtgcaggtgtcctcagccttccatttgccatgtcaaatatgggctggggccccggtgctaccgtgcttatcttgtcatgggttatcaccctctacaccctatggcaaatggttgagatgcacgaaatggtgccagggaaaagatttgataggtaccatgagttgggccagcatgccttcggagacaagctaggtctctggattgtggtttctcaacaagttgttgttgaagttggcacgtgcattgtctatatggttactggtggcangtcattgaagaaagttcatgatacccttt

SEQ ID NO: 30181 - DNA, 435 bp, Glycine max
gggaacacatagatgaactaattttctcaaacaaaaataagcctccccttgcatcagataccccaagatttgtgtcactcactttgactttgctagccctcacatacttggtcgctgtggccatcccagacatatggttttttgttcagttcttgggatccacagccattgtttccacctcattcatcttccctgccgcaattgttctcagggacacgcctgccatttcaaagtcaaaagatcaagtgatggcaatagtggtgattgttttggctgtagggacaagcggaattgctatatggacgaatttgaatggttcaggggatgatcaatgattaaccatgatgatgttatataatacccagtcttctcaaacttggtgattttttttagtaattattatcatataaaaaatcaatctatcttttcggtttt

SEQ ID NO: 30182 - DNA, 500 bp, Glycine max
tccggatagtgcagtgcttatggcttattcattcattgcaaatatgaggttaggcacatctgagctgaacccacccgcattcttttcatgccggcggcatttccccggaataccaacactccaacttcacccacccgcaagaccaacgtcgccgcgccggtgccgcgattgggtaacctatgcaagccgtcaaaaaccgccgattccaatttctagtaacatcgacgagagggccttatgttttgatatcttgtggagatggctttctagacttatctccttttacttgctatctctcaatctcgctgctgcagcctctgattacccagctccctctacttatccctgtgaggacattagccattacgcttcttctgtgaagcattttagattcagaggtgaagcactcaaaagacaattgaatagcatcgttgccccacatcattccttgtcctacagagaggtgtgggatgccctcaaggttcttgatgctgctgata

SEQ ID NO: 30183 - DNA, 355 bp, Glycine max
gaaagcagataaagaaatggcttcttctaaatcaaaggtcagaagggcatgttccttcaccaacctcctccttagctgtttgaatttctcactcttcatcctctctgcttcctcatttgcaccaactattctcctaaagatgcccccaacatcatttggcatggctctcctaatggtctctggcatctcactcctctcatcttttgtgggcttctactcccaactcacacacttctgtttcctcacccacatttctcttctactagcctcattaataggacaagtgctgaccatattagcccttgttaccaaagagaaagctagcatgtcccttctgaagtcaccaagggacccc

SEQ ID NO: 30184 - DNA, 659 bp, Glycine max
ctttcgcgtccgcccacgcgtccgagagtcacaacattgggtgctgttcatgagatcagacagttgcaaatgatgttgaggcatctaacaagcaatcttacatttcaagaagcttatgacatgacaggtagaattcttgggattacagtttgttccccaaggaagcacgaaccacctagatgtcttaactacttgacttcaccccatgtggttatatggagtgcagtcaccgcttcttgtgccttccctggccttttgggggctcatgaattgatggcagggggtagaagtggagagattattccttaccaccctccttttaacttagggcctgaagagggctccacaccagcacgccgttggagggatggtagcttggagattgatttacctatgatgcagttgaaagaactattcaatgtcaatcattttatagttaggcaggccaaccctcatattgcaccactattgagattgaaagaatttgtgcgcacttatgggggcaacttcgctgccaagcttgctcatcttgtggagatggaggtgaaacataggtgtcatcaaatactggaacttggttttccattaggtggacttgctaaattgtttgctcaagactgggaaggtgatgtgactgtcgttatcccgcaactcttgct

SEQ ID NO: 30185 - DNA, 275 bp, Glycine max
attgtgctagccttcagaggacacaatgttttgcccgaaatacaggggacgctgccttcaaatttcgaacaaacatccaaaagaccaatgcgaagaggagttagcatatcatatgtactcatttccatgtgcatgtttcccctcgcaattgccggattttgggcctatggaaaccagataaatgacgggggattgttaacttcgttcccacaattccacaagaggcaaatcacaaaattctctatgggtgcaatatatgttctagtaataataca

SEQ ID NO: 30186 - DNA, 420 bp, Glycine max
taatttcgagagaaaacggggactctaatggcctatgctacacttactctcgtattggcaataatagtctctctaagcttgccatctcaaacctcagctgatgacaagtacgactattcatctcctccaccaccagagaaaccctacaaatataaatcaccaccaccaccagtttacaagtacaaatccccaccaccaccaccacctgagaagccctacaaatacccatcaccaccaccaccaccagtttacaaatacaagtcaccaccaccaccctacaagtacccttctccttcaccaccacctaaaaagccctacaaatacccatctcctccaccttcaatttacaagtacaaatcaccacccccaccatacaagtacccatcttctccaccaccaccttacaagtacccatcttct

SEQ ID NO: 30187 - DNA, 461 bp, Glycine max
acttggtgctgaagaccttagaactgtgctaaagattgatcccggtaatagcgtggctagaggcaccgttcaccggttggctaagatggctgattaggaattcttttgtccttttctctttttcctttgattatcatgccatataggtttttacatcaccaacaacccccatttcctttggcctttatagttagggggtgatacgtaaggactgctttttgaatgctgtcacccttcatatgatatgtgatgtatggtttatttcattctggctatgtcttgaaattaaaattctcattgccatcacccaaatttgcccttaatagaattgccatattctttttctatttgttatctcgtgtttggattgtttgcatattaagaaagacatttgttatttcctaaaattatgaatagagaatgcgttccggttaaaaaaaaaaaaaaagggcggccgccga

SEQ ID NO: 30188 - DNA, 381 bp, Glycine max
tggaacaataacttttctggcgttgtgcctgaagggttatggggtttgccccatttgtatttgttggagcttgtttataattctctttctgggtcgatttccaattcgatttccggggcttggaacttgtcaatgttgttaatttccgggaataagttttctgggtcgattcctgagggggttggggaattgggtaatcttgaaaagtttgtagctaataataatagtcttactggtcggattccgaaaagtgtgtttaggttgagtcagttggataggcttgttctcggagacaatcagcttttcggagaaattcctgttggagttggtggttgtaagaagctcaatgagcttgatttggcgaataataggttaggtggg

SEQ ID NO: 30189 - DNA, 492 bp, Glycine max
tatataccagctgattcgtgatatctgcgtggggatccatatctcctttgggcgaatcatctccatttataaatcagtgctgctcatgcacaaccaatcatccatttccccatccaaaacaagtctctttctaataccggtagtgatatgtactcgggaaggggaaactcgattccagaaatatatgaactcatcgtcttatccagattcatcatcatcattcttccttatcagtgagcattcgaaatcgctgttgttgggaggcgaaggcaaccatgaccatgaacggccaccataccgttaacatcgctaacagtaacaggcaccccaacgacgatgaccaccacgccctccctccctcctccgaccatgatgatgacgaacaagaactcgtggatcccgatgatccttttgacattactcaaaccaagaacgtatcgcacgacacgcttcgccgttggagacaagcagcactcgtgctcaatgcgtcca

SEQ ID NO: 30190 - DNA, 424 bp, Glycine max
gagggacacaaaattaaccctaagcctttccaggcacagggggtgctcactacccagaaagaggaagggttccgtttttatccaaaaggattcctttccttctttctcgataatctattcatttaattgggtcaaattaatattaattaacattccttgaaaaaattaacaatgaggaagttgtgccctaattttgacaatgaagatgggttggataccgtccttgaggtgccaattcccgaggagatgttgtccggcatgggcagcaatgggtccaatcgttggaagaacatgcgaactctcatgaatgctcaattcgttgataagtcttctggtctctcaacaccatcaaacaatgaattcatggtgttgcttaagcttgtgggtgctccccttattcctcttcaggttccatcagaccata

SEQ ID NO: 30191 - DNA, 548 bp, Glycine max
cgtgggttgggattgccttatttttcttagctttcacagcctcatgctttgcaacagaggttacttatgatgcacgttctctcattattaatggagaaagacgtgttattttttctggtgcggtccattatcctcgaagcacagtgcagatgtggcctgacatcatacaaaaggcaaaggatggagggcttgatgccattgaaagttatgtattttgggaccgtcatgaacccgttcgacgtgaatatgatttctcaggaaatttagattttatcaaattttttcagataatccaagaggctgggttgtatgccattctaaggattggtccatatgtttgtgccgaatggaactttggaggcttcccattgtggctacacaatatgccagggattgagctgagaacagataacccaatttacaagaacgaaatgcaaattttcactacaaagattgtgaacatggctaaagaagcaaagttgtttgcatcacaaggaggaccattattcttgctcaaattgaaaatgaatatggaaacattatgacgg

SEQ ID NO: 30192 - DNA, 447 bp, Glycine max
accaggtttcgtgttttgtgtaggcgtataagaattgaagctgttttgttgggagttgggattaggtgcatcaattgactgtggcattatagcatattaagagaaagcaacaaaatgtggaggctgaagatagcagatggtggaaaagacccatacattttcagcacaaacaattttgtaggaagacagacatgggagtttgatcctgaggcaggaactccagaggaacgagctcaagttgaagcagctcgtcaaaatttttataacaatcgcttcaaggtcaaggcatgtggtgatctcctttggcgttttcagattctgagagaaaaaaacttcaaacaatcaatacctagtgtgaagatagaagatggagaagaaataacatacgaaaaagtcataagcacgttgagaagagccgcacaccacctatcagcattgcagaccagt

SEQ ID NO: 30193 - DNA, 404 bp, Glycine max
ggaagcacccaccatacacacccattggaaaccgttcaaaagagataccttacaatcgttttacaatgcagcataagaacaactaacagtagcacgctactctctttttctctcgtgtgtgtaatcctgcaagtaaatggcaagagcagcttgcaatcaccttcacttggttcccagtttagttcatcctctaaagtcaaccctcttcacaaatcacactctttccaccacacgcactcgcttctatggcattcaccgaaggttctcttcttcttcatccaaaataagcatgagcctcaaggctggtattgttggccttcccaacgttggcaagtccactctcttcaatgccgttgtggaaaatggaaaggctcaagctgctaattttccattttgtacaatag

SEQ ID NO: 30194 - DNA, 270 bp, Glycine max
tagaaacataaaaaactaaattacttttttaaaatataaatgaccaaacttaagttcagctgaaattttatgttgatactgttggagtattagttgatgcctgtagaaaacaaaatctagctctgttgagatcctatgagagaggcataatatatatagccacataggatttccaataattttccaaaggaatgtgcgtgaaacaataaagttttgacttctgcaaataggatatgattattgttgcagtgtgggcaggatgacattttg

SEQ ID NO: 30195 - DNA, 370 bp, Glycine max
gggagaataagaaaaactgttaaaaatattttccataaaagataaaaaataacttgaagtggttattttgtgcataaatatgatagtttaacaatcacttgactcattgttgtttattttggtaaatactttttttaagttttacttttttgttcccatttggtggggtgcattggagccttgcagggaagtaggaggatacatggttatggacttggtttttatagcacacactctcagaaaagattgacctgatcctgactcacctccaagggggtctagtcatcaggtttatgaactagattgccttcaaatttttgttaggctgattctttagatgcaaagtccatcccttgttgtatttcagtta

SEQ ID NO: 30196 - DNA, 413 bp, Glycine max
tggtgaaatacgacaacacgaatccgttgtttgttcaaaccgaaacgacaaggcagttcgctttccctttctttctctgagaaggcgtcgtaacagaacacgacgattccccaaggaagtgggcaaaaattgaagatagggatcagtgacagagagagataacaaacgaggtgaaatccctcacgttgaattgttctttcactccacttccctttttttgtgaatcccttcgaaattttcctttttttttttttgtataattgacgtgggttttggtcctgttgctatgctaccgttctgattttcgattttcttgaaaaaaatgaattttagggattttactgagtaatggtaattgtagtctctacatgcatccattcaatattttgttgagaaaaaatgttattcgatat

SEQ ID NO: 30197 - DNA, 557 bp, Glycine max
acacactgtaagtaaatagaatcgaaatttagacaagacatcatgggtggggtaacatcgttactaatgttgctatgtctcttcgcaggggctatgtcccctgtgaagggtgaagacccttacttctttttcacatggaatgtcacctatggcaccctttctccagccggtgtgccccagcaggttattctaatcaacaatgaattccctgtacccaccatctatgacgccatactcatgaatatctgctatattgaattgctgatccttgccaagcccttgcttttccattgggccgctgtccagcacaggatgaatagttggaaagatggtgtcgtcggcgccaattgccctatccaaccaggcacagactacacgtaccacttccaggtgaaggaccaaatcggtagcttcttctactaccctagcctagggttgcagcgtgctgccggaggcttcggcggcctccgcatcaacagccgccaactcatcccagtcccctatgctgatcccgaggatgactacaccgtcctcgccggcgactggttcacaaagag

SEQ ID NO: 30198 - DNA, 668 bp, Glycine max
tgaatgtccatgatatgacatacaatatttacattttggttcttctagaacgtagcaccaccttattctacatgaatataaattgtgagatcagatactctttgataacatcctaagtacttatagtacgttgttccccccattgcacatatttcttaatcatatgattttcaagtgatgcaatacatcatgttatttattatatgacagttatttttacaatgagaagtttaactttgatctgtttataggtggcaactgcggtgcggatccgtagttctctttcttttgcaacccacacatttttcaatgagcatgcatttattgatgtgcaagtacctattataactagcacagactctgaagggtttagcaacatgttgaaggttaacaccctggaacagaaagcagagaaggagaaactagacacaatttatgagactgaaggtgttagccttgaacatgtgaaggcagctgcaaaggagaaaagcaacattattgagcatttgaaaagaactgagagcaatagggaagcactggctgctgcagttcaggatctgaggaaaacgaatgaactcgcatcgcaaatggaagcaagagaaaagagaaagttaggagcttcttttaaggacgatgacaaagtagactcttccaagagtttttccctt

SEQ ID NO: 30199 - DNA, 644 bp, Glycine max
tgccacttcaaaatctcttcattttcttaagtatttatacactgtgggtccccgcaattaaattagttttcggctacataaacagccagtaatctttatatttttctcaaatatatatgaccgtcatcatgatcgttgtggtttgaaactgtatataataggaacaagagtttatttcagttacttgggggaacattaagcttggttcatcaaaaggcctcatcacttgaagggttactatatactacttctgtgactgaaaagtgagctgaggtgtataactgcaaatgggtgtttggtggtggaagctgtttgttgctgctcttgctgggattctcttctcaacccaacattgtgcttcccaaaaagttccaaactacacatttatgcacaatgcaacgacagcaccagacgtatcatactacgactacatcgtaattggcggcggcaccgcagggtgtcctttagctgcgacactgtcccaaaattacagcgtgttgctccttgaacgcggtgggtcgccctacggcaaccctaacatctccgacttagctgctttcggtgctgccctctccgacaccttccctacctcccccgctcagcgtttcatctccgaagacggtgtcatcaactcaagagcccgc

SEQ ID NO: 30200 - DNA, 293 bp, Glycine max
tcacttccttcttcaaagttcgacgccatgcgaattaagccaatcctgctcccggagccgcccagcccgacggcggcgcgtggcactcccgacatcttcgaatccggtgtccacaccctcgtccgcccacgccgttgtcatcggcaacggtttcccctcctccgtgaatcacagcatcggtttgctccgcgcccttggcctctcccacgaccacctcctattccgcgttacgaggccgagaggtggaatcgacgattggctccattggctttccctctctctgcatcgaaaat

SEQ ID NO: 30201 - DNA, 589 bp, Glycine max
  unsure (1)..(589): unsure at all n locations
agatcaatcagtggagctccccacttgaacatcaatcttgaaatgaactattggcctgctcttccttgcaatcttagcgagtgtcaagaacccttgtttgattacatttctcttctgtctgtgaacggcactcaaactgcacatgtgaattaccaagcaaatggttgggtggcacatagtaaatcagatatatgggcgagaacatcagcaggtcaaggtgatgctgtgtgggccttgtggccaatggttggagcatggctttgtactcatctatgggagcactatgcttacacaatggatgaggatttcctcagatataaagcatatcccttaatggaaggatgcgtgtcatttctgttgagctggctgatcgaagacagtgaaggatatcttgaaactaatccatcaacttcccctgaacattattttatcgctcccaatggcgagcctgcttgtgtaagccagtcatccacaatggatgtagcaatcataaacgaagtcttctccacatttctttctgctgctgaggttatagggagaacacaggataacattgttggagaagttcgtanagctcaaccacggttac

SEQ ID NO: 30202 - DNA, 286 bp, Glycine max
ggcacctctcatatgcaaaacaccccataaaaaaaatgatgcatctaagcttatattttaccgttgttgccatagcgctcctattttcatttacatcttcttcagcagatactcatgaaaactttgttcaatgtctttataattatcccaatagcggaacctcaatctccaaagttgtttacacccagaccaactcctcatacacgtctacactagattcttccattcaaatttctaggttcttaaacgcaagctcaaaaccccttgtcattgtgacacctttggt

SEQ ID NO: 30203 - DNA, 636 bp, Glycine max
gataccttaatatttcaaatatccccagcagagagtaacctctcaatcctagcttcaattatattgattttttcacatttctaaatccacctctaccatatatatctccctctaattaaacctctctatccatatctaaaatttcaaaaagatctcaattaattagatttccctctctctttctctctctaactatattgcaaacctttccctctgctttcaaaatcagcaaattcatgggtcttagagacattggtgcttcactgcccccagggtttcggttttacccgagtgatgaggagttggtccttcattacctttacaaaaagatcactaatgaggaagttctgaagggtaccttgatggaaattgatttacacacgtgcgagccatggcaactccctgaggtggctaagcttaatgcaaacgaatggtacttcttcagcttccgtgaccgtaaatatgcaactggatttcggaccaatcgtgcgacgacatctggctattggaaagcaacggggaaggatcgtacggtgcttgaccctgccacgcgtgaggttgtagggatgaggaagacattggtgttctacaggaacagggctccaaatggtatcaaaacgggttggatcatgcatg

SEQ ID NO: 30204 - DNA, 265 bp, Glycine max
aatttctggctgcacaaaaggcatgtcctgcccatacagcataacttatggagatggaagtacgacctctgggtcctatattaaggatgatcttacatttgaccgagttgttggtgatctccgtactgtgcctgataataccagtgtgatttttgggtgtggttctaaacaatctgggacattgagttcaaccactgatacatcccttgatggaataattggttttggacaagcaaattcttctgtgctttcacagcttgctgca

SEQ ID NO: 30205 - DNA, 348 bp, Glycine max
cggctcgaggctagtggtaaaaataagcttaaagttgacaaatgcttctcaactcctggaatggcacctcatcttggaaagatagcacaatatcttagaaagcgaagactgatgccagataagaaactaggtactcttactagtgatattgctgggcagttgaaagagctaagacaaggccgtgtagagtttaaaatggaaagtaaatcaattttgcatgtgggacttggaaaggtaagctacaaagaagaggctttacgggagaatattagtgcatttatgaatgctgtattgcttgcaaagcctgctggcttaaaaaagactccaaatatgctgggtatgtgttgt

SEQ ID NO: 30206 - DNA, 714 bp, Glycine max
tcgaaacattgcttgcaaaaacaattcacgatcacagactttgagcgaccttgttcatggcaagttttctgctagaaaagaaaaagactagttagttaggcttttatgcaaagaacagagttctcccaaacacttcaatcaaacatggctttaccagccaatgaaacctccatggcagaaaggtctcagtgggtgctcaatgctcctgctcccccatccacgtggcacaacctcatggcttctgtgaggaacacaatttcatcgtaccaaaaaatgtgttcttatataagaggccaacctggacccaaagttgtgctttccttcttgcggagcatttttcctattcttcattggggtcgtaattattcaccaaccaaattcagaaacgacttacttgcaggtcttaccattgcaagtctctgcattcctcagagcattgggtatgccactttagcaaagcttgatcctgaatatggactctatacgagtgtgcgtgccacctcttatctatgctttaatgggaacttcaagagacatagcaattggacccgtggccgtggtatcgcttcttttgtcatcaatgattcagaaattaatagaccctgccattgatccaaatgggtatagaaagcttgttttcactaccactttctttgctggcatatttcaagctgcttttggactcttcaggttggggttccttgtggattttct

SEQ ID NO: 30207 - DNA, 262 bp, Glycine max
cgaaatggaagatgatgtggtctgaggcacctcttggtattgtttccccattgatggtgagggtgttggcagcaaagattcccaattctttatgcttgatattcaagtcatatgacatactgaaaggtcaggtcaggggcatgctattattcccattttcagcgaggaactgatgatactggttatagtgctgtaaagaaatattatatctgaaattttgtttctgccgagagttaactgacctgtagatgttaagccatca

SEQ ID NO: 30208 - DNA, 415 bp, Glycine max
caagcaacagatcaaactcctccatattccacgcccaaatctttttaataaattttctccaaataccattcacacaacaacatcgatttgtaataccatgaagtttttttcagcaatagagtttctaagttcatttcttgtgctgatgttcttctaccctttttgccactcactcgacaacaccataaccataaaccaccccattagagacggcgacgttttggtctccaacggtttaggaaactttgcgctcggtttcttcagcccgcgaaactccacaaaccgttacgttgggatttggtacaacaaaatctcggaacaaacggttgtgtgggttgccaacagagacactcctcttaacgacacttccggtgttctcaaaataagcaacaacggaaaccttgtactccacgac

SEQ ID NO: 30209 - DNA, 367 bp, Glycine max
ctctgctctctctctctctcttccacccacatgtagatgtgccttccttttccaaagggagcagcaacaacttgtgtactcttcttgttgttttccacttctcagaaagagatgcctcaccacaactatttcccttgcttgttgaagcctagtatcattattgtctagttcttgctgtgcttttttgtgttctctctctctctctctctcttttatggatcttggggtagtgggtttggagggggtggtgggttcacaaagtggttgcgtgtttggttcctctcttgcttcagatcctgagacaaagcacaagtggtacggatctggtgtgctcaagcaagagagatctgccatagcaagtgaagat

SEQ ID NO: 30210 - DNA, 542 bp, Glycine max
atcagccataaataagtgagttataaaaactataaaaaaaaagtactatttagctttataacacgttctagagcttatggatttcaggcaaagagctccaactttccgtccacaactttctgttcgtcgcgtgtacgagactttggagccacgatcagagacagaagaacttccagaagcttatcttctgcgtgtatatattcctggttttccaagggagaatgtaaagattacatatgtggcctcttcaagaactgtgaggattacaggagaaaggccacttcaaggcaacagatggcacaaaattgacaaatcatatcccattcctgattattgtgaggcagaggcacttcaaggtaagtttgagattccaattctcaccattacaatgccaaaaaaggccacttcacaagctgctactaaacaacaagaagtgggaacatcccaagagaaaggtgcagtagtagctgaaccaaagcctcaagaaaaagtccaagagaccacttcagcaccacaacctacaacaactactaaagtggaag

SEQ ID NO: 30211 - DNA, 753 bp, Glycine max
aggagataaaaaaatcttaaagaatatcgcatgccttgaagcatgtaaacaacttcataagattggagctttgtcagataatcttgttcctgatattgtcatggaagaagcagaggtggaggaattagggaatgaaccttatgatgaaaaccaaccaacttttgtcccatttggattggtaaattctgtgtcaaataatagtcaaacggtctatcattgttatttcatggaattcaataacaaatttagctatgatgtatctgtccaagatatttttcttctcatgcgaattgagctcgatccagaaattggatgcatgcaatttgatatgggttttgacagaggtagcttgtcggttaactttagatacaaaggaaccattaatctttcgcctgatcaggttcttttgtgtaaaaaattccaagttactatacttagaattctaatagatcatgatatgaataagttgactgctggtttggacagatgctatttggaagatgatcttgagattgattatcttctgcttccagctatgggtaaagggaaatatacagctattaattggttagctgttaattctgtaaatccatctgaagttagctgtaagtatcatgaaccccacataaggacaaaaagtggtttagtttgcagttgtaaactacaaaatgcattggtttgtacttcccaccctattggtaagattagcttctatattgccaccggtacaatggaattggatggaaattcacc

SEQ ID NO: 30212 - DNA, 505 bp, Glycine max
ggccttcataaaaccaagcgcacgcttccgccactcactctcacccctcctatcccccactttcaagccatattcttcttcagcttcggccttagttcccgaacttgatattcaacccgacactccccagaaccctaatctctcccccgaagaaacaaccttagccgacaagttccacgccgcaattaaagagcaccaccgcagaaaccccacacccaaccctaacgcccctcccccaactcccaacctcaccatccccgacctctccctcgccttttccgctatctccgccgcccacccaatctccccctccgtcgcccaccgcgtcatcgagaaatgcggcggcgtccgccacggcatccccttcctccaatcccttgccttcttcaactggtcctcctctctcgacggcttccccgcctcgccggagccctacaacgagatgctcgacctcgccggaaagttgagacaattcgacctagcctggcacgtcatcgatctcatg

SEQ ID NO: 30213 - DNA, 410 bp, Glycine max
tccacacgctttctccagagaccttcttcctagatacttcaagcacaacaatttctcaagcttcgtcaggcaactaaacacttacgttgcagctgttgcttggacaagaatctatggtagtgatagcaatcgttatttactcaagattattcagaagccgtagaatggatacgaattcgaagtagctggtctccaagaatcataactgattgttgcttttgaaccaagatccggttggtggttaaccttgtcggtttgattttttttcccctctatacttttcattgcttgagacttcgtcatgtggcttgaaattccacgtgtggcctcgttttatttcaagccacatgacgaagtctcaagcaatgaaaagtatagatgctcacacgtggaatttcataatgttacat

SEQ ID NO: 30214 - DNA, 797 bp, Glycine max
ctcgagccgaatcggctcgagctctacaattgaaagttcaatcaacccagaaaaactagtttttcatattgttactgacaaaaaaacttatgctccaatgcatgcttggtttgccaccaattctattaaatcagttgtggaagttaggggattacaccaatatgactggtctgaagaagtgaatgctggtgttaaagagatgctggcaactaatcacttaatttggaagcaatactatattaaggaaaaggaccttgactatactcaagagcatagcagatatttggaggctttaaggcccagcagcctatccttgatgaatcaactccgcatttatttgcccgaggtaattagttatttttggtagccctctgattcagtaataactgacaacaagtctaaataatgcttggcgatgattgtttcatcatctgatttttgtggaccacaacagctctttccagatctcaaaaagatagtattcttggatgatgatgtagtagtacaacatgacatatcttctttgtgggaactagatcttaatggcaaagtcattggctctgtattgaagtcgtggtgtggagacggctgctgccctggaagtaaatacacaaactatttgaacttttcacatcctcccatatcatcaaagtttaacggtgatcagtgtgtatggctctatggcatgaatatatttgatcttgaagcttggaggagaacaaacataacggagacctaccatcaatggttgaaaattaacctcaagtccgggatgacgatgtggaatccaggagtgc

SEQ ID NO: 30215 - DNA, 415 bp, Glycine max
ttacaccaatatgactggtctgaagaagtgaatgctggtgttaaagagatgctggaaactaatcacttaatttggaagcaatactataataaggaaaaggaccttgactatactcaagagcatagtagatatttggaggctttaaggcccagcagcctatccttgatgaatcaactccgcatttatttgcccgagctctttccagatctcaaaaagatagtattcttggatgatgatgtagtagtacaacatgacatatcttctttgtgggaactagatcttaatggcaaagtcattggctctgtattgaagtcctggtgtggagacggctgctgccctggaagtaaatacacaaactatttgaacttttcacatccttccatatcatcaaagtttaacggtgatcagtgtgtat

SEQ ID NO: 30216 - DNA, 523 bp, Glycine max
cacatcctctctctcttcataacatttccaatccatccaacatattcttcagttagctcccccaacctatacacttcaccaccacaccacaaccctaccctctctctctgtcatggtcattggaggagccttccctcgtttcgacccaatcaccaaatgtagcacccaagaccgctccaaccagaccatcgcctcggacctcgatggcaccctccttgtctcccggagtgccttcccctactacttcctcgtcgccctcgaagccggcagcgtcttccgagccctccttctcttaaccttcgtccccttcgtctacttcacgtacttcgtcctctccgaagccctagccatcaaaaccctaatcttcataacctgcgcggggcttaaactaaaagacgtcgagctcgtgtcccgctccgtgctgccgaggttctacgccgaggacgtgcaccccaccacgtggcgcgtgttcaacgcgttcggggggaggcggtgcattgtcacggcgagcccccgggtgatg

SEQ ID NO: 30217 - DNA, 590 bp, Glycine max
ttcacttcagaagttccctctctctctctctctctctctctctctgcactgagcttgagaagagatatactcaaaagagacagatagattcactgagaaacacgatgccgtcattgccttcttcttggttcttcacaacgcttctactatgcttcttcttacatgttacttttgcaggtgacccttatgttttctatgattggaccgtgtcctacacctcagcctccccacttggagttaaacagaaggtaattgggatcaatggacaatttccaggaccaactctgaatgtcaccacaaactggaatgtagttgtcaatgtcaagaataatcttgatgaaccattacttctaacatggaatggtatacaacataggaaatactcttggcaggatggagtttcaggaactaattgtccaattccagcaggttggaattgtacatatgagtttcaagttaaagatcagatagggagtttattctacttcccttccctaaatttcctgagggctgcaggagtatatggaggaattatcataaaaaaccgaccagtgattcctgttccttttggattaccagatggagatatt

SEQ ID NO: 30218 - DNA, 248 bp, Glycine max
caccaatttagtttgaagaatttggctgaatcactaaaaacactaggtaacaaggcaatgcaatctaagagatactctgatgcaattgagttgtataattgtgccattgcagtccatgaaaagagtgctgtttactactgcaacagggcagctgcttacactcagattaacaaatatacagaagcaatccaagattgtcttagatccattgagattgatccaaactatcccaggcatacagtcgtctg

SEQ ID NO: 30219 - DNA, 331 bp, Glycine max
atcgagccgaatcggctcgagcttcaacaccatggtggtcacctctgtctcactagtccacaacagagtgagtattaatcgttacttcaagatcaggataagctttttccttctgcttcatccccttccatggccgcaccttccctctcctccgctctcaactccctctcctctctatccctctccacctcctcccgcttctctctcctccctccacctgccctcctctccaaacctctccccctcctcttcgcaaccaccaccctcaaatccaaaccctccgacgacttgacacatcgttcttcgacaacatcaacccgcaagacgacat

SEQ ID NO: 30220 - DNA, 781 bp, Glycine max
tcttcgcgtccgccttaatttatattatacacgtctctagctagctacataatattctcttcttccacacacacaaaagaaaaaagaaaattgtttagagtgtggagggtaaaaaatgagcaaagttcttcaggcgaagttggaggcaactccaacatgggctgttgcagttgtgtgctttgtgatgcttgctatttcaatcctcattgaacatattcttgaagaacttggaaagtggttaaaaaagaaacacaaaaaggctcttcatgaagcgctggaaaaggttaaaggagagcttatgctgctgggattcatatcgctgctcctagtgatgtttcaagatcacatttctaatatatgcatcccaaaaagcgttgcatccacttggcatccttgtgatcccggtgatgagcgtaaaaaaccagacggatattatgacaaatgcgcagataaaggtaaagaccaagtagcttttatgtctgaatatagtattcaccagctccatatattcgtctttgtgcttgctatttttcacatcctacagtgcatcatgacactgactttgggtagaaccaagatgtctatatggaggaagtgggaagacgaaacaaagagtcttggccatcagttccaccatgatcctgagaggttcaggtttgctagggatacaacgtttggacgaaggcacttgagctcatggagtcgatcaccaggttccttatggatagttagcttcttccgacaattctacgggtcacttaataaagtagactacatggca

SEQ ID NO: 30221 - DNA, 382 bp, Glycine max
gcctccactctcatcttcatggacatcactcattcgaatgccttcttgattggaatcggcgtatgaatattgcaattggttctgctgaaggaattgtatcttcatcaccaagcaacaccgcatatcatccacagggatattaaagcaagcaacgtgttgctggattctgatttccgtgctcgtgttgctgatttcgggtttgctaagttgatccctgacggggcaacgcatgtgactacaaaagttaagggtaccctgggctaccttgcaccagaatatgccatgttaggaaaagcaaatgagagttgtgatgtctacagttttggcattctccttctagaacttgccagtggcaagagaccaattgaaaagcttaattcga

SEQ ID NO: 30222 - DNA, 297 bp, Glycine max
cgaggccttcacagagagaaagagaaaacatttcaaaaaaaataaaaaaaaataagcctctttctctctctgaatttctaagcctctctcacaacaatggaggagccacaaccaggacccagcccgttacgcaaaatgattttggtgtcatcaatggcggccggtatccaattcgggtgggccctacagctctcccttctcaccccatatgttcaaaccctaggcgtcccgcacgcttgggcctcatttatttggctatgtggcccgatatctgggctgctggtgcagccattgtgg

SEQ ID NO: 30223 - DNA, 255 bp, Glycine max
caacagcagctgcaaagtgtcaggcaaaacaacttacagaagataagtatggtgtccctggcggaacaaatggtgcttggaaggaagagttagaatctgctgttaaaaggtatgcatctgtcatgacagaacttgatgctgcaaagcaagcactgagcaagactcggcaagagtatgattcatccttggatgaaaaaatgtttgctttcaagcaagcagcagaagctggagatgcattgaaggaaaacacagaaa

SEQ ID NO: 30224 - DNA, 363 bp, Glycine max
atgactcaagtcttaacccaattagtgttccccgaagttggatctggaaccttgataggcgaacagtgtattttggaacctccataccatctatattcaaaggtttatcaacacgagaaattcaacaatgcttttggagaggatatgtctgcgtgcgtggatttgaccgggaaaagcgagcaccccgacctctgttggctagactacacttcccggttagcaggttgcctaagaatagggataagacccaacaagagtccgcatcggcaaactcacaaggattgaattttaaacaaaatccagaacagccagaattgctttccaacattcggcagaccggaggatcctgaaggcaaataattg

SEQ ID NO: 30225 - DNA, 448 bp, Glycine max
cttaattgttctgcctaccttgcagctcactgaatgcagtagccaatgatggaggatggatatatcttggaactaacaaaactatggcaaaatcaagtagcactggctacagtcagtggtccctctcaaaggatcatcttcaggtgggtgatacagtgcgctctagaaagctttccaattcatgcaatcctcaaaacatggaggtcccagaaggaaatgttgttggtttagaacgcaatgtagatcatggatttgttctagtgaggctccatggtgttcatgaccctgtaaggattcgtgcatcgactcttgaacgtgtcaccaatggtttgggagctggggattgggtacgcttgaaagaagaagatgacaagcactcgccagtgggtattcttcattctatcaatcgtgatggcagagtgactgttgggtttattggtctgcaaac

SEQ ID NO: 30226 - DNA, 423 bp, Glycine max
cttttccttctcctaaccctctttcctattaagaggagaaggaataacaaaaacaatatacacaatggctttcgctttcactttcaccaaaaccctaattctcttcgtctccctctcctccctcctcctccaaacccacgcggcccgcggcccccgcaccgtccaggcccgcctctacagcctctgcaagcccaccaccaatgttgggctgtgctacaggaccatcctgccggaggtgctgggcctgccccgcttcaactattacaaggccctcgaggtggagatgctcgcgacccagaaacaggtggagaaaacctcgaagttgatcagcgtgctcctggcgaggcccggaaactcgaaggatctcggcgactcactccagatttgtaaggagcagtacggcaacatcatggactcgatggc

SEQ ID NO: 30227 - DNA, 602 bp, Glycine max
tgcttatagagatatttatgaaatatggctgcaatcacagagaacaagcaatgtaagagacaagacaccggatagagatgagtggactgaagatgttaatgggaagaaaatggctcttattcgccagatatttatggaagctaaacgtctgtctacagatgagagactacgccagtccaaggagtttgaagatgccttggaagttttaagttccaataatgatctgttagtcaggttattggattctcaaaatctttatgaacttcagtctactccagtagcagagacaaagcgtattactgttcttaaaccttcgaagatggttgacaatgaaaattctggtggaaaggggaagaaaaacgacaagcagattaagaaaccagcaaatgttggtgctggatgggagaaatacagtcctgcatactccccagccagtcagaaaattgacgagtttgcagttcaacctactcgaatagtggtattgaagcctagccctgggaaggcacatgagattaaggctgtgtcttctcctactatgtcatcacctcgaaatctgcagagtggaaatttctaccaagaacctgaggatgatgatgatgtac

SEQ ID NO: 30228 - DNA, 290 bp, Glycine max
gcaaaggtgaactatgaagcaaatggctgggttgtacatcacgtttctgacatatgggggaaaacatcaccaggtcgaggtcaggctgtttgggctgtatggccaatgggtggagcttggctttgtacccatttatgggagcattattcgtatacattggacaaggtttttcttgaaaataaagcatatcctttgttggaaggatggacatcatttctgttggattggttgattgagggccgtggtggattattggaaactaacccatcaacttcaccagagcacatgtt

SEQ ID NO: 30229 - DNA, 482 bp, Glycine max
tgggaatatagtccccttgatcttggagacccatttccaaataatgaaggctctgtccatctttggcatggagatcaggatctcatggttccagttacattgcaacgatacatagcgcaaaagcttccatggattcactatcatgaactccaaggttctggtcacatgtttgctcatgctgatggtatgagtgatactatcatcaagtcacttttacgtgcgaagtaggcttcttctatgttagttactgtcagtgcgaagttggcggcttctatattggttactgtctatctcaggtcagtttcggcatttaatatctcagttttggagaattcactgttggacagaatgatgtatgatcaactttgagcaatatttgagtacacttaatggtaggaagaatcctattacttcttaataattgtatgaactttactcccttgtgtgggaagttatttaacagaagttgacttgttcaaaaa

SEQ ID NO: 30230 - DNA, 257 bp, Glycine max
cttgattctgttgttatttgcatttgaagctgtttgcttggggacgacagtatttgtttgctcagagacaaatgaaaaaaaaaatgtaaaacaagattgttacatgcatgtggatgtacaaaatgctgctacatattgcttgaaattttacaataaggaaacaaaaaaaatttgaaatgcaatatgtaaaaatcaagtcttgtataccgtgagtgattattgacgaataaagcctgctaaataatttaatttttgtg

SEQ ID NO: 30231 - DNA, 273 bp, Glycine max
aggattctcaaatactcaactcattagcccttatcttgcccttattcctcttcatgattctgatcctaaaactagggagaaaactcaagagaactgaattgtctctaaacataccccgaggaccatggaaactgcctattataggaaatttacaccagcttgttacatcgacaccacaccgaaaattaagagacctggccaaaatatacggacccatgatgcatctccaacttggggagatcttcacaatcgttgtttcctcagcagagtatg

SEQ ID NO: 30232 - DNA, 315 bp, Glycine max
cgacggaacacattctacgtactcgacagacaattccatccctgtcgtcgtttctcaactttgcgtatcagaagacttcattttcttctgcatttctccgttaaagaaaaagcaagaacaaaattaaatttactattttctgtgtgacactgtgtcttatttatgctctttctgtattttctttctacatctatattctaaaccttccttttcctttctgtctgctcctgcgttttcatttattgatgtccttcttttgttttatttgccaagatgattttctgattggtttttgatgttacaaggaaatctggg

SEQ ID NO: 30233 - DNA, 263 bp, Glycine max
tcctaaccaaacccaaccattaaaaatccacataaatggcattattgaaggaagaattcaacacctatagtaaattgacgacatagcgtatggtcatgaagagtttttcttttcggtttctccattgggtttgggtagatagaaatttttagtttggtcctgatcacaggaatttattatactgtattgttttacagtccaaagcagtccggaatcgtcccaatgcaatgcttacagatttattaccgcttctgctgactgat

SEQ ID NO: 30234 - DNA, 954 bp, Glycine max
ttgctctacgcactatagtctttgttttcatttactaccatatttagttatcagcaatggacttccactttggaaactctcctccttatcccaataattatgctcataattctcttaatatggctctatcttcccctgagattgcactatccgattatctcatgctcgatgactatgttgatcatcaagattctcgatcatcacaaagcaccgagtcatctgaaaaagcaaccttcaatgatgccactcacggattcagtactggtgcaacctctaagaataataacataaactgcaaaaatgggattaatgaaaacaaaggtggagtgggtccaaggatcgcgtttagaaccaaatcagagcttgagatcatggatgatggatacaagtggaggaagtacggcaagaagtccgtgaagagcagtcccaatctaaggaactactacaaatgttcaagtggaggatgcagtgtgaagaaaagggtggaaagggatagagatgactacagctacgtgataacaacatatgaaggtgtgcacaatcatgagagcccatttaccacatactacagccccatctccttcgtactttctgatactactttcaaatgacaccaacttcaaacccttttgggcatttacacctccctagcttaattatgtgccaagaaaaagcttggaagattcgatcgagcaggggaagctatgtatcattgcattgtctaatcaatcataatttattttcatgctgtaataggttgaagagagtttctatacctttttttggttccacgtttaatatatctctcaattaaaaatcagcctttgctagttcatgtaacaaggaacatgattctccatgtgtaaagttgttcaaatcttaaaagtaagtatcttgtattaggattagagtatctctcttgtactctgtttaataataaaagttttgcctcct

SEQ ID NO: 30235 - DNA, 285 bp, Glycine max
aaaccttagaataatgtcttggctccttataattctgtttctcagcctcacacatggtagtttttcagagactagccacgacaagaagcttccttatgctgttgtggttggcactgtctactgtgacacatgttctcaacaggaattctccattggaagtcatttcatttcaggtgcctcagtagttgcagaatgcaaagatggaaattcaatacaaagtttcaagaaagaagtgaagacaaatgcgcatggggacttcaaagtgcagctaccattcagagtgag

SEQ ID NO: 30236 - DNA, 267 bp, Glycine max
caacaccacacgaagcctttgttgcattcttctggctccatgttaccctccaaggacaaggagctttctgtttctgccagaaaactcgctgctacactgtgggaaatcaatgatttgcccccttcgagggtgaagaaggagttcgaggttgatccactgagaggctgcaaggagaaggttagaggcagacagaagaagggtgtgcggttgtccagatcgggcctgttaagggcatagatgtcagatccgtcgcatagtcctgtctca

SEQ ID NO: 30237 - DNA, 281 bp, Glycine max
gccttctttcatgactagagtggccatgagaatatctagatcaagatggttcactttcttgagaagagtattccattaccaaaacggaccaagatccaatctcggctccaaccctttcaattccagcacttggatgatgctggagttgattgcgttgttggtccaaatagcaagcacaacattcactttggccatttcgacgagtgtgaagccaatttggcctatgagagtgtggatagcaggttatgatattggttgtgtccttaatcttctgctacttt

SEQ ID NO: 30238 - DNA, 502 bp, Glycine max
tgatgttcatggctgcttgccctaggtcttatagctacgcatacgatgatgctacgagtacgtttacgtgttccggcgccgattataccgttaccttctgtccatcctctccaagtcagaaatcttcacgagataccactaccaaccccatgacctcaacaacaacatcaccagggtcagggacagtgacaggaaccggaaccggaacaggatccgaaggggcagtggtatacacgggtgcggacaacggcgttgcgtataatacagttacggattccgggtcaagttcaggatccggaggagaaacaatgctcgcagatgggtcatatttagctggtttagccatgggagactcccctgaaagaacagtttccatcgcgtttgtttactctgctagctttttgcttattctcttcctgctttagctgcaccagcattgtttgttaaatgtgtaaatggctcttagattttcgggtttttcgtgggtgggttcaagaatttg

SEQ ID NO: 30239 - DNA, 411 bp, Glycine max
atacgcaaccggtaacactgctcacgccaccgccggaaaatcgcaaccaccgtctgccaccatcagttgattaaatttgatggataacaataattggagacctaatcaaggcactgaagccaatatggatactagtgattggagaggtggactgccgcacgagtcacgccaaagaattgtcaacaaaataatggacacgttaaaaagacatcttcctgtttctgttcaagagggattgcatgaacttcagaagattgctcaaaggtttgaagagaagatttttactgctgcaacaagccagtctgattatctacggaaaatatctttgaagatgcttacgatggagactaaatcccagggctccatggcccccaacttacctacaaatcaaggtggccctagtaataaacc

SEQ ID NO: 30240 - DNA, 447 bp, Glycine max
ttccccagtcacacacaaacagctcaacctcggaccaagatttacattagatagatacatcattcatacatggcttgttcccgcattcacttcaaccttaatctccctttcccctccgatgcggcaccaattccgtacacatgtcactctccctctcgcctctctctttcccctctcttcacattcacaacaccaaagatcgcttattccagtgctccgcggcgcacgtgtggtgcggtgtgctgtcagatgaccatggaggagaagcctctctctgagaaccaaatgctcgtgtatgtgcctcctcatccgttgatcaagcactgggtttcagttttgaggaatgagcaaactccttgtcccatcttcagaaatgcaatggctgagttgggaaggctactaatgtatgaagcttcaagagattggttgccaactgtttctggagag

SEQ ID NO: 30241 - DNA, 350 bp, Glycine max
gttcttaacctttcaatccattcggctgaggttaccttccccttggccataatcacccaaaaaataaaaataaagaaaagaaaagaaaaaagaaccttcatggcaaaaatgcataatttcttccttttaacgtgtttgatagtcatcatacctaccttgcatgccaatgtcaaggaggatgaaatatattggaagaggcaaagtcaaatacttaatgattcatattggaagcaaaaagcatcagttgcagaaaaagagaacaaacaagcttatacttctgacccatattcactcaccaagaacttgacctatagtgttagcgaaatcatagttggtgagcataatggaag

SEQ ID NO: 30242 - DNA, 472 bp, Glycine max
acgagtctggtatgttagacttgagggtttagtggatggtgatgctgatcaatgcaggcagcaatctgaagaatggtagtaaagggttggtgaaggctggtttgtaaacagaattcacaccttggtatggacgtgccattggaagaccaaaggaggagagtacaaaggcagttggtgatccaatatgttaaacatcgtgcttgttctggtgcccaatattatcgcatagattggacatccatttctgttcttccagcttctccaatcgcttgtatgagaagaatgaattcgttgaatagtaacatgagatttaggaaagccgtgaataatctctgtagcatgctcagtgaacgatatgcaaagcaactggaaaagtcccagtactcgtcattaaacaatgatcgcaaacagtttgtgcgatcccagtcctgtgaaggtatccccagtaattctagtcctgacgccggctttc

SEQ ID NO: 30243 - DNA, 345 bp, Glycine max
cttcagcgagaaacattggatgctagttttaaaaaagattacgtaggttgatatattttcaaaggaaacagagagatggaagaagaagagagtgaaaaatccccacaattggtgcgagtccttgaagctctgaaagaagccacccacgacatccaacgacaccactcctcggattccccagccataaaggcactcctggaactccactccattctctcctcctcggacccctacctctccgctctctccgaccacctcatccgcctcaaaaccctcgtccactctctcaaccactccaatggccttctatccttcctcactcgccccctctccactctctccctc

SEQ ID NO: 30244 - DNA, 399 bp, Glycine max
cttcaatccaattccaaagtaccgtaacgtaacaaacttgactgtcgtgtgcctcagctgctattgttcatcgcaagctacctaacaagttcgaggctgaacctgagacaatggcgaatcacaatagcagattcctcttacgctccttcatccccttcttccatcgccgaatgaactcacctcttcttccttcagcaacgtcatgtcctcgggtaacttcggggacagcttttgatgaaaaattcacgcagttaccgagcaatattgttcgcggggatcatcgtcaagttttgtcttttttcaatccttcaagaaatttcgcggaaaccaaacaatggggtgttggaattcggcacaaatgttttggttctatggctgggtcggttcaaaggaacccca

SEQ ID NO: 30245 - DNA, 571 bp, Glycine max
  unsure (1)..(571): unsure at all n locations
taggggtgtccgtgcgggtgcgttggggctgatgttgaactctgttgtgcttggtgcgacgtcgttgggagtgaaagtgctggcgcgtggggttgggggcgtcaagaggctgtgggggattgttaacttcttgctcgcggtttgtttggccatgacggttttggttactaagatggcccaacattctcgacaatacaccctactccccaacgcccaccaggaacccctgcctcctcccgccgccgtcaaagccggcgcgttggctctcttctctctcctcggaatcccactcgcgattacttacagcataccctttgctctagcatcaatattctccagcacctcaggggcaggccaaggtttgtctctgggagtgctcaatcttgcaattgtcataccacagatggtggtgtctgtgataagtggaccatgggatgctctatttggaggtggtaacttgccagcgttcgtggtgggtgcggtggcggcggcccgcagtggcattntatccataatcctgctgccatctccaccaccggatntgccaaagcagcaacggcagcncggagga

SEQ ID NO: 30246 - DNA, 525 bp, Glycine max
  unsure (1)..(525): unsure at all n locations
caatcacacatgcatttccctctctaaccatatttacaacatccaaacagggacttaattaaattactagaactggagttatcaagctatcccatgatgttcgccaagaaacgttcccggcgaggcgtcgcttcatcgttcccgagctcgaacgcgaagaagctatcgagactgccgcacgtgttcgcgaaaatactagagcttccttttccttcagaagacgacgtttccgtggaggaaacgccgcagttttttcggttcgtggcgtcgtgcaatgccgatggtggcgtgagagctctggcgatcgacatttttccggggataacgaaaatcgtgataaagagaatggacggtggtgacgtggcggttccgggtcagcagcagcagcaggttccttctggctttggactgtggcggttccggcttccgtcgtggacgcagccggagatggttaccgncgtgtgcagcggcgggaagctgatggtgacggtgccgaagatcaagagcagagcaaactgattcgat

SEQ ID NO: 30247 - DNA, 280 bp, Glycine max
ctctttctctctctctctactccaactccttgatgccaattttagcatcagcgttgttgcctccattcttcttcttctcttaatgggttgcatttactcgcgagtctgcataggcgacaattgcagaggctcaagcatcaacggagaccccattatcgcccgaaacgacgtcgccgaagtcgcgaatttctccccttcctcttcggatgttgaagaaggcgaaatcagagaccaattgaaccaattgagcatcaccagagactctgaagctggaatccga

SEQ ID NO: 30248 - DNA, 392 bp, Glycine max
ccttggagagctttggtgctgatcaatttgatgataataatgccaaagaaagaaggcagaaaatgtcctttttcaactggtggaacagtggtttgtgtagtggaatcattctaggagtgactgtgattgtgtatgttcaagaccatgtcaattggggggttgctgatatcgtcctcacaggggtcatggctgtctcattgctcatattcttgattggaaggtcttcttatcgttacaggacaccaattgggagccccttgactcctatgttgcaagttcttgatgctgctatttccaaaagaaagcttgcatatccttccaatccaactcaattgtatgaagtttccaagtctgagggcaacaatgaaagatttctggctcacaccaagaaa

SEQ ID NO: 30249 - DNA, 292 bp, Glycine max
cttagttcagagtcaaaaaatctgttccacggttacaaattgtcatacttgttgttggaactagaggcgacgtacaaccttttctggccattgcaaagagacttcaggagtatggtcatcatgttaggctggcaactcatgataattttaaaacatttgtgaagtcagctaatgtagatttctatcctctgggtggtgatcctcgtattttggctggatacatggcaaggaataaaggtttaatcccttctggaccggctgaaatatctgtccaaagaaagcagctgaaggc

SEQ ID NO: 30250 - DNA, 400 bp, Glycine max
  unsure (1)..(400): unsure at all n locations
gaatatcaattgggcaaagcggactaaatgcaatatctgcaacacaaataagcctgggcataatgagggtggtgtaagaggaggacgaggtggaggttacaaagagcttgatgaagaggaaatagaagaaactagacgtcgtaggagggaagctgaagatgatggggagttgtatgatgaatttggaaatcttaagaaaaaattccgtgccaaaacacagcaagctgaagctgcacgtgggcttcctggttcagggcgtgctggttgggaggtcgaggaactagggatagacagggatgctagagaaagtagagacagaggaagggagcgcaatgatggggagagcaggaacagagagcgaacgnnaaaagagaggcctagcagttggaatagagagagg

SEQ ID NO: 30251 - DNA, 357 bp, Glycine max
gtcttgaaccaacccattttgtatccttttccatagactacagtggccagtgtctgtctctgctggcggtgctttctttccgtctctgggcttcacaacaatgaaaggcttccaatccgatttatcctccgccgttcgcctcaacattggaggcaagaacttttgcaccaccaccgatactctcactcagcgcgaacccgattcaatgcttgccgctatgttcagtggccgccacacgctgtgccaagatcctgacaaggggtatgtgtttgttgatagggatggtaaacactttcggcacattctcaattggttaagggatggtgtggtgcctactctcgaggagtctcagtactc

SEQ ID NO: 30252 - DNA, 425 bp, Glycine max
ggttgatcaaattaatttaactcatcattaatcaacttcgcattgattaattaaatagcgatggcaatgacaagggtgatgcagggtcttgttctctgcacacttttgttgtcggcggttttggtccaagaagttgaggcaagagtaatcagcaaagaagcaatgcagcgtaacaccattcctggatgcagcaaagtacaccccaatgtcgccgcttgtcatctgccattagttaacatcaactatagaagaggttgtgagccaggagaaagatgtcgccaataaggtccagatcgaggatgatataagccagggactcggcctttgatcaatttcttttaaaaaccatgggtactggctccaatatgtaaaaggccattaccttgggcaccaagtaaaataatgaaatttcatctttgtctttc

SEQ ID NO: 30253 - DNA, 258 bp, Glycine max
aagaaattgcgaagtctaaagccaaagaagagaagaagaaagtagaggctgagattgagctgctcttggtagtagagaagcttcaagagttacgctccataagaatacaaaagttgaaaaaacaaggccattttctcccagaggaggatgacaagtttcttgagaaagttcaagctgctgtggaagaagaggagcgtgaagctttggctgcagttgaaacagatgctgctaaagatgcaattgcaactgctgaggaat

SEQ ID NO: 30254 - DNA, 251 bp, Glycine max
ccctaacggagcatgtggtcgcatagctaaatcttacttgaagtacactacttaaagctagagtatgtgttgtagttatatgtgtcttgaaattgttatgcctaccctatcacaataaattattattataataagagagtatgttgcttgatcatatggctacaatttgtaagtgatgattaattaccaataatcgaatctttggtaatatatatttaaaaatcaatattatattatgtgttaaggtatta

SEQ ID NO: 30255 - DNA, 264 bp, Glycine max
cgcgaagagtcgagggttgccgttgatttggaatctgtggcgacgcacgagataggtcacgtgcttgggttgggtcactcttcggtgaaggaagcggtcatgtacccgagcctcagccccaggagaaagaaggttgacttgagaattgatgacgtggcaggagtccaagctctttacggctctaacccaaactttacttttagttctttgttgcagtctcagaattcattaaacgctgccgttgggttggaaacggtttctata

SEQ ID NO: 30256 - DNA, 510 bp, Glycine max
acgagcttccctgaattgacaacaaaacatctactattgacgccattctgagatctaagaacaccaatgtctgtttctgaacgtgttgttcatttggctttcctcccaagtgctgggattggccatcttaacccatgtcttagaatagcagcactgttcctccgctatggttgcaaagtcactctcatcactcccaaacccacagtctctctcgctgaatcaaacctcatctctcgcttctgttcttccttccctcaccaagttacccgaacagacttaaatctcatccctttggatccaaccacagttaacaccagtgaccctttttggcttcagtttgaaaccattcgtcgttcggttcaccttctagctccaatcctatcttcactttcaacacctctctctgctttcatttacgatgttagcttaatttcacctctaattccagtcactgagaaactcacttgtccgtcttacatttacttcacctcatcagctagaatgctctct

SEQ ID NO: 30257 - DNA, 441 bp, Glycine max
ttgaagaacttattcaagctacaaatgtgaaccatgatcttgaactacttacaccaccaggctctgatggagaatatacaaaatcatggttcacatatgaagaacttattcaagctacaaatgggttttcagcacaaaatttgttgggagaaggtggatttggctgtgtttataaaggtttgctgatagatggaagagaagtagctgtgaaacagctcaaaattggtggtgggcaaggggaacgcgaattcagggcagaagttgagattattagccgtgtacatcatcgtcatctggtttctttagttggttactgtatatccgagcatcagagattgcttgtatatgactatgttcccaacgatactcttcattaccatctccacggttgaaaatagaccagttctagattggcctaccagagtcaaggttgctgctggt

SEQ ID NO: 30258 - DNA, 319 bp, Glycine max
gcgtttacgcgtccgcccacgcgtccgcttttcttaaatttgctgttgcacgtcatttttttctcatgcatgacagccttcatgaaggagaccttacaaaaaggcgctccaacgctgtgaataattccaatctgtttaagttggctatcaagcgcaatttgcaggtctatatatgcgatcagacatttgatcccactcagttttatgcattaggccgtccttgcccaagactttgtagcaatgaaaccaaagaaagcatacacttctgtttaaattctgttaaggaacaaggaaaagtaactgaaacccaatgtaacaa

SEQ ID NO: 30259 - DNA, 271 bp, Glycine max
ttcacaccctcaccaaatggaaaaggaggcaaggaatttgcaacgttgtaaatcctcacccccctcctttcgacatttttggtgtcgacatgatccgctagcactaattggaatattaggagttaacccttcgaggggggaaaaccaaaccaattcaaccaaatgcataccatgcctcctaaaggcaccctaactttaatattccttcaccatgatgtcctttctttcaacaacagagaacactcgttaatcacaccctctccacacaaca

SEQ ID NO: 30260 - DNA, 297 bp, Glycine max
gttgacgcgactttaatccgtgaggtcgcaacgtaaaacaaaggcgaaggggggtaatcaaacgaatcaaccatagtccattaccttcttcccgcgctgaaaaaccagtgacagtgagtgaggatctaagctccaatggaagacgaaatggcgatgggcacttctcccagttacttcgaccctcacaacctctcctccagacagcagttccgcagatacgggaagacacactcaagttcaggtgcttcaatccaatacgacaactcggcttctaagttaagtgaaactgggttgtta

SEQ ID NO: 30261 - DNA, 360 bp, Glycine max
ggatattggtttcgttcaatattctatgacttttctctttaagaaattctagatctgctttatatgaaggcatatatagcttgaagttcaccatcaagcttacacatagagagaaaagaggctaatttattgtgttcatagatacaagacaatgaagaacctttcatagagttgaacaaggtggatcgaaggcatgggaagaggcctctcccttctgatcatgcatcaagggagagagggaaggtttcaacttttctgttaaccaatctccacctaagagccaagggggagaagcttctcaattctcctttatgcatccaatcaatactggtgatgatagcactctttcttcaccaattc

SEQ ID NO: 30262 - DNA, 343 bp, Glycine max
ggctaacttgcggtcgccacgattaccttgtagcttcttcctcctcctttctcatcccgttcttattcactctcaaaccctaatcatgccgccattagcgtctctgcaacttcggaggctcttactccgttctcgttccttaccattcacatctccctctccgattcatcactctcctctgtttccccgacattcctcttcccatttctattctcgaactctcttcaccccttcgttcttcataacaagacatttctcatcggaaacccaaacggatgagattgctagctccctctcctcagagcttctcaaagagcaagactccgacgctctctccgtctcg

SEQ ID NO: 30263 - DNA, 287 bp, Glycine max
tttcagaagagagttaggtttgtctcatcccaacagtttcgcgcgtcgtttttcagcttccgaggtccttgtgaagagcttggatttatatgggaagttggatggtcatgaagggtgtgtgaatgcagtggaatttaactccaccggtgacattcttgtttctggttctgatgaccgacaaattatgttttggaattgggaatccaaaactaaattgtttgcatacccttctggccacacagacaacattacacagacatagattatgacattcatcgatgactgcc

SEQ ID NO: 30264 - DNA, 451 bp, Glycine max
tgggaaatatcaatatgctgcttgacaatgtaacgagcactagcactagcactaacactagcaaatatcctctattgagaagaaggcgtaggttgattgttatagcacttgatttgtatgacaataatggagctccggagaagaaaatgattgagatggtgcaaaagataattaaagctgtgcaactagaccctcaaactgctagagttacagggtttgctttatcaactgctatgccagtgatagaaacagtagagttcctaacatcaggcaatgttcaagtgaatgagtttgatgctttaatttgcagtagtggaagtcaagtttactaccctggcatcaatacagaagaaggaaagcttttgcctgatccagattatgaggtacatattgactatcgttgggggtgtgaaggtcttaagaaaaccatttggaaacttatgaatggtga

SEQ ID NO: 30265 - DNA, 247 bp, Glycine max
gctgaaaataaagtgaaagaaggccaaaatacaagcattagtgagaaaagtcctaaggaagagtcagacgttagccagctgaaggatactgatcctcctgatggatctagtaaactagagttgagtgacaagaatactccacaaccattgaaggccaaatctataattgttaagaaatctcaggctggtaaacttaaggctaagaagaacaatggttctcaacagattcgtgggaaaagaagaatta

SEQ ID NO: 30266 - DNA, 378 bp, Glycine max
cttcttggacgctacgcggcgccggcgccggcgccgattggtggtggcgtggcggcgtttgtttacacgtctatgcttgaaaaccctaagcatccttatttttataccgttagcttaatcggaatcgccgtcgggaaacggactattccggcgccggagctgctacggcgggtgcacaatcgaggtgacggcggcgtggttgtggcctccggcacgacgttcacgatgttgccggcggggttttataactcggtggtggacgagtttgaccgccgagtcgggcgagacaacaagcgcgcgcgtagattgaagagaaaacgggactcgcgccgtgctattatttgaactccgtggcggacgtaccagctctgacgctgc

SEQ ID NO: 30267 - DNA, 270 bp, Glycine max
atccaacaacattcgatcttgatgatgattcatcaactacatcatgtccatattacttcaaatggatccatgaagatctaaaaccatggaagagtaaaggaatcacaagagacatggttgaaagaggcaaaaacgtttcccattttaggcttgtaattgtaaatggaaaagcttatgttgaaaagtatgacaaagtgtatcagacaagagatgtgttcacaatatggggaattttacaacttctaaggttatacccgggaaagataccag

SEQ ID NO: 30268 - DNA, 530 bp, Glycine max
gttcaagcttgtacaacccaacattattcataacatgatgttgaggctggccacagcacagttaggggaaggttcgattgacctggagtctataggaaacatagaagttacttcagacggcgctgcattgtttggtgatggagaagataaccacaatgattctgaagccgccaattgaaaaattgagctcaacaaaagtccattgtctaaaaattggtgttttggtggggggtttaagtggataactcctaatagtaagaggagcaaataatgcaatgcttcaaggaagtttgctagtcaattggttgaggaattctcaattctacatggtctctgtgattttctaatgcatgccaacttgatagtgtttttatgtctcaactgaatttgtctccagcttgtggctattttatgttattgcattcgggaatgtatatattctaggagtttgtctgagatctatgatgatgtgtttgttacaataatattaataataattggtacatcattgtgaataatataaaaaaaaa

SEQ ID NO: 30269 - DNA, 768 bp, Glycine max
ataaaatccaactcggcctctttcgcacatatacccaaccctttaaatcaaaacctaagaatttgatatgagagagcgattgtgtttccgttagtatatatactcgatttgttgcgtatctactatcttacccttagacataacaatatcatctagctagctagctagctagcaaatagcaatgttaaaaaaccaaccacaaccagattggcctgagcccattgtccgggttcagtccttatccgaaaactgcgaagattcaatccctgaaaggtacatcaagccttctactgatagaccatccataaaaagttgtaattttgatgatgccaatattccaatcatcgaccttgggggactatttggtgctgaccaacatgtctcagcctcaattcttaagcaaatctcagatgcttgcaaagaatggggcttcttccaagtcactaatcatggtgtcaaccctgatttgatggacaaggtcagggaaacttggcgtgaattctttcacatgcccatggaggtgaagcagcaatatgcaaactcgccaaaaacctatgaaggctacggaagcagacttggaattgagaaaggtgctattcttgattggagtgattactattttcttcactatcttcccttgccactcaaggactataacaaatggcctgcctcgcctccctcttgcaggaaagtgtttgatgagtatgggagagagttagtgaagctatgtgggaggttgatgaaggctttgtcaataaaccttggatt

SEQ ID NO: 30270 - DNA, 896 bp, Glycine max
acattaaaattgactccgagtcttcggaagattttggaatatcttggttgggctcaactaatttggcagttggcacggctcaagctgctgcagatgctgctgatgttgattgcatattgaattgtgatcaggagtcaatctctgtctgtcttcccagtgctgaatcatatttgcatcttccaatggtgacttcaaagtttgatcggttttcattattaaacaatcttcctaaagcggttagctttgcaaagttcaatctcagcctgggaaaaagacttctagtctgttgtaataacggggaagatattagtgtatgcgtttgtttagcaatcttgatgtcattatttgatgaaaaaggtatgtttgatggtgggaaatccttcagtgcagcacaagtcactaaatgggatatgagacgtaggcttgtatttgtctgcaagtttgcaacagatgctcgaccatccagaggaaatttgaggcaagtttttaactttctaattggtggaaaattcaatcatcctctggacacgggaagagatgagtaattggaattgcgagggcagatgattgaatgaatatttttggccattcctaaaactttccgaacttaaatacctgggaatcttggattttgcattgcgcagatgtgaaactattccaaagtcagttttcagagaattgttgtatgcctaagtttatgcgaaatttgacatctctcgaacctatgattcttttcatgttctggtctgaatacacaaatactgagatgtctatgactaggttatagagtatagacccatgtgatgcacgtgttagacattcaattttatggatgaataattaatatagaacaattaaagtaaaaaaacaaccacccaagatgaaaaccacaacca

SEQ ID NO: 30271 - DNA, 276 bp, Glycine max
ctaccatccagcgatctgaaagtgtaaattccttctttgacaaatatgttcataagaagacctctgtccaagattttgtcaaacagtatgaagcaatcttgcaagacaggtatgaagaggaagcaaaagcagattctgatacatggaataaagtggcaaccttaaaaactccttctcctttggagaagagtgttgcagggattttcacacatgctgtattcaagaagattcaagctgaggttattggtgcagttgcttgtcatcctaaagctgaca

SEQ ID NO: 30272 - DNA, 275 bp, Glycine max
ggaaagtttgatgaaagcaatgataacctctctccaactacgcttaatggctcccagaatacaatagatacctgatcagaccagggatattgtcaacaaaacggctgagacgcaacctgatttagtaagctagggaatacctcttccccttgctatgcatgcaaacatgtctgttcctgtcagaactgatggcgtacttgcacatcctcttcagggaactgtttctaatgcacaatcaactgaatgcccaacaactagtgaaccacagaatcaac

SEQ ID NO: 30273 - DNA, 262 bp, Glycine max
cctcgagccgactcggctcgaggttcaaggctaacagaaccaagcccgctaccatgccagacacttcacttgatcaccacacgttaccttcctaatattttgatcaatgttctattcgtatgacaaaacttacgtgcagttcctgagatgtgttaggtcgtgttctctaattagagtgttatcttgtcaactttgctagtaaggtccacatttagagtcgactctagtttctgaggtgactttaattatgaatggaaaaaca

SEQ ID NO: 30274 - DNA, 276 bp, Glycine max
ggctcgagattcataatactggtcggtacaataagtattatcctagtctcccctagttcaaatacaccccatgtcatgaaaattcccaccctcttcaataaggcatatacatcatgaagaggtgtgctattagcaatttgcagacatcttaatttgttgaagcttcccattcctagctagggtcagtctcaattgttgaatcgtcatggaacgcaaggggaaaaagcctgttaagatgtccgtgcctcaatttggagggtgggaacacaagcccgc

SEQ ID NO: 30275 - DNA, 311 bp, Glycine max
cgttgttacattacaatacaaccttcagctcttgttcacgaaacacgcgctttttcacagccttcgaagtcaaagattctggctgagcagtcctaagtaagtcattgtagaagtcatggttctagagtccattttgtcgtcttcgaagtcaccatctttcaggaggcagtttgcaaagcatgaactgggcagttggtcgacactcttgaagaggcaccgcttcctcttatttgctcttgctctactaactgtcctctgtaccatttatctatattttgcagttacatttgcagccaatgactcctgctctg

SEQ ID NO: 30276 - DNA, 611 bp, Glycine max
ttcggctcgatcttcgtcccactcgcaacacaacaatgctgttactccacgcgccagcactaccttttctgagaacattgcttcatttccctcttaatagtattcatcattcttctcgcgctttctcctcactatctcacttcacaaaacccttttctgtttccaatcgtttctcctcacattctcgccgaagctcactccaaatgaacggagaaggcctcgccgccgacgactcctcgccggatcacgtcaccaaagactggtactccgtgccggagctccggttgcgcgatcatcgcttcaaggttcctctcgatcactctctgggaccccattcttctcccaagatcactgttttcgctcgtgaagtcgttgcagttgggactgaagagaaaaacttgccatacttattatatttgcaaggtggacctgggtttgagtgcgggcggccaactgaatcaggtggatggactaaaaaagtctgtgaagaattccgtctcatcttaatggatcagcgaggaacaggcttatcaaactccgtgactgtgtcatcaatgtcacagttcaagtctgctgatgaattagctgacttcttaaaatatttccgagcg

SEQ ID NO: 30277 - DNA, 271 bp, Glycine max
ggcaatgagtatcttgtgattccggaacagctctgtttgctcttcacttttaccttcatgaacgcgtacagtcattgtcataggtctccttgtcgtacgacgatgctacaaaatcattttgttttccaatatctgtttttttcttgcattatttattttggatcttaggagtagtaagtaaacacagcacctcaggttttttattttggcagatatacatgttttttgttacacaaatattttgtatctttgcttgaaggataagcataat

SEQ ID NO: 30278 - DNA, 335 bp, Glycine max
cagctgagaaaaaaaaatggatgtagagaaagccttccacatgactggaggagctggcaaaactagctatgccaagaattcctcactacagaagaaggaatctgataaagtgaagcacataatcatacaaacagttgaggagctctaccttgcaaccactccaaagagcataggcattgctgatttgggctgctcctctggaccaaacaccctatcaatcatcaaagatatctttcaggccatccaaggcataagccacaggatcatgcaccactccacagagttcagggtgtacttcaatgatcttccaacaaatgacttcaattcaatcttca

SEQ ID NO: 30279 - DNA, 471 bp, Glycine max
agtaggcaatagaatagatggcagaggaagagtcttatccattgtttgagacaaggagggccaaaggaagggtcatttacacaatcttctctttatcactttttgtgggcattttgttcatctgggtttacagagtgagtcacatacccagagaaggtgaagatgggaaatgggcttggattggtttgctttgtgctgaactatggtttggtctttattggctcctcagacaccctttcagatggaaccctgtgttcagggaacctttcagacacaaactctctcaaagatacgaggagatattgccaagagtagacatctttgtgtgcacggcagatccagggattgagccagcagtgatggtgatgaacacagtgctatcagttatggcttatgactatccaactgagaagctgagtgtgtatctttcagatgatgctgcttcagatattaccttctatgctctcttag

SEQ ID NO: 30280 - DNA, 539 bp, Glycine max
gtctcttcatctcgagaaagagacagataaaagacagagagatggggaagaaagaaaaagctaaggaacgaagagaacaacgattgcaagagatacaccttcagaggaccattccctattctcatcaccagaggtggtggtccaaggaaactgtggctgtggttacaggtggaaatagaggaatcgggtttgagatttgtagacaacttgccactcatggattgactgtcatactgacatcaagagacgctagtgctggtgttgaatcagttaaggctttgcaagaaggtggtctcagtgtggtttatcatcaacttgacgtagtagactattcatccatcaaccagtttgttgagtggttgcgggaaaattgtggtggcttagatattctggtaaataatgctggtgttaattttaatcttgggtctgataactcagtcgaaaatgctcgtaaagttattgaaacaaattattatggcaccaagcgtatgactgaagctattatttcattgatgaagccatcccttgttggtgcgcgt

SEQ ID NO: 30281 - DNA, 412 bp, Glycine max
aaaaaattactttatagtaatgtgaatctgaaggtagtgagtcacatgtgtcctttcaattctgctgcttttccagacagtttggcaattgcaaaagaaggtgagcttactattggcactattgatgatatacaaaaacttcatattcgctctattccgctgggggagcacgcacgacgtatctgccaccaggagcaatctaggacttttgctatttgtagtttgaaatacaacccagctagtggtgaagactcagaaatgcactttgtccgcttgctggatgaccagacttttgagttcatatcaacttattctcttgacacttatgagtatggttgcttcataattagctgctccttctcagatgacaataatgtgtattactgtgttggaactgcatatgtactgccag

SEQ ID NO: 30282 - DNA, 605 bp, Glycine max
ggaatatgacaggtgggataatgtcaggcaaaggtactcttacttggataaatggggactcatacgaaggaaactggttaaatggcatgatgcatgggtttggagtttatacttggagtgatggaggatgctatgttgggacttggacatttggtctaaaagatggcaaaggaaccttttacccgagaggtagccgtcttccttgggtgcaagaaatttacctcagtgccttgagaaaaagagggttgctgccagatttgagaaaacagaaacaggtgagagatgtcaaggtaccagagaaccatatgtcaagtcatgtttcatctgataagtttgcaaaaggaaacctgttaaatctggaagagtctaatagaagaaatgtctctctcgaaaggcgttggagtcttgaggtgtctattgagaaggtgattggggatgattcagcattaagatttgcagaatctgtaccagaaagtagagatggagaagttgatgcaatgatcccaattttggaacgagagtacatgcaaggtgtgttaataagtgaggttgtgttaaataatatgttttcatcaatgtctagaagggcacggcgacttcaaaaa

SEQ ID NO: 30283 - DNA, 438 bp, Glycine max
cttggatttcacccacattaaaatcttcaacaactcttgtcaatctgtctcaaaaaaacctttttttctgtcttctatggctgctactccaaaacccaccatcaaatcttgcactcccaagaaactccccaacgctctaatctcagtttccaaggtgagggtcattgtcagggtcagacccttcctcgcacacgaaacctctgcaagaaacggcgacgtttcgtgcatctccgtcctcgatcaagattccgagtctccgcaggacgagattgccgtttatctcaaagacccactaaccagccggaacgagtgctacctgttggactctttctttgggcatgaagataacaatgtgggccagatattccgccgagaagtgagccccttgattccgggaatgttcagcggatgcaatgccacagtgtttgcttatggggc

SEQ ID NO: 30284 - DNA, 394 bp, Glycine max
tacggagagacgacagaaggggagaagaaaagatgcaatttgtcatcaattatgcttgagatggatcgaatactaaggcctggtggacgggcatacatccgtgatactcttgccatcatggatgagcttatggagattggcaaggctatgggctggcaaatgtcactgcaagatatcagctgagggtcctcgtgcaagttatagggtcttggtttgtgataagcgccttcgttaatgcaaactcgctcacttgttttttatctcttcaatggggaaatcaacagaataaggtcacactcattttagcagagaagcctacgatgacgatgcaagtgtaaatatcacactttcttgtatttgtctgctggctcttgacatcagatcgccagagcag

SEQ ID NO: 30285 - DNA, 394 bp, Glycine max
gaagctggattattgaaaaagtatggccctttaagtttccttaaggtccatgatgcgggtcacatggttccgatggatcagccgaaggcttcgttagaaatgctgaagaggtggactcagggaaccctttcagaatctgcagctgatgcggagaaattggttgcggagttgtaatcactttcgttattgcaattagtccagaaaagggatacaaaagtattatgcaataaagagaagggaattaaagtgatcagcatgtgttattaattataaagtgagattgaatcaagcccatgcaggaaaaaaactattcatatatagaatttcgtgtgggcatgtatactgttttaataaaatgctgagatgtaaattgcttaccccccatattgtgctt

SEQ ID NO: 30286 - DNA, 566 bp, Glycine max
atacgtgaacagtgaagatgatttcttttcacatcctattgctaagcaacattacaaaaaccatattaaggctgtgttgacaagaaaaaacacaataactggggtcgcatataaggacgatcctgccatatttgcgtgggaacttatcaatgaaccccgttcccaacacgacaactccggaaaagttattcagcaatgggtgattgagatggctgcctacgtcaaatccatcgacaacaatcatttgctggaaataggactcgaagggttctatggtgaaacaatgccagagaaaaaacaattcaatcctgggtaccaacttattggcactgatttcatttctaacaacctagttcaccaagttgattttgctaccatgcatctctaccctgaacaatggttgccaggctcaaacgaagctgctcaggttgcatttgttgacaaatggttacaaacacacattcaagatgccaaaaatgttctggcgaagcctattgttgttggtgagtttggcaagtcttcgaagtcatttagcgtggttgaaagggacaattacctgagcaaaa

SEQ ID NO: 30287 - DNA, 656 bp, Glycine max
ttcgtgcaccgagcctctatttcacacccttacagcaacttgttctctcctgggagagaagagatgtgctaacttcaactctgtgttggggcatcatgctttctgtgcttctctatctttccctcacaatgggtccactttttatgctcaagctctatggggttccctatttgatcttcgtcatgtggctggatttcgtcacgtacttgcatcatcatggttacaagcagaaactgccttggtaccgtggccaggaatggagttatctaaggggtggtcttacaacagtagatcgcgactatggttggatcaacaacattcaccatgacattggcacccatgttatccatcaccttttccctcagattccacattatcatttaatcgaagcgactaaagcagccaaggcagtgctaggaaagtattatcgtgagcctcagaaatctgggccattgccacttcatctaattaagtacttgctccacagcataagtcaggaatcacttcgttagcgactctggcgacattgtgtactaccagactgattcccagctcccacaaagattcttggacccagtccaactaaagtttttgatgctacatttacctatttcactcttaaatactatttcctatgtaatatgaatttagaatat

SEQ ID NO: 30288 - DNA, 280 bp, Glycine max
gtttagttaacagcaagtggcaaatggcatgcatatccgcaacggaggcagagattgagcgtatgatatgagagagaagacggaacaaaatcaagggcggagaatgccccatggctgacatcatgtcggttaacactttattcagacaacactatactccttaatcaaaatcaaatgacctaaccactctctctttttcccaattttcgaatctctctcctccatggacccaacttcgatccctccccctccggccaccaccgtccccttcactgtcgaa

SEQ ID NO: 30289 - DNA, 269 bp, Glycine max
gggtggtggcaatgggtagcgaagaagagagggttcttgagaatcaactggaacttcaattgcaagagcaaagggattctctctctgctatcggtcaagctcttctctctgatccaactaaccctgaacttctggcggttcatgaggagcttgttcaggcaattaaggatgcagaagaaggacttcttcacctaaaacgtgcacgattgttacaggaagcagattcagtgctgcataacactaatatttttactgaagagaaagtggat

SEQ ID NO: 30290 - DNA, 562 bp, Glycine max
ttacaaaaaatggtgttctcaatctactattcccactttcaaaatcttatcagctgaatgtttgcaaaaggcccggattggggaacaattatcactagtgagggtgaaggtttcatggcctctgtctctgagggaagctatagtgcactattatctgtttgagtactttcaagatgacttaattgttgttcttacaaattcggttccggattcaaagaatgccacaggaaccctttgtggtttcaacaatgaggcaattcctgaagcaagggaggttgtgagagtcgatttggtgggaggctttgctttgcaaaaggtgacatcagaaagatgttactttcggacaatagcaaatatggatataaagctggattttgtgcctccatcccttataaactttatttcaaggcagctcattggcaatggtttcagactctatcagaagacggtgtcttctatgacatgccacgataaaggggaattcaataaggccttgggggatccattatatgttcgaattcgggaagctctatataacactagtggatcaaaggccatgaat

SEQ ID NO: 30291 - DNA, 293 bp, Glycine max
gaggatcacagtaggagataaggagagcattcaccattttcttgtggtttggtttcctagagacactaagtactcccatggaacaaaacaacaaaagccttgtttcttctaaattcttatgtttatgtttgttgatcaccttgatcagcattattgttgctccacaagcggaagcagcacgagcatttttcgtgtttggcgattcgcttgtagacaacgggaacaacaatttcttggccaccacggcgcgtgccgattcatatccttatggcattgattctgcatctcataga

SEQ ID NO: 30292 - DNA, 555 bp, Glycine max
actcgagccgaatcggctcgagcggctcgaggatagatagagcattcattcatcaccaacatggctcttctaggcttaatgagttttgctgccttgacccttttcttggtcctaacaactgtgcctcgtcaagcacacgcttcaagccgtggcaacttaggcagaaacatcaacccttcagtgtatggcatatgtgcctcttctgtcattgtgcatggatacaagtgtcaagaacacgaggttacaactgatgatggttacattctgagcctgcaaaggatcccagaaggtcgaggtaaaagcagtgggagtgggacaaggaagcaaccagtggttatacaacatggagttcttgtagatggtatgacatggcttctaaacccaccagagcaagatctgccgttgattttagctgataatggatttgacgtgtggattgcaaacacaacaggaaccagatatagtcgccgacacatctcattggacccctctagccaggcctattggaattggtcttgggatgaacttgtctcctatgatttccctgcggtgttt

SEQ ID NO: 30293 - DNA, 427 bp, Glycine max
ctcttgttcagtcaaggcaggttgaccgcagcaagaaaggccgggttcaagaagctcttaattattactctatagagtccacccttgcccttgtagtctcctttatcataaatatatttgtaacaacagtgtttgctaaggggttttatggttctgaacttgcaaacagcattggccttgtaaatgctggacagtatcttgaggagacatatgggggtggactatttccaattttatacatatggggtattggattattagcagcaggccaaagtagcactattacaggtacttatgctggacaattcatcatgggaggttttctaaacttaaggttaaagaagtggatgagagcattgatcacccgaagttgtgcaatatttccaaccatgatagttgctcttatattcgatacctcggaagaatc

SEQ ID NO: 30294 - DNA, 348 bp, Glycine max
cacaagatcttggctggcctcttggatcaacatacttttgctggaaaccctcaagctctaaaaatggtaacatggatggttgattacttctacaacagagtgcagaatgtaataacaaagtacactgtaaatagacactatcaatcaatgaatgaagaaactggaggaatgaatgatgtcctttatagattatacagcataacgggagattctaagcacctagtgttggctcacctttttgacaagccatgctttttagggttgcttgcagtgcaggctaatgacatagctgatttacatgctaatacacatatcccaattgttgttggatctcaaatgcggtatgaa

SEQ ID NO: 30295 - DNA, 445 bp, Glycine max
attgggtgatggtatctaaaatataactgtccaaaatgtgaactgtggacctggtcatggcattagtgttggaagccttgggaggtacgataatgaagaggccgttgaaggtcttctagttaagaattgcactttgaacaataccgataacggtctgaggattaagacttggcctagcacgccattaacaattacagttactgatatgcattttgaagatattaccatggaaaatgtttcgaaccctgtgatcatagaccaagagtattgtccatggaaccagtgctccaaaaagaatccgtcaaaaatcaagataagcaaggtttccttcaaaaacattaagggcacttcaggaactaaagaaggagtgatttttatttgtagcagtgttgcaccatgtgagggtgtagagatgactgatgttgatctcacattcaatggagct

SEQ ID NO: 30296 - DNA, 242 bp, Glycine max
ccggtttatgcgttccttttttatgtgtgtgtgcgtgagagagagagagagagagagagagagagagagagcgctatattcaattagcacccttatctttacaaataggtgaattcacgagtgttagaatgaaagatgattatgaatatgaggaagctatgctcatgctctgtacttcagtttagcttatgataaaacttgttcatttgttagtttttgttagtgggaacgattgaatccgt

SEQ ID NO: 30297 - DNA, 304 bp, Glycine max
agcttttcggtttttgttgtataattttcagatatgttattcttagacccgtggcagttatcattcatcgttctgcaagcaagatgaatagacttatagttctggcatttcatgtcgtccatgcctggtgctttactcttccagtttatgggcgtgcatattctgccttgtgttataaactcatgagttataattacatccgattcatttgctaattgtagtgtcatacccaatgcaaggctgctattatttgtctaaagctgcgttattttttaattgtaactcacagattaagattactttc

SEQ ID NO: 30298 - DNA, 245 bp, Glycine max
tctcaatgatgatgcaacttctcaatgctacagcaaaggcatttattgcacactttcagcttgacactcgctgatcatacttgcaagcaagcccccatccaatagcaatgccacctcaaatcaaccttttagcatctccaagtccttcactatttattttatttatgttctctttgctttgattgccttctggggtgtttctgtagtgttggaaatataaaggtggagtgtggactttaaaaggg

SEQ ID NO: 30299 - DNA, 267 bp, Glycine max
ggcagctggcgttttacactggagatactgttgggggtcttttaaatgctacatttggaaatgcaacagagctgatcatctccatatatgcactgacaagtggaatgacacgcgttgtccagctctctttgctgggttcaattttgtccagatatgttactggtgcttgggtgtgcattcttatgtggtgggattgttaatcacgagaaggagcaagtgtttaactagtgcagcaactgggagctcaatgtacctggctagaacact

SEQ ID NO: 30300 - DNA, 312 bp, Glycine max
aatatggatggtgtccccattgggagaaaagtggacatcaatgcttatgacagctatgaaaaactttcctctgctgttgatgagcttctttaggggcctccttgcagagatgaagttatctcatattggctcttcccaatgctgttctggtcaaagagattcctgtgctggtggaattcaaaacaaggaacaggaagagaaatccaataagggtttattggttggaagtggggaatatactcttgtttatgaggataatgaaggagacaggatgcttgttgaagatgtgccgtggcacatgtttgtatcgac

SEQ ID NO: 30301 - DNA, 315 bp, Glycine max
gactaatacattgaagacacgcagacgggatttggcggatgttttgataaataggggagtaaatttggatcctttaagcaagtggtcaaaggttggacttgttgtgtatgattctcaagtgcctattggtgccactccggagtatatggctggtttctacatgctgcaaagtgcaagctcttttctgcctgttatggctttggctcctcaagagaaggaacgtgtcattgatatggcagctgcacctggtggtaaaacaacttacattgctgctctaatgaagaatactggaataatatttgcaaatgaaatgaa

SEQ ID NO: 30302 - DNA, 348 bp, Glycine max
tggaggatagtttgcccttctcccattatagaaacccgcaataacaacctggaaatgcaatcagtaaataacaaatctctcattgaagagcttgataagcttcttgagcgattgcgtgtcccttctgagtatgccacaagtttgactggaggttcatttgatgaagcccgaatgcttcaaaatgtagaagcatgtgaatggttgaccagtgccttgcgtggtcttggagtgcctaatctagaccctagttatgcaaacatgagagctgttaaagagaagcgtgcagaacttgaaaaattaaaatctacttttgtcaggagagcctctgaattcttgagaaattatttt

SEQ ID NO: 30303 - DNA, 715 bp, Glycine max
ttattgcactccacccacccaccgtgcatcggtcgctggttcctgaatttcccttgtggttaggtttcctcgatggagtcagaggatgatatgcacgacgccaacgacatcgagtccctcgacgacgatttctacagtggcgagaccgaggacgctcctttggactactacagcgacgacgacgccgacgattacttcgacgacgccgagaggatcgagtctcgccgccctgagcaaaattttaccatattgaaggaatccgatatccgactaagacaggaagatgacgtcgctagagtagcaacggttctttccatatcaagggtttctgcaagcttactactccgtcaccacaattggagcgtcagtagagtgcacgatgcatggtttgctgatgaagaacgagtccgaaaagcagttggtttgttggagaagccaattgtccagcatcctaatactagagagcttacttgcggtatctgttttgaaaattatcctcgtgctaggattgaaatggcttcctgtgggcatccctattgtatctcatgttgggaaggctatatcagcacatccattaatgatggtcctggatgtttgatgttgagatgtcctgatcccacttgtgatgctgctattggtcaagatatgattaatcttctagtgtcggatgaagataagcagaaatatgcacgttacctacttagatcttatattg

SEQ ID NO: 30304 - DNA, 552 bp, Glycine max
acgcgtacggcacgtgctgcaccgagtgttgtgaaaatctctaatggccgaattatctcttcctcaggattcttactttctcggattcgacagttccacccagtcgttaaagccccctgtgttggactccaacctcaacatcgtagcctcagagcttgttcatttcgattccgacttgccccattacaaaaccaaagatggggtgcacagagacccttctggcaatggcagaatcgtttcacccactttgatgtgggtggaagctcttgacctaattcttcaaaagctttcaaaatcaaattttgattttgccaaggttgctgctgtttctggcagtggccaacagcatggtagtgtgtattggaagagtggcagttctcagatattgtcatcattggatcctaagaagccattgttggatcagcttgaaaatgctttttccattaaggaatcctcaatttggatggacagtagcaccactgctgagtgtagggctatagagaaggcttttgggggagccttggagttggctcgtgtcacgggatcacgtgc

SEQ ID NO: 30305 - DNA, 511 bp, Glycine max
atcacggaagagtcaaagaagcgagaggccgaaactcaaatggtttgttgaaggagatatatcaagttgagataagcagccgccgcttgaccgacctgatagattcagctcagtttccgttggcagatgaccagaaaacagaagtggcgcgcaatgtgatggagctgatgcgtgtttgtgaagctttcagaaatggatcggatccgttggagcgccaagtgagggaggtcttccggaagataatggcttgtcgaactgaggggctcgattacctcggcacgccaagccatacggagcaatgaaaatggtgggttgttgatgagctatcagatgtacaaatttgcggaactgtgtacattttacatcttaccatctttttctgagaggagtgactcagcaagataagcagacaaatcttttatcactcttgcaatgcattgtattaaataattaatctcagtacttgtgtaaaaaaattaaaaaagaatggtcaggttacttgttaaaaaaa

SEQ ID NO: 30306 - DNA, 442 bp, Glycine max
agcaaattaattagcttcaccatggactcattgttacttctaaaagaaattgccacttccattttgatcttcttgatcactcgtctctccattcaaacattcctccaaagctatcgccagaaactcccaccggggccaaaagggtggccagttgtgggtgcactccctctcatgggaagcatgcctcatgtcaccttagcaaagatggcaaaaaaatatggacctataatgtacctcaaaatgggcactaacaacatggttgtggcctctactccagctgctgctcgtgccttcctcaaaacccttgatcaaaacttttcaaaccggccctccaatgctggtgcaacccatttggcttatgatgcacgggatatggttgtttgctcattacggatcacggtggaagttgctaagaaaactaagtaacttgcacatgcttgga

SEQ ID NO: 30307 - DNA, 492 bp, Glycine max
aaaaacactaccaggaaaaagtccactttagctttcacaggcacaaacgcgaattcggctcgagtgttctccttctcagaaatcaagagcctcacctggggatctcaaggatcaaattgggccaaacatgttcaagggtgtgctaccgaacaatcacctgattgcagttaaagacctgaatgcatccatagaagaaaggaagttccggagtgctgttatgaagttgggcaacatccaccacaagaaccttgtgaagctggaaggttattgttgcgagtttaaccatagatttttggtgtatgaatatgtcaaaatcggttcactgcataaatacataaatgattgtaccctttgcaagaggctaacttggagaaagagaattgaaatatgctcaagtgtggcaaaggccatttgttatttgcacactggatgtagggagttcgtgagccatggaaatttaaaatgtgagaatgtcatgttggatgaaaattc

SEQ ID NO: 30308 - DNA, 308 bp, Glycine max
aacccttgttgaaccttccttcttctaacccaagtcgcgcgcacgcagcacctcttgcttcttcttgaaccctagcctcttcgttgttgttccattgaatctcttccacattgaagcaaccgcagcctcttcgtcgagttccttccgacgagttcgaccttcccggctggaacttccgaatcaaggactgccagcagggctttcgctccaacgtcggcaacaaagacattggtctcacttcgaagaaaccagggaagacgcaggtcatcaatcagttcttggtgaacaacagctggtaccttgtttga

SEQ ID NO: 30309 - DNA, 259 bp, Glycine max
caagagatctctttgaggtttctcatcaaacacctttagccaacaacaatggcacctttgaacaaagttcttttgctcctcaccttattgttccctgcggtggatgccacatacaaaaacaagaaagacaagaagaacagtgtttttcataagattcccaaatttccaaaatttccagttcctatcattggcggtgaccagaaagttgttgtggatggtggtaatcatgccattgccaagcccgattttggaaacaaac

SEQ ID NO: 30310 - DNA, 598 bp, Glycine max
aattaaggaacaaagaaaaacttgagacaacagagaaaaagggtcacaacaatggcttccttagactctctcgatttctccctcttccgtctcagcactgacttctgctctccttttgccattttcgttcaggcgcagggatgtataataaacctaatccttgcttttgggtgggcttgtgctgcatttgtcaggaaccgagaaataaatagaataaagaagagtatgcggaatggcaataactttgcattcctttgtcatgatattagtgaacttgagcactccaatcaggctgatcttccaagtgtaacagtaattatgcccctaaaaggatttggagaacacaatctccataactggaagactcagttaacatcgctttatggtggccctcaagaatatcttttagtagttgaaagtacagaggatcctgcataccatgctgtagcaaaactaataacagaattagaggattctgttaaagctaggattataatagctggtttatcaacaacttgtagtcaaaaaattcacaatcaattggttggagtggaggcaatgcataaagatagcaagtatgtattatttttagatgatg

SEQ ID NO: 30311 - DNA, 476 bp, Glycine max
agcctccgaggaaattgcaacggacttggatcagttcacaaaagatctcaaaaacttgatgaataccttaaaaggcaaagctgcatcaggtgactctcgtctcaagtatgatgtaggaagcatacgtggtcctgataataagctcatatatggtcttgttcagtgcacaccggacttgtcagggtcagagtgtgatgattgcttggggcggtccattcaagtcatcccaacagattgttgtgaaagcagaacaggtggtaaggttggtagacccagttgtaatttgagggttccgaacctcaggtccgttcaatgaagcatttgttgaaggttgcagcaatgctaaaatcatttcatttaagtgccacttacttattagcgttgtcgtggtaatagtagtaccagttgttgtggtcgtcgctgctgtggtgctcatttatatctacatctatcctaaaaaagatcctattccaaaa

SEQ ID NO: 30312 - DNA, 271 bp, Glycine max
attcaacctgtaagatccgcgagctaaaactcccacactccacagcttttcttgttttcctttcctcagatcagatcttcacgccgttatgcttagaacattagctagggtgttcaagcgagccacccttgccaatgacttgcttcaaaaacgcagcagattctatgcaaccacggttggtggaagaagtgacaggttagaaggaaaagtggcactcataactggatcagcaagtggactcggcaaggccacggcccatgagtttgtccag

SEQ ID NO: 30313 - DNA, 260 bp, Glycine max
aatgatgaaatttggaggggtgtgtgaatgacccttttcccctgtgaggattggggacattggggtggagtaaagttgttaactttctcagagaccatgcaggggcattgagcttgtcttcctggttcctctcctctcacttggttttgtcttgtggcaggtttgaaggatgatgatctgtatagagagctgtggacgctatgtgcacggccattggtggatgttcctcgtaatggggacagagttttctaattccctca

SEQ ID NO: 30314 - DNA, 361 bp, Glycine max
gggaagatagaaaaaaacaaaaacaccttattgacaccaccttttctatcatccttcaagtcatcatctttgatgatgcccatcctcctggtcattctcttggccttgttttctccttcattaggccttcctttagcatctttccaaccaaaagacaatttcctcattgattgtggtgctgaaaacacagccactctccctgatggaagacatttcaaatcagaccctcaatccagatccttcttgcaagccgatgatgagtacaaagtctcagcaaatgatgtgaatttgccttcacctgtttactcaaatgcaaggatcttcattcaggaagccaagtactccttccatttggttcaac

SEQ ID NO: 30315 - DNA, 476 bp, Glycine max
ccctcgcgtccgtccttaaccaattctcaataaattctactcagctgcatgcctataaatctccttcctcttcccatgacttctctttacatctgatacagtctctttcttttctggcttttctcttgtttgataattgatatgccacttctaatctttggtagtattgtagttaaaaaccattggcaaggacataacatattaacattagagtgcaagaaatcatgcagggcttcaatctgaaggagaataagatcatgagaaagatattcagcagtgataacttcaaaggagaaaatcagaattcgtcagaggccaaaaaggaaagtcctagtttgaatcaagcatcggcaagatgcttctatcatcaaaccaaaaagtatgaggtcataatagtatgaattcttcaacaattgttctctttcacttgaatcctgttcttgctatactatatttaccttgaatgtaactctcat

SEQ ID NO: 30316 - DNA, 258 bp, Glycine max
cactgcattccctttactctctctgtcttttcttcaacctctctcggtttcgaagaatcgcaatgacgaactccatgggtcccccaccccccaaaaaccctaatccacctgacaccgcgccaccgtcaatgcctcctcctcctcctcgtgactcagcggccccgtcaccgccgccgccaccgccaccagctcgcgattcgagcaatgctccctctcagggtgtggcagttccgtataagatacctccgtggggcgccg

SEQ ID NO: 30317 - DNA, 169 bp, Glycine max
tagttatgttccgtaacttatgggctcttaattaaactatatctgcacaaaattatatatatatcaaatgtgatggtatgtggactataaaaagatatggttgagaaccacaaactttgaaacttcgaataatatattgccagtgacagtcttgttgatttgttatagc

SEQ ID NO: 30318 - DNA, 267 bp, Glycine max
aagaagttcaaccttccaatcctcccaaccaccacaattggatccttccctcagactgttgaactgaggagggtgcgtcgtgaatacaaggctaacaagatctcagaggaggagtatgttagttcaattaaagaggaaatccgcaaagttgttgaactccaagagaatcttcatatcgatgtcctggtacacggggagcctgagaggaatgacatggtggagtactttggtgagcagttgtcaggctttgcctttaccgttaatggc

SEQ ID NO: 30319 - DNA, 343 bp, Glycine max
tggttgtacacaatgtagtagtgaaggtattgagaagcttggaggtgaaagttttggtgaacttcctactggggctgggaactctgaaacaagcttccctgtaatagatattcctgcttcttcttgggccaccagtggcacaactcaagatctccacctagaaccacctttacatctgtccctttttccggagtattttagtccagagcggccgataaggacattaacccgctatgaggacatctactccatactccttgaacactctcctcgtaaacctgtatctgttggacctgatcatcaagctgatgttccagcatgggatatttcgggtgccactaat

SEQ ID NO: 30320 - DNA, 571 bp, Glycine max
caccatcaataaggtgactggtgcttttggacacacgccatggctcttgggtgccaacttgaaccattatcaccttgagaggttttactggttgatgtgtgtacttagtggactcaacttcgttcattttctcttctgggccaattcctacaaatacagatgttcaaccaaaccgggatatactagctagaacgtacaaacctacctgcatttatgaatctatttggatataaaagtagaagtgcttttttgagagtttttcaaagtttcttcactcaaaaaagctctatatttatcgtaagaaactctctaaaacatttataatttgtatccaaacagactctatatactaccattaggtagtttgtggttggcccaaaataatgtaataatcagtgagatagagagtgacccctactccatcctcatttacctatatcacgtccatgagctacatgcatagcccaatattggtgcagctattccactctactagtactatatattacttggtgcaatgtaccgagttttaattataaattaatccattacccattatgaatatcaggat

SEQ ID NO: 30321 - DNA, 463 bp, Glycine max
cttttctttaaatgttgagttattggtcataccagctatctcagaactcagagaaacttggacttctgtttttgggtttgagtcacttgaatctacaagcaagcaaatattacataataagaatctgttggtatttcctcatgtagatatgttacagaagaagatatcaaaacataaattggctggtcaaaatctgaatccttcggaaggccagataaatgatgaaaccatatctattgaatctggttgtcatcttcctgatggttcattgaacaaggtacctgacattgctagcaatgctaaagatcataggaaatcttcaacagatgacacatgtcaagttgtatgtcaggcagctcccgaaattttggtgatggaagacaacaatagtattgaaaatgcccgtgattatgtgactggtacttgttgccgagctggagatagccagttgaacagttgctgg

SEQ ID NO: 30322 - DNA, 287 bp, Glycine max
tatggcgatatctgatgcggtggcgaggaacttcagcaccatcttcgtgggtctcatggcgtgttttgaggcctatggctttgcttcggggagaaggtttagcggcggttatgttgttattgtgtccaccgccgcggtcattctcttcctcgtggcaacgctcacgtgggacgtctcgcgtaaggccacgtgtgcctttcacagagaccacgctgacagccaagaggatgtgtgcaagggaggtatctgttggcacggcgtcgcgccgcgatccccagcctctcagg

SEQ ID NO: 30323 - DNA, 675 bp, Glycine max
  unsure (1)..(675): unsure at all n locations
ccctccctctctctttctctttctctctttccctgggttggagaacttgcaggtccttaaaattaaaccatggcttcatctttaaaccaacgcatgttattccctcttatgttcgtaattggtatgttctgcttaatggtaactccttctattgcggaacttcccatattcaaacaccctccaaaaaaacaacaatctcttaatatattggtccttggagattggggaagaaaaggaacctacaatcaatctttggtcgccaatcagatgggaattgtgggagagaaactagacatagattttgtgatctccactggtgacaatttttacgaagatggactaaaaggggttgatgatccagcattctaccaatcattcgtcgacatgtacactgccccaagcttgcaaaagacatggtacactgttctgggtaaccatgactacagaggtgatgttggggcacaactaagtccaattctaaaacaaaaagatagcagatggctttgcatgagatcttttattctcgatggagaaattgtggaatttttctttgtggacaccactccatttgtagaagagtacttcacggacccaggagagcatacctatgactgngaaggcgttcttcctcgcctagcttacctttcagaactcttgaaggatgttgatttagct

SEQ ID NO: 30324 - DNA, 500 bp, Glycine max
tcgctttcgcgtccgaagaagaacaacaacaaagagatagagagagaaatagagggagagagagagagagagaaaagggtacattttgatgtttgttaaccatagaggcaaaacccaaaaagcatcttcttcatcttgatcaaagtccaaacctttgtacccttttgtgtttccctcccatttttgtgtcacaacacaatccttaaccacacaaaatccctcccatttgtgtgcaagagggtatttccctctatttgttggggggctaaaaagagaaagtctttgggccaaaaggggtgggttggttcccagaaaaaagcagtgaaaggaagaaccttgtaaaccccgtcattgtgaacaagggtggctttgtgcattgaacaaacagcagaggactagttttgagtagtttcatcgctgttcaacttaaaaagggtgggaaaaatgaagtatgtgttggtgactggtggtgttgtgagtggacttgggaaaggagtcac

SEQ ID NO: 30325 - DNA, 384 bp, Glycine max
cttcactgtgtctttcaatctctcaaaaatcctcacttgggtctcaatccgggagcgataggcacacaaaagagggcctttacttccttacatactctcacttgcttgtggttccttggtcgttcatatttttgatatttcttcttcttcttcttcttcgttttgttcagtttctttcatggcgatctcggagaacgtgtcacctttgaagctgttgttatgttccaattgggttccacttgtggtttttgcgtttgcttgatgttttccttttctgggtgtttttttcttctttgctttttggtggggttttgaggtttgtagagagcatgttgcggagcttcatggatccctttgaaggggttttggggtgggtttgatttt

SEQ ID NO: 30326 - DNA, 572 bp, Glycine max
ctcacttgcagcgcgcgcagctcggttttgctgcagcatcttctcttggcttatgttgaggagattgagcgtgatgctggtcgtttggtagattgtagggctaggatgaatttctgccccttaggagcttgtgccttggctggtacagggcttcctattgatcgattcatgacttccgaagctttagggtttacggctcctttgaggaatagtatagatgctgtttcagaccgagattttgtactggagtttctttctgctaatgccatcacagctgtgcatctttctcgacttggtgaagagtgggtattgtgggcttcggaggaatttggattcatcacaccaagtgactctgtttcaaccggaagtagtataatgcctcagaaaaagaatccagatccgatggaacttgttcgtgggaagtctgccagggtcataggggatcttgttactcttctcacattgtgcaaaggacttcctcatgcttacaaccgtgatttgcaggaagaccaagaaccagtgtttgacagcgttaaaacaattttggggatgcttgaagtatcagcagaatt

SEQ ID NO: 30327 - DNA, 375 bp, Glycine max
cagtgaccgaaaaaggaaggaaatgatagcattctagcttgtttagcttcacgctgtgtagttggtttttcgttatttcatatgtccatcagctcccaaatcctctccacacagtaacagattgcattgactcatcttttgatttggatcaccatggaacataaattagcaacaactgaaggacaacccataagatgtaaagcggcggtttgtcgcaaagctggtgagccactgggtattgaggagatcatggtggcgccaccaatgcctggtgaagctcgcattcgtattatatgctcctctctctgtcgaactgatatcagtttccggaacatgcaggggcctccggcgaatttcccaacaattctgggtcat

SEQ ID NO: 30328 - DNA, 576 bp, Glycine max
tttctctttctgctttgctagttcatgtcatggcgtttctgaaccctttctctctccacattcccatgtccttgttgctcttcctcctcttctttttttgcttctgcaaagccagtactactactaccacctccactacaacaaagtcactgtcccccccttcttcaccctccaccactacttcctcctctgacgttcagcttctcttgggaaagatcaaagcttcactgcaaggtagtaactctgacaaccttgttttgtcttcatggaactcctccaccccactttgtcagtggaaaggcctcatatgggtcttctccaatggcactcctctctcatgcactgacttgtcctctcctcaatggaccaatctcacactcctcaaagacccttctcttcacttgttttccctccggctcccttctgcaaacctctctggttccctccctagagagcttggagggttccctatgctccaaagtctctaccttaacattaactcattggagggtaccatccctcttgagcttggttatagctcctctctctctgagatcgatttgggtgacaatatgc

SEQ ID NO: 30329 - DNA, 396 bp, Glycine max
gttcctcttcaatttcgcatcttctccttctcattccaactccaaaatacacacacacgatggaaaccttcctcttcacctcagaatctgtaaacgagggccaccccgacaagatctgtgaccaggtttctgatgccatcctcgatgcttgcttggagcaagacccagagagcaaggttgcctgcgagacctgtacaaaaaccaacatggtcatggtctttggggagatcacaaccaaggccaaggtgaactacgagaaaatagtccgcgacacttgcagaggtattgggtttgtgtctgctgatgttggtctcgatgctgacaagtgcaatgttcttgtcaacattgagcaacagagccctgacattgcacagggagttcacggccacttgacca

SEQ ID NO: 30330 - DNA, 321 bp, Glycine max
attttgcaaacaagttggtgcaattttttcagaaggtctgggaggagtcttctggtgaaagtctgctgcagatacagcttcttgttgctctgaggaactttgtggttgctcttggttaccagtcacccatttgctacaatatactactgccaattctggagaatgggattgatattaatagtccagatgaactcaatctcctagaagatagcatgctgttatgggaggccacactttctcatgctccatcaatggtgcctcaattgttacaatatttttcacgccttgtggagattatggaaagaaattttgaccatttac

SEQ ID NO: 30331 - DNA, 457 bp, Glycine max
ggcacgagagccgctctcaggatccagaaacactcctcacatgttacttcaaagcccaaaacaaaagcccattccttcggcctcttcgggtcactgtacaagagactcactcaacggaaccagaaaaagcatgagatagagagtggtggaggcgttaagatttccgtgaaggatgttttgaagtgggattcttctgtggggcgaagataagtttctaaagccaacgggaaatgcaaggagcaagaagaaacagtgaatgtgactgtgaatgtgaatacgtgttcttacaatggtagtagtgctctttggtcagagagcaatgaagataacaaatcactagacatggaaacctcaagtagtggctactactctgaagagattcacttcgtaaccaatcacaaacagtactccacgtgcttctgcgaaagcccgttccgttttgttctccaaacaagtt

SEQ ID NO: 30332 - DNA, 570 bp, Glycine max
cggtgactcacgtctcaagtttgcagagggagaggctccggttcaatcaagcaatgaaaccatacatgctctccttcagtgcgtgccttatttgtctcaccaaaaactgtactcgatgcttggagtacgctatgtccaggatttcatattggtgtgatggaaaaacaggtggttggtatctaggacgaagctgttctttaagatatgagacctacctcttctttgagctcatattccacgatgcaccagcaccacagccttcccaacctgcagttacccctacaaaagattttccgaaaaagaccaacccatcgcgaaatatcattgttatagtcgtgccagtgttcgccgttgccattgtcgttgtgggactcatagttcttatctacaattattttggagcgagaagaccaagacacaaacctatccaaagtgaaggtgatggtgaaggtgatggtgaaggtgaaggtgagcttgataatgacattaaaacagatgagttagcgcaatttgaatttgctaccatcaaatttgcaacaaataacttctctgatgcaaataagcttggtc

SEQ ID NO: 30333 - DNA, 339 bp, Glycine max
gcggaaacttcaaaaccatctctgaagctttggctgccatcccaccaaaatacgacggaaggtacgtggtttatgttaaagaaggagtgtacgatgagaccgtgacagtgacaaagaaaatgctaaacgtaaccatgtacggtgacggacagcaaaagagtatcgtcactggcaacaaaaatttcgtggatggagtcaggaccttccaaactgcatcattcgttgtacttggagggggattcttggcgaaagacatgggattcagaaacacagccggtgcagagaagcaccaagcagtggccgcaagagtgcaagccgaccgagccatattcttcaact

SEQ ID NO: 30334 - DNA, 343 bp, Glycine max
ctcaatttgtggcttggacaggttgacgaagaatccaatttctcttgctattgtatgcatttcgttgagaaagagtgtttcagatcccgaaccgcatcgtacggtaccacaagtacgagttacggttatagtcattggtagtagcgttagtgtgatcagatcagaattgtgatcgtggatcgaagcaatgttcaaattcttgaaagaggtggtgagtggatctggcacgggcctcaaagatctcccatacaatatcggtgacccttatgcttctgcttggggctcttggcttcattttcgcggcacctccaaagacgatggtacccggtgtccataatttctc

SEQ ID NO: 30335 - DNA, 340 bp, Glycine max
tgtggtccccacctttaagatctccgttttctcaaaaatcttcctggtttggtctttcaagatccaaccctgtttgaaattcacctgtgcttgtttttctcctacttcacacttctgatctcatctctctcacacctcacctcgttttgctttttttacttttgaatgttaccatcttaattttttctctttgggtatcttcacaaagcaaagaaattcactgagaaagccaaagccaaaggtgatgatggaataataagtacaaatgaaagatgaacaggaaatattgaattgggtcaatcggatctaatctatcgagtataagtaggtaattcacaaa

SEQ ID NO: 30336 - DNA, 263 bp, Glycine max
gttctttcttcttccattgattcgttgcaatatttgtgcaagctccgttgctttctccgccaccactcctccgatcattctccggtgtagggtagagaaattgggaacaatgagtgaggtgtttgaagggtacgagcgtcaatactgtgagcaatcggcgaatctttcgcggcaatgcactgcggcttctgctcttgatggagaacaaaagaagcaaaaactttctgatatacaagctggattagatgatgctgacacattga

SEQ ID NO: 30337 - DNA, 301 bp, Glycine max
gaagacaacaagtgagaaagacaagaggaaagaaggcaagactgaagacgatgattgagacagtgaacacaacacaacaccataaccttaaacctcttcttttctaatttgccatgtatctctgtttcatttctctgttacatactctccctccaatgtagtaggaggaaaacaagcaacttttttttgccgccaatcgccatggccaccaccaccacccaatggagttccatttctttctctcccatccttctctccattgccctcttccaaaccctaacccccaattcccatccgccgc

SEQ ID NO: 30338 - DNA, 438 bp, Glycine max
ctagggtttgatttcgttgttcgattccgaaccaataatgcgacgcgaacgttaatggagaaagaaggagatgcattagtggatcctctcgccagctattggggactttccctctttcctcaaccatctctcccaccctccaaccctacaactcagaccaagatcttcacatcatccacactcacctcagatccatggccttgcggagtcctgcgaaactgatgcagcaggccaaatccatagtggatggtaaccctcaactgatcaacactgaaaatttgaacgatccaacttctcagaatactaatgttgccgaagaggatggagaatttcgtcgaaacccgagaccagggttagggcttaaacgtccacgcttctctatgaagccaactaaaaagccatctgttgagcgtttgctaccaactctggaccttgata

SEQ ID NO: 30339 - DNA, 420 bp, Glycine max
gactctcacacagctcctgagaatcaagaccaatactcttctagaagcaatgcagattaaaagagaagataacatacaaatactcaaaaattttcttcagcatttcaagcaggttaaggatctgagtatcaaagatttgatggggagaacgtagaagaagaggaccctaacatggctgtgaacttgctaactgtggctagcactggcaatgctgcttttcttgaggagcttctaagagcaggtttggatcctgacattggagactccaaagggaaaactccatggcacataacagcatcaaaagggcatgaagagtgtgttaaagtcttactcaagcatgcatgcaacatgcatataaaagacatgaatggtaacactgcaatatggaatgctatagcatcaaaacattactccatattc

SEQ ID NO: 30340 - DNA, 292 bp, Glycine max
atcaaactcatttattcaaaatctcttcagacgcttccaatcgttcagttcttcttcttgcaagattagtcccagtaattaatgggttgtttgtattttcttagaaaggacacaatggaagaaaagattaataaggagcaccaggtttgcacatccgatggagctattgatagccatggtcatcctgcagttcgaaagaaaacgggtgactgggttgctgcaattttgattttagtgcgtcaagggcttgctactttggcaatctttggagttggagtgaatttggtactgt

SEQ ID NO: 30341 - DNA, 563 bp, Glycine max
ccttggagtgcaatttcctggatcaactcttccaaaccatggctaatcatctactggtgaaggattcttccttggttgtgatgtgcatggttttgggtatgcccttggcggatgcagctctttcatgtccttaagtgcaattcattgtagcaccatgccttggtgactagagaggccttggtggtggagttttccctctaccatgttgcaatggggttaggaccctaaacaactaggccaagaccaccccagatcgtcaaggggcttgtaggtgccttaagcattacctacaaaaaagtctttcaaagataatttgtaagcaataacaaaacttgctccaaaataatagtaataataagtaacaccttctaacactctttctatttttagcttaaatttattaaaaaattacaaaatcatcatcaaggtcaaataataaagaataaaaacgctgcataattattatgatttctaataaatttgagcttagcattctttcctgcgagtgtgagaatgaaaatgaagaacacaacagaccaagcgtggacaggatcgtgatcctt

SEQ ID NO: 30342 - DNA, 483 bp, Glycine max
gacatgttcccacaaaccctaatattgttctcagcactcataatcctcttccatggagatctcgtcttaagcacaacagcaccagatgatatccacgatgttctccctcagtacggtttcccaaagggtcttcttcccaacaacgcggtctcctacaccctctcccccgacgatggcttcttcaccgtccagctcgatgccccctgctacgtccactgggacgaccaattagtctactaccacagccaaatcagtggcactctcacctacggttccgtctcgcacgtgtcggggattcaggcccagaaactcttcctctggctccctgttaccggaattaaggtccaccaggattccggcatgttagagttcttcgttggagctttgtcccagacgctacccgccagcgacttccaggatgtgcctgggtgctcccgcagaggatcgctgctcgctacaaacctcattcttcctctctgaccg

SEQ ID NO: 30343 - DNA, 285 bp, Glycine max
ccaaaaccagcaccacccctcttttcctctctatctcttttctcccgtgttgccgttgaacttccttatcctaaaaatgtccaattctatctccgacccgacccgaataattcactctccggctccgaataccaccgcggaccctcaggttccgcttcggaacctttcccaggttcggaacagaatggattctctacaacacttcctatctcaatccatcaataccaacactcccctcaccgtcgatcaaatcgccatggtctccagccagatcctctcctccat

SEQ ID NO: 30344 - DNA, 432 bp, Glycine max
  unsure (1)..(432): unsure at all n locations
agagattataacatatctgttaaaggtgtgacggatctttcttttcatgctaatcaaaagcttggtggagatcataagtggggtcttgcatctttgactgaaaaacttctatcaaaacagcttaaaaagcccaacaaaataagactgggaaattgggaggctcctgttttgtcaaaggagcaactagagtatgctgcaacagatgcttttgcttcttggtgtctttatcaggcgattaaagatctcccggacgcccagaaagtcactgacagaagtggccaagttgatgctgtaccgcaagaatgactacatctttagtgtgtattgaatttcatttctattaaatattaatcatttgtcatgtactaattatctgttgtaatctgtaaaaataaaaaatctgttgtnnnnnnnnnnnnnnnnnnnnnnnnn

SEQ ID NO: 30345 - DNA, 279 bp, Glycine max
ggattttgttaaagaattcttgctttatagcatattattgtggtcttggagcatcttttatatgacaattgtttctagttatgccagcatggtccaaattgttctgcttcttcttttatgtatgcaaggaaattctaataaaaactaagcaagaattatggacttaggtttaaaatcatcctacaaagctagatttagataatcacagcaaaaatcctagatgtttgaatcattcctttctaacatccatattggcaaaaagatctgtacagtaagttg

SEQ ID NO: 30346 - DNA, 328 bp, Glycine max
ttaaactgttgacaatttaagttggcaacggcgttgcaaaatcgccgttggcgtggcaaaagcacttaagttcttgcattctcaagcttcatccatgcttttgattggagacgtgtcaccggagatagtttgggccgacgctaagggcgtccctcgccttaaggtcacccctcccctattgccgtgtttggatgtcaagggtttcgtttcttcgccctacgttgctcaagaggtaatagagaggaaaaatgtgacggagaagagtgagatatatgggttcggagtgatgctggttgaattattgacgggaaggagcgccatggacata

SEQ ID NO: 30347 - DNA, 372 bp, Glycine max
acataattgagactttggttgatgaatacaaggcctgtgagtccccagattatatcacatggggaatggaggatccaggcaacatgctaacaggagaaggctatgctacaggatcattggatccaaattcagtagcgtgaaaaaacccaagtaccacaagggaagcataatcaaggaaagggtttttctgaaagatcaccaaggtttcctttgaagtttttaacttttttggggtgtgagatggtattcggtgtgattagttttgtttgtatttgtttgctaatcgtttgtgcccaagggaagggagattgagtacagaatctttctgtattgattcgtttttagcaatgtatatggttggttggtcattgg

SEQ ID NO: 30348 - DNA, 542 bp, Glycine max
gtttttatagtcctcaaagcaaatgacagtggagaaggaggaacgtttgcactatactcgctgattggcgaggtatgcaaatgtgagtctgcttccaaatcgtcaacaagccgatgaacaaatctctagtctttaagctcaaactgacctactcccagacactgcgcaaggtgcctataagtactaaagcgacagctttagaacaggacaccatttttccaagaacctattattgggtgttggttcttctgggagcttccatggttattggagatggtattctaaccccagcaatatcagtgatgtctgccataagtggtctgcaggatcaaatagatgaatttggtactggtgaagtggttggtatttctattgtagtcctggtggctttgttcagcatacaacggtttggtaccagtaaagtcggtttcatgtttgcccctatacttgccttatggttcttttctctgggtgctattggaatatacaatatacttaaatatgatatcactgttctaagagcattcaatctcgcttatatt

SEQ ID NO: 30349 - DNA, 333 bp, Glycine max
gagagaggtaggacacatgaggaggtagtggggtgcaatgaaaaagggaagggaaggggggtggggttggaatgagtatactatacatgttgttgtggtgtggatgaagaagacacctcactgaattaaattaaccagggaaaacccactcttgctcatttcccttctctgtctctaaaacaccaaacccctcttttcttctttctatcaaacacagtgcgtgcttttttgttcgtgttcttgttctttcgttctcctaattgtttcagtttatgagtgaatgaaatgggggacaagcaccagcagcaccaggaagactgcagcgatttcacc

SEQ ID NO: 30350 - DNA, 333 bp, Glycine max
catttcaagttctgatggtgatatatggcttctaggtgtatgtcataaaatttcacagcaagaatcatctggaggtgtagataatagtaatggattggcatcatttgaacaagatttttcatcaaaaatcctagttacatatcggaaaggctttgatgctattggagatacaaagtataccagtgatgttcattggggttgtatgcttcgaagcagtcagatgctggttgctcaggcattactttttcataaattaggtagatcatggagaaaacctattgacaagccactggataaagaatatattgacgtcttgcaactttttggtgattc

SEQ ID NO: 30351 - DNA, 305 bp, Glycine max
atgagatttgggatctaggtaacaaagaacagtttatgctgcttccatatctgatatagaatccttgaaaatgacatttgtatttaaagattggggttgaagagctctgtcatggggaaaagaatccatacttggttgaaggaggcttttattcttggatgaaacaaggtctccgtatcaaggaactcaaacctgagacagcactttccatcctcaatgaggaagctgaagcaattctggaggatgttagtccttctccttggcaacttttaggttatggtacagtacttattgcagggcggtag

SEQ ID NO: 30352 - DNA, 362 bp, Glycine max
cggcacagccattcccaaagagagagataagacaaaaaccacggttgcattgttgcattttgcatttaatggttgcaaccacaatccgttagtagattggaatggggaatggtgaatggtgaacggtgaaaagtgaattccagaaagcagagaatggcaagtagcggtgctgcaacagcggcgttgcagagcgatgcaagtagtagaatggaaggctggttgtaccttatacgcttcaaccgtattggacttcagttctctcggaagcgttacttcgttctcgatggtaaccttctccgcagcttcaaatcagttcctgtgtcaaataatcaggatcctgttagaagcgcgattgtacgatt

SEQ ID NO: 30353 - DNA, 620 bp, Glycine max
tttgcatacagcaacatgagtgacattgtaaataatttaggttggagtaacaacaatcaccctgaacatgacaaaactgttcgttttggagagtatcagaactcgggacctggtgcagaccccaaagggcgtgctactataactaagcaactaagtgaaacggaggttaaaccttacataacacttgcgatgattgaaggctccaaatggctacttcctcctccaactcccaaggtttaattaattaccacatttttgtctggcttgaggaataatgcaccccatgttttagtggatggtgaattagaaaatggtattccaattcaatactagattgctcgagttgttgagttttggtgtcttgtaatttatttgctttagtcttggcattttaaaattaagtgagatccttgtaaattttgattaagtgagttttggtgttcatgtgcactatgataacacctttgttaaaaataattggaaatttattattgttctagcttcaagcttttaaaaggacataatgtagtcaatatatgtccctataaattcatgaaaatgggaaatgtattttaatttatttaattttatatgaaatagatgatttgtattgtggttat

SEQ ID NO: 30354 - DNA, 698 bp, Glycine max
gtaaaactccacctaagatgcttgtaattttaaacccacgatcaggtcggggtcgttcaagtaaagttttccatggcattgtggaacccatattcaagcttgctgggtttagattggaggtagtcaaaacaacatctgctggtcatgcgagagatcttgcatcaagtgtagacatcagctcttgccctgatggaattatctgtgttggtggtgatgggataatcaatgaggttcttaatggtctccttagtagagacaatcaaaaggaaggaatatctataccaattggaattataccggctggttctgataactcgctggtatggactgttcttggagttagagatccagtttctgcagcaatggctattgtaaagggtggtcttactgctacagatgtctttgctgttgaatggattcagaccaataaaattcactatggattaacagtctcatattatggttttgttggtgatgtgttggaactttctgaaaaatatcagaagcgctttggcccgctgcggtattttgttgctggattcttcaagttcctatgcttaccacgctacaactatgaagttgaatatcttccagcttcaaagactgagagagaaggaaagctttctggtgaaaaggaagtagttgacatgtcagatctgtacactgacatcatgagcagatcaaataaggatggaatg

SEQ ID NO: 30355 - DNA, 502 bp, Glycine max
gggctctgtatgtggtgttaactagaaaagttgtcactttggtggcagagaatgaaaacctaaagagggagaaagaattggctttgaaagagtatgagtctttggagactacaaataagaacttgaagacacagatagccaagtcaataaacactgaagtggagaaaactcctgttgagcctgtgtcatctgtggctgagataacaccttcatccggtaatggtccatggttcctttataacctttttccagttccacaaatattttggccttccatccttcaatcttctaatccaattcatctacaaaatacatcatttaattccatcgccattccacctaatgctaatgtttcatgttcttctgagtctgaatcacatcacaagcaaaataaccttataaatgataatcgaactcgagtaatcactttttaaaattttattttgatctatccttttgatttttgaggttgtaagtttctttctttagcttaatcactaga

SEQ ID NO: 30356 - DNA, 310 bp, Glycine max
cctggcaaccttaaatctcccacaaggtatatgaaaccccattttctccctactaacaatcctcccatccccactgttctgtacatccaaccaacttatcctcactccaaaaggattcaccgagacagtttcatcaatcaaggcataattcctcggcattccatcatcatcatcatacaccgcccacacttggcctttcttaaagcttcttccaactctatctttgtcaaaatcataaaaatcagaatccaccaccgccatagtctccaactcccctccactagaaccccccctatgcttctcaattatc

SEQ ID NO: 30357 - DNA, 247 bp, Glycine max
gcaattggttggcatcagtgccatgctgatggcatccaaatatgaagaaatttggactcttgaggttgatgaattagtccgcctcacagattatactcatgaacaggttctggtcatggagaaaaccatattgaataagctggaatggaatttgactgtgccaacaacttttgttttcctggttcgtttcatcaaggcatcagtcccagatcaggagttagaaaacatggcacattttctgtctgag

SEQ ID NO: 30358 - DNA, 617 bp, Glycine max
cttgaagagtgtgtctatgtcttctaggaggggttgcatttaccaccacttaaggccaacggattatcgttgctccaaagagtcattcccaagttgatcaaggctgctaatgatactcagaatattttatcgcctttgatggccccagaaacatttaaaagggataagttcttttggttttcagatgtggaatttgctagggagactttggcaggtgtcaacccatatagcatccaattggttaaggaatggcctttaacaagtaaactagacccgcaaatctatggtccacaggaatcaacaataactagggaagtcattgagccacaaattatcacttatggaacaattgaagaggcccttaaagaaaagaagttgttcatgctggattaccatgatttattcttaccatatgtaagcaaagtgagaaaaattaagggcaccacattatatggatcacgaacattattcttcctcactgatcaagggacattaaagccattagctattgagctcactagaccacctatggatggaaatccacaatggaaacaagtcttccaaccttcttgtgattcaaccaaactctggctttggaggcttgctaaagctcatgt

SEQ ID NO: 30359 - DNA, 482 bp, Glycine max
attggagctagcctgacatgccttgttagccaacgaaggtggttcggttggtaagaatacgatcaaaacacttgtgtaaacatggcttaaggggataagttcttttggttttcagatgtggaatttgctagggagactttggcaggtgtcaacccatatagcatccaattggttaaggaatggcctttaacaagtaaactagacccgcaaatctatggtccacaggaatcaacaataactagggaagtcattgagccacaaattatcacttatggaacaattgaagaggcccttaaagaaaagaagttgttcatgctggattaccatgatttattcttaccatatgtaagcaaagtgagaaaaattaagggcaccacattatatggatcacgaacattattcttcctcactgatcaagggatattaaagccattagctattgagctcactagaccacctatggatggaaatccacaatggaa

SEQ ID NO: 30360 - DNA, 533 bp, Glycine max
cgggtgtttgtgaatgtgtgggctattcatagagacccttcaatttggaagaaatcactcgaatttgatcctacaagattcttagatgcaaaattggatttcagtggcaatgacttcaactatttcccctttggatctggaagaagaatttgtgcaggaatagcaatggctgagaagacggttttgcattttcttgccacactcgtacacttatttgattggacagtaccccaaggagaaaagttagaggtatcagagaaatttggaattgttctcaaaaagaaaatacctttggttgctatccccaccccacggttatccaacccagatctttatcaatagagtttactataatatacttgtatccattattcaacgctcaacactatattaattattttgtaaaaaaaaaaaactacattaattatgtgtaccagtaccagcataaggtgttagatataagtcgttgtcattgtacatcaaaaaatatggatttgttataaaaaaaattatcctgggttggatcattcatt

SEQ ID NO: 30361 - DNA, 309 bp, Glycine max
gagccttgaaccttgaaccttgaatcttgagccacgagccaccctcagactcagtcaccaacaccgaccaacgcaacaatggcatcggcgttcgtcaagctacgacgattcccctatgttccagagacagttatattctctcgaagaaacaactgatgagttaacggatcggtgccagaaactatataaagggtgcaggacgtttatgacagctttgggggaagcatatactggagaaataccctttgctgattcaatagacatatttggtggcggccaagatgaacctgtcagtgtatcaattggagg

SEQ ID NO: 30362 - DNA, 298 bp, Glycine max
ggatctagagaaaaatgaatgctttcatcactaatacattgtctaaaatacataggccctaatatgatttagcgtaagtgctgttttttgtcactagtacaatatgctattttgatgatcgttttttgaaatttttgcgatattggtctcattttgtaaaatattgtgatcttaatctatctgttaatttgtcacccatcactcaatggagatgttgacatgttcatgtgtttggtatggtgtcaactccatgtgtaccactcatgtcagtatcttatcgacatgtgaactccatgtg

SEQ ID NO: 30363 - DNA, 279 bp, Glycine max
gaagattgaagatggtgttcctttgactactttgtctcgcaactcggatgaaaagattgaattatgtcgattttccaaggacggaaccaaaccatttttattttgctctgttcaaaaagcaggtgatacttctgtcactgcggtttatgagattagcacatggaataaaattgggcacaagaggctgattagaaagtctgcttcagtaatgtccattagccatgatgggaaatacctttctctgggcagtaaagatggagacatatgctttcgatccct

SEQ ID NO: 30364 - DNA, 370 bp, Glycine max
gtttcgaccatcccctgttccttttctgttgcttgttcctctcttgtacgcaaacccatcaccacgtttgggtttgtgtaccacattccataacataaccttgttgtcctcaaattccagtcgttggatttgtactagaaggtgaaaatggttgggtttagaaaaacaccagcaccaactgaatcagataagaagacaacccttactgcagaaaaaagaactgcttcagaacctgtcctgccagttccaaaatctaaaggaaactatttcgactacgatgacgacgattgggggaggaagccttcctcattcacagcatcaaaggacaaagacaggcactagaatggtttcagcaactctggggggctag

SEQ ID NO: 30365 - DNA, 455 bp, Glycine max
ctagggaaatctcaatgtgtctgattttggattaagtgcattgcaaaaggtagctttgttcctttgaaccttatcctcagttccatcataagtattctctttactgagtcaaatttggatacgttatcagcataacgatgtcttaaacacgcggtgtggatccccaggctatgtggcacctgagctgctattgagcaaggggtatgatggagcagctgctgatgtttggtcatgtggggtgatcctttttgaattacttgcaggctatttaccatttaacgaccggaacttgatgaacttatatggaaaggtaaaatctatagtcataaaaaaaaaaaaacaaaactagtgtttgtaacaaataattcacattttctgataaatttcatgtgtaaaaagatatggaaggcagaatatagatgtcccccatggtttactcagaatcaaaagaaact

SEQ ID NO: 30366 - DNA, 492 bp, Glycine max
ctggtaaggttgcttcgatcaggctcagagagcattgttgttggtgctttaaatgctcttttagtgttggcaaatgatgacggaactagtgcagaagctatggctgaaagtggtgctatagaggctctcttggagctcctacgatctcatcagtgtgaggaaactgctgcaagacttttagaagtattgctgaacaatgtgaagattcgagaaacgaaagtaacaaagtcagctatcgtaccattatcacagtatcttttggacccacaaactcaagcacagcaggcaaggttgttggcaactttggctcttggggatctgtttcagaatgaggctcttgctcgaacaagtgatgcagtttcagcttgtcgtgctttagtgaatgtgcttgaagagcaaccaacagaagaaatgaaagtcgtagccatatgtgctttgcagaatcttgtgatgtacagtcgatcaaataggagagcagttgcagaggctggt

SEQ ID NO: 30367 - DNA, 419 bp, Glycine max
ctagccttcttcaagtgttcttcctctttaatttctctatagaatacttacccttttctcaagactaacctctcgatccttctcaaaagaagaaaattaaaatggcaactgaaaagcttagaggttgtgcaaagttttttgcaagctctaaaccctacttggccatgatctctttacaatttggctatgctggcatgaacattatcactaaggtttccctcaaccaaggcatgagccactatgtccttgtggtttatcgccacgcttttgccaccgctgtcatcgctccttttgcctttatttttgaaaggaaaggtcaaccgaagataacattcccagttttcatgcaaatttttatcctagctcttcttgggcctgtgattgatcaaaatttctactatgctgggttgaagctcaca

SEQ ID NO: 30368 - DNA, 806 bp, Glycine max
catttttcaataacaagagagagagagagaggcgtagttcacttcacttcaccactctcgcaacttcaattcttcattcttcttctctctctttgacaagtgtcaacaattctcctgtctcgttccgtctcccgaatccgtacgattttctttgagggtttgatcgcgccgatgtctgtttaccacgaaatcggaggctcttcatccatcatcggcttccgatcctgcttcaccaaccgcgccaggcttcgctgtcccgctaagatacgctttcgcttttgagggttttttttttctttttttcttttcctctcacacatgaaatagtaataatcgcacgaggtttcctttccactcaaattaacaaaaaaaaactgctagattctgaagcaagcgttgtgttgtgttttattttcgattccatggccaaagctgttggagttcggttccaccctactggtgttgaattagttgtgtactttctgaagaggaaagtgatggcaaaaaaaatctgtgatggtttcattgctgaacttgacatactacaagtatgctccttggggtctcccagataagtcttgtctgagaactggagaattggaatggtacattttctgcccgctagagaagaaatatggcagtgggagcaagatgaagcttgctaccaaaattaggtattggaaagctactgagaaggatagagttgttcagcacaataatcgaactgtggggatgataaagacactgatatttcacacgggtaaatcgccttgtggggaaagaactgattgggttatgcatgatca

SEQ ID NO: 30369 - DNA, 228 bp, Glycine max
ggcaaggtcctgttgtcgcagacattataaacttcaaattccttattaacaaatgatgttcttctattgattcctcaatttctccaactcaaaactaagtttcgtctttgtgatctcttgattatattatatcgatttgtgaattgtttttccacaaaaaaaaaattctatcataccatggcttcattatgccggcggttatcccgccgctccggccggtaacttccg

SEQ ID NO: 30370 - DNA, 470 bp, Glycine max
tcttcttctcgttggtttagtctcccttttcaccatcttcaataatctcaatgcgccttacttgtgtaaaaaagatgggattgttcttcactgcccgcatgttaaagaatcaccatcactttgggaaaatcctttctcttccacaacatcttggaagacctgtgctgagcgccaggatggtgttttaccagaacttcctcctgaaaatgaaacaaatggctatatattcatccatgctgaaggtggtctaaatcagcaaagaattgcgatatgcaatgcagtggctgtggcaaaaatattaaatgccactcttattttgcctgttttgaagcaggaccagatttggaaagaccaaacgaaatttgaagacatttttgatgtggatcacttcattgactacctgaagtatgatgttcgtattgtccgtgatatcccagaatggtttaccgataaatcagagctatttacta

SEQ ID NO: 30371 - DNA, 561 bp, Glycine max
gtctaggtggatttgtcactgcacatgcggcatgctcgtgcttatgatagagcggctattaaattccgaggagtggaggctgacattaacttcaatattgaagactatgaagatgacttgaagcagatgagcaatcttaccaaggaagagttcgtccacgtgcttcgccgacaaagcactggatttccgagaggaagctccaaatatagaggtgtcactttgcacaagtgtggaagatgggaggctcgaatgggccaatttttagggaaaaagtacgtttatttgggtctcttcgacactgagatagaagctgcaagggcttatgacaaagccgccataaaatgcaatggcaaagaggctgtaacgaattttgatcccagcatctacaacaatgagctcaataccgaatccacaggtaacgctccagatcacaatctggatttaagtttgggcaatgcaacttcaaagcctggcaataatcaagcgttggggaatcacgccacaaatgctgtaacccatgatcagcacctgccatctgagtctaattggcgtaatggggga

SEQ ID NO: 30372 - DNA, 327 bp, Glycine max
aaagacaatacttttcgtcaagatagtggttttttaggtgagagaatcaaagggggtctgaattacagtccctggatcattaaccaattggcctcaagtttgagaacccaagagagggtgaagaaggccaaacctggtgttgtttctgctgttcttacatcaagtaacaccaaagaatcagtggcttttcaaatgccatcgtttctcagaagaaaggctgatccaaaaaatgttgtttccatcatattgggagggggacctgggattcaactctttcctcttaccaagcgagctgccacacctgctgttcctgttggtggatgctac

SEQ ID NO: 30373 - DNA, 221 bp, Glycine max
ggcaaagtatctataaaataacaaaggagctcttcaacttccttcctatatgttttattttgttctttttattcagggagtgaaccgatgtaggtgagcatttattaactgtaagatatgggaagatcaaatttaaataaagtgatttctggcggggcatgtaaataatgccctagggagtttgtaattattgtttatgaattaaaaaaatatatataatt

SEQ ID NO: 30374 - DNA, 497 bp, Glycine max
aagagaaagagtgggagaaagccttagagagaatttttttcaaaaaagaaaaatattccttcttaattctacgtacgtgaggtgttagaagacacaacaatgaatttggcaaagggtgttggcggaaacattgacaaatcccaagttctgtccgctgttgaaaagtacgagaagtatcatgcttcttatggaggtcaggaggaggagaggaaagctaaatatctctcaccatatcaacataattagcctctcacttcatctagtgaccaacttatgacgctggcgacatcgcgtgccaactgagcggtctgatcacgaggatggtaacggaaaaactgaaagaatagtgacttatgacatatgaagatcattaattgaagtaaataaacaagagagtgaattatatctgtatctctgctagatgcaaacacctgcattgctcacatctcttatgtcataatatatacatatcctcccttgatatatttgagtatacg

SEQ ID NO: 30375 - DNA, 468 bp, Glycine max
attagagagagaaagagtgggagaaagccttagagagaatttttttcaaaaaagaaaaatattccttcttaattctacgtacgtgaggtgttagaagacacaacaatgaatttggcaaagggtgttggcggaaacattgacaaatcccaagttctgtccgctgttgaaaagtacgagaagtatcatgcttcttatggaggtcaggaggaggagaggaaagctaattatgttgatttggttaataaattctatgatcttgctactagcttttatgagtatggctgggggcaatctttccattttgcacctagatggaaaggggaatctgttcgagaaggcattaaaagacacgagcacttcattgctttacaactttgcctaaagcctggacaaaaggttttggtgctcggcggtgcaattggatatttgtcatgctatatgttacttataattcatgagttttaccta

SEQ ID NO: 30376 - DNA, 417 bp, Glycine max
atcaatgtttctaataaatgttttccacgtttcttgttttccttccttttttttattacattttttgaggtttcgccattttgaggagctacatcgacgcctgaaagagttccccgagtataatcttcatttgccaccaaaacattttctgtcaactggtttagatgtaccagtcattcaagagcggtgtgaattactggataaatatttgaagaaactcatgcaactaccaacagtttcggaatcaattgaagtatgggactttctcagtgttgattctcagacgtacatattctcaaattctttttctatcatggaaacattatcagttggcttgaatgccaaaccatttcagaagactaaaaacacttccaacttgtctgcacctgcaagcgatcctgtttccttttggagaga

SEQ ID NO: 30377 - DNA, 267 bp, Glycine max
acgataactaggaagtttcctaaacatcccttctttcaaaaaaccaatggctttcaagaacttgtccgttcttactctctgtgtttcccttgtgctttccttctttgcaccgaattccatagctgctaacaaccgtgcagtggttcctccagaaaccatttgcaactccaccgtaaacccttccttctgcaaaaccgtgcttgctaatcaaaatggcagcatcgttgactacggtcgaatttctgtccgaaagtccttgtcccagtc

SEQ ID NO: 30378 - DNA, 298 bp, Glycine max
attatacactttcatttagtccttgtgtgtatctgttgacaaacatgggaaccacttgcccagaatctccaccacttctccaagacccaagggttaccatcctcgaaacttcaatggtttttccatccaaagaaaccgacaagaggtccttgttcctatcaaacatagacacggtcctacaacttcgaagtggaaacggttcacttctttggagcaaacgaagattttccacccccaaaagtggcccagatgttcaagaacgctctagaggaagccctagtggtctatgacttcttgg

SEQ ID NO: 30379 - DNA, 344 bp, Glycine max
gggattaaagaaaattcttttattgcttgttttcttacagaacttgtctcagctagcttctatcaattatgatctggtgattaagagctccaaggaatcaactcaatgactccaacccatctatttcaagatattgctaaagagggttataagtttctccaagcgattatatatatatatcaccaaagacaaggctctaaataggtggatttccagtgtaaaaaagtattggcatgttcaatactaactctactgtcgtgtgttctttaccactgtattgaaataattttagatgcaatgtgatgtggttcgatagttgttttttgttacctttcagtttagaa

SEQ ID NO: 30380 - DNA, 456 bp, Glycine max
ggcgattggatctgcaccggttagttttgcccccccaaccaccacttcttcttccaactaatcattcaatcaaaatcttttctttttcatttttttatttatgaattgggctttgggtcctgttttgtgtaatgggtagcgtggtttttcaagttccaaagaggcccttgtttaggaacctgttttatatatttttttagtgttaagttggtatggatgacacatgtaggaattaggaaattgttagcctttagtttagtcttctgttcccgtatgatatggcctagtgttgttgtttccttttggctcatatatggaacactcactaagcattcttttgcaaagtggatagatactatttaggcttatttaaattttatttgtttttaatcattagttcagtacatgtaacaaaaactgtgaatttttagtctgtcaccaaggactagatagatg

SEQ ID NO: 30381 - DNA, 256 bp, Glycine max
gtgaaaactgaccaagttttgagcaagaagagaaaaaagcttccctagactctgggattcgcaatacagaattagaacccgatgatattttaaatgctattgttgattataagtctaaaaggggatctagataagcttctaaccaggtcaaagccacagatgcttcatctactcgactcaattatcaactccttgtgccaggttccaccgttcgtgttctatctggaacattttcagggtttacaggaccctcaag

SEQ ID NO: 30382 - DNA, 252 bp, Glycine max
ctccagtccccagatagacacctctctctctctctctctctgcattattatggactctccgtttcttcttccgcttcttctcatcttcctcttcctctctcccactccctcctcctcctccattgataatttccaccaagcctttcccatcgttgaacctgatcctggtcacacaaaacttcgtctttcaagagaaggtttggaggctattgagaaaataaccaaccccattgcagcagtggcaggattggg

SEQ ID NO: 30383 - DNA, 395 bp, Glycine max
ctaggccttggcctgagcaactccttcaggctttcttcgtggcagcaaagtgcatatggttgctacatttattggcattttctttcaaccctccattgggaattttaagggtggaagagaatagaagctttgatcctcactacatggaagatttggttactgatagacagaggtcacaaggtccaagccgggttaagatcgtggtggtgccagggttctatgttcaggatatgatcttgaggtgtagagttatttgcaggcacaaatctgcaccataaattaagtgaaatggaacttggaaattgttttaatttcactgtccattttatttagattctctcttctctgtaagtttgtaaaatccaaatgtatccggtaataaagtataatcgctc

SEQ ID NO: 30384 - DNA, 381 bp, Glycine max
ctcacacagcacgagggccaatcaatggaaagccgcgtccacctccctttcatctaacgacgtcgtcgtccacgtcaacggcgactctgctcccgacgctcgccggtttcacccaaccaacgatgcatttccccctcaacaacaacaacaacagcatcaggagcatgggaaggaaagaaggggcagtttggttcttgcgtacaagactcttggagtggtgtttggaggacttgtgacatcacccctttacgtgtacccttcaatgccactcaagtctcctactgaagatgactatctgggcatctacagcatcatgttttggactcttactctcattggggttgtcaagtacgccaacgttgccattagagctgatgacca

SEQ ID NO: 30385 - DNA, 496 bp, Glycine max
atttgttgctacaataaaataagatgagttcaactcaatccaaaccttcatccgtcaatgcccgtggcatggctctgccgtccgagcctcaccgccgtcgccgccacaaccacaaccacatctccaccttcctccaatccaccgcctccaacttcgcctctctcttcaaccccccaaaccctccctccctgactctcccgcacccgcccacctccgtctccctccctctcttcttcgcgcctccgctctccggttcctccaccgtggactcagccacttccaagcccgcccatcccccagcaaagtcagtccgcatcgcgcggcttggtgccaatggaaaaggcggcggcgggccagtcttcttgggggaggtgttcagcttgtgcgacctctccggaacggggctcattgccgcttccaagcacttcggcattcccttcatttcggaaagaacccctgagtggctgaaaaaaatatttgcaccgatcaccaagag

SEQ ID NO: 30386 - DNA, 269 bp, Glycine max
cacctctccccaaaaccctcgcgccgctttttttttctctttcattatttttttaccattttttttatggacctcttcgccggcgaccacttccccgtccccgaccacgtcgctccgttccccgattccggcgacctcctcttcgccgccgacctcctctcccaccgccccaacccccagaagctccgccccatcaggtccgtccccgccgcccccattgcccaccctcctccgccccctctctcgcacgatccgattccctccgggtc

SEQ ID NO: 30387 - DNA, 314 bp, Glycine max
ctcaggatcgtgcgactgctcattatggtgctgtgacagggttaaaagcgactgaggatggcatgtatctactaagtgcagggtctgattctagattgaggttgtgggatgttgaatctagctgcaacacacttgtgaactttgaaacagttcgtctgcaaataaacaaacctcttcaactagccaccactcaagattcagcccttgtttttgttccatgcatgagatctgtgaaagcatttgacatgtggtctgggaacacatacacgatattgcgtggtcactatgaatgtgtgaactcttgctggtttaat

SEQ ID NO: 30388 - DNA, 253 bp, Glycine max
atcaaagtctcttattcctctttgtattaattttttcctcttctcccttttcattttccggtggcaattcaaatcgcactctttgcgtttgtgctgatccactgtgaatgaaaaaaacaaaactaagagagagaagagagaaaaattacaacaacattattatttattgtaactaattagctaattaattggttattaaaaattataaggccatgtttggcgaaaccgttccgcgaccacagttcatgcaatc

SEQ ID NO: 30389 - DNA, 249 bp, Glycine max
tggaaccacaatatttactgccgtgcaaggttcatctatcacatgctaaaatgcatttaatgttcatcaacattggtgtctaggatgttgtatcacttattataatcctagggaataatctctagtcgccactggcaccaagtctaacaagaggctataatatatggatgatatgctgaacctatgaactatgtctactaaattatgagtttttcaatctctaaattctctctaaaagattctgctact

SEQ ID NO: 30390 - DNA, 285 bp, Glycine max
atgggcaattgttgaacttctctggctgtggaaatacattgaattgtaaccatcctgtggtcatggagctaattcttgacagcctaagacactgggtcaccgaataccatgtggatggatttcgatttgatcttgcaagtgtcctgtgtcgaggaattgatggctcccccctcaatgcccccccgcttattagggctattgctaaagatgcagtattatcaagatgtaaaattattgcagagcttgggattgtggaggtctctatcttgttgggagtttcctaat

SEQ ID NO: 30391 - DNA, 400 bp, Glycine max
tttctcgcgtccggtaaaaatgtagatgtaatgattttgggaagatagcgtatcatccatggcgtgaaaccctagttaatagttagtaccaaatgtcaaggctattctattacgatgtgatgtcccaccccacactaaagtagagtcagtgaggcttgttgagttcatgtaaagaaaagttcggagtgtcttggtggtgttatcggtgttggggggagtggagggacgtcactcttgtcgtctcccttcgcctctctcccaattggggttggtggcagggcgatggagaatttggttagagaggggtttatacagcttccaattgattgggcatgtttcatatacatcaagaggacagaggtagcagattacatagttggaggtgtaatggcttgtgaaa

SEQ ID NO: 30392 - DNA, 450 bp, Glycine max
atcggaagaagaagacagtgaaagaggtggaagcagaacattggacaagaaaaccaacaaaatattcggctttgcggtagcccatgatgacagtgaccacccacccgtgacccatcagttttttcctgttgaggactccgaactgcctgtctccgccgccgccgcaggcagtggaggcggtggcggcggaagctccttcccacgtgctcactgggtaggtgtcaaattttgtcaatcggaaacacccggcgccggaaaagcagtgaaagtgtcggagccgatgaagaaaagtcgccgaggaccacgctcgcgtagctcacagtacgaggagttactttctacagaagaactggtagatgggaatctcatatatgggattgtggaaagcaagtgtatttgggtggatttgacacagcacatgcagctgctcgtgcgtatgatagagcagct

SEQ ID NO: 30393 - DNA, 473 bp, Glycine max
gtatttacttccacaggcatggaaactgaagaacctcctgcacctgctgagaagaaagaggcgccaaaaagacggggtgctgctaaaaagaagtcaagtgccatagtgttggacgactcagatagtgataatgaagttcacgatgttgacgatgacgacgatgacgaggactttgaaatcatgcagccggttgccctagaagcagggagaaagaaaggagggagaaagcctgctgctcaaaatgccaagaaggcacctgctgctgctgccaggaagagaaacgtaggtggcaagcaatctcagtttttgggtcagaaactcataactgatatgttggagagtacagggatatcaccagagaagaaagtgaggaagatgagggcgtctccatttaacaagaaaagcagttctgtattgggaagggttgctgctgctgacaaagatgaaagtgtaagtaaagacttgtctggtgg

SEQ ID NO: 30394 - DNA, 275 bp, Glycine max
aaagaaaagatggaaaccatttccaaatttccctgttcacatcaacctgtaagctccattagtttccctcctagggtacaccccgtttctcacagagttgaagcacttctaaaccacctaaaacctcatcattctcagcctatctcaatcactaactggtttagacgctgagacaattcagagcgacttagttgtgcttgctgagttgtacaactgcatggacgaacttttccattctccacaaaccatacaaccccttctacgctaccaagatg

SEQ ID NO: 30395 - DNA, 341 bp, Glycine max
tggatgtacagtgtgtcgtttcaatcaccctcgcgatcgtgctgcggttgctgcggcagtaagagctacaggggactacccagaaagggtgggggaacctccgtgtcagtattatttaaagaccggaacctgtaaatttggtgcatcttgtaaattccaccatccaaaaaatggaggtggatatttaagccaagctccactaaatatttatggatacccgttacggctgggtgagaaagagtgctcctactatttgaaaacggggcagtgcaaatttggtatatcttgtaaattccatcatcctcaaccggctggcacatcattgccagcatctgcacctc

SEQ ID NO: 30396 - DNA, 122 bp, Glycine max
catatagacggcttcgaagttgccaccaggattcgaaagtttagaagtggaaaccggcctatgactgtccccttcgactgcaactgcagacgaacatttgtgggacagatgcatgcaagttg

SEQ ID NO: 30397 - DNA, 450 bp, Glycine max
acgagacctggtctagttaaacttttttattttggttttgactatcttttttatttttggataggttcttgtgcaaaatgttgactgattgagaggttgtggtaatgctgatgtagtttctttattttagatatgcataccgtggagaagtatttcaaatggattatggtggaacattttaaatatccttaatgaatggtctatttttttattatggattctcaacaccatatcatctctcctttcgccggtacatcctctctgccgtgcgcctccggcagaggcgatttccgacggctgtgccgccacttttatttttcctccctccacaattttttttctacgatcccctatttctcctccttccttgacttgatttttcaattccaatcaaacaaacgcaattgccattgttcccaatgatctctcagaccatagtggctttggctc

SEQ ID NO: 30398 - DNA, 323 bp, Glycine max
tggctggaattacacctcaaacatgttcattgccatatcttcctagggattgtggagatgagaaatgtcatagaccacaaatctctccgctagtggatcgtgatgtggtgcagccatctttagatgcatcaaatggtgtcttggatgattcagaagatgtaacagtctccaaaagttgccttgttgtgaatgtgcctgggtcatctaatgaacctgaacaaggtgagaaaacttgttcagccatggaaaacgctgagcatgttatagatatttccaactcggttgtgggaaattctctagactcaattacgaagtgtgatgat

SEQ ID NO: 30399 - DNA, 474 bp, Glycine max
  unsure (1)..(474): unsure at all n locations
cttgtactagcagcagcaatttgtttcgtgagcacttgcagcttcggtttcttcactcttcttcgctagggtttttgaagttgacgatggcttcgcctcctcatttcgacgaagactttgattttggaggcggttttagcggaacgcattcaggtaataagaggtcatctcccgactatgacgaggatgaatatgaaaatgatccttttggacacaagaaggccaaatctaaagctgaagaagctgcttctggtgtgacaacaggaatcattttgtctcttcgcgagagtcttcagaactgtaaggacatgcttgttacatgccaagttggtctttcccctttaacaaataatgttgtttgcttttgcttgaaaatcttgaactactgttattaagggaagcgtactttagttataattnttctgttaactctgtgagtatacacccacaaactctatggttatgattgatgtg

SEQ ID NO: 30400 - DNA, 265 bp, Glycine max
attccccccctctctcaagtctcaaccatgtcttccggaaccctagaaaacgagcaacctcaagtggaagaagaacaagcccaagctgaagacaaccacaccaagcaagaagataattcggagatgaaagacgacgatgacagaggcgaagaggaaagggatcaggtagaacaagagaaggatgtggagaaagaggaggaaaaggaggaagaagaagaagagaaggaggaggaccgtgacgaggtgaagtcaaaaaagtcaacga

SEQ ID NO: 30401 - DNA, 447 bp, Glycine max
aacccaaaactagcaagcaccattctttaattaaattatttccctcaatccacggaaatcgaataaagaaacccaaatccttcgctactaccgttatccaaaaccaaaatgcagagtcatttattcacagcatgatatcaatcgataacttcttcatttcacaaaattcagggtagcgttcacattttcccccttctttcttcccttccccaacaacatactccctactcgcgcggtgccgccacgtgtcccatcgttttcggcgttagtttccttccttctcatgtaacagtaacaacagtcaccacccatcacttctctcccgcacctaaaagaaaaaactaaccaactttttttctccgtataaataacgccaaatcaaaaaatcaaaaccatcgcaaagggttcccttttcagttttcaagcaccttcatcagcgatcgattt

SEQ ID NO: 30402 - DNA, 621 bp, Glycine max
cacagaacaaaaacttggtcttcagggaagtaaactggagaaagtagaagttaatgtaggaccaacctctgggttccgcagcatgtctcctgatgagtcaaaggagataaagaatatatatattgactcttctggagggaagccagttactttacagagatcagggtctttaagttcgacaaaagtagatctcccagaggaattcaaggaaatttgcaacttgggaacaatgaagcagagtcctgcaacaggagctcgtgtaaaatcaaatgaacaagcaattagaaaatctttcattgcaccaaacattgtacctcgggacactcttgatggtaaagtctcagcaaaatcagaaaaagagaccatcaccttttcaaagacaaaacctggaatgctacttagaccagctcatgtaagaagagcatccacaggcagatttgatgttgataggttttcagaagatgtgaattctggaactttttgtgatactgctattaaattagacagcacaaaagaacccaaattccaaccgaatctaggatctcagaatgaagttaaggaatcttgtgaggataaacatcctatcaagagtgttacagacaaattcgacaagactctatc

SEQ ID NO: 30403 - DNA, 428 bp, Glycine max
ctcatctaaactagtaccgtacccgtgagccatgcaccgacagttggattacatctcttagttttgtccgtggaaggagctttttccggtaaatatttctaaaaacatgatttaatgcattacttaccgggaccagctttttcctgccagatctagccaaatgcattttcctgtaaaaagatcacaaatatgacaatgttgcattcaattttccctaaacaatataaaaaggtcagagtgggactcgctaagttagtagttcgacaatggcggaggtagggtttcaggaacgaagctcgtggagagtggggctgagggcgcgctatagcagccccgactctgtggttttcactctcgaatcgaacttgagcctcttctcctatgcgtccgcgagcgttgatcgatgctccttttcatctgattcacac

SEQ ID NO: 30404 - DNA, 418 bp, Glycine max
ctcttattttggttgtgtgtgccgtggccatttcaattgaaagtaccatggaagccacttctacctcttcaagctgcagcaatggcttctttagtctccgatcaacaaatagtggcgaatccagggtccgtggttgcggaaaatctgatggtgtggccatgtggttcatcaatggtgtcacaaccgctttctttgcctccttggaacgttgctgcatccgaattgccaccgaagaagacgtcgaagatggcaacgacgacgtgcccttgatcctcaacgacggaaatctccgccaccgcaccgtggacaccaccacccgccaaaggaagaaagtgaaaggaaagaaaagttaattgttcttggtagttgaccaacgctaatatatagtgaaagtcaacgatctctcttttcttggtga

SEQ ID NO: 30405 - DNA, 545 bp, Glycine max
gacgacagaaggggattcatcgctaaagagtacaagaaaataaagtttatcaataacaacatggacatgaagttgaatattccagcaattaatgttttattcttattgctagctatttctagtacaactcaatcggttgacattaatataaaaaaatttggcggaggtgcagatataacacaggctttgacaaaagcttgggaagaggcatgcgcagcaacaagtgcaagcaaaattgtgattcctggtgggtcatacaagatggaagcagttgatttaaaaggtccttgcatggctcccattgaaattcagtttgatggcacacttcaagcaccggctgacccgaatgcactcgacggggctgatgaatggctcaaagtacaacatgttaacttttttaccttatcaggtaaaggtgtttttgatggtcaacgtgcaactgcttggaaacaaaatgattgtggaactaacaagaattgcaagaaacgttccaagaattttggtttcaatttcctggacaattctatggttcgggacataacttc

SEQ ID NO: 30406 - DNA, 333 bp, Glycine max
ggaatagttagcgaacaaacccaacaatcttacaatcctaaaagaaaacggaaagcaaaataaacaaacaattcaagaagagaaagattatgggtatcgtggaagaggctcacaacgtgagaatagtagggaaggggaatgaaatcgtgattcttgctcatgggttcggcacggaccaatcggtgtggaagcaccttgtaccgcatctggtcgatgattaccaagtgatcttgtacgacaacatgggtgctggtaccacgaacccagactacttcgacttcgaacgttactacacgatcgatggttttgtctatgacctactcgccatcttgc

SEQ ID NO: 30407 - DNA, 320 bp, Glycine max
ttttcttttcccctccctctggcaggaagggcagggaaaacggcaatttaagagagacccttttcctctttctctccacattccaagtttccaacctaacaagaccttgtccatctaaaatatgagttccaaagcgtggcttgcgttccttctcctggcactggccatggtcgctgaaacatatgccacaatagatgaatttgcaactacgttagaagaatttgaccctattatctctgatggtgatgctgatctcattgtagatgacaatgagtttttgatgagttctgaatcaacacgtcggtcactgatgcatggtc

SEQ ID NO: 30408 - DNA, 387 bp, Glycine max
caatagtcatggaaactagcaagttcagtttgctattcttttacgtaatttgtcttgctatattccctacccttaacgctaacataggtcacttcgatcatgtctggcataggcgattaaaagaagcaagagaagccgcaaaacaagcttacaagccgaaccccatgaaagttaccgctgagttcaatacacatgtcatcagggcaatgagaggctccaacaactcaagaaggggcttatcaaaccaatacgatggtccatgcaaggcgacaaaccccattgacaaatgttggagatgtgaccccaattgggagaaaaaccgcaagaggctagcagattgtgccctaggctttggccatggcacaacagggggcaaagatggcaaaa

SEQ ID NO: 30409 - DNA, 463 bp, Glycine max
aattcactctctattttgttgttaatcgaatttctctctcctttctttctctcttctcttgacgttgaaaatattacgagagagaaacgcaaggagagagaggaaaaccaaaaaatggttgtttccaaggtggttgtttttcttggtctgattctcgccgcccttatgtcagtggcttgctcccaatccgctgctccggctcctgctcctgctcccacaagcgatggcacctcaattgaccaagctgtagcgtatgttctaatgttggttgccttggttctaacttacatcatgcattaaggcaactacgagcaatgacacgccctaaattaattgatgagggctatagggcatttttatttcaaggacgtgtcaaaagcacttaggaggaagaaagattttttaattggaccgatgcatttttgtttatcttctcttgctccaaggataatctcattttgat

SEQ ID NO: 30410 - DNA, 476 bp, Glycine max
ccatttctcttctcgcgtctcactctcccaccgattcagtttcggacactcactcccactcgctccgattaccgcaccattctgcgtcgccatttagggtttcttcgctcctctttgttggatcttcctcactttgcatcgttctcttcgattcgtaaaatttttcttgcttctcctgtcttggctcgagatccgggccaagcacagaagaatccgtttctgatttgcattttgtactcactggtttggcttgtttttttctctttgtataaatggcttcgagcgaggggtttctgaccgatggccagagggaactgctaaaaattgcaagtcaaaatgcggagaatctgtcttcgtcgccgaagtctcagtcgtccttgctgtctgaccatcatgtgaaagcccctgctggtggtaaggcacaaaccgctggaatagctgtgaggcatgtgcgtcggtcacactcgggaaagtat

SEQ ID NO: 30411 - DNA, 555 bp, Glycine max
tttcacttacaatatatatataaaaacattgcaaagttgcagccccggttatttttattatctttattccgatcatcattttgcatagagaaaaagcaaggaagaataataagggagagagagtgagaggaagaagggaaaaccaaagacacttcctagttacttccctctgcagccataatagaataaccagcaccaccaaaggtgaatcatggttatttgcttgaagctcataataatgtggaatgtggcactgcttctggttttttctctaattggttctgctaaggcctcagtgtcctatgactcaaaggctatcaccattaatggccagagaaggatcctcatttctggatccattcattacccaaggagcacccctgagatgtggccagatcttattcaaaaggccaaggatggaggtttggatgtgattcagacttatgttttctggaatggacacgaaccttcacctggcaagtattattttgaggggaactatgatctggtgaagttcataaagctggtgcagcaagcaggcctttatgttcatct

SEQ ID NO: 30412 - DNA, 317 bp, Glycine max
catcatcatcatcatcatcatcatcatcatcatgttgttgttagattgccttgttgctatagctcccgggattgtatttgggcaattttttttttttttaatcaatttgttctgttcttgccaactgcatgcattgttggcattctgctaaaaaaacattgtaatcttttttactacttccttaaatatttgcttgctacaagcattcaaacactcgtcaatcctcaactgcttaaagtaaagttcttatttaatattgttcccaaaaaagaaagttttcatttaatattatttgatgcatttaatcattgcccctt

SEQ ID NO: 30413 - DNA, 386 bp, Glycine max
  unsure (1)..(386): unsure at all n locations
aagccagttttgttcccttcgatgatcctagtttctgtgaatggatgccaagtttgaaagtggtgccccccccaccaagttgatgatggagcccctctaaagggtcttaggcgctgcatgttccacctcgttcgttattctttgttaagttggtgaagtcaagtttgcttgcatgatttggggaccccaatgagatagacttttgcctcatagccccctcccattcattttgttcgcttccaaaagatttttaggtgcaaaaaagagtttttttttttatattttttttgggggccggcggggggtaaggaatgactgtgccaaagaaaattttcccattttccggttaaggtgttcccgtagagcaataaaagcctttcccggna

SEQ ID NO: 30414 - DNA, 462 bp, Glycine max
tctgagctcggctcgaggaagcatccagtcagttgcaggtacaaatttcagctatgccagatatcgctggtgtaaagatagggtgataatttcattcctacaggcaatgacccaggaaaagttttccccttggaagcaccatatcctattcctttgcagccatttgagggcaatttgcatgctaatatatcagatgcttcagctacagctgctatatcagaagggcttcatcctgcattaccatcaaagaacaagggtaagcaccagcagtctgaagatgcctcttcattaattagtagtatgaatcccacacagactcccaagtctgttgaagatgacttctttactacagccactgatgcattcagccatgctcatgttgatgccgagtccaatgtaattgatttcagttaccttgaaccacctgcactttccaacagagtctattattcaaagagaatt

SEQ ID NO: 30415 - DNA, 437 bp, Glycine max
ctgtcgcgttggcggattccatcacacgggtcaattggtaaaatggaatggcattccatttgctattggtgtctatggattttgctttgcaggacattcggttttcccaaatatttaccagtctatggctgacaaaaaacaatttaccaaagcactaataatatgttttgttttgtgtgttttgatatatggaggcactgcaatcatgggatctctcatgtttggtgactggcactttgtctcagataacattgaatatgccaccaggcacatttgcttccaaagttgcattgtggacaacagttattaacccgttgactaaatatgctttgttgatgaacccactggcaaggagtctagaggagttgctgccagatagaatttcatcctcatattggtgcttcattcttcttaggacaacacttgttgcatctacc

SEQ ID NO: 30416 - DNA, 287 bp, Glycine max
gatttcccttcctttttgacttatagcctctgctccccttttgcggggtccttcaatctcacttggggaacctccgtgcattaacccaaaagagttcatggacccttaattaaaaaatattttgcctagaaccaaaacctgcccttactctataacatttaccaaccgggaattcttcctggacgttttgttttttgattctagacacttggaagaagaatgagttgttttccttgtttttcaaagactaagagaaccaacagcaagagggagcagcaaggcattat

SEQ ID NO: 30417 - DNA, 329 bp, Glycine max
cccactttcatcttcagttatctatcacttaagattgcatttctcaaagtctagttactcatcacagtaatcatttgcctctttctgagagacacaacatagatatgataataagtgacacacttatctaaatggctgccacgtgctgtagcttcactcaatcgtcttctggtttcaggaaactccatgagagcattcagctgcagagctacttcacaaggtaccagcgaagatcaacttgcagtgttgaaaatatcttccatagggactatggaggaaggttgttacaagttgaaggatggcatcaacatcagtatttgttatgtgca

SEQ ID NO: 30418 - DNA, 400 bp, Glycine max
ccctcgcttccgaaggaatcagaaaacccagaaatccacacacacaggctttagcaagccgtgtgtgaaggtgtgtctggtctgtgatcgttattaattccttcactagacctcctagttaaattaaccttttaataaatgtcacactcgctcaaggttttttttgttttcactctcttgttccttgctgtggttgaagctaaacacaaaaagaagcacaaacacaaaatccgccatggtcctaaaccatttcttcccctgatcccaccctttggttctgatgagcttccacccgttccccagctcccgcccattttcgagcccccatccaatattccccagctcccaccctttcccttgaagcaaggtggagaagaaggacaaggggttgaaaatactc

SEQ ID NO: 30419 - DNA, 668 bp, Glycine max
ggctgggcatatggacctgacattaaaagcctaagatggcctcctatttcttcacagttttcaacctaatcagcctctgatgttgtgcgtcgaaggcgatggattcgtacaagacaatctttgtctgagcaaggtacagaaagcttgcagggtggagcaagtactgtgcaacctggagcttctgctgttttatcatggagaagctcatcaaagaattctgaccaatgtttgcaagttcgacctaaatttgataattctcagccctcatactcatggggttgtgctattgctgttggttcaagttatatatatagcaaagaccaactattagatccaggttctactagactgacttctgtaacacccacttgctcattgaagcttaatgagcttgagaaaaaagatatacttgtgtgctgcaatcctagtagtggaagtaaacagttgtggtttagtgtgtgtacagatgcctcagttctcaatactgaactaaacgtacctgtatatgattggagaatatctattaactctcctttgaaattggagaaccgacttccttgtcctgctgaattttcaatctcagagaaaacaaaggaaggaaattgcattgagcggcatcatggtgtcgtatcttctcgtcagagtgtacatatctattcagctgatat

SEQ ID NO: 30420 - DNA, 284 bp, Glycine max
cgaaacttttagggcagatgctttactatgttctcactactggctcgggacagcaaaccctgggagaggagtactgcgacatcactcaggttgcaggaccttatggacttcctcctacccctgcgaggcgtgctcttttcgttgtatatcagactgctattccttatattgcagaacgaattagttctagaattgcttcgcgaggcattgtccttgctgactatgagtctgctgagggttttggtgaaatgcccacaggagccatagtgctcagatttctggca

SEQ ID NO: 30421 - DNA, 331 bp, Glycine max
gttttccctcttttcttgatctagcttgctgaggaagcacatggctggtagtagttcaaagccagtgatatgtccgcgaagccagggacaaacttggctttcccatggccccacttccaattaccactccttcaatcatcttgtttcaagaggaggaattggaaggctcagtcgttgctgttgtactttcaatttcaggttaagaaagagctaaacggctgcgttttcggtcatgagaaactttggcgtgacgacggaggaagaccatgaattcgtgaaggctctcagggaatcccaaccttacgtttcggtccacaggggcagactattc

SEQ ID NO: 30422 - DNA, 395 bp, Glycine max
ggaaattccacctttgcttgaaggagatgggaagatagaggtatggcgaatcaatggaaatgccaagactgcattgccgaaggaggagattggtaaattttatagtggagattgctacattgtattgtacacctaccattctggtgagcggaaagaagactacttcgtgtgctgttggtttggcaaagacagtgttgaggaggaccaaacaacggctactaggttggccaatacaatgtctacctcattaaagggtagacctgtacagggtcgcatatttgaaggcaaagagccgccacagtttgttgctattttccaaccaatggtggttctcaagggagggttcagctctggatacaagaaactaatagcagacaaaggagtatcagatgaga

SEQ ID NO: 30423 - DNA, 928 bp, Glycine max
tcggcagtgagcagttaagtggtgttatgcctgtgtctcctgctgaagatgacatcactcattctctaataaatagagatagctttggacattacaatatgggtggtattgcagaggtattattggcacttgagaggattgaacaagatgcagaactaacccatgagcaaattcttttgttggagaccaacttattcctcaatggattaaacttttatgatcaccacagaggcatgcggttggatattgataacatgtcctatgaggaacttttagctctagaagagaggatgggaactgtgagcaccgctttgccggaggaagcatttgctgaatgtcttaaaagaagtatatatcagtctgcatatacacatgagtgttgtaatgaggataaggatgatatcaaatgctgcatttgccaggaggaatatgttgttggagatgaagttggggatctgcaatgtgaacatagatttcatgtggtttgcatacaggagtggatgcggcttaagaactggtgccctgtttgtaaagtatctgcagccctgtccaattcatttttacctcattgattgcattgttccttttcttttacttttcattttgcacaaaatacagatacagatgctcctcacctcatcttattgatccatatgtacatacatagccaatgtctccatccataaaaactaataacctaagccgccggcttgatggacactggaacttgctatcctgcgcatgaaaatagtcccatctttttgttttgtttttgtttttgccccttttgcctttatcggcaagtattagttagttttagtcccatctaagtacatctttttctttctttgtttttatcggcaccgattttatattattttctgtatttttctcatttctaaataatagagaaactctattctatttt

SEQ ID NO: 30424 - DNA, 298 bp, Glycine max
cgaagaggaattggtgattgaagaaatggcagatgcagcgaagggtacctacagagcctcaagatggtcccttaacggaatgactgctcttgtgaccggtggaactcgtggaattgggcatgccatagtggaggacttatgtgggtttggtgccactgtccacacttgttccagaaaccaagctgaattggataagtgtttgacagaatggcgtacaaaggttttttggtttctgggtctgtgtgtgatgtctcatctcaaccccacagagagaagttcattcaggaagtcacttcca

SEQ ID NO: 30425 - DNA, 441 bp, Glycine max
tttcatgttacctatttccatctttcattattattatttttttatatttatatttttcccttaggaaaattgtcttaactaggagccttagctcacgaatatcatcttaccacgaaatcttggctagtactatattagggttcaaattcaaactatttcaatttaggaggatctcaactcaactcatgttatcattattattaggactgtttcatattagtactgtcaaagtttcaattaattttcacatgttcaaccacagaataggttaccagaacaaatattaagtttaagacacaatccaactgtatcttactcacgtccgattgaacactttttttgtttttttttgtggatgaactttgtttatccttttaggcccagcataacttagctcttctggttcttcttttctttttttctttaggttttgaattggat

SEQ ID NO: 30426 - DNA, 341 bp, Glycine max
tcttcttatatatatccccttaaaaacgcacacgcagaaattgtcttagctaggaggagcgttagctcacgaatataatcttaccatgaatacttggctagtagtatactaggggttcaaattcaaactatttcaattaggaggatctcaactcaactcatgtttttattaggactgtttcatattaatactgttacagtttgaattaatttttacctgtccaaccgctatatagataaaataggttaccaaaacaaaatgtaagtttaggacacaatccaactgtacctcactcacatcagattgatcacttttttttcttaaaaaaaaactttgattat

SEQ ID NO: 30427 - DNA, 530 bp, Glycine max
gccaatttggtgcttattcatcagctcagcctaagttgataacagttgactcagaagaggtagaattcaagtatgaggaagaatctggattggtgactattgatttgagagtacctgagaaagagttataccaatggagcatttctattgatttttgaatcagagactttgtctcaagatgaaggggtttagagttatagacttgatgtatccatagttcgcaacaatatgatgagcgtatgtagaccaatggcaggaaatgttagaggttccctgtaaggaatatccagaagcaatgaatgaatatcacgaagttctcgccctattttttgtgatatacttaaccagaatgtaaatgcagcctttgcatcgttcccatacagtatgaattggttgctcttggtttcattaggcctcatttctaagaagttcattgtagtttcgttaagctagaaaagaaatatgcggatagaaatgcattaagattagcccgcatatcctttaaatggggaactaattggttatttgat

SEQ ID NO: 30428 - DNA, 602 bp, Glycine max
catgaaagcccccaatatagtaattgatgttaaggaaagttctggttcagatgatgaggatgagaactatctagatgctcttgatacactttctagaactgaatcattcttcatgagctgtagtgtgagtggtttgagtgaatgggatgatcaagaggtccaactatcaggaaatttttcaacagatcaacaggcacgtgatttcatgattggcaggttcttgcctgcagcaaaggcaatggcttctgaaacacctcaaattcagcacaactctaggaagccacttgttacacaagaacaaccaaaacaggcatggaaggtagttagtggagcgaattcccgtcctcttaatccaaaatggcaaaaggtttctgccgcattatgctcaagatattggtagggaagagagcgaagatgaaagtgatgataatgatggatatgaaaacaatgcacccaaagtttgtgggctatttcctcggttctgccttttgaatccagttccaggattaagaatggagggtaggattcgaagttctacatttcatggagtgcagagtaaatcaattacttctcacagaagaactgcaaaagagcatggtaga

SEQ ID NO: 30429 - DNA, 325 bp, Glycine max
  unsure (1)..(325): unsure at all n locations
gtaataattgcttngctttttttttttactttttattacttgcgccttagccctctctcactccgcctccatcgatctctttacgccctctgactccgtctgtacgtgtcactccgcctctgtcagcgccgccaccgtcgtagtgtctcctgcaccgtcgctctctcaccattgaagtcattgttgtcgtcgtgggggttgtgagggcatattcgtgttgctccatctggtgcgcgtctcattcaatttaattggtttttccctttttattctcctatagcttgaaggggttgttttggagcatccctttttctggggagaggaa

SEQ ID NO: 30430 - DNA, 334 bp, Glycine max
cctgatttacattcttgccattcgtgttgaactgaaaaccaaattgaaagaaagaagcctacggtctgaaaaatccacttgtcctgatgagttatgtaagtccagtaatggcagcagcaactgcccttctttctcttgcattagatccatgggatgaattccgagaaaacaagtactttgataattcattgcatattactcgaagttgcttgctgatgcttcttggtggcacattgccttttttatggtactaacagaatatgttctggtctcagtaactagtgctgtcacagtcacaatagctggggtcgttaaggatagtgtcaccatattg

SEQ ID NO: 30431 - DNA, 351 bp, Glycine max
ctggagggggccaaaatcctaaagataattatcttgtgaagtttctttttctgctaccattttgtgctgtgctgttctgctgttgtcgttcgtttctaaagaatcagaggtactttggttcctgttgtagaacctcactatgcgatcatgtcagacacctttattacaggattaaatcaggggggccacttgcatatactaccatttctacctcaactctcaattcccctcataagctcatctttggcgctcagtacaaggcgcctgcatatatgggcagtatttctgtctgtgtctgtttattggctgcagtggtgtctcttggattagctctcttgatagtaccacggc

SEQ ID NO: 30432 - DNA, 412 bp, Glycine max
tctcgttgcttcggtcttatgatgaggtccatagtaagttggcagacatgtttggcatagaaaaatctgaaatgttaagtcgcgtgctctaccgcgattcagctggggctgtcaaacgcattggtgatgagccattcagtgacttcacaagaacagccaaaaggttgactattctaatggattctggcagcaacaacgtaggagtgtagtggggcagaataaactattcttttaattgtacagatggttcatgaagtctcattttctaacctttccccctcctggtgcaatggaaggaggcagcctgatttagtttttgaatatcaaactctacataaatgtttctattccatctcaaaggggatgtttggatttttgaattttggttagagtgatcataatttgtgttttc

SEQ ID NO: 30433 - DNA, 357 bp, Glycine max
cgactacagatgctaactctggcaagcttgtcatgttttcgggtgagcctgatttcagttctggtgcgcatgctttgcttaataaggattgtgagcttgggcgtggaggatttggagcagtgtaccaaactgttcttagagatggacattcagttgccataaagaagctcactgtgtcaagccttgtcaagtctcaagaagattttgaaagagaagtgaagaaattaggaaaaatcagacaccaaaacctcgttgaacttgagggttattattggactccatcactgcagctcctcatatatgagtatctctctggtggagtctctataagcatctccatgaaggatctggtggaaa

SEQ ID NO: 30434 - DNA, 256 bp, Glycine max
ctcacttcacaaggagcagaattttgattgtggacttgagcaaaataatactcgcctttcaatattgcatgaatctcatgagagtcatatgcttgcagagccagatgacacacttgaaccttgtgcttcgggatcatttacatgttatcttgagggagagaaagtacattcagatggtgaacttaacagaacattatccgagtgtttcccatcaaagagtccaatctttctgagagaatagattctgcatggactg

SEQ ID NO: 30435 - DNA, 257 bp, Glycine max
atttgtcagggcatgctagataaatttattccttagaaaatatataataattgctcccaaacataaataaaatatacttttgtggaaaataattcaagcttcgtgttattttctttttttagtttcattgacgaaatataaaagtttctgaccgttcaatgcaaactcctgggcaagactaaaaggtagtttgaatgctgtgaaagtatggttggccttcaattttccaagttcctaagatgagccaaaattttcaa

SEQ ID NO: 30436 - DNA, 465 bp, Glycine max
attgaattcttcttcctgcaatgccaggaaccatcatggtttcagtactggaattcatggatcttccattatcttcatcaacattcataagggcttccttggggaaaatagagtaccaagtgaatgacaagggaaacttatccttccccttaactagcctccgtgatgatttgatcttcaaaattcttgattctgaggggaatgaaatatcacgtacaggtgttcaaataaaattgatattggagaaaggtgttttggaagacaactttccccttggaggtggccatctgcgtttgaagttgcaattcatccttagtgatgaagagcgcgacagaattcgttcattgagacaatctgcattaaagaaaaaacatgatgagcttcttagttccagtagaagaggtgaagaaagcgatagtagaaccgtgattggaaatgctgcattgccctttcgcagaaatgatg

SEQ ID NO: 30437 - DNA, 458 bp, Glycine max
acgagggcaaaggaagttgattctgccaaagaaagttctggggctgaaaaaccatctgtgttttctaggaagagaaatttccagactgccatgttacagcataaaaaaccagcctctagtgttaatgctgaaattattggtggacccatgctaatttctagtgcatcatcgaaaggcgctactcttagaaagggtgatcgagtaaaatttattggtagctcgccttcggctgtctcatcactaccaacttatatttcaaggggaccaagttatggctcccggggcaaagttctcctagcttttgaagataacgggtcttcaaaaattggggttaggtttgataaatcaattccagatggaaatgatcttggtggcctttgcgaagatgaccatgggttcttctgttctgcaaatcatttactacaagtagacggctctggaggggatgatcttgacaa

SEQ ID NO: 30438 - DNA, 404 bp, Glycine max
gccaaacagggcggcttcatctttttattggaaggctactgggactggtaaggcggtgttgacctctggtgggacccaaaaggttggggtgaagaaggctttggttttctatggagggaagcccccaagagggatcaaaaccaattggatcatgcatgaatataggctaactgataacaagcctaacaataggcctcctcctggttgtgacttgggcaacaagaaaaacactctaaggcttgatgattgggtgctgtgccgaatctacaagaagagcaacacgcataggtcacccatggagcatgacagggaagattcaatggatgacatgattggagggattcctccatccatcaacgtgggccacatgagtgcgaggtttcatcatctttcaaagatgacga

SEQ ID NO: 30439 - DNA, 249 bp, Glycine max
cttcagttcagttgtataatatctatcttaactgatcgtgttcatcccccctaagcgtacttggagaatgatttgttatcaagtccccattagtcatgttggactattcctttttaatgtgttacatgaagtaaatgtgcttggtgctgtgcaatttaattgtgtgacgtcgtccgagaagcaggtctactttagcatataaaagccaatcaaataataaaaaaaaaggacgaaggccggccagtgagc

SEQ ID NO: 30440 - DNA, 215 bp, Glycine max
cttcagttcagttgtataatatctatcttaactgatggttatcatcactcctaagagtacttggagaatgatttgttatcaagtccccattagtcatgttggactattcctttttaatgtgttacatgaagtaaatgtggctggtgctgtggaatttaatgatgctacgttggcagtgaaatcgatcaaattaagcatataatagcttttcaatt

SEQ ID NO: 30441 - DNA, 305 bp, Glycine max
attacaaggagttttttttatatagaattgagaaaggaaacacacacaaactaagcagtagttcagctatttatactgattttttacaaataaacaactcactaatattagtaatttgttacaattgttttaactacaagcttagtttgttagaactattttaattaccaacttaatttgttacttatgtgaaccaacctatcaacaatttgcatatataggatatgattacgaaatttcagacgcattgtacactgtttataaccaaataacccaacaaggtttgatgaaagaaaaggaggagt

SEQ ID NO: 30442 - DNA, 307 bp, Glycine max
gaaagatcaccaatcggccccttgctggtactgttagaagaggaaaaacaccaaaagaagatatcatgttggagaaacaacttttgaatgatgaaaagcaatgtgcagagcacgtaatgctagttgatttggggagaaatgatgttggaaaggtctccaaaccgggttctgttcaagttcaaaagcttatgaatattgagcgctattcccatgttatgcacatcagctcaacagtcacaggggagttattagatcacttaacaagctgggatgcattgcgtgctgctttacctgttggtacagttag

SEQ ID NO: 30443 - DNA, 558 bp, Glycine max
ctcgagccgcgcttccccaccgtgcttttcagattggtcaagctccttttactccccgcaacaaaacaccacctagttgcagattttttcttcttcttccaagtttgtttatctttatcctaatttgatttggctttaaggttttccattatagcggttttctttttattatttgttgttattatgatgacgtaatttcaatccttttcataatgactccataatggcgattagtgaagtttctgagctgtgtgagcgatttagcataaagtatacgatgcatcgtttctggttctggatgttcatgttcgagcaaagatcttttgtgtgtgtgcggttactgctttgacgttttggattttcagtaagtaaaatctcggaagtcctcagttaagctcttctgcttacttagggtttggaaagtcacttcatgtagggattagtatttgcactagatccgcggttagagttgaataatttctaacgctggatttgaagtgaatggttttagaaagggatactctgctagagtgctcgggatatatggtcagggcattt

SEQ ID NO: 30444 - DNA, 545 bp, Glycine max
cattattttacattccgtgagctggcaattgcaagggagaatttccgccaagaatgggtgttgggtgaagggggctttggcagagtttataagggaacaattcctgcaaccgggcaggttgtagcagtaaagcaactcgaccgaaatggggtccaaggcagcaaggaatttctggttgaggttttgatgttaagtctcttgaaccatgacaatctggtcaaactcgctggttattgtgctgatggagatcaacgtcttttggtctatgagtttttgccagggggctgtttagaaggccgtcttcttgagaggaaaccagatgaacctgtattagattggtacagcagaatgaaaatagcatcaaatgcggcgaaaggactatggtacttgcacgacaaggccaatccttcagtcatataccgggacttgaaatccgccaacatcttgctggataatgataacaatgcaaaactatctgattatggactggccaaacttgctggtaaagataagacgaacatcgtaccaacaagagttatgggaaa

SEQ ID NO: 30445 - DNA, 329 bp, Glycine max
aagtcataaaaatataaagtcccatctttgtgtatgtggcaatcttaatcaaattaattgttggcacttgcttgttggctaaactctctttgaatccaagttctcatttttgctatggtttgagtccaatccattgtcattgtcaccctaacaatttgctcacttttagttttctctgtctctcattccaaccagctagttggttattctttccaccggttgttgccatatcttcggtggttaaacgcgtcgttcacacggaagctctatcttagaccttgacgtcaaactagctcattcccttccaaactgttcattctctttcattg

SEQ ID NO: 30446 - DNA, 548 bp, Glycine max
cggctcgagcgtgaaactctcccaagtgaagtcccaacccaatataaatccttctgaaagcaaaagggagagaaaggcttttatttgcacccctaccccgcgatgatggacactttgtctatctagacaacacctttctaccttccttctcagcttcatctcaagtttataactccctctatatccatttattaattgaacaaaatgtgtcactgagtgagagagagagagagagagagagacatcatagaagaagaagaagaagaacgcaacatggcgatgtactttcacggaagcacttcggaaattcaaccttcttctgcagatggcggtttgcaaacgctttaccttatgaacccaacttacgtaccctacgctgacgcgccgcaccacccaacagcgctcctcgtcaatcccaacgcgctcaacctcgcgaatatcccccacgcgccgtcagtgtcaccaaaccatcagcagcagcagtccctcgccttcactataacctctggggtccggtggttgatcatccgggaacgccgtctagcagc

SEQ ID NO: 30447 - DNA, 514 bp, Glycine max
tgagacatcatagaagaagaagaagaagaacgcaacatggcgatgtactttcacggaagcacttcggaaattcaaccttcttctgcagatggcggcttgcaaacgctttaccttatgaacccaacttacgtaccctacgctgacgcgccgcaccacccaacagcgctcctcgtcaatcccaacgcgctcaacctcgcgaatatcccccacgcgccgccagtgtcaccaaaccatcagcagcagcagcacgtgattcacggcatgacaaacatcctcggatccggcaattccgatgaccactcccgaccgtccttgttcggcgaaaacatcgccgccttccacggcttctccggcggcgcaggcactgcctccgccgccgcccctcgccttcactataacctctggggtccggtggttgatcagccgggaacgccgtctagcagctccggtggaggcggtttccggcggccgagtcagcagggtttgtctctcagtctttcatcacagcaaacaa

SEQ ID NO: 30448 - DNA, 489 bp, Glycine max
gtacaacgtgcaggtcagagcacccttcagatacttctctaatgttgccattagcaaaagtgaagagtcccttgaattcaaacaagaatggttacaaatgaaggatatgtatcacaatcttagccaaaatcttgaagaggtgacaagcaaaacaattccattccaacttgatggagaatatgcagttttctcaaatacagagcaaagaaatcatccaaccataattaaggttatatttgagaacatggatggcctttctgatcagttgcctcacctaatatacatatcaagagagaagaggccacagtatccacataattacaaagccggagctatgaatgtgttgaccagggtgtctgggttgatgactaatgctccctttatgttgaacgtggactgtgacatgtttgtgaacaatcccaagattgttcaacacgctatgtgcattttgatggattcaaaaagtggaaaagaagttgctttcgttca

SEQ ID NO: 30449 - DNA, 395 bp, Glycine max
gtggctgcttgtgtggaaacgaaggctaccataatcaacccttctcaaacatttcttgatttgttggagaagggttgttgtggctgctcgcgtggaaacgaaggctaccactgcccttctcaaacaaatcaagaaatgtctcagtctcagaagcattgtgaccgcctcagcctcaccaacttcactgatttggacacgtcatcatcggacgacattgatcagaatagcactggcggcggactcaacaaggacaatgactccatggagaagaggagaaagagggtgagtggaagaagctggaaggtgaagataaaggacttcattgactcacagatgaggaagctggtggagaagcatgaggagtggttggataaactcacaaagacactggaaca

SEQ ID NO: 30450 - DNA, 301 bp, Glycine max
ctccgacagcatcctttgttgaacgaaaacacctttctattctccagtttgacaaaaaacagtggcacccaaaccaaacggaacctcgtcggatacaaaattcccaacatatttgtttttcttcattttccaccttaataataatattaatacctcctgttgttgttattattaatattatttttcttttttgggtcggtttagattttagaatccttaccatgataaaaactcctacaaaatctcaccagtttcgaacctaacacacttatgacttatcccatatttcgtatttatctcg

SEQ ID NO: 30451 - DNA, 357 bp, Glycine max
tagacaatccccagctcttcatgtttaccttggagaaacttcacgccgctatgggtaccaagttcatgattcccattgttggaggaagagaactagatttgcatcgcctctttgttgaagtgacttctcgaggagggattgccaagataattagagagaggaaatggaaagacgtaacttcagtcttcaattttccatcaacagctacaaatgcttcttttgtgttgcggaagtactatgcttcattgctctaccattatgaacaaatctacttctttaaagctcgtgaatgggatcctattgctcctgatgtttcgcagaaccaatcgaccctgccagttcctcctccaaaaatgc

SEQ ID NO: 30452 - DNA, 514 bp, Glycine max
agcacaaccacaacagatctccttcacaaggttcgccttttgacgacaaatgttccctctttatatgcgtgggacagtgtctgtgttacaatctcgagccaatagttttcgaaagattttggtcgggtctgtttccagagacaaatattcgtggagctttgaagagctgcggtgtagatatatacaacaactctggccaactctctagtcatatcttccccaactgtagcaggtgttcgtccttgctgttgtggttcgcagttttgtcaggacaggctcccatctcttgttctgtgccttcccaccgattatggctaacttctcagtcactcttgctatgatataattgagtcagtcaagatgtgaaagggaataggatttgtatatagaccagtacaaagtttgaaagcgcaaaggagattgactaaaaaggactcgactcagcacaagctttatcttctgccatggtcttgtgtaggtgtctctcttttttgactggaaagagagagaaaaa

SEQ ID NO: 30453 - DNA, 592 bp, Glycine max
ggatttgtgcacttgctgatagatgtgatcagaagggactgagtgtcaatgagcgtcttggcagaatggctgaaacactagaaaagatgatggaatcatgtacacaaaaggatacccaacaaatggcgggaagtaccgatgttgcaaaagtgtcaaattctagtatgactgaagaatctgatgttccttcacctaaacttagagattggtctcgcagaggctcggaggacatgctagactgtttccctgaagccgacaattctgtttttatggatgacctaaaaggattaccacttatgtcatgtaaaactcgttttgctccaaagtctgaccaaggtatgacaacatcatctgcagggagcatgactcccaggtctccgttgatgacaccacggacaagtcagattgacttgctcttggcagggaagggtgcttattctgaacatgatgatctgccgcagatgaatgaacttgctgacatagcgcgctgtgtggcaaatgctcctttggacgatgatcgcacgacgtcatatttattatcttgtcttgatgatttgcgggttgttgtagatagaaggaaatttgatgcact

SEQ ID NO: 30454 - DNA, 484 bp, Glycine max
caaagcctccaccaatgtcgctgctgctgccgccgccgaaacctcaccggagctccggtaactcccctggcgacagcattccagactggatctccgaatcaatcaacggcggctccctccgccgcgtcgacctcaactccggcaccaacggctgggcgtcgccgccaggctccgtgttctccctccgctccgaaagttactttcagaaccgccaaaaatctcccgccggcgactacctcctctcgccggcgggcatggactggctcaaatccgccgcgaaactcgaccacgtgctctcacgcgcggacaaccgcgtgatgcacgcgctgcgaagatgtcaaaccctaggtcgctccctaaagagcttcgtcttcgcggtgaatctccagatcccgggcgcgaaggagcaccacacgcgcggtgttctacttcgcgaccgaggaaccggatccggtccgaaccggttcactcttaaaccggttcg

SEQ ID NO: 30455 - DNA, 352 bp, Glycine max
tttattttgcggcgactgaaatctgatgtgatgcaacaacttgttccaaaaatacagcaggttgaatatgttataatggaaaagcagcaggaaactgcttacaaggaagccattgaagagtatcgtgctgtttcacaagctcggatggaaaaatgttccaatcttaattcaaagagtgttcttgaagttcttcctcgacgacagataaacaactattttgttcagttccgcaagatagcaaaccatcccttgttaataaggcgaatctacaatgatgaggatgtcattcgctttgcaagaaagctacatccaataggtgcttttggttttgaatgtattttggacagggtta

SEQ ID NO: 30456 - DNA, 334 bp, Glycine max
caaatcagcaacccggtttaaacatcataacagaatacataattggttacatgtatccagagcgtcctgtggctaacatgtgctttaaggtctacggctacatcagcatggttcaagcactgacctttttgcaagacttcaaacttggacactatatgaagattccaccaaggacaatgttcatggcacaggtggtaggaacaatcttatcagtatttatatacacaataacagcatggtggttgatgagaaccatccctcacctttgtgatactaccatgttggatcctgatagcccttggacttgcccaatgggacatgtgttctttgatgc

SEQ ID NO: 30457 - DNA, 590 bp, Glycine max
agataacatgctatcagttgcaattaacagccagggtatcctgtcgagaacagatgagaagtggggagtactgaaaagtccaacttctaatgacaaaacggaaagaataccacttttgaagagggatattataatgagcgtggaagagttgcctgaaagatatgggcgtcgatgtttgggcaggggattcttgacctctcgaccagctatttttgtgattgtttcggttgcttttgtcttggggtatgtgttgccgtccttcatcctggtagggttagtgagttagcagtatcggttagaaggtgcttgtttaactattagtattttttgcatttgtcttctagttggtacatatttgttgtaacactaaataaaatggtgttatggggataattagatagtttattacattggaagcttaatccaaggttgctaatttgtgcattaccaattttatcggatgtccagagggacttgcagttacaggtgctgtgatgtgactgcaacgagtctgatcattatagttaaagtttgtaattcctgttatcattatattattacaattgggtttttatgccagagttctctct

SEQ ID NO: 30458 - DNA, 408 bp, Glycine max
ttgcctactcgtccggccacgcgtccggctactcgcaccactagcgagttcttcttcttcttcttcttcgcgaaattcgtatgcgaagaaggaggtaggaattcacgctcctgcattctcagaccgttaggattccaattgtgcctaaatatatcttgtattctgcgaagaagaagctgcgagaggttgaagatgggaggagatgattctgactggaatactgatgatgagctcgaaattgagaactataactcttcatcttcgtgtttaacccttcctaatggggatgctggagaggcaagctcgtctgcagctttggctaattccaaggtacttgaccactccgtcaacatgggattttctagagaaatggtttctaaagtaattcaggaatatggtgaagaaaat

SEQ ID NO: 30459 - DNA, 385 bp, Glycine max
gcctgacacaaaatataaatattttggaaagcaagttggaagatttacagggtgtgcttgctctgagggactccaggattgctgaacttgaaacatcctcgagtagtgttaagatttctagggaagagtctgctagaaccgtagattcgtcggatgaaaaatgtaaagtggttgagtcggagcttgaggaccttttcaggctaaggattgaagctgaggttgaatgcctagccatctcaaaggtaatgcagaacttgaagggtggggcaggtttccatcagacattattggaagaacaagagaaactgtctgaaaatcaagcgcagattctcgacaaagttgtagatgcagagagtaaggcttcagtgctgaagaacaaaacaga

SEQ ID NO: 30460 - DNA, 324 bp, Glycine max
tcaatttacaattgtgtcacttggtttctatgatgattatctgtctattcatttatcttaagaagtcaactaatttcaaaaaggagagtgagcctttgaagatataacacagaaaaaaagaaccagctaatagggaactgcatcgacactatggcagaagatgacatatatacacaagatgggaccattaccatctccaaaaaacctgccaacaagaaaaagactggaaattggaaagcttgctattttattcttggaaatgaatgttctgagagattggcatactatggtatgagtacaaacctggtgaactatcttcgggag

SEQ ID NO: 30461 - DNA, 271 bp, Glycine max
tctaattacagtagccgatcacaacaattagttggccctcaaaaagctggttctaataaggagtggaaaccaaagccaacaaatacgattaatcagggttctggaccagctagtgcatctgaggttcttgtttcagttgactcaactgggcagttacaatctgcatctagtgctcttaactctgaagaagctacttcaaaactgcagagggagctgggaggattttcatcttccacagcgtcaacatgtacatattccaaaccatatcatt

SEQ ID NO: 30462 - DNA, 298 bp, Glycine max
ctttttccaaaaaggttcaaactttgggtgcagaactgcagatgtataggcaccgtagggaaactcatgaacatcgcaacgcgttaggtagcttcctctccactattcaaaatcggttccattccaatataagaactgaaagagcccagaactaccaggcaagaacatagtgtatgtgtttcaaaactgtgattttgttatctgttcttcaaaaccattgaagatgaggtggctctttcctctcctctgtcttttttcgcttggtcttactgttactggtcaagaatccattgagttc

SEQ ID NO: 30463 - DNA, 293 bp, Glycine max
aaaaaaaccctaggagagtcgtgaccatagcggcgcctccttcaccctaatcgattttttcttcatggagtagtgtcataatcagacacagatcatggttgttctttactggcacctccttcacctctttgtggggaatatttgactgtgaagttctgtctttctcccttgcagaggcatccattcctctttctggattggttctaacaactaataacggaggacaatctttcatagactgttctaaatatgaaatcatttggcagtggaaggaggtattcggtgctagtttt

SEQ ID NO: 30464 - DNA, 530 bp, Glycine max
cggctcgaggattcacattattctttctcagactccttcactctgtgttgtcgtttctgtttcttcagcaattcttctcatcgtaggggaaaacatgaagttctgcaaaaagtatcaggaatacatgcaaggccaggagaagaaacttccatgtgtaggattcaagaagctcaagaagattctgaagaagtgcaggagaaactcttcatccctgaaaccccttaatgcatcccttgccgccaaaacctgccccgaccattgcccagtgtgcgatgggaccttcttcccttcccttctcaatgaaatgtcagatatagtggggtgctttaatcagcgtgctcagaaattgttggagctacatctcgcttctggggtcagaaagtacttcttgtggatcaaaggcaaattacaagggaaccatacggctctgattcaagaaggcaaagatcttgttacttatgcactcataaatgccattgcaattcgaaaaatactgaaaaaatacgataagattcattattccaagcaag

SEQ ID NO: 30465 - DNA, 280 bp, Glycine max
tttcaaggctctctctattgtttaggttccaaagtcaatatacaatttctgatctctgcgtcccaatccaattgatcaaatatgccttcaaacgatggtgtagttatcgtggtcatgggtgtcagcggtgctggaaaaaccacaataggtcggatgctggaaaaagagtcgaaatacaagtatcttgatgctgatgattttcactcagaatcaaacaaagaaaagatgcgtatgggaatcccccttaccgatgaagaccggatgccatggcttgaatcgc

SEQ ID NO: 30466 - DNA, 315 bp, Glycine max
ttgctttctaattattcgtgttgtcagtgtctctttgaggccattttgctagctatttaataatggcaattgagaagcatgaggatgttgagagtggatatttgcacgagcccttcattcaaccagaggatgctgctgctgcttgtaaagaaaatggatcagataagagtgtgaaaaatggatccattggaatggttttgcttagcacacttgctgctgtttgtggttctttcacatttggaacttgtgtgggctattcagcacccactcaagcggctatcagggcagatcttaatctcactcttgctgcagttt

SEQ ID NO: 30467 - DNA, 487 bp, Glycine max
gcctttatggaagaagtttctgaacttcaaccagggcctgattcacatgttccaggggtgaaattcaaattccagggaatatctatagatttgctgtatgcaagtatatcacttttggttgtgccagaagacctagatatctcgcatggttcagtgctgtatgatgttgatgaaccaactgttcgaagtcttaatggctgccgtgtggcagatcaaattcttaaacttgttccaaatgttgagcacttccgaactgcactgagatgtttaaagttttgggctaaaaggcgtggtgtttattcaaatgttactggattccttggtggtgtaaattgggctattttagttgctcgaatttgccagctctaccccaatgcaatccccagtatgttggtttctcgattcttcagggtctatacacagtggcggtggccaaaccctgtaatgctatgctctatagaagagaatgaactgggattccctatat

SEQ ID NO: 30468 - DNA, 283 bp, Glycine max
tcgaatcgagcgaatcggctcacggctcgagcgcaaactaacatcaaccaccaccaccaccacaacaacaacgtttgtgtctggtcgtgttgtgttgttagggattcatggcaacaataaacccttgattcctctccccattctcccaagagaagggccattttgttacagtgttggacacttgcaaatggatttagaagacaagttcctcgctaaagtttctggtgttcaaagcctttcatccagtgcacaaagtactccagaaaaaaatggccattcagat

SEQ ID NO: 30469 - DNA, 274 bp, Glycine max
ccgagctagaagccactttggtttctttgcctttctcaatacattttcttttccatggaggtaggaagtgttcttaactttcttcaggacaagaccattttaattgttggagccactggctttctagccaaaatttttctggagaaaatattgagggttcaaccaaatgttaagaagctttttcttcttttaagagcttcggatgccaaatcagctaattatcgattgcaaaatgagatcatagcgaaggacttatttattgtgctaaaggaga

SEQ ID NO: 30470 - DNA, 363 bp, Glycine max
ttctaatagcccttcccttcatttggagacacattattgttctttcttcctacaagcctttttccctatccaactcttttctctcatcaaaccaaaagcacccttaattcattcactttgtgacatgtctcgcaagaggctaggaaaaaagcttcaacctgccaagaaggcatggaagagcttctccaacacagtccaacacaaactccacaaactcaacatccccaagtccatgaaaaccacccttcaacgcctccttcaatccttttactcccttggcactgtcatacactctagacttcatcgttcattcaccaccataaggccacgtggtggtactgccacttctaattactaccatgt

SEQ ID NO: 30471 - DNA, 387 bp, Glycine max
agaaaggcttgagtatctagaagctcgtttagatgatttagagctgaataaggatgcatattggtggtatcttgatgtgcgtcgatatggttcagtacctcatgcaggctttggtttggggtttgaaagacttgtccaatttgcaacaggaatggacaatataagggacgttattccttttcctcgaacacctggctcggctgagttttagaccttgcacatatgagcacttcgcttcacattcatttgtacgattcaaccttgtatgttaggcaatagagtatcttgagtctttccttttcgtctctctgttttgaaaaagaacactgcttgcttctaaatgaagtatttatacattatgaatttagtagaatggaattttgaggc

SEQ ID NO: 30472 - DNA, 234 bp, Glycine max
tctcagaagtaaaagagactcaacaaacgctctcttgcacagagaagatccaaaattcgcaacaatctcctctttctctttcactctttcactctcccactctcattccgccgccatggacgatccaccgttgcagaaaatcgcgatttcgggacccaccctagcctccctcatccagcgcttctccacctgcccctactccctacacggcctactcttaggccacgtcacccc

SEQ ID NO: 30473 - DNA, 472 bp, Glycine max
agcatctgtggcttggggaaaataaactctctggcaccatccctgatttgagtggactgaaggagttagaaactttgcatttggagaagaacaactttgaaggaccacttcctccgtcaacaaagaaactcccaaaactgcgtgataattgagtcagattttgagaataagcctccaaacactaatctaaagcaatgcgaagtgaaagtagtacaagtggctctagagattcatccgtgagaatgagcacaagccattgcaaattcgacaggttttgtacgtgactgaagaggctttaatacaatcatagtgtctaatgggacgagaagtaattaattggcaccatataccaatcccattatttctgtatcacgtgggaattatgattgcaagctattgctgcaaaaattagacgcatatgtgtaattatatggtgatatatattgagtaaatatttgatagaatatgattg

SEQ ID NO: 30474 - DNA, 527 bp, Glycine max
gacgaaacttacatgcactttcttaagcgccctcctctgataattggaggtttatggcctataaagattattgaaatgaaattggtctgagaagaactctaaaattatgttatctattggtaacactgggatgttaatttccccggcagcaacatttttgcgtttcctttgagaagtgagcattggtgatagtagtctcaatcagttgaatctcttgtgtctatctcaagataatttgctagagctgcaataacttgtatagtgaaaacagtatatgtcttggtagagctgcaataatttgtatcctttccagacgttgggacattgattataaaactctccctgtatatgtttttttttttacctctgaatctgattcattctaaaacaaaagtgtttctattttttattatgcatggtcactgatactaacatccaacacttggtgccctaggttcttatttgccaaatgcttcatggcacaataggaaaatccaaaaagaatataattttttgaggtttcggtg

SEQ ID NO: 30475 - DNA, 300 bp, Glycine max
gctaagccaagattaaagaaattatctgatttaatccttttattcttattgttcagtggttatctgggaagttcattgaatgtcttttctgaatttcttattttgaaattgaattgcaactgatatctggactagaagcatttgtattgatatcttataatgatattatccttttattcttatttttcagtggtttatctgggaagttcattaaatgtcttttctgaatttggttgaatttcaaaatatgaagttgaattgtaactaatatatggactggaagcatttgtatcccttatt

SEQ ID NO: 30476 - DNA, 286 bp, Glycine max
gtgttttgtttcttctctgcaccctttgggatctcttgcatagaccaaccccagaagaaggaaaaaaataaaaaataaataaaaatcaaccctttttgtaaatccccaccttttgttctgctaaagaatttatttttcctttttagttcctgcaatttatctttctggatcctaattgggtttgatctttctctttcaatttggtgattatgttgaaaattcttgaatttttatggtggttgaattttcttcagggtttggatttgggggttaggttcagggtttc

SEQ ID NO: 30477 - DNA, 319 bp, Glycine max
ctctctttctttttcaaaaccctcgctctcaccgtcgcgccggaatcttccccggcaatgtcggcgccggcggaggctccttccttcactgcctctcctccgtcagagactactccctcacctaactccactgccctctctcctccgcctccctccaccatcaatgccaccgtttctcctccgccgccggaggcccatcaccctccgaccagtaccgttaacagcgggttgtcgacgggtacagtgagcggaatagttataggggccgtgttaggttcggtgggtatgcttatcattgggggcattttctctgcttcta

SEQ ID NO: 30478 - DNA, 522 bp, Glycine max
tacatgcagaacctgaatcagattttatgcttgcagtgcagtattttggtaactggacagtatttgcaacagttttcatggggttgtatgtgcttgttcacatttggttggctgcaccaagcacaattcaagggcttgagtttggtgggcttgacttgccagattcaattggtgaatttgttgtctgtgcagttttggttcttcaaggtgaatgcatgctgggtataatctcacgcttcataaaggccagagcacaaaagggtagtgatcatggaatcaaagcacaaggagatgggtggttgctaactgttgccttaattgaaggaagcagtttagcttctgttgattctagtgggttgtctgatccctatgtggtgtttacgtgcaatggaaaaacaagaactagttcaatcaagttccagaaatctaatcttacatggaatgaaatatttgagtttgagatttattattgtctgttttacaacttggatcaaacctctgaaaccggtgatctaatcaaca

SEQ ID NO: 30479 - DNA, 338 bp, Glycine max
gggaaggagtttgaagaaaaacaatcaattatgttttcttcttcttcttcccctccatgtcgttattgtatataattttatatgcataatcctttaggcttcatcatcaatcatatattgtctccttgagattcctggcttgttcaagagcaagccagaggtcattcattggatatcatttattttgaatgaaatattgagactactagactattttgagctatgttgtgttgtggaggtgcagaagaggattttggcattccacctggaaatcaatataatgcatcacctaaaaagggtaatgcatataatggtggaggaggaggtgacagagcgag

SEQ ID NO: 30480 - DNA, 311 bp, Glycine max
ctctttttcttagacaggctctgctcctccgcgtttgcttccacaactaccaacgcttcaccgccggacgtacgccgcacgtcaccggctgtggtgcagcgccgccgccaacctaccgtcggacgaagcggagaagaaaacaaactccggcggcatcagcaacagctcctttgcacggaaagctcagtatcctccgtcaagtgaagcgcggtgggaggacgaccccgattaccgcaaatggaaggacaaagaaaaggagattctcagcgacattgaacctatcgttgttctcgccaagggatatctccact

SEQ ID NO: 30481 - DNA, 363 bp, Glycine max
ctcagtcactcactcaacaaactagtgaattgttatggacactagtgtctctccctctctcctactttctctcctcttctttgcaagagtcttagggcttgcagtggcagtgcttgtcctcatatgggcccttgccttcaaatccagcttcctcactacctcactctcccaacaagacctcatctatgcagttcttcatcctctgctcatggtcattggctttatcctcttaagtggagaagctattttggtgcatagatggttacctgatcaagcggttacagaaacgggcatttgggcttcaaggggggctttagctctggatctttggattggacaaaattccagggcaagatgggattg

SEQ ID NO: 30482 - DNA, 591 bp, Glycine max
ctgtttatggagtcactggcaagcatatgtgaggttgtgttgcctcctttgcctatggatgctcttaagatcagaaaggaagaccaaattgatgattatgattctagcaagagtctcaagtccttctgggacatttctgcttctcgctatccaatccctcatgaggttgctgagatgttaacgaagaggagcttaattgaagcagtaatactgattagagtagttttatggctgctggcaacaaggttgggaaccttgttgctctgtggtttcctctgtcttggtgaaaaatggccctatgtcaacaacttctcaaacatatctttggagaaaagagaaatggttatgcagaagtggctgaaacataggttcctcacacctattagactggcctttgcttacatcaaagtcttgtgtctctttgtttttttctcttgggttgatgaaaatggtgacaacccagcatggaaagccattggatatgaggtaccagctgatgaaaacttgaccaatgcctccaaaactaggccccttgaaaaggggattatagaaaccatgaatgaatctgactccgctcttcaacaatctctt

SEQ ID NO: 30483 - DNA, 306 bp, Glycine max
ccgagactaacccaatgttccaaccttcttctactgaagatgtggtccttgacttagatgctcagagtgactacactctatggaggttaaaggcttttgtaaaagattcactagaagagcaagtaaaggtcaatgcaggcgcaggtattaatcctaatgataaccctgatgacaagaaaaacaagaagaggcgagattctggtgattcttcgggcaagacaaacccaaaaaggaagaaactatctacattgtgattcattagttgcaacataagagacattagtttagtgtgattgagttaaagtt

SEQ ID NO: 30484 - DNA, 506 bp, Glycine max
agagtatctggtggaggcatatgattctcgagtcgcagaaatagagaagacaaagttaatggttcctgtccctcttgatgtagaactgaagtctaaggtttgttcttgtaaaagacagtggggagcaagttggtttgagcaattttccatattattttcaagaggattcaaagaacggaggcatgactactttagctggttaagaatcacccaagttctagccactgcagtcatcttaggattactctggtggcaatcagatgctaaaacacctaaaggtttgcaagaccaggccggactgcttttctttattgctgtgttttggggattctttcctgtgttcactgcaatattcacatttcctcaagagagagccatgctgactaaggaacgaacaaccgatatgtacagactaagtgcttatttcgtggctagaactacaagtgaccttctactagacctggtgctaccagtgtttttcctccttgttgtttatttcatggcca

SEQ ID NO: 30485 - DNA, 265 bp, Glycine max
gccagatctagaatgtggcctatcagaaaaagtagaagactttcctgccgatgaacctggcctttcaatggctttctgcccaaaacgaactttgtcgtccaaatcacggataagaagttccagctccttttctttctgttgtaatattgcatgtgtactggtttggtctccaccagcctcatccacagattccttgtttgaatttattgtagactctttctcaagttctttctttaaattatcaatttcttcttttaataatttt

SEQ ID NO: 30486 - DNA, 388 bp, Glycine max
aacccatcttcgaatcaaattctaggaaagtaccaacgcgtcgctccttttggctttcagaaacaaaaagcttttgcgttcgatttgtttcttcctaaagactaatattctcattctccccaaaacctctgctagtttttggttttgcttcaacaccctcgtcctccttcttcttcacactcccccagaaatcccaattttgcccctaccctcttccccaatttacctacgatgtacagcaacatgctggtcaactgctccaactgccgcacccctctgcagctgccacctggcgcgggatccatccgctgcgccctctgccgcgctgtcactctcatcggcgatccacgcgccctcccttcgcagccaccggcctccacccacgcgc

SEQ ID NO: 30487 - DNA, 426 bp, Glycine max
ctgctcttgccctcttctcgctagtcttaaattgcacgttgtgactcgtagctggagctctcgtgcatcatgttctatgtacttcattatcttacgatcctcgctcggtcgcgatattagggttgcaattgtggatctgagctacttaagacttctgattgcgacatgccttgctgaaatgaccttgggcacaagcgcaagactggataaagcgcgcttcactcttatcattactgccatcctttcttcttttggaaggtcaatgtcatggatgacggtcctgcaaaattaaatatcatccctgatcattttcaagttccaacatcaagtatagaatctcctgagagcagaacatcatctattgccgaacctggaaccgatcaatcttcaaggtcctcgtgccgtcaacggactcgaagtaaatta

SEQ ID NO: 30488 - DNA, 305 bp, Glycine max
tggcagtgtctcttccctggcttggtttatgtcaaaccaagaaactagctttgtcactattggtcaaagagttcttgctagaccactgaaggtgcgattccactatggtcatccgagatgtttttgatagaattttccactttacccgtggaggaatcagcaaggcttcttgtggcatcaatctgagcgaggatatttttgctggattcaactcaacactaagacgcgggaatgttactcatcatgaatatatccaagttggaaagggtagagatgtagggctcaatcaaatctctctttttgaa

SEQ ID NO: 30489 - DNA, 412 bp, Glycine max
gcgggattagggttttgcactccagagtccaaactcacctgcttcttcctctttttttcatttctcttcaacttcctcttctttcaattctcttcagtctctctccgccttcccaaaatggtgaaccctagatgcttcctcgacgtcagcatcggcggcgagttagaaggccggatcgttgtggagctcttccacgacgtcgttcccaaaactgccgagaatttccgcgccctctgcaccggcgaaaagggcatcggtcccaacaccggcgtccccctccactacaaaggcatgtgtttccaccgcgtgatcacagggttcatgatccagggcggcgacatctccgctggggatggcaccggtggggaatcaatctatggcgccaagttcgaggacgagaacttggagatga

SEQ ID NO: 30490 - DNA, 594 bp, Glycine max
aatactatcagctacatattttactttgggatgtgtgccacgtttgacgaactctgaaacaaacatgctcttattggttacttgctgagttatctgactctgatgatgaaattcgtggccctggttcacaggacgagttaaattgatcaagagcaggaacagagacaccgttttgcctgttaagatataagactctttccttgtacagtttttgcaccttttgttttcttagcgatttaggggcgaacaaagccccccaccaaagtgaaagaaagggctgcagacctgccattcagaatgttgaagaaggaaacaatgactgaagaacagataccaaatatacaaatgctgctttcctcacttattaacagtctccaattactaagatcccgtaagacactcgctttccgcaatagaaaaaaaatggcctatatggttttgtctaagcttggattgcctcagtggtttggttgtaaagaagtgtcatgtatgtacgtgtgttaatctggttgtaccagcaaactgtaattaaatttttgcagttaacttgacatgaaatattgttgtttttgtttattggtaaaaaaactttgc

SEQ ID NO: 30491 - DNA, 372 bp, Glycine max
ctccccggtatctgccgcagccaacatccaaagtccaacaaacatttggcggagtttacaacaaaactcttcaaaacccacatccaaatcgtcgtaaagttcaaatctttgatacctcatttcgatttagacctatattgttcccagcaacaggcttccattaacttctctctgcggcgatggtcttgaagtcaatggttgcttccgcgagcgatctaagtctcgtgtctgttgcagggaactctccccttgatttcaagaatcgggttttcgggggccgactcattagcctcggatttcgtttcaacaaaggtagtaaatgcaaggggaatgaaaggtttaactttgatgttcgagcagctgtggaagtgg

SEQ ID NO: 30492 - DNA, 472 bp, Glycine max
tagcagtgtggtctctctcactccaactccaaccacagagacaacaaatacaacaacgttgtttccatgacaatggaatctgcgcttacagcttctaactggaaccgttctttgattcggattcgccacactaagccacgcttcggtgcaattcgccccacagcaatacggtgctccatcaactcgtatcgcttgtccaacctcactccctctgagcttcagagcctcaagagccgaccccgcatcgatttctcttccattttcggtgttgttaatcctattgtcgatgatgttcacaaaagaggggatgctgcggttaaagaatacacttcaaagtttgataaagttgaattggataagatagttgaggttgtctcggagctccctgaccctgtgcttgaaccgcctattaaggaaagcttttgatgtcgcctatgataatatttatgcatttcatgctgctcagaagtca

SEQ ID NO: 30493 - DNA, 402 bp, Glycine max
tcgtttaacgacgtatatgcgcaacatgttgctctgcaacagtcatgttgatgttactgtaacctctcttcttcttctgtgcctatctctatttggaattggatcatcctcagcagcacccttttacatcgatacttactgcccaaagaacgcatcgtacaattccaacgtaacattcgaaaccaatctcaaagtcctcctcgcaactctcgtctccaacgtttccatgtccggcttctactacaccttcatgggcttgggaaccacaagcgtcgccaacggtcagtttctctgtcgcggcgacgccttcgccgccacgagtgaggactgcatcgccaccgacgccaaagagataacgcgactctgccccaacaaaacagagtccataatatggtacgacga

SEQ ID NO: 30494 - DNA, 272 bp, Glycine max
attgaaatgcatgccaagacagactcggaggtaacaagcctggatgcgtcgtccagcacaaggtctcctcggcgagcagtgtactacgttcagagcccttcccacgatggggagaaaacgacgacgtcgttgcactccacccctgttctcagccccatgggttcccctcctcactctcactcctcctccagccgcttctccgcttcacgccaccgcaataaccataataataaatcttggaagggcatcgacgtcatcgaagaagagggtct

SEQ ID NO: 30495 - DNA, 345 bp, Glycine max
cagtcaaactgtagtcaagtttgtcggtggattgggtctatcatggcaattatcttttggaattctagtccttctctacttttactctcattacttctttgcaagtggagctgctcatattggtgccatgtttactgcatttttgtctgtggccactgctctggggactccgccattctttggagccatagtgctgtccttcctctccaaccttatgggtggccttacgcattatggaattggatcagctcctgtgtttttcggtgccaactatgttccccttgctaaatggtggggctatggattcctcattagtattgttaacattataatctggctaggact

SEQ ID NO: 30496 - DNA, 279 bp, Glycine max
aacgtgaagggttctgctggaagccttgtgactttggttagctggctgtgttcttggattatatcatattcttttaacttcctcatgagttggagttcagcaggtatgttatcatttaatcttggtcctgagggtaaaaataaaaaggaaaagttaagaatttttaagaaactagggaagtctaatagaaacgtaaggagtccttattttacatatggaataagatttacttatgttatgtttgggctagagacttcttaatgttctctagcatatgtg

SEQ ID NO: 30497 - DNA, 335 bp, Glycine max
aggggtcaggaaagatagtaatttgtgatagaggccttagtcctagagtgcagaagggtaatgtggtgagaagtgcaggaggggtgggaatgattctcactaacacggaagccaatggggaagaactggttgcagattctcacctccttccagcagttgcgataggagagaaagaaggaaaagagctcaaaagttatgtcctatcaagtaaaactgctactgcagctctagcttttaaaggtacaatattaggaataaaaccatctcctgtagtggcagcattttcacaagagggcctaattttctcagccttgaaattctgaagcctgacttag

SEQ ID NO: 30498 - DNA, 555 bp, Glycine max
gtgagcgacgctgatctgcgcatacaggtatactttgagaaactctcaagcaaggtcactgcaaagccacgaagcccctcaaggtgttcatctcaggaggatgatcttggtcagagactggaagcaaaactgcaggctgctgaacagaagaggttgagcatcttgactaaggcccaaatgcgtttagcaagactggatgaattgcgtcaagcagctaaaagtggagtagaaatgcgctatgagaatgaacgtgtgaggcttggaacaaaagttgaatcacgggttcagcaggcagaggctaataggatgcttattctcaaggctctcaggcaaagaagggcttctcatagagaaaggtcatctcagacattgatgagaaggatggctcgagaaagtaaatataaagagtgtgtacgtgctgcaattcaccaaaaacgagctgctgctgaaacaaaacgacttgggttgctggaggctgagaagaatagggcacatgctcgagtctcgcaggtgatacatgtggcaaagtctgtatctcaccagcgtgagattgag

SEQ ID NO: 30499 - DNA, 342 bp, Glycine max
ccttatcttatctctcgttatatccatctttacaactttcatttcatttccctatttcagacacagtaagatcttggtgtctccgtttgcagcgtcactacttgctacaacacgagccatgaaacccaccttcccaatccactccaattcaaatttctcactataaaccacttcttcaaacttccctccgcaattcttaattcattcgaaccatggcagcgtcctcgctctgttcctctttcacctccaaaacatggaacccgcaccggccgcactcatgctatcaccacaaaaccccaagcccgccgtattccacctttcttcgcggcgacgttcagctcc

SEQ ID NO: 30500 - DNA, 439 bp, Glycine max
gcatcatggagccatatctaagatacttgtatacatatgtttctatatctggtccacacttaggttatatgtatagttcgaactctatattcaattcaggattgtggctcttgaagaagatcaagggcacacaatgcatccatcaactaactttcacagatgatcatgatcttgagataccttcatctacaatctttcaaagaagaagacacttgcaaacttcaagaatgtgattctgttatgctctcctcaggacggttatgttccatatcattctgccaaaatagaactgtgtccagcagctacattggacttttctaaacaagggaaagtgttcctggagatgttaaacaattgcttggaccaaatgagaactcactctgagcatcgtatagtcatgcgctgtgacattaacttcgaaacctcctcctacggcagg

SEQ ID NO: 30501 - DNA, 632 bp, Glycine max
gaaagatataacagaagaattctttcattataggcatttgactcaggcaaaattatgggattgttactccgcatatgaacactgggctaagattgaggttccaaaggacaaggaggagcttgcagccctccaagcaaggctaagaaagcggtttcctgtggatgcatacaataaagcaagaaaggaattggaccccaataggatcctttcgaataacatgttggaaaagctcttcccacaatcagacaccatataaattctgtgttggttatttgtctatattgtccatattttttatgtttactgtatattcaaccctaagttgttgactttggaacttgggtttgcaaaatatctggtgcacaatctggattattatgcataaatgcattctttcagcttattgcttgcatggcagatggattgaacacagaagcttagagaattgtgatgtatgcatatagaggagctggattgagtggggcgactgcattggcgagcttgactaaaaactgaggagccaaaaataatgaagcttacaatatattagttaaatgtaacattttttatatcatcatattttatgagtaattttacacatttaattatattagaaaatattttttcacttt

SEQ ID NO: 30502 - DNA, 340 bp, Glycine max
  unsure (1)..(340): unsure at all n locations
ctcgagccgcttaggaagaggaatgttagtatagaagagaggcttagtcagattcctgaggtggaagttaggatcatgagggaggaggtcattggtttgatccctagattggtgtacgcagatcctcgatccaaacttgagactcttgaggatgcatttgatgtttcggtgcaggctgtgattgacaaggttaccaacttgaggaaggacattatggaaggtcgcacggacgagaacttcattgaggagaacagttggaagtacgcgttgttggatgagggacagcgcgaggtctggactcatgaatgggatccttcttctccanaccaagccgggtggg

SEQ ID NO: 30503 - DNA, 468 bp, Glycine max
gttttcattcgtgggtatctggtgttgaccagtctatgtgttctgggctgtcgtatgccatttaatttcaaaagaaaacgccacaattgttataattgtggacttgttttttgtcattcatgtagcagtaagaagtctctcaaggcttcgatggcaccaaaccccaacaaaccttatcgtgtctgtgataattgttttaataaacttaggaaaacggtagaaactgattcttcatctcagtcttctatgagcagaagaggaagtgttaatcaggggtctcacttgagtttaatggtaaggatgataaattggattccagatctcataatcaacttgccaggttttcttcaatggaatccttgaaacaagtggacagcagatcttcaaagaaaaacaaaaaattggaattcaacagtagccgtgtctcacctgctccaaatggtggttcccagtggggagcaatgaata

SEQ ID NO: 30504 - DNA, 373 bp, Glycine max
tgtgagcttggttttgattacttgagagacaatcttgccacgagtgtcgaagatcttgtcataaggggtttcaattactgtatcattgatgaggttgattcaatccttattgatgaagctagaacgccgcttattatatcaggacctgcagagaaacccagtgatcgatattataaggctgcaaagattgcagaagcctttgaacgagacatacattacactgtagacgaaaaacaaaaatcagttctactttctgagcaaggttatgaagattctgaagaaattttagctgtcaaagatttatatgatcctcgagaacagtgggcttcatatatcctaaatgcaataaaagcaaaagaactatttcttcgag

SEQ ID NO: 30505 - DNA, 266 bp, Glycine max
cttctttcataaactaaaattagcttatgcacaagttaataccagatttgggagaagctaataggagagtttttacaaattagcttatgcaaaagctagttttagctcatgagaaaacttattttatttgtcattcttattttcttctcttaaataagtgttcatggagaagtttatccagaaaaggttctgctctgtttattttctgagtttctgttaaagcaagcaaatagttctaattgcactgcatatgagattgtagtagt

SEQ ID NO: 30506 - DNA, 1049 bp, Glycine max
caaaaggccttcgttgaggaggtcatggagcttgtggagctcactccgttaagtggagcacttagtgggtgataccatgagaaatgcatggactgacgactgagcaacacacaaagattgactatagctgttgaataggtcgcccaatccttttatagtctttatggatgaacccacttctggattggatgcccgggctgcagcaattgtgatgagaactgtgaggaatatagtgaatactgggcgaacaattgtgtgcacgatccatcagcctagcatagacatatttgaatcctttgatgagcttctgttcatgaaaaggggaggagagctcatttatgctggtccacttggccctaaatcttgtgaacttattagttatttcgaggcaatcgaaggagttccaaagatcaggtctggatataaccctgctacgtggatgctggaggctacttcttcagttgaagaaaacagactgggagtggactttgcagaaatctaccgaaaatcaagtttatatcaatataacctagagttggttgaaaggttgagcaagcctagtggtaattcaaaagaattgcattttccaacaaagtattgccggtcatcttttgagcagttcctaacttgtctatggcagcaaaatctttgttactggcgtaaccctcagtacactgctgttcgctttttttacactgtcataatctcattgatgctcgggtcgatatgctggagatttggtgctaaaaggtccttctctattcatttttcttttcttctatggatctttaatttcaagtaacattctgtttcaaatgtttcaaatttgggaagctatgcactttccatttattttcattattaggtacatctctgcaatgctctcctgcaatgtctaaccaggccataaatgtgtaaacatatattaagaaacccctgctagacatgagcaattgacagactttatcatcttgttgaataagttttggttagaacaccgtgaagattagtttacaaagtttaagttttaatgtaaccggtattttttt

SEQ ID NO: 30507 - DNA, 482 bp, Glycine max
tcggttcagtagcgtccgaacgaacttcaccactcggtctgttgcttgtgctgatgcattgcgccgtgaaccctcgctagctcactctccgatcagatccaagtttgtgttgattctccgatccgcaatgacgccgaggaagaacagaggcaaggcttcgtgttttcctcttctcggtttcgtcctcctctgcgttctcgcgccggtgtttttcttcctctcccgggggctctacgctgccccggatcaagattatatttcagctgttccaagtaaacaggttcgcaaatggagagaatggcaggctttgcaggaccttaaatcacttttttcagaagaggttcttgatgttattgtatccagcacaaatgatttgggccctttcagtcttgacaatttcagaaaaaatttgtctgcttcatggagagttggattaggaacttcaaacgctggacatgagctaaaccaacaaacaacacatg

SEQ ID NO: 30508 - DNA, 270 bp, Glycine max
atagaatcatatacacatatattaaactgaacgaagttgtcctagaagagaagaaccaatggctgctggcgtgggtttccgcagtcacaaatctttgttaataattcttttgggttttcttggcttgttctcctttacagttgaagcagacacaaagaaataccaatttgatattcaagtaaagaatgtgagtagactatgtcatgcaaaacccattgtaacagtaaatgggaggttcccagggccaacaatttatgttagagaaggaga

SEQ ID NO: 30509 - DNA, 300 bp, Glycine max
cagtgcactcttcgctgagctaagtgataggatcgtgcctgttgctgtgaactgcaagcagaacatgttctttggaaccaccgttcgtggcgtcaagttctgggacccttacttcttcttcatgaaccctaggcctgtgtacgaggttaccttccttgatcctttgccggaggagatgtcggttaaaggctggggggaagtcgtccattgaggtggccaaccacgtgcagaaggtgctgggggatgtgttagggtttgagtgcaccgggttgactaggaaggataagtatatgttgttgg

SEQ ID NO: 30510 - DNA, 371 bp, Glycine max
tctactacgcgtccgcccacgcgtccgacaacctctccttctcgtccctccccaatcgcaaaattcaatcgcttcttcttcagcttacactacaggatcgcctctttcaaatcaatatccattcacaatttattagaatatcctttttcaataattccgcgatccacacttccccaaagtccacgccctacgattctttctgaattgaattatttatccacgttttattttttcttagattgagcgttacgaaatcgagattgaatttatgagagggaatagaagaagaataattatggaggatgcatgcggtgggtagaataattagtcagggcgtggtcaggttttcagggccgtttcatccgtttggt

SEQ ID NO: 30511 - DNA, 480 bp, Glycine max
ccctcgcgtccgcccacgggtccgtaaactcgtcctgaaccatagacaacaagtgctaagtgcaagtgcaagcaaaaaaaatatggcatacatcgccaccacggttggtgcaagcagtgtcaccacagtggattgccagaaacaagtgagatcatggaggctcctacgttccctggtggaacttctaatccccacttgcaactgcaccttcgtagaagaagaagaaaaccaatcaccacaaaagtgtctccaaaatcatccacaacaacaacaactcatgatgacaacttcaaccacaatcactggcaccatctttggataccgcaaaggaaaggtgagtttctgcatccaagctaatgctaactcaagcaaccctattctgctgctggagttggcacttcccacaagcgttttggctaaggaaatgagaggtggcacactcagaattgtgctggagagtagcaccaccacaggaacatg

SEQ ID NO: 30512 - DNA, 529 bp, Glycine max
tgggagccttatctttataagaatcatagggtaaaatgaaatgctgtgaaatttatactgactttagatgctcttcaatcattgttatttctatcagcagcagcatctgttagtgggttgaaaacgttagagaggaactttgcaacaagcatggagacagcctcagactatggagcattcacagagaaattcactttaccaccaaattctgcaccagctcttcctctcaaatcactcacctttgcagtgaaagagattttcgacacggaaggatacgtgaccggcttcgggaatcctgactgggcaaggactcatccggtggctacctctactgctccaacagctctggctctcctcagagcaggtgccacttgtgttggtaaaactgtcatggatgaaatggcttacagtataaatggagagaatatacattatggcacacctagaaatccttgtgcaccagaccgggttcctggaggatcttctagtggctctgctgttgcagttggtgcacagcttgtggatttct

SEQ ID NO: 30513 - DNA, 460 bp, Glycine max
gaggaactttgcaacaagcatggagacagcctcagactatggagcattcacagagaaattcactttaccaccaaattctgcaccagctcttcctctcaaatcactcacctttgcagtgaaagagatgtatgtacttcacttttctttttgtaccacaatattctgattgtcaaaaactctcctttgctgacatcaaagtcgtcaactagtctttgaatccatgcttctgcatcttgaacttgttttggaagtgtttgtgtcaaacagtttcgacacggaaggatacgtgaccggcttcgggaatcctgactgggcaaggactcatccggtggctacctctactgctccaacagctctggctctcctcagagcaggtgccacttgtgttggtaaaactgtcatggatgaaatggcttacagtataaatggagagaatatacattatggcacacctagaaat

SEQ ID NO: 30514 - DNA, 457 bp, Glycine max
gtcataaccgtcatgtactttaccgttttattaaaggatcaaatcttcttattgacaatgaaggaacacttaagattgctgactttggactggcttctattttcgatccaaaccataagcatcccatgactagtcgtgtagtaaccctttggtatcgacctcctgagttgcttcttggtgccacagattatggtgtgggtgtagacctctggagtgccggatgtattttaggagagttattggctgggaagccaatcatgcctggtcgtacagaggtggaacaattgcacaagatatacaaactatgtggttcaccttcagatgagtattggaagaagtcaaagttgcctaatgctacctcgtttaaaccacgagatccatacaagagacacataagagagacatttaaagattttccaccttctgctctacccctcattgatacacttcttgcaat

SEQ ID NO: 30515 - DNA, 337 bp, Glycine max
ggtggacaatgtcttgatacatgaggtagctgaaacagatgagcacacctttgcaagccactatcccatggagaggcttcaggacgtggagaaagacgaagaaggggaagaaagtccgaatcctgttcctatccccttgtcagatattaatacagcaacaacaaaccctgcagtgtctgaagagcaatcaactatcaagtcctgcatgtatagagatgggaacattcccaagaacaaaagaaaacgcggggagcgcaaagcgtgttcaggcggttggagcaagaaatgctcgggggattctgagaacccgtgagcaagtcttctcaatcagaagtga

SEQ ID NO: 30516 - DNA, 559 bp, Glycine max
caggtttgttgttgcattgtgatcatcacacatgacgggtcactcctctatgggcacgcgtcacgtgacaaaaccccccttcccggtttgtccccataacccaatccacatgacccaacccacacacaccatacatcaacattcaaccacaacactacactactctcccaccgaactaatgttcttcttcttcctcgtccaattccaacaccaactacattagtaagtaacgaattaacaacagagagagatagagatagagatagaataataataataatattaataataataataataatgaataacggcgttagtcaagaatccggtgtgctcctcgatttggcatcccacgtgaaccgcttcgccttcgattccttccgttccgactacaacaacagcaacacccttctctccaatttctcgcaattcaacaacacaagaaccggagaagcggcagtcaaacgcagcgtttcgctggggctgaaggttgggggagcgagtgtgcggtttaggaacattctcaatgacttcaacagagccgttaggtttcactgcg

SEQ ID NO: 30517 - DNA, 302 bp, Glycine max
ttaattgttgaatactggtttgaatatgcggttgtggttagttactgtatgctgctttaatggataggaagatagacaaccatcgtttcagttagtgcaaacaactcgtgttgttgtattttgtaggctggtaatttgggaaaaccatacatgaacaaataaatcccttacaaactcatgcatgcaattggataactcctggttttactgtaactgtcttaccttgtagactgaagggcttgttactgctccacatttttttttcattttttatttgtctataacttagttaactgtgaact

SEQ ID NO: 30518 - DNA, 840 bp, Glycine max
gatgaaatcaactccaatggaaatgcaacgaaaatcaagagtcttgatgagcttgatcctaagatacagaacattgtattgctaagtgacgcttatggggctgaaggtgaactgggtgtggttttatctgacaagttcattgaacatgatgcttactgtatgtttgatgctttaatgaatggggcacgtggttcaattgcaatggctgatttcttctcttattctcctttgcctgggtcccatactggcttgcctcctgtaattgaagcttctgctgcgttgtatcatttgttgtctcatgcggattcatctttgcatggccatctcgttgatctcggggttgaaccccagtactttgctctccgctggttgcgagttttatttggacgggaattttcactcagcaacctcttgataatctgggatgaaatcttttcatcagataatagtaaattggaaaaacatgcagaggacaatgcagactctggttttaggatcttcaattcgtctcgcggagcatttatctcagctatggctgtagcaatgatgcttcatataagatcttcgttacttgcagctgaaaatcctacaacctgtctccagagattattaaacttccctgagaacattaacgttgaaaaactaatagagaaagctaaatccttgctggctcttgcattaagtactgagatttcatcctcaatgcctttattggtcgagtatcataaccagggtaaatcagctattgcaagatctcgcaccctttcatctgaatcaatttcaccaaaaactcctctgaatttggtacctgatagctactgggaagaaaagtggagagtg

SEQ ID NO: 30519 - DNA, 882 bp, Glycine max
gcaagaggtcttgcaaagattcatgcagagtacagtgcagccaaagtgcctcacgggaatgtgaaatcctccaacgtgcttctagacaagaacggtgttgcatgcatctccgattttgggttatcactcctattaaacccggttcacgccattgcccgattgggagggtacagggccccggagcaagaacagaacaagaggctatctcagcaggctgatgtgtatagtttcggagtattgttgttagaagttctcacaggaagagctccttcatcgcagtacccttcaccggctcgtccccgaatggaggtagagccggaacaggctgcggtggaccttcccaaatgggttcgctcggtggtgagacaagagtggactgcagaggtttttgatcaggagttgttgcgctacaagaacattgaggaagagcttgtgtccatgttgcatgtggggttgacttgtgtggtggcgcagcagacgaagaggccaaccatgggggaagttgtcaagatgattgaggagatcagggtggagcaatcgcctcttggggaggactatgatgtatcatgcaattcgctttcgccttccattcccaccactgaagatggtctagcttaggagtaatgttgaatattgttgtctggtatatataagattaattcatgtcatgttttgtaggtacttgcagtctcctcctctagttgcatggtctaaatgcacattacttattggcgctgttcagtgttctttgtaaaatttgtgagttatttggaatttcattgttgaacgtagcgcaaatctgaatgatctgatcttgagcttgagcttagagtaagtactagtgtgtagttgaattgtataaggtacatttggagtttgcat

SEQ ID NO: 30520 - DNA, 454 bp, Glycine max
tcgcagaatcatctgtgaaggcttagtggtggatctcttgggtgaaccgtccattgttgctctttcaaggatgcagcacatacttcctctaactttggtctttccacctgcctattcaatatttgcttttgttatttggcggccctttgttatgaatgccaatgtagcagttcgtgaagacatgaatcaactttaccagtctctaacaatggccataagtgatgcactgctacattggccgttccgagatgtatgcttaagagagtgtcagggcctttatgatcttatggctgcagatacaagtgatgcagagtttgcaaccttgctagagttgaatggctctgatatgcattcaaaatctctggcatttgttccgctccgtgccagacatattctaaatgccatgattgattgtaagatgcctcaatctatttatacaaaggatgaaggaagt

SEQ ID NO: 30521 - DNA, 250 bp, Glycine max
caactactactactataggtacttactactttgcctagctcctctttctctctcttcccttttgcactgaacttcactctctcttctatatcaagggttgatcacataacctcaatatatttctaataataattgatatagtttgagttattgtttcgagacacacagatagagagagagagagagaatgggtagagggagagttgagttgaagaggatagagcacaagatcaaccgccaagtaactttc

SEQ ID NO: 30522 - DNA, 290 bp, Glycine max
taattttgacatattaactcgtgggatggaatctatcatctgttcttcactgattgagtgcactggtcaagctaagaagtcaacagatgaagagcctccaggataaaggatgctgcaggagttagtatttatgttatgctcactctggttgcattcagattaagttgcccctgttttgaattctgtttgcttttcacctattctttgatctgcaattctcggaattgtcgtcggttgaagttaaagtgctagtctttcttagcatccacattttcactgagtggtaatta

SEQ ID NO: 30523 - DNA, 311 bp, Glycine max
accaaagcaaggcgacttggggtttgtactcctgtgctgtatgctgtggatcctgctttgcacacgttaacatttgaatatgttgagggcccttctgtcaaagatgtgtttcttgaattcaggtcacatgttgtcaataaagagtggctggatgatattgcatcccaaattggtgatgcaattggaaagctacatgatggtggtcttattcatggtgatttaacaacatcaaatatgttactgaagagtgatacaaagcagttggttcttatcgattttggtttgagcttcacttcaactctaccagaaga

SEQ ID NO: 30524 - DNA, 258 bp, Glycine max
tttcctttctataacctatctgaaggctcaatctctgccacagaatccttagcagtcatagcatcaattctcatattactttgcttctgtttcagatcttcaagtatctaccttcttgactatgtttgttatatgcctcctgataatctgcgccttccttactctcatattgtagaacactttgaattgtgcaattttgaccctgaactcataggctttgaattgaaagtattggaaagatccggtattggcgtggag

SEQ ID NO: 30525 - DNA, 357 bp, Glycine max
ggagaagcaagctgtgacatgaaattggttctggagaaattggatcatgccatgcctatggacatggtcattgtgggtgatgagagaggctcttttgactttgtacacaaaagtgggaatgattctagaatcatttgtagtaaaaaaggaaacatagaagctgttgctcttgtatttgctcaggacagggacaggtctttgggaactattaggtttcatgttgcattgtcaaatggtgtttcaactgtgggtcccagatacaaggcagcctcagttaaatcaaacaatgctgattgttcaacatggctcactgctaggagggaagggcaacaggaaaatcttgacggtcagagtatt

SEQ ID NO: 30526 - DNA, 607 bp, Glycine max
gttctccttcacttcaattcccacacacactcttcatttgctcacaaatgagtaacttccttcttccaatccctgttgactacttctgtctactgtttaactaccgtcttctgcctcggattcacgactcgctgagtctccgcaactcggaacgattccaccgaacgccgattctcaccgcaattcggtttgttcggatccgatgggtagcatcgtggaagacgccgacacagacacggtgtatgtggcggtcggaaagaacgccgacaagacgcagcaactgttgcattggacggttaagaatttctccggcaaagaaatttgccttcttcatattcaccagcctcactctctcaattcgttctcagacagaaatctctctgggtatgaaccaaaagaccatgcaaccaaggctttccaggagcatggaaatcaaacagtgcacaaacttctagaccaatacgttctcactctggtccctgcaggggtacgagcctacaaattgttgattgagatggatgatattgagaaaggaatcacaaaagctattgctcaacacaatattagatggcttgtaatgggagcagcagcagacagatataacttg

SEQ ID NO: 30527 - DNA, 475 bp, Glycine max
aatggagtcaatacacgagcctcatccttccgctcccgcttctcttcatcggaaacactagaatgtgaaccataaaaccagagcattgtatctgccatgtctaaacacacaagccttagttttatctatgtattttcctcagaatacgatcctaaagatcttacaaattcacaattcttgggattttaggtgtgactgacactcacacacacaggacaaccaaagcattttatgttccatgtctaaacactgaaatggcgtccatctctacgtgcatcactgtgacccccacttgtaggcttgctcggcggctactttccttcacctcgaagcaggcaatagcattcccttccgtgcagcaaaacccggtgattgggggagtcacgaaaagggtatgggattctagggttttggtggcggggccgggtggcgcagtggaaaccgacaagttgccttctgatgtgagaaagcgaac

SEQ ID NO: 30528 - DNA, 452 bp, Glycine max
gtgatgtcaatgcctgctttacctcacagtggtagttcttcaaagccattaatgatgtttagtgctgatggctctggaactctgacatcaccttcaaaccaattggctgatgtggaccgttttgtggaggatggatctcttgatgataatgtggagtcttttttatcccatgatgatacagaccctagagatactgttggtcgttgtatggatgtaagcaaaggtttcacattttctgaaataaattctgtacgtgcaagcactaacaaagttgtctgttgccatttctcatctgatgggaaattgcttgctagcggtggccatgacaaaaaggctgttttatggttcacagattctctaaaacagaaagccactcttgaagagcatgcatatttaatcactgatgtccgtttcagtccaagcatgcctcgtcttgcaacatcttcatatga

SEQ ID NO: 30529 - DNA, 427 bp, Glycine max
attcacaatccctcttcaggtttcgttattttttggattcttcgcctgattttgtgtcatataaatcgtgttactacagtgaagatatgacagaggatatgaaaattgatcatattgtggaagttcctgataccccagatagaacaactgtaaggcacgattatcagaaatatttaggtaatcctgataagagggggagagcttttaatgctgctgatgaaaataataaccacagtaactatatatcattgtccccgtcagaggaatcttattcttctcaaaatgctcccatctttaggagagcccaaactgatggagctgaaaagatggagaaagggaaaagtataagctccaaggttccttctaaatcatctcaccgtggtatttctattttagatttgactgaagagaatgaacaaatccgaca

SEQ ID NO: 30530 - DNA, 258 bp, Glycine max
agaaatcacagctgaaagagggtactatcaataaaacagcgctacagatattgttcagaaatttctgtaccaaaaaagtaaacactgaatttattgcactggctcaacccccctcttcctttctggctcacatgcacttctttgtctttctttgaagttcatctatccacacatacatatccctttagcctttattacaagcctcagatataactacttcacttgttgtgactaagctcactaatcattatcatcatt

SEQ ID NO: 30531 - DNA, 452 bp, Glycine max
attctgacacgcaagaaaacgattatgaacgacatcatcgcgtgtgctgctgctgcagctaactcttctcttccaacctctgtgttgggtgttcttcactttctccactcccgaggaagatcctcctcttgtgttcacactccctctgaacttctaagggactttgccacaagagagttcaatgcgtttctgtggctatgtctcgttgctgtcaccacccttttgctcagaagactcttcaatctctttaggctgtggcatagggccaaaaccattcctgggccaccctctccctctttctttggacactgcaagcttttttcccggcaaaatttcaccttcactgacgtgttgtcagaatcccatcaaaagtatggacctattgttaagctgtggttaggtcctactcagctgttggtgtccgttacggatccagcactaattcaagagat

SEQ ID NO: 30532 - DNA, 333 bp, Glycine max
ggagcatcttccgcgtcgatttaaccgattccgaactttcagaatctcgaaactcgccgattcgcgtcacgccgccggggttgcactgtttcactccggctgctttccacgacggaaagcgcgtcgcggtcgcaactcgccggagagaaagcaatttaaggcacgtcgaaatcttcgatctcgaatcgcaaacgttccaacgaatcaccgaagacataaaccctaactttaaccattacaacccgttcgtctcgttggactctcgccacctcgggtaccaccgattccgaggcgagtcgattcagggcgagccaatatacccgcacctcgaca

SEQ ID NO: 30533 - DNA, 451 bp, Glycine max
ggttcctctccgtgaacacccaaagccaaacaaacaaacattaaccttaaacaaacaaaccctaattttttatctgcccctaattgtttgttcccttctcatccattcctaaataaattctagatcatttgtttgccatatttcccaaataaaattccccgattaaccttcgtgctacccacgaaatctatttttcttcccatttttttctgagcatttagctgtcgcttctttttgtttgtttttgtcatcctcggcagatcaggttttgtttttgcttctgctccagctttggaagatccacagtctctctctgagtggatggtttagtgtatatttttaagatactgatataaaagtatgggaagcagtgagatggataaaactacaaaagagatggagtcaaagacgccgtcaccacctacatcacaggagcagtcttcgaccaccg

SEQ ID NO: 30534 - DNA, 299 bp, Glycine max
ctcactttgtatattcctcccatacgcagtttcaacctcttcgtccacaccctccagatctttctgcaagattcctctctcttctcctttcgcccctttcttcgcatcagactcgccatctctcgcatcttcaactccatcatccacgtaacctggtagatcacatcctctctctctctgttcttttttctctctctttgattggatcctaaatgaatttcaaactttaggggtcggatgtgtaactatttgttgctgtcaaaaaatgattgattgatgaataaataataaaaatcatt

SEQ ID NO: 30535 - DNA, 520 bp, Glycine max
ctttcacgagggcatttggtagtgctatgttttttttctgctttcgtatgacaagtgtataattctcctgaatacccagcagaagctatcaacaaaagccacaccatgtctggacccctgtctccaaagacatctcttgaaaagagtgaccgtgttggttcattgaagaaaatgctgaggaattctctaacaaggagtaagaggcgaagcagcagcaaggtcatgtcggttgaaatcgaggatatccgcgatgctgaagagtccaaagctgttgatgagttccgtcaagctcttgtcttggacgagctactccctgagaagcacgatgactatcacatgttgcttagattcttgaaggccaggaaatttgaccttgagaaatctaagcaaatgtggtctgacatgcttcaatggaggaaggaatttggtgctgacaccatcactgaggattttgaattcaaggaactcgatgaagtcctgcaatattatcctcaaggacatcatggagttgataaagatg

SEQ ID NO: 30536 - DNA, 309 bp, Glycine max
gttttgatccatgccactgtccaaaagattgtttttgatacaaaaggaaaaagaccaaaagctaccggggttattttcaaggatgaaaatgggaagcagcatgaggcgtatctaggaaatgacaggcagagtgaggtgattgtgtccagtggggcacttgggactcctcaattgctattgctgagtggaattggcccaaaagcagagcttcagaaattgaacatccctgtggtgcttgacaaccaatttgttgggaaaggcatggctgataccccatgaacacaatttttgttccttccaaaagatcag

SEQ ID NO: 30537 - DNA, 324 bp, Glycine max
tgtggttccaatcgattctccggacacactgccaataatatattagcgtggattattcggtatttatcatgattggtgtgaatcattcaatacttaccctagatcatatgatctgctccatgccgactctatattctcaacacttaaggaaaagtgcaacatactggcagtgatcgcagaagttgataggatcctgagaccagaaggatatttggtcataagagacaatgttgaaactattggcgagatagagagcttggctaaatctctacaccgggatattaggttgacatactgcaaaaatggagaaggattactttgcat

SEQ ID NO: 30538 - DNA, 595 bp, Glycine max
agcgggtttggtttcatctaatactctcagggagaataatttccatcactttgagtatatgtgtaccaagaaagatccatttttttctgttaacaagactgcaatttcactcttttctgaaaactatgagaagcttgatcaactgaaatccgagattaatagttcaactaaattgattgttactgggcatggtcttggaggagcagttgcttctctctttactatatcgctattaaatagcattggttctggaaagaatcgcccactctgcatcacctttggttcaccccttattggtgacaagaaattgcaacaagccatatcacgtagttctaattggaattcttgctttctacacgttgtgtcactcaaagacccacttccaacgctcttcattacaaactatagttcttcacctgctgtattgactcctgaaacaagtggctacatgccttttggaacatttttcttgtgttctgatgcaaactccacttgttgtgagaaccctgactctattttggaacttctcattgcaatgggctcaatccacactcagaatcaaggatttcagtcttctgattacggaaatatagta

SEQ ID NO: 30539 - DNA, 255 bp, Glycine max
gaaaaagctactgatttttcttctcatcgaggttgttttctttgctgccgttgctcttataacaatgctggcattgcatggcactcgccaaaggtcgttagtggttggtgttctctctgatatcttcaatgttatgatgtatgtctcccctcttacaattatggcaaaggttataaaaactaagagtgtgaaatacatgccattctggctctctctggctaacttccttaatggtgcgtgttggacaacatatgc

SEQ ID NO: 30540 - DNA, 346 bp, Glycine max
cttcattcattccccttctcttatattcaaaatcacgttcacctttctcccttcactcatctcacaaaccatgagcacaatccaccaaacacacactcgtcgcgaaggtgaagacaaagagttcagtttctggggctcatcaaacatcataccttctgaaaatgattgtgatcaaccacaaggtaatgaatcaaggctcaaaaaggaagcatactttggagaaacacaccaaagaaaaagccttaaatatgagtattcacggttttgttcaacagtttcagacccttcaaggagcaaagctatttcagaagggacaagggaccttatggagatgatgcaagacatg

SEQ ID NO: 30541 - DNA, 250 bp, Glycine max
tattgctaccctggctttcccttcattcacatttcgcagggcgcttctttctcattgctggcaaaatggcaaatgcagcgtccggaatggctgtgcacgatgattgcaaactgaggtttcaagagcttaaatcaaagaggagctacaggttcattgtgttcaaaattgaagaacagcaagtggtggttgagaaattaggggaccccacggaaagttatgaggactttagtggccagttttccagctaatg

SEQ ID NO: 30542 - DNA, 269 bp, Glycine max
ggaaactaaaccaaaccaaaccactgtcccaccctcatccgtgaaacccttcttgtgtgacacaccaaactccaccactgatgaaagccctcacaagctcttgttccaagaccgtcgtcgacaccctaggacccttttctcccagagtttgccttcgtgtttcttatagacccgaattctgctccacccttcgttccaaaaatgagaaaaagggttgcaattcattgctcctgaaactggttcggaacaagggtgttgtttacccggtt

SEQ ID NO: 30543 - DNA, 299 bp, Glycine max
ggaacaatgagcaattaatcaatcacattaagaaattaacttgctttcatagttttcacatatttgaagtgacatcatgaatatggaggggcagaagaaaaacaagagggtggctgttttggtgggttgcaattaccccaacactagcaatgaattgcatggttgcataaacgatgtgttggcaatgaaggacacgctggagaagcgctttgggtttgatccctctaacattgagcttctcactgatgcacctcactcttctaataaattgcccactggtgctaatattaaggaggcac

SEQ ID NO: 30544 - DNA, 279 bp, Glycine max
tcccttgcaatgcagatgcctatcagtcctcagcacttccttcccaaggggcattccggcctgaacttacccaaattatgagccaactggttcagttcctcaactcaaacggttccccatttgttgttaatatctacccctttcttagcctttataacaatggagatttcccccaagagtatgcgttcttcgagggaactaccacatgccgtccaagatggttccaatgttgacaccaatgcatttgagggaactatgacactttagttgcagccctca

SEQ ID NO: 30545 - DNA, 303 bp, Glycine max
gtaaaattgagccacttgtgagtagaagcaagggtgagaggaagactcactatggtaagggtggaagtgatgggctgaggaagagattttcgttgagactgcggccgaggttacggttattggctatgagaatgaaaagggcttccattaggtccattttgaatgacgtggggatccttattcgtaagaacattagagcagtggcgttttctgcttcaatttctactgtgttctgcctttgtttcttgtttctgaaattgactgcactcccccctccgaaatctgttccgtattctgacttga

SEQ ID NO: 30546 - DNA, 516 bp, Glycine max
cttcaaaagattgcagcattggaagcacttaagagaatgagtctgcagatggagaggaagaagcctgaggagaagaccttgagtagttttggacacactgcgaggtacagaagatacaccattgaggaaatggaagaggcaacaaacatgttctcggagtctctcaagatcggggaaggacggtatgggccagtatacaggtgcgaactagattgcacccaggttgcaataaaggtgttaaagccagatgcagcacatgggagagagcagttccagcaggaggtggaagtgctgagttgcataaggcatccaaacatggttcttctgctgggtgcgtgtccagagtatgggtgtctggtgtacgagtacatggccaatggaagcttggacgactgtctgttcccaagaggaaaatcacggccacctctcccatggcagctgaggttccaaatcgctgcagagatagccacaggtctccttttccttcatcagactaaaccggagccactggtccac

SEQ ID NO: 30547 - DNA, 274 bp, Glycine max
aattctgctcgatggatgttagacttgggtttgcatcatctagattctgatactgctggtgcttatgctacctggctgctagaatacccatcagcacttacatctcttgatcatatcacaaactatgcaagagggaaaagaattgcgtgctttatggattatgatggaactctttcaccgattgtggatacatcctgactgtgctttcatgtccgacaatatgcgtgctgctgttaagaaggtggcacaatattttccaacggcaataattagt

SEQ ID NO: 30548 - DNA, 520 bp, Glycine max
aatggacatgacaactcctgtgttagcaccatactttgatggcatgacaaaagacattttccaattatcttgatcttccatctttgttgttaacaagagttttgttggccatggagactccgtaaatgaaatcaggactcaaacattaaagccatcacttgtgatctctgcaagcaaagatgaatctgtccggttatggaatgttcatactggaatatgcattttaatatttgccggagctggaggacatcgtaatgaagttttaagtgttgattttcacccatcagatatatatcgtattgctagttgtggcatggataatactgtaaaaatatggtctatgaaggagttctggacatatgtagaaaaatcatttacatggactgatcttccttctaagtttcccacaaaatatgtccagtttcctgtatacaatgcttcagttcatttaaattatgttgactgtaataggtggctaggtgattttatcctctcaaagagtgttgacaatgaaattatc

SEQ ID NO: 30549 - DNA, 259 bp, Glycine max
tcagaagtaactactggagttacaagaattggggactatgaacttcgcgatcttgtattgctagataataatagctttggtgatgataatacgtgtagaaagtgacgcatttcaggttcttaaggggattcctgacagacctgaagttgtgcttatgaaattaagagagatcaaatgcaagatagatatggtgataagtgtgcaggataggtttaagtctacagtatcgtcaaaggatgttgtccggaccgttcatggt

SEQ ID NO: 30550 - DNA, 838 bp, Glycine max
  unsure (1)..(838): unsure at all n locations
gtttggggtaggaataatatcttacacggtgcctgtgtacatagctgagatatcacctccaaacttgagggggggtttggtttcagttaaccagctctctgtcaccattggaattatgctggcatatctgctggggatttttgttgaatggagaatccttgcaattataggaattttaccctgtacaatattgatacctgccctgtttttcattcccgagtcccctagatggctggcaaaaatgggaatgacagaagaatttgaaacttccttgcaagtgctccgaggctttgatactgatatttctgttgaagtgaatgaaattaagagggctgttgcttcaacaaacacaagaattacagttcgatttgcagacctcaaacaaagaagatattggcttcccttaatgattggaattggactgctaattttgcaacagctttctggaattaatggtgttcttttttattccagtaccatctttcgaaatgctggaatcagttcaagtgacgcggcaacatttggagttggtgctgttcaggttcttgccaccagtctaactttgtggctggcagacaaatctggtcgccggcttctccttattgtctctgcaactggaatgtcttttagtctcttagttgttgcaatcacattctacataaaggctagtatatcagaaacttcttccttgtatgggatattgagcaccttgtcgctggttggagtcgtggccatggttattgcattctctcttggaatgggagctatgccatggattataatgtctgagattcttccaatanacattaaaggcctcgcgggaagtgtgggcacactt

SEQ ID NO: 30551 - DNA, 298 bp, Glycine max
ccaaaaccgaaattaacaaaactcatttttccaatggggtgtgccagtttttccttcctccttaaaattattccttccccctttcaatccctttgaccctttctgcatttcagatctaagaccataagacaacacaacccatttaggttcatcactctctacagaacaaggaactccaattgggtaccactagattataaagatttcatttttattattcttcttattattaaatatttaagggtgggggcgagagaggagaagaatgtggttagttgaggtccaagaaaacgggaac

SEQ ID NO: 30552 - DNA, 267 bp, Glycine max
ctcgagccgcgaaaccgaaacaaaaggcagagcggtagcatttaaagggagaaccggtgccgtgaagcgttatcttatcactcaaatttagcttcggcaccgtctgtgtttctctcatctcagccatttcactttccctgtgatggacgccgatcctcctcaacttgatgatcatttggaacctttcagggtttctgtgaatcaaattctcaccacagtcaacaagcttgagaagcaagtgactgaggttgaacagttctatgaatc

SEQ ID NO: 30553 - DNA, 275 bp, Glycine max
gtgaatgctaatgtctcattgaccttgggtatggagctaattagtagaagaacaaatgtggataatgtatcaggacttactgctactccatcaagacctggtaatatttctggtgagggaggacttggtttaccttcattagagggtgctgattctacaagaccagttacatccacaaatgtgggccatcaatgaggacactaaagttcacagatatcatgaagaagttggacacttcaaaagtgaaagagaagagggtgagttatcacctaatg

SEQ ID NO: 30554 - DNA, 386 bp, Glycine max
attccatgggtgtcattcatagagatcttaagcctgagaatttcctcatgttgaataaggatgaaaattcacccgtcaaggtcacagattttggtctatccgtctttctcaaagatggggagacattcaaagacattgttggaagtgcatattacattgctcctgaggtcttgaagaggaaatatgggccagaagttgacatatggagtgttggtgtcatgctatacattcttctaagtggtgtccctccgttttgggcagaatccgaacatggtatattcaatgccatcttaagaggtcacattgattttacaagcgatccatggccttcaatatccaatgcagcaaaggatcttgtaaggaaaatgttgactacagaccccaaa

SEQ ID NO: 30555 - DNA, 541 bp, Glycine max
accttttgtatcacttgtttaatttatttaggattccaagtttttctctctttttcttttttccccagcctaaataccatacgagtttatcttcaatccttgttggtggagaattgggcgaatatggcttgaactactttgatcgttgtgcctgtcagctgcattcaattttcacaccggtctttacttcgatccttcttcttctttttttgaggttttctattttggtttcaaggtgaaacggagtaattgtttctcccctgtcttggggtgttctatttttatttctgtaagttgatgaatggggttgaggattatggcaaatcacgcgggtctttgcttcaattattttagttgagcatcataattcatatttttaggtctgggaaatcgtatgtattttgcttttaagcgaatagcattcaatatgctggtttctttgagttgtatcctacgattaaccatgtagtctttcttagcaagacgataaactggggatattgtcttgtgaaaattttgttgagcttcatggaatgagagg

SEQ ID NO: 30556 - DNA, 516 bp, Glycine max
taggattccaagtttttctctctttttcttttttccccagcctaaataccatacgagtttatcttcaatccttgttggtggagaattgggcgaatatggcttgaactactttgatcgttgtgcctgtcagctgcattcaattttcacaccgaaggtttctttcatggatgatggtccttgggaaataaaggttattcgtgatcacttttgatttccaacatctggtgtagaatctcttgaggacggaacgccttctattacaaaacctggaactgctaaattctttgagggaggtattgcatcctggtggaaaaggggaaagaaaccaatgatcagaaagtcattaggtatttgattctatttgaaatcagccatgcaatatagcttactttaggtctcagtgccatctgtggacttgaagaacattaagggcagtttccatgtttaaattatttactcttcggcggctgccatggagcttgagaagtggtggtcaggaaaaggttgagctaacag

SEQ ID NO: 30557 - DNA, 277 bp, Glycine max
agaacaccacaaaaacatcaccctattctctattgtgtaatcaaatatcattaaccatccatggcacaaagaagcaagtcatttcgttttaggatcccatggctatcagtaccatctgaatcattcgctcgtcgtacaagagaaagaccataatcccctccccactcagacacaagtgtgcctattcatagaccatctaagccttctgtgatagccccttcagagttatctcctcttagtcccacgaaaactgaggaagccccaagagctgaacctc

SEQ ID NO: 30558 - DNA, 362 bp, Glycine max
gtatggtaaaggaaagatcaatttaggcctactaatgggatattggcgctttaactattcggcaaccacttgtttgccaatactatattactccttcatcccttcactttatctccttaaagccattcccttgtttccaaagatgtctagcccatggttcatacctttcgcatatgtaatactcggggagagttcttctactttgattgagggtttgatttctggaggcacaatcaagggttggtggaatgacttatggatgtggttgtacataagaccaagttcttacctttttgctttaatagccattgtctggaaattctttggacgttcaaattcatcctttgcggtcccaccaatct

SEQ ID NO: 30559 - DNA, 373 bp, Glycine max
caaaactataaatcaaaagctcagagaacccatcccgccgccgccgtgtgctccgaccgccacctccattcgccgtgtactctcactcccttaataattattgatttcttctcttactttttgctctcgctggagttgagtgtgatggtataggttaataggaaagaaaaactaagtgaggaaaggtgaaaaaagaattaattagagtggaagagtgtggttattttctgatttgagaagcaaataccaaagagtgaagaacaaaagaaaaaaaatgtgtacataattggtttaagggtttggtgatggaagcatcactctcaaaggtttggaacttgggaagaggtgacaagtttacatgagcctacactcc

SEQ ID NO: 30560 - DNA, 265 bp, Glycine max
gtcagaaggaagagataaatccatcgatgagtcacatgataaaacctctgcgatggattcttctcctccacattccaatcagaggtttagcactggagcatcaattaactcacccactaatcaaaacatcagttctcaccctcgtggatactttcagcattccgaacaaattggttcagagttctcaacagttccccttacatcatcagatagtaaaactactagttcaagacttcctagatactaaatatacatttttttccat

SEQ ID NO: 30561 - DNA, 389 bp, Glycine max
ctcgagcgaatcggctgagattttgaatcagttctggattcctaatcttaagctgattgtaggagctatagagctcagattgactgtagttgcctcaaccagactcatctgtgagtctccagttcttttggatcctgcagcttctgtgtcctggggtaagatggtggacagcatagtcacactcctttctcggccagaagaggatagagttcaggaggaacctgacatgccagatataacagaaaatgcgggttatagcaccacctttgttcttctttacaatgctggaaagaaagaagaagacccacttaaggttataggagatcccagggagttttttgtggcatcattgtcccgactttctgcactttcccctgggaggtatccta

SEQ ID NO: 30562 - DNA, 338 bp, Glycine max
gtgatgcttttacattctatatagtgttgaagaagttaaatcacatattcttgagctaagatggacaaatcatccaactttgatgaaaattctgatgtggggtatcacccttcttcaccttccaatactcctgctttttccccaatgagtagagatccttttgcatattgcccaacatggacaagctcagagtctgagactgtagacgagagcagctatgccagtgaaccttcaccttctcggtggagggctaaacaggatgttctttcaaagctaggaatgaagctgcgtgagcattcaaaggatgataaacttgatggctgtgttgattcagccga

SEQ ID NO: 30563 - DNA, 646 bp, Glycine max
  unsure (1)..(646): unsure at all n locations
gcaaggacaccagaagtttttttggctgctacaggtgttaagccaacattgncacctaacctcaatactctcgcacttgttgaggctgcaggtgtcaagcgccttcttttctgtggtgtaggttgccaggtgcaagcattaagatctgtggagcaccacttgaatttggataagctctatgttttaggcacaaattgtgtggacaatggtactaggcaagggctggataagtttctgaaagctgcgagccaatcaccagaaacagttctacattatgagtttatgcaagattacaaggttcacttgaagcatttggatggtcatatagaagaggttccttatttctgtctgccagcaaacgatttggttgatgttattgccccatcttgttacagctgttttgactatacaaatgctttagctgacttagtggttggatatatgggagtgccaaaatattctggaatcggcatgacacaacatccacaatatgtaacagtaaggaatgaacgtggaacagagatgttgagtcttatagagaacttactggagattactccaacaattagtactggggataggcgaccatttgtcatggagactgttaaggctgatgatgaagctaagttaggaagaggtccttctc

SEQ ID NO: 30564 - DNA, 835 bp, Glycine max
gtgcttgcagtgagcttaaggataagttagaggattatcatgccttggaagaaaaattagaggaaaaagaggctgagatttcatcaatgcacaatgctttgttggcaaaagaagaaaactccctctttccagcatctcaaatgagagatctctttgacaagatagataggatcaaaatccctattgtagagtccaaagaagatgatttggagccacatacttcagcccctatgagaaaactcttttatattattgatagtgttcctaggttgcatgatcaaataaactctctgtctcatgataaagaaaagctgcaatcaatccttgaaactagggatcttgacattaaggatctgaaggatgaagtcaaacaactcaatagaatctgtgaagactctaaaatgatcaagaatgaattgtctgagctcacctatgtattagaaaaaattatggatattttgggagctggtgaatgggttgtagataggaaatctaaaggttcgaaggaattaataccagcattggagaagcatatcattgccattctttcagaatctgaaaattcaaaatccaaggcccaggaacttgatattaagttagttggaagtcagaaggttattgatgaattaacgaccaaggttaaagtacttgaagattcactccaagataggacttctcagccagacattgtccaggagaggagcatatatgaagcaccctcattacctgctggatctgagataattgaagttgaagagggatcatcacttagcaagaaagcaatatctcctgtcccatcggctgctcatgtgcggaatatgcgaaaaggatctac

SEQ ID NO: 30565 - DNA, 363 bp, Glycine max
gtttggacagtgatgtctgtgaacaataataacccttctaagggcattggggcctcttcctcatcctttggtaatgctggagtaccctccaattctataccttcaaaccctggattttcacagtcccaaggacaggcccagattcctgttggttatcaaggacagtttccactgtcccaggcccatcctattgtccaagctcagtccaaggcccaggcccaggcccaggcccaagcagcagctgcagctcatgctcaactccaggctcatttgcaagctcagggattgagtcttaatcagaaccaggctggtggtttgggggtgtcgtcaccgttgatttccacgccgggtaatgctagtggg

SEQ ID NO: 30566 - DNA, 291 bp, Glycine max
taaagtgttgtcttttttgggggatttgcaacgcaaaggttgtttgttgttgccccaggaaatcatagagagcgaggcataaacatcaatctctctgtgaaaaaaatggggacgacgaagaacaacaacaacaacttcaattctacctcaaaatctgataacagtgccaatgacaacaaaaacaacacacgtgtggtgttgaatgtctacgacctcacccctctcaacaattacctttattggtttgggtttggaatctttcactccggcattgaagtgcacggtaaggag

SEQ ID NO: 30567 - DNA, 318 bp, Glycine max
ctagcacgcaacctgtttgttcgtaaattcggccactccaaagtatatgcaccacaaacaacaacaccctcttaatcttctccacacaacacacaactcgcaaaaattacataaattcctagcccaaaaacttgatcagtaaacaaacatgggaagctccgtgcgtgtaaaagaagcatctgtggttacaccttctgagcccactccatcgagtgtgttggctctatcagctcttgattcgcaactcttccttcgtttcaccatagagtatctcttggtctacaacccttgccctggcctgggacaggctgccaccac

SEQ ID NO: 30568 - DNA, 379 bp, Glycine max
ggagacgcaaaggcagtggctcacgtggatttcgaccggctgccctgaacaaggtccctgaacaaccaagcgaatctccgaaagaggatgactatgattatctcaaggaaggaaggaagcagagtgaagtaaagttcaaaaaggccctttcacgggtgaagtccatggttcagcatccagaggcacgggctcaataccggcggctgctaaatgtagttgaggacttccgtcaaaccaagggaggtaatttgaatttgataaattcggaagagacagctgatggtgtggaggatttgattgatattgacatgcttttagatgatgaaaatttcttacctatagcattcgatagattctctgctgctgctccacccacccc

SEQ ID NO: 30569 - DNA, 282 bp, Glycine max
agcagctcccacaaaaaccagacatgtccgagtcggaagtagcaggtcagaggtaccgtgtgggctatcctctccaaggcaagaaagtcgaaagcttcattcaaccctcactcctcgatcacgccaaacaacacagcatcgatctcgtccaaatcgaccccaccgcacccttacaacaacaaggtcctttccactgcatcattcacttactccacacccaacactgctccaacctcctccaacaattctcatccaaacacccaaacaccgtaatcatcgacc

SEQ ID NO: 30570 - DNA, 466 bp, Glycine max
gggctgagaatcggaagatactggactgctctggctgctggtaattgcaatggttgcagctatgccgggacattcagacctccaaagtgccaggttggttgtggccaaccaacccagagatggtaccatgtacctcgatcttggttgaagccagatcataacctgttagttgtttttgaggaacttgggggagatccttcaaaaatttcacttgtaaagagatcggtgagcagtgtctgtgctgatgtgtctgagtaccacccaaacattaggaattggcacattgatagctacggaaaatcggaagagttccatcctccaaaagttcacttgcattgtagtcctagccaggccatctcttccattaaatttgcaagctttggaactcctttgggaacatgtgggaattatgagaagggagtttgtcattctcccacttcctatgccaccctagagaagaaatgta

SEQ ID NO: 30571 - DNA, 327 bp, Glycine max
caacagtgttaggcccaaaagagagaaaacgggatggatactcatcataggtcaaagttggtggctaattgataagaagcgtacatgtgcttctttatgttatgttgagatatggcttgccatttccgtaatttgatcgagtaatcatggtcatttctttagcatagagttgataaatatcatcaagacagaactagtttagtgttttacgagtaagttaagataagatgaagaagatggtggttgcaatgatgcttatatttcttctaatttctacgcaaatggaagcgaagagcccgatgctgcagattgcttggatggttgcac

SEQ ID NO: 30572 - DNA, 589 bp, Glycine max
atttgattatattccttcagttagtggtaatggctttggaagatatgaaattggtttattatgtttggggatgatgcattttcactttgggcatccaaagctggctttagaggttttgtcggaggcagttcgtgtttctcagcagcaaagtaatgatacctgtcttgcatatactttagcagctatttcaaacttgctgtttgaaaatggcatctcaagtacagctgcgacactaggatcgtcatactcaccttttacaagtataggtatttcgctctctgttcagcaacaattgtttgttctcttgagaggttctttaaagagagcagaaagtttaaagttaaaacggttggtggcttccaatcatctggcaatggccaaatttgatctaacgcatgtacagcggcccttgctatcatttggtccaaaaacttccatgaagctcagtacttgccccgttaatgtttcaaggaaattcggttgagttctcatcttattagtgattttagctatgagagttctgcaatgacaattgatggtgcctttagtacagcttggcttaggaatttacaaaagccgacgggttctc

SEQ ID NO: 30573 - DNA, 642 bp, Glycine max
aagtttttgggatcaatagctactttaattggtactgcaccactttcacaatggtattgttggtcactcaaacagtggtggtctatatccaagactctgtgagctggaggatacggtctgggataccaactgtgtgcatgctatgctccataataatgttctttgtgggcacaagggtctacgtgcatgtaaagcctgaaggaagcattttttctggtattgctcaagttttagtgactgcatataaaaagagaaaactccaccttccaatgagtgaggagaagccagatggagttttttatgatcccccactaattgggatcacagttgtgtcaaagctgcctttaaccaaagaattcagggccttgaataaagctgcattaataatggagggtgagctaaacccagatgggaccagagtaaatcaatggagacttgtcagcatccaacaagtagaagaggttaaatgcttagcaagaattatcccaatttgggcagcagggattcttagtctcatttccatgactcaacaaggaacatttactgtgtcacaagcaatgaaaatgttccgtggaacaacccaagcttgtttcacagctcagcaacaatggcttctatcccatgcatcacccaccaccatca

SEQ ID NO: 30574 - DNA, 298 bp, Glycine max
actgttttgaaaaaaaagacgcacaccaacctttcctaattcacactgcacacttcatttctgaacaaaaaaaataaaaattattcctgttttagtgcttctttcttatccatggcgagtctgcttcggaacgctaacacatccctcctcaaacgttctctcttccactccgaccttctaacgcgcttttgctttaaaccgggagtgttgggcacgtctcaagttttaagcttttcaactcgtaaaaggaggtctaaatcagatggaagtgactcaggtgaagagaacatgtctaaga

SEQ ID NO: 30575 - DNA, 307 bp, Glycine max
ggagcggcagagtctgaaataaagaaaaagtataggcgactttctattcaataccatccagataaaaacccagatccagaggcacacaagtacttcgttgagtacattgccaaagcttatcaagctcttacagatccaacagctcgtgaaaattatgaaaaatatggccatcctgatggcaggcagggattccaaatgggtatagctcttcctcaattcctgctaaatattgatggggcatctggtggaatacttctgctttggattgttggtgtgtgtattctcttgccgttggtcattgctgttg

SEQ ID NO: 30576 - DNA, 345 bp, Glycine max
ggtaacaaattttaaattcatccatgaccatgaatatttatacagactggagctgctgaaagtgatgttattctccaaattaatttgagcaccttccattcattaataagtaataactaacatataaaaagcacataatgcaaagatatatgagaacaacatctacagaaaactcaagtcatcaactgataactttacttccacaaaagtgcacaaaggctaatgcaaacactgctgacttgcaaatgggggataggggaatcccgtattttcctctagcaaacagtcctttaaaatatggccagtagcaaactaccaaatacgtactacagatgaattccccaa

SEQ ID NO: 30577 - DNA, 474 bp, Glycine max
ttcccatttgcgctttctcattcaaattctttctatattctcctctttgttcatcatcaatcatgctttcgttacggttacttcgccttttctctgttcgttctacttgttctaaccaagctcccattctgcaggaaagttataagattctgtttcaggggtgtaaagaaactggctttcgatcattatctccaggttcggtgaaaatgagttcaggaggaaagcaggggggcttcgtttcgtaccaaaacgtcttcgtaatgaggcacggggagcgtttggacaacttcgagccgtcgtgggtgatgacggcggcgcggccgtgggacccgccgctggcagaggcaggtagaaaacgggcgttcgaaacgggtcggaggctccgggagagtgtcgggcttccgatcgggcgggtcttcgtttcgccgttcctccgctgcatccagaccgccggggaactcatggcgtgtttct

SEQ ID NO: 30578 - DNA, 753 bp, Glycine max
ttccacgcgtccgcccacgcgtccgtttaactgcagatatctcctgaagatattcagtgggtaggtgaggatcctggaatcaatcatcgtgggggttttgggggccctggtcatgggatgaataggtctgttggacgagatggtgttccaggagctggaagaggtagaggagcagcaaaggggcaatccagaaaagattttttgtcatcacagaatggcataggaaagaaggcgcctgatgatatacaaatacttcacacagacacactaatcaaggaggtggagaaggtattcagtgcaaatcaccctgatccccttgaagttgagaaagcaaagaaagtattgaaggatcatgagcaagctcttattgatgcaattgcaagacttaatgatctttctgacggtgaaagtgatggggctggccaccatttctcacatgctcaatcaatggatcgagagtgatgaggacctgttactttgtacaatgagcagaggaggcattatgatagcataattctggaaagggtgtatttctcttgtattatcacataaagattattaccctctctaacagtttatagctgtaggcatggttcttgtggattaggcattatgtaggatggcaaatattgtagtttggtaataattatttatttcggtttgaaagatgacccaggaccagctgatgatacttgtataattctgtttcattagtgattaatgtgtggtagagtataaattcttgtatttgat

SEQ ID NO: 30579 - DNA, 611 bp, Glycine max
ggtataggcattgtcctgtgtctagactgcactggttgctttcccttcccaaagggtataaagtcccagttccgtggcccaagagcagggacaagatttggtatgataacgtcccttattcaaagctggtggagtacaagaaagaccaacactgggtagtgaagtctgggaaatatctggtctttccagggggtggtactcagtttaaagatggggttgaccattatattaagttcatagagaagacattacctgcaattaagtggggaaagcataccagggttgttctagatgttggctgtggtgttgctagctttggtggctatctgctggacaaaaatgttattactatgtcatttgccccaaaagatgaacatgaagctcagatacaatttgctttggaacgaggaattcctgcaactctttctgtcattggaacacaaaaactgacttttcctgataatgggtttgatttgattcattgtgcacgatgcagggttcactgggatgcagatggtggtgagcccttatatgagctcagttaggattcttagcaccaggcggtttcttagcaaggtctcttacaccatttcccggtgatgatgaaagga

SEQ ID NO: 30580 - DNA, 268 bp, Glycine max
agctaattaacagaacaaattaggtaataaattacttatcatagaaacatggcagccctcaaacaagtttcatccctcttgctattccctttgtttctcatttttgccctattcaaatcctctcatgctggtgggattgcagtctatctggggtcaaaacggcaatgaaggctccttggaagaagcttgcaactctgacaactaccaatatgtgaacataggtttcttgaacgtttttggcaacaaccaaatcccacaactaaacctt

SEQ ID NO: 30581 - DNA, 673 bp, Glycine max
cctttctccgccgtcgcatcgttgctgtcatacaccgctgcccccgcccatgttgcacctccttcctccatttttcagtttttctccactgtgcatcagaatccacttttcatgtattctagagcgttcaatttgaagagttgcatttgagaaatggcatcggctttgatctcgcgttcttcgcgtaggtttctcaaaccttgttcttcttcggtatctctttaccctgccatcttcaatcctgtgatttcttctcaacaatcggcaagccaaaacccctctcaaaatcccccattcaagctaccccagctccaaagtttcaattttgagttccgtaaaactactgggtctctctcaagtttccaccttgttgcgcacgtgtccacgtggccttccaaggagaacaagaaccaccaaagtggtggtaatgtgagtagtagttgggttgaattgtacttgcctaggaaggttcagccctatgctcgccttgctcgccttgataagccaattgggacatggttgcttctatggccttgtatgtggtcaattaccctggctactaccccaggtcaccttcctgattttaaaatgttggctctgtttggatgtggggctttgcttttaagaggtgccggatgtactattaatgatctccttgatcgggatattgata

SEQ ID NO: 30582 - DNA, 480 bp, Glycine max
acctgctcaacactcttcagatccaaagcccataaaaagagaataagttgtggtctctgaggatctaggccagagggcttttcaatcactggctcctgctgtcggtagccatacatctactcctggtgcagttgtggcccctgttgggaatgtgccaataactactattgaaaagtcagttgtgtctgtatctcctcttgctgatcaatccagaaatgatcggaatgttgagaagaggattatgtcagatgagtctcttatgaaagttaaagaggctagggtacatgcagaggaagcttctgctctctctgctgctgcagtgaatcatagcctagagttatggaatcagttggataaacataaaaattctgggttgatgcctgatattgaggctaaactagcttctgagcagttgcagttgcagctgctgcaaccattgcaaaggcagcagctgcagctgccaatgttgcctcaaatgct

SEQ ID NO: 30583 - DNA, 250 bp, Glycine max
ctggaaagaaatgtgaggcaggcgtctcgagctctgaagcaagggaagactttaattgtatctggtttagctgaatcaaagaaagaacatggagttgaactgcttaacaagctggaagctggtatagatgagcttgaactgatagtacaggataggaatcgagatgcagttgcaccaaaacagaaagagcttcttcaatatgttggaggctgagatgttcctggggcattgcatttctgcagtgttgaag

SEQ ID NO: 30584 - DNA, 266 bp, Glycine max
ttcttcttaaactcctttggattttcattccaagcgtcaaacattcaccgcagtttctccactccatgccttcccctgggctacaatgccaggaggggaagacttcacgtcttcttctcatccaagggttgagattgttggtggaagtgaagctcctccagtgcatgctctagttgttgaggttgccatagccatggctctcaggtgttcatcctatacccctcccaagtggcctaggtggtgcctatgttttccccaaccaaaac

SEQ ID NO: 30585 - DNA, 348 bp, Glycine max
caccctaaccttggttaattttccaccaccaccaccacctttgttttgtagagatcgaaataatcaacaacaaggatttaaaaaaccatcggcaaccgtgatttgagttataacatcaatttttttcaactgtcctcaaccacaattgaaatcacatcgggttgcatttgttcgtaatttatcacgatatcaataaacccaaccaaaccgttatgcaactgtaaccgatcaacatgttaagagagggggaaatgagggtatttaaaagagccagtggagccatcaaggacaggaacagcatatgggttgcgaaattctcaccaaagggtccattccacaaccctgatt

SEQ ID NO: 30586 - DNA, 430 bp, Glycine max
cttccctccaaaccttgtgagtcccttcgaatcaaagcaaaacttagcagttcgattcttggtcaccctctgagacacaacctctgcttcctgacatatccttcacgccaatcttcccttcctcctcagactatatacacttcatcatctctatcccctcttcatattttttctattcttaacctttctctacagtatgtgtttgctgaaaggatcatgttattgaagctttttgtgatatctgtctgattatgttgcgaggagttaaaggtggtgcagacccagaaaagatcttccaatcaaggtactagttccatccatcaacaaagttgcctattgggatgcttcattttcaaggttcttttgatgcaaacctgtgcttttgagaaattaatactgctgctggattcaattacttgatcgtggatac

SEQ ID NO: 30587 - DNA, 472 bp, Glycine max
tgataagagtgttgagagtttcaatgggaaaaaactcactcctacaggctctaggtattttggtggttccatatcagggcaatttgattgtgaaagagatccaaagcagtttggctcctcagttgtcaatatgagaaaagatgtcagaagtgagattgatgtgcttccacacgtcagtacaaggaaggagcaggcatcaatgtctgtcagaagcatatcgactagagaaaatatccacaccttactaaggcaagccaaggtgactccgaatcgggagtttcaagattgtcatgtatcaaagtttaacagattacaacaaggtgagacttgcttacagctggagtgtggagtggagtcccgatccaatgacattggagataatggttgtcttgttgaatctgcaagggagacagacaagggaaatgcccctacagcaaaccaaactagtccagctgatgcaatcaatgacact

SEQ ID NO: 30588 - DNA, 449 bp, Glycine max
cccaattgaggcattatttttcatatgtatgattagtacatgaccaaggtgatggagtattggagaccgtggttttgggggcacgccgacaagtactacgttgttaagttgagccaattgaggttgaagtttgggccaacgttggatgctgcaaatgacaagataatagcaattcagattaagggaacagctacaaagaaagggaaagtttcttcttcttcttcaacttccaaaagctttcttattccttttcatcgtacccagaaactaggatccactcacaccaccaccttcccccataggttcaccaattctaaggcaccaacaatcgtgtgggacgcacgtgacctctgcgactttcatctcgtcctcaaacacggcacgtgctacatgacacttcatgtcttacatgcggagggtgatataggagaatataaatctgaaatggt

SEQ ID NO: 30589 - DNA, 564 bp, Glycine max
gtgaacacagtgccgtgttttcctcattgccactggttctcaaatggcttagggacaccctcagttgcttcttccccacttgatgaaaacatgtgctgatcatggtgtctacttcaagaaggcactctttgtacctggtttatcagtgtatcacaaagttggatcccatgctttaccagcgacagattctgatgttgacctgtcgtggcagcttactctacaaagagtgtgggaaaatctcatgcaagggaacaaagaaggcaagagtaataattctgctcctgaagaattaaacatggaaatgagtgccagcaattgtgaacacagtgccgtgttttcctcattgccactggttctcaaatggcttagggacacggtgcaacaaaaccagtcaactcgttttcaggtccttgttactggttctatacatcttattggtgacatgttgaaattagtcaagaagtgattcgttgggctacttgaaagattggctttcattcagattttttaagtaccactatttgagtccatgaaagtgctgtttcacttggttcaaaagctgtt

SEQ ID NO: 30590 - DNA, 312 bp, Glycine max
agctatttctttgttttcttgcttggaggcattcttgactgaagaacctcttggaccagatgacatgtggtactgccctagatgcaaggaacacagacaagctacaaagaagcttgacttgtggaaattgccggagattcttgtttttcacttgaaacggttctcatacagcagatacctgaacaacaaacttgacacttttgtgaattttcccattcacaatctggatttaactaaatatgtgaaaagcaaggatggaccgtcttatgtgtatgacctttatgcaatcagcaaccattatggtggtctaag

SEQ ID NO: 30591 - DNA, 371 bp, Glycine max
tcgtggtcgcgtggtcggacgcgtggggtagtattcattctaatagcaaaccaaggtgggtgtgtccgagcagagcaggagcgaaggagaaaaagaccctcactctgttttttcttctttccttcctcaaccctaagcaagcggcatggttgtcttttcgcgaagtgcgacgacgacgacgacgacgacgacgacctatacgcgccacaacttaatacgacaaacgaaaacctgcgttggcaataataatagtttgtgttactctgctactaagaaggctcctccgcagaggattcttggtggtgcacgtggcagtagagtgattcttggctgtcagccctcccaccgaagacgctttagttgccactgac

SEQ ID NO: 30592 - DNA, 324 bp, Glycine max
atataacgcaccttcttcttgttcacttctctctctctctctctctctcactttttctcttgacacggagagaaacaacatctgaattctgatgggttacccagtggggtactcggagctcctcttcccgaagcttctccttcacatcctctccctcttgggcctcctcaggaagctgatttgcagcctcctccgcttcatgggcctccacgacttcctcgagcccgacattgccgccgcgcccgaaacccgaatgcccgaagaattcgagtccgtgtcggccacgctcatccgggaaatcctgccggtggtgaagttccggga

SEQ ID NO: 30593 - DNA, 336 bp, Glycine max
cacctttccataaacacaaccttctctcactttgctttactccttcattcattttcctctcatactcaaaactctgcatcaaaatgctcctcattgttcacaccacccattcttgaaaggtacttcttttctcgtttttccaaccaccccatttcttaaaaagactattttcccttcaagttccttcatcatttcttgtagtttcgagtctttggttattggggtggttaatattgcacttgcactatggaaacttgcacggctctgttgtttttaacggccatcacagcatacttgatatggttcacgttcatctcacggtcgctgaagggtcca

SEQ ID NO: 30594 - DNA, 433 bp, Glycine max
tgacatgtattgtccttcctttgattatcttggatctcgtgctcttctgatatcaagagatcgaccagctatgtggaggcatctgatagtttgatagttatggttttctggtaactacaagctttacttgtgtactcttacaaaacaggaatttgcttaaagtttaaggttgtgtttctgcttttgttttttcttggttttctttttaaggaccaaagttatactttagaggaaattatgttagatgtggatgcttggttgttagtattttatgcaagagccttgtacttttcccgggtaaccacttgtcactgatcaatctggtaaagggggatctctatttatgtcaacccactggtgttcgttgattctgtatattttcattttcaatctatttaaaaataaaatgataatttgaaaaactttagtatac

SEQ ID NO: 30595 - DNA, 306 bp, Glycine max
caacgatggatttgagcttgatgcaggtcatatagttcaggaacttggtggaattaacactgctatggaacgacagataacattgctacatgaactgatgtccactgttaaggatatgttacgcaacacagaggttgctgttcgttcctttatgatgctacgccctaggttccttcatccgagtgggggtacatcaagtgccactgccccatcacagactcctggtgcaactatagcacctagttcgagtagccaaccaacaactgcttctatagtgcctgtttttgatttctacagtggtcttcc

SEQ ID NO: 30596 - DNA, 427 bp, Glycine max
ctcgagccgctcgagccgattcggctcgttctcaaccaacaagtagacaaaaaccccagctacataatcatatgggtctttttatgaagctcccttttcctcctcatcttgcagcttcctcactgctccatttcacattattattattattattgatttttgatattgtgtgtaaaacaagggcagttgtgaaacttccgccaaatgtttcagttccagcagtgttggtgtttggagattcgatcgtggacactggcaacaacaacaacaacttaggaacaacagctcggtgcaattacccaccatatggtaaagattttgagggaggcaaaccaactggtcgatttagcaacggaaaggttccatctgactttatagctgaagaattgggcattaaagagtatgtaccagcatacttggatccaca

SEQ ID NO: 30597 - DNA, 582 bp, Glycine max
ttgacaagaagcacaggaaggatgtggaagagaaggtagaagaagtaaagaagtccattttcaaggccgacatcgacttcagagggcatgaggagatctgctctgaatctggtggagtgatggattatgaagaagatcgaagccgaccaaagaggaggcggcatccaatttcttgaagatttagtagataagggagctcattggagatgggttctttagttgcttgcctgacttttattcatggcatgcgtcaacagaggatatcagcttttgcagacagacaagtatatctcatcgatattgcccttgtctgtcacaccacaaagcgagatagggacaaggaaaaaaaggagggaaaacctgttaatttaggaaattgatagtgtttcttgaaccattatttaatcgtctactgagttggcaataacaagctgagatggtggcgcggctatttatttgcggttgctgaatgctatatatactgttttgctttggattatgctgatatatttgctgcctcacttgcgtggttatactttgtggtgaatatatatattccaaaaatataaaaaaaaaaaaaaa

SEQ ID NO: 30598 - DNA, 364 bp, Glycine max
acctattgaagttgctccctctcatgtctttcttgctagcaacatatgctcctcttacattactggccaagtcctccaccccaatggtggaatcattgtgaatgcttgatgaattggcggatatatatatgatacctcattaatcgagactggtatatgtaatgtcattgactcagtgtggttcttgtctacgccatcactatgttacgaatggcagtgaatgagcacggttctatcgatatgtatgaatgtataatatatgtctggatgaagattcgttgaaagcaagcataaatattgctttcaaacgtataaacctaagaaaatgtactacttgaaatatatttgaagcaagatctattat

SEQ ID NO: 30599 - DNA, 676 bp, Glycine max
tgaatcttcccagttacacagcaatggagaggctaatacagcaggctacagttgtaagacaatgcttaagtcaagaagctggcaaggatgggccaccattttccttaaaggattttctcaaaagttgatggaaaacagtaaaaaatggagagtcaattggggaatgaagctcgtttaccttgaacctttctcgtctcatattggattggtgtacggtttcatcatagtgtaaagttttttgaatgccttttcatctataaattctttgtttccaagctatcttcttctttttggtcttgctgcacttttgcgaggcatgagtaatctatgagtgatcatggccaaaaatgcaagattgagatgatcctcctgtccgaggcagttgacctcatctgggacctaatttccactgccataatttctactaatttaaggtattttcaacccattgaaaggttggacagacaaaatttagtaccataatttcccttaatttagatgattttcaatccattgaggttgagctgccaaaattaaggatatatatattatattgtttaaatatttgatgtaaaatcttttggttacatgtatgtggatatgaaaggaagattgaagacttcaatctcttttgtcagtaagtttcaagttatcaatcaaaacgttgggtgtgtac

SEQ ID NO: 30600 - DNA, 287 bp, Glycine max
gaagacgacagaaggggaaccaagttaaaaaaaaagaaaaaaactttaggaaatcaaatgaagagagagaagatggcttgtgtttacccaggacagcttctcttgttgtgtctgatactgagcgtggttccaatagcagtttccgcaggcaatgacgcagcacccctgaccaaccatgggggacgcttgctgactggaaagttgaacgttggcatcttatggtacggcccaattccaaaggcccaaaagaaagcgattttgtccttcttcaggtccctgaacatgaa

SEQ ID NO: 30601 - DNA, 348 bp, Glycine max
ctcgatccgcgaaggcatactccgttctgttctggtataaactaatagacacccatcaccattttccccgtacactcttctcaattctctatcgatcgtttctgcgtggcgtcgttgtctttcttctgtttccaaatcagattcttgtgctatcttgttctggattttccatttgagtaagaagctagaactgttttcaattgttggtgcagtgtgttgttagttctgcatttgcctgttaaatttgaggaatcggtgttataccaagacagaaagagggaaacttagataaaaataagagctttctggggagcatagacacttcacatacatgtttccataagagaa

SEQ ID NO: 30602 - DNA, 396 bp, Glycine max
tgatgttccatgatgagcagatagcatgattgagatgatagtgttcctcttccttgtcttgcttatatccctgatcttgagcagcagttccaataatagcctccagcttcccccaagcccaccaagcattcctctgctaggtcacctccaccacctctaccccttccctatacaaatccctctacaccctctcatccaagcacggtcccctcctcctcctccgcctcggcccctcccgccgcctcctcctacttgtctcctccgccgccgtcgctaccgatgtcttcaagacccacgacctcgccttctcgtcgcgccccgccttcgccttcgccgagaggctccccttcggcacctccggcttcgtcaccgccccctatgggccctactggcgct

SEQ ID NO: 30603 - DNA, 543 bp, Glycine max
cgagatttcaagactggttacctgaccctctcatcggcaaagtccatgtttgtgagccaattgattggaacagccatgggttgtgtaatcgctcctctcacattctggatgttttggactgcctttgatattggctcacctgatggcccttacaaagcaccatacgctgttatattcagggaaatggccatacttggtgttcagggattctcagagcttccgaagtactgcctggaaatgtgtggtggtttctttttggcagccttagttatcaaccttctaagggatgtcactcctaagaaattctcacagtacatacctatcccaatggcaatggcagttcctttttacattggtgcttactttgcagttgatatgtttgttggaactgtgatattgtttgtatgggagaggttgaatagaaaggatgcagaagactatgctggagcagttgcttctggactgatatgcggtgacgggatatggacaattccttctgcaatcctttctattttgaggattgatcccccaatctgtatgtac

SEQ ID NO: 30604 - DNA, 253 bp, Glycine max
gggagagggatgtgaaaaatgagtttgtaagacagaaaagaaggaacgtaagaagggaaattcaattcccttcttgttgttcccctagcacggccaattgatcttgcggtgaggggcaataattaaaacacatgaagcaaaaatcttaactcaatacaacgcaacacatgcatgtgagtttttgccaacaaacgtgatcattgccgcaacaacgaagactcaatattatcataggccattatgttcaccaaca

SEQ ID NO: 30605 - DNA, 352 bp, Glycine max
cggagctttgctcaaggtactgatggctgctctcaagcaggacctgggatggtagtggcaaaattggcaataggacagtgaagcaataatcatgtacaggggttgagactgttgcacaatttggtgtagtgtttcttctctttgctttggggctggagttttccctggcaaagttaaaagctgtgcgacctgttgctgttcttggagggctacttcaaattatcatttttatgttcatgtgtggcattctttccatgttatttggagccaaattgtctgagggtgtttttgtcggttcctttctatcaatgtcatcaacagcagtggtggtgaagtttttagtggagcggaa

SEQ ID NO: 30606 - DNA, 501 bp, Glycine max
agttgatgaatgatgtgctgattgcagcaaagcaaaaggattttgatgttttcaatgccttggatgtaatgcacaatgagagtttcctcaaagagctcaagtttggaccgggagatggacagctccactactacttgtgcaattataggattcgtagtgccttgaaaccatctggacttggacttgtgctcttgtagtttgatactattcagttttggtttcactatgtaattggtaaaaccattcatttgttttgttttattagcttgttgtttcaacattatttcttgttcctttcaaatattggcaattaacatattaggttttcagggtatgtgagagcccatcttatggcagactttctgctaatgtgcttatactgcaaaattctgaagttgttatggtctgctacttcagtttcctttttgctctatttccttctgaattctctctctctctctctatgcatgattgtatgtaaaagtagttcacaattctgac

SEQ ID NO: 30607 - DNA, 296 bp, Glycine max
aaattattggtctctgttctctacctcaccccccaccgcactcgtcttgtctcaaacaaatgcaacaaccacttattcttatagttactatggactaggaacaagatttgattctcattctgatatcagattcagatttttttaaaagagactcacgctggcggtgaagaacgttcctgcggcggcggcggaggaggaggaacaggttaacatgactctgatttccaattccgacgtcgaaagccacgccgacgtccaaatccccgacaccgcgcatcaaattagcaccgattcat

SEQ ID NO: 30608 - DNA, 484 bp, Glycine max
gcatcctagtgatgacagaagacagtttcaaggtagcagggaaaggggatggttttctggcagccgagacttgaataggtcaacgtcaagagagagatggtgaacagcagttttgtgtggattaagagttatcttcaacttttgatgaccagaacctaatactactattttattacttgtcttttctaatcgttttgttcattttactccaggcaattggagcaacaatcattgagtactggcactaaaacttttgcctaatctgttattgcatctcgaaacattgtaaatttgtttttccccttctggtaattttttgggtgtctggatgaaggcagaaagccttgtaattttattaggactaaattgttattgagaatcttggaacttcctagttaatgttaatgtgatattgttctgaattctgatatacaattatttttcttaaaaaaaaaatataaatagacggccgctcgcgatctag

SEQ ID NO: 30609 - DNA, 304 bp, Glycine max
cataaataccgcggacacacattggatagggggcagagcttgaattgaatcatctcccacacccatcagccatcgccatctccgatgagatgttccttcattaggcctatcgtgggcttttatttgttgggctctaagactttacctacgtgggcttttgttataggcccacagaagccggcccatggtgtaaggtgaaagccgtaattcaactttctcaggggtgggtggatgggtgtttgtttcaattcgatttcttctcttctctgcagaaaatcgaatcaatcgatggatgctttaattt

SEQ ID NO: 30610 - DNA, 264 bp, Glycine max
ctttaaacagcttgaagcttctaattgattattgcttctactaattttttttttagcaatgtgtagtgttttatgaagtctctttcagttatcgatatagattcataggtccatgcaggactaagtgaaaaagagaagataagtatctgtagtacactgaaccacgagaagctgtcagctgaacttttgaggcatcttactcgaagcttggtgtttccttcagacgcaaaaccaagagcttatgttactagacaaagccgaatg

SEQ ID NO: 30611 - DNA, 329 bp, Glycine max
gtcttccaaatcaccaaaagctggaataatagccattgcggtcacatcataagcctcaaaccttgcctccccacattgaacgatccctgaattgattggtgttcatgaaatcaaattccttctggcaacaagaaaaacgaatcataagcaccacccacctcatcctttttttaacaaatggaaaaatcattatgctccacataacatctcgttgcggcattttattgaacacaagatgcacgcacattcttcatttccactacaaattgccttcaaattaacaatactttgcagtgagtttcaaaattgggggagaggtgatcgtcatt

SEQ ID NO: 30612 - DNA, 476 bp, Glycine max
agctcgatgctcagttaaacgaacccgatgccaccaccttttccacccatgaccctgtgcttggatacacagattacccatttcttcaagatatatagtcagtagaagtaattagaggtcacaaaatgaacagacttgtcttgcaaaaacccattaattaaaagccctaaaaagttaggttcttataggatttgaacttcattttagaggttcaaatttaatcttttttttttttggttcaactcacaataatatgcaacctacattggagtcacttgcgttgggtggaataatccgtttttccacttctaaaaatgaagttatgtttgacattcatcttgcttccactatcatcatccctcgatcttgacttgtataattaattaagtaccatcttttattatgacttttgtaagtgaatgtcattagatgaaacactagtctatatattatacataaagattcacttttaatcc

SEQ ID NO: 30613 - DNA, 289 bp, Glycine max
gggttggggagaaatcagctacagttattggtgccacttttcagtggtttttgagggatctaactggtatgcttggaggaatcttattcacattttaccagggatcaaatcttgatagctatgcaaaaatgtggcgattggttgcagatcttatgaatgaccttggaatgctaatggacctacatttctccgttgtttccatcagcttttgtatttgttgtttgcttaggaagcatatcaagatctttcactggtgttgcaagtggagccactagagcagctttgactc

SEQ ID NO: 30614 - DNA, 404 bp, Glycine max
aaaatgccttgcagaaggtaaaggaccagcttattttgtctgaatcatgcaagaagcaagctcagcaagaagctgaggagtccaaggagcaactactagccctatctgcaaaacttgaagagccacaaaaacaagttctggatctttgttctactggagaagctcgcgttcttgagctccagaatatcgtagaagaacgtgatatggcatgccaatctgagcttgagtctgccaaaaagcagctctcagttgagtctgctgccctggcctctgcaacgaacgaaattcagatgctcaaggcgcaacttgaattggtagctaattgtgagagtgtgcaatctcaacacgcagaatcagcagacattgagcttcttaacctgaagcagaacttgtccgaaacgctt

SEQ ID NO: 30615 - DNA, 242 bp, Glycine max
gaaagaagctgtagttttctaccctgcacctctcataggtcacttagtctccaccatagaactatgccagttcatcctcactcaccaaccatccctctctattcacatcctcataaccatagcaccctacgacacatcctccacttcccactacatccccaccctctccaccaccctcccttccattactttccacaccctccccaccttcgacccccccacaaacccttctctcttcctca

SEQ ID NO: 30616 - DNA, 359 bp, Glycine max
tctagagctaacttgcctgatcgcagtattctggataaaaaggatgaaaaagatacatcaaaaactgctgctatgattttacaatatgaatatgaagatgagtatgacgactcttttgatgacttgggtctaagtgtagcagactctggagtagaagaaaatgagacactgggcgaccaaataaacgcaaagtcagggaattcgtgggcaacagggggtggaaactctgtcaaaaatgcccctgagtcaaaatggggctccaggaaaaagccgcagtactatgtcaaggatggtaagaactacagctacaaagtggctggtgcagtagcagtggcaaattctgatgaagcttcgttaat

SEQ ID NO: 30617 - DNA, 356 bp, Glycine max
actcgagccgctcgagccgattcggctcgagtggatcccaagttagtaccaagttcaagacaacgctgatagcatcatcaacaccattgagagttagagatcttaaagctaaggtggaggcttcacaaaaagaacctctaattgggccatcttccatgacctctagaactcgagatctgaaagagaaaagagaaattactcatagaacaaccagggcctcaggatcttctcagagatcagtcgagtcaaatgctgccaagtatctaaagggacagtctttgaacagaagctggaatggatctgcggatacatctgtatccgtcaaatctcctacaaacgaggaagaagattcttct

SEQ ID NO: 30618 - DNA, 271 bp, Glycine max
aattatgttccatatatgtatgatttaaacaaattctgcccttataatacagttctgtttgctcatagtgatccatcaatcaatactgtgttgacagcaccaactgataaacctggagtggcattgcttgattttgtcattttcccacccagatggctggttgctgagcatactttccggcctccatattatcatcgcaattgcatgagtgaatttatgggcctcattcatggtggttatgaggccaaggctgatggatttcttcccggtg

SEQ ID NO: 30619 - DNA, 369 bp, Glycine max
gtagcttcctgctacagttataagcaaggctgctggaacattgatgtacagtaggagtctttttgaaaggtttcaaaaaagcagatggcccaacaatgtggttgtctgtgcagtatagaatgcacccccagattcgggatttcccttctaggtacttctatcagggacgccttactgctagtgaaagtgtggctaaattgcctgatgagccatactacaaggacccttgacttagaccatatatattctatgacatcagacatgggcgcgagtctcacagaggtggatcagtgtcttatcaaaacatacatgaagcacaattttgtctccgactgtatgagcatgttcagaaaacagtgaagtctttgg

SEQ ID NO: 30620 - DNA, 615 bp, Glycine max
ttctgagtggcgatcattaaaggttcaatgggatgaaccatcgtctattttgcgtcctgatagagtttctccatgggaattggagccacttgtgtctacccctcctacaaacccccagccatcccaaagaaacaagagatcgcggcctcccattctaccttcaacaatgcctgattcttctctgcaaggtgtatggaaatcaccagttgaatctgcaccattctcttattgtgaccatcaacatgggcgagatgtctatccatcaaccaatttcaattccactgcaactggttttcttggttttggtgggaactgctatgcttccaacaagtcaatatattggtccagtaggatggaaaactccacagaatctttttctcctgtagcacttaaagaatttggagagaagagacaagggactgcaaatggctgtagactctttaggattcagttacatgacaattctaattctaatgaagaaagtctaccaatggtcactttgtcaggaaggatgggtgatgatggcccccttccatctttggatgctgagtctgaccagcattctgaaccatcaaatgttaatcgatctgatatcccttcggtaagctgtgatgc

SEQ ID NO: 30621 - DNA, 453 bp, Glycine max
gaaacaaccttttccatgtgttcagttcattggaggggatggaggagatgttggattttacatgtttagatcagagaatgatgctaagaaaatgacagggtctagagagaccattcatgttccaaatgttgagcttctgagggtcacatatgaagtggagtctttgatgttcccttctaaccggaagatgatcaagtctttgtcattggaagcatcaggctcagatcggtttccagttattgatgttgcacgatgcacgccatctggtgatcttcgatttagaaatccaaaccttgaagagcttagatttgtctatgcattcagaaggccatttccctggtgcactccttacttcaggttgacagggaaagtggtccaaagtattcaacagtggtgtgttttgaaccttttatagagactgttgatgttcagtggcctccagaagtagccaag

SEQ ID NO: 30622 - DNA, 519 bp, Glycine max
cagtactgcactgcacgagtttcacacacactttgtcatttttattaccgcatttggagtttcttctctctcactcatctctctgaaggttctagagcacatagagagaaaaaaacccagtttgtgttttgagataatgctgaggaagaggaccaggtcaatccagaaagatcaacaccacactggtcaaatggcaatctctgataccaattctgagtctcatgctttggggagcaatggcaaaagcaactcaattttcaattcccctcttctgtttgtgggcatgggtcataagggcttgttggattctgattcagttaagagccccacttcaccattagattttggtttcctttcaaacctaagtaacccctttagaaccccaagttcattgtccaatgaggggcacataggagttgggactgtgccaaagtaggtctaagtattatagattctttggaagaatgttctaagttttcttggaaaattctccaggcttcagagagcaagaagactagt

SEQ ID NO: 30623 - DNA, 516 bp, Glycine max
aaacaacaacaacaacaacaaaaaaaagccctagaaaagattttggagaagcaattcctcactcctgaaaatctcatcctcttcttttacatttgttttggataaaacattttgctgatattgaatttttattttctcttgttttcgtttcttttcgacattttcttcttcttcttctgcttcggtgttttcagggagatagggataggagtaacaaagggagagtgcaatcagtttggttcttcgcttcgggactcgaatcttcgatgcctctctgttttttcttctctgccgcctctttttctgttctcaaattagggtttctgtgagagtgcctcttttctcgattctccgcatactatcatcattgtaagggaaagcgatttgcgtttggacataatgtcgccaaaatatcagagtctccacaatcgccccatcaatcagtggaaggttacagagctgaaagatgagctgaagaggaggaagataagtaccaagggtttgaaggatgatttg

SEQ ID NO: 30624 - DNA, 281 bp, Glycine max
cacctctctctctctctccctcctctcgtctctgcaactcccggtggttgagaaaccctaaccaccgttgaaacgccgttgtttcactcccaaacctcgctattcacgcgcgtttcccgccaccgttccgaagagaagtgatttccacacagcatacgatatgtaaatcttcttcaatcccgaaattgggagattcgtgaatcaattttcgtcagctcgtaataatttatagtcgttgctggttaaaggcctaaggaatgcagtccatggtctgtacattt

SEQ ID NO: 30625 - DNA, 262 bp, Glycine max
atccctggcaaaagcttttgttgtaattgcaaaagaaagtaataatctccaatttgcttgggaattaagtgcccagatccacaattcgcagatgctcctctcgaatgcagccactaggcgtcttcctttaacaaccacggaaacagaaagggctatccatgatatggcattattgttataccaggcccagcagctccattatgatagtgcaaccatgatcatgagattcaaagcaaaaattcaagctcttgaggaacagatg

SEQ ID NO: 30626 - DNA, 372 bp, Glycine max
ctcttctccaattttaaacgaaacttccatatttttcttaaatttatttgatcgttttgctcgtggctgaggagctcctttatgcagaaatggccaacacctacaagccaaagaacattctcataacaggagcagcaggcttcattgcatcccatgtatgcaacaggatagtgcgaaactaccctgactacaaaatcatagtccttgacaagctcgattactgctcaaatctgaagaatctcattccctcgcgttcatctccgaatttcaagttcatcaagggagacattggaagtgctgatttagtaaactacatcctcctcacagagtccattgacaccatcatgcactttgcagcacaaacccatgtag

SEQ ID NO: 30627 - DNA, 463 bp, Glycine max
ctttttgctagtacacagaagtttgataccctagttgactacaatcctgtttatgtgtcatctttccggaagcaagaactccagggtggggcaaggctgcttctaccaattggtgtcaatgacactgtaattccagtatatgatgatgaaccctcaagtattatagcttatgccttaatgtcaccagaatatcatttccaattaaatgatgaaggagaaaggccaagagaaggaaatgagttcacttcatcatatttttctgactcaggcaccttgcagtcattctcatctgttgacgaaacagcttttgattctcaaaaaagttttggatcgatagaggaaatgatattttccatgtctgggtctcgtaattcatcaatattggacccaatgttatatactaaggctatgcatgctagagtttcctttggagtagatggtccccttggcaaggtaaaatatt

SEQ ID NO: 30628 - DNA, 561 bp, Glycine max
ttgatgaactttcaatgctcatgtcacggttgaatttaagggcggactttccagaattctcgcggttctatgattttgttttcttcatgtgtcgcgaaaatggtcaaaagaatattactgtaagcagggcagtaactgcatggaaattagttcttgctgggaggttttcactgcttcatccatggtgtgactttgttgagaagaatcaacggtacaacatctctgaggatacctggcaacaggttctagctttcagctggtgtacccgtgatagtctggaagcatatgatcctgaaggtgcttggcctgttttaatagatgattttgttgagcatatgtacaggatgcaaggatcgtattatgataattccaacttccattgtaactgtggtgatccagaatctcagtcatgtgtttttgatgaccccctccctggactgagaagtttgtctggtctaaagaggaagttacccgaggacttgagcaaaagtgatgatatggattccaatgacatgattctttcaaattgtataagatgtagagctcatgatgcggtggatt

SEQ ID NO: 30629 - DNA, 354 bp, Glycine max
gagagacaggaaacaagaaaaaaaaaaaaacttagaaaagaagagggagagagaaagagaaaataataagaaaaagaaaacttgaaaactttgagggattgattagaaacagggacatggagattctcatcttccaatgatcccttcaaccccacaaattttcccgtttggatttggtgtcacagcttgattctccattgctgcgattccaacatcaacagctaatccaaacatctctttctttctctctctctctgtctctttgtgtcctctctttctctcttgcatctgcattgtcccttttcactgcataaggaggctaattggaggaaccccagaaggaaatttcggatt

SEQ ID NO: 30630 - DNA, 432 bp, Glycine max
cgtttattctatagccctgaagatgtgaagtgaggataggaacaaaatcaaattgagaacttttcttttcctcctctgttcttctgatttgaagtttgtccatgaatatttcctgttatatctaccttgcaaacttgcccttgagactttagtaaccttgggatatagaggaggattcaaatgttgctgcttctgcaaatgtttcacttcaaatgaaagcagacttcttatagattatttcattggtctaccccacttgagacttggactgtggtcatgtctcccattaaagctattttattgcaatgagttttagagttgctgctattaccttgctgtgagggcatgtatgttctaaacttggagatcatttctgaatgaacacaggattacaaatttaaatgtggtattgaaacagttcggtggccatgt

SEQ ID NO: 30631 - DNA, 488 bp, Glycine max
ctgtaagtcagtggagaagattaaatatgtccactcaaagtgtggtgaaggaaatggagcagtttggagtgctttattttagattgtttttaaaagggagatggttttttctggttgggagaggatataattgcagctgggacaaagacaaagacagttttcagatttgagattgagcaaataggtataacatggaagatctcgtaaactattcaaagctgtggaagctgaagttggcaattgcatggatgtggatttgaggataccttccagtctgttctgttttgtttttagtctgggaggtatgacaactattctcggtgttatgtaacaaagtctgttctatttttgtacttctttttttatacgccgtttttgttcttagttgggtcgagatcgattatcaggccctttgtactgaaaaacaatgtattcatagttctgctaatatgttaagtgtgattactcattttgatgtaaaacaaaaa

SEQ ID NO: 30632 - DNA, 419 bp, Glycine max
ctcgagaaaaatcacgagccaactcctgaggaggttgccagaatacatagccaatttgttgaagcgcttcaagatctatttgaacgacacaaagctcgagctggatatccaaaccttgagttgagaattgtttgatatggtcgtaacttcgacccatagtttcatgggggtaattacacttttcttctcttaggttaggctttatttgggagttttgaagatggagtggagtgattggttcatgattaattggatttgaatggggtaaggtaaataaatactgttgattgattgagaaaggagttatcttttgttgtcttagaagtcacattggtaattaatcatgtaaattgtaaacttccaattatgagtccgtgaacaatttatatcacatatatttataaatctgagattaattt

SEQ ID NO: 30633 - DNA, 402 bp, Glycine max
taaattgacacaagatccaaagtttttgtcagatattgaaggtggggtgttcaatttgacagcagaggccactcttcctgggaaagtgaccatgatcaagattttaaggcttaaggccaaaatttatatctcttgtggggtctctttcaaaataattgctgtggatgctagttccacctgcatgtccaaaatcaaattgtgactgcatgttaattgcaaaagagaggaatttctacacatgttgaaactaatatgctcttggtgggggttgggggaggatatatgttctcctttgcctttaaattattactctctccttttctttttatctttgtctcactggtttcattttatcttatttcaagatttttacgtaaaaattaaaaaaatgttataattttt

SEQ ID NO: 30634 - DNA, 359 bp, Glycine max
cctcgagccgattcggctcgatagcattttaggtgtgtcaattgacgctgcaccaattatacctcatgcgatggttggtgagctgcatatctgattgctggggatgcattggtggatgatcatgaatcacaggacctttcagaggaggaaataaatgtgcatcacttgttgagattggctaggatactttggctgcctgcttgtttctttcttaccgtttgtcaaacttggacgactcaattacaaatattattcattaaacttactctattcctcctcagtacaaagcccaaccctttctctgtctatgtatttgttgataagttgtgccaacgatatatgcaccaagaaactcgatt

SEQ ID NO: 30635 - DNA, 507 bp, Glycine max
ccctctcgtccgcttttgcgttatgaaactaacgtacaagtttgtacaacaacaacaacaatttctcttcacaccatcttcctccctctcaaaatcacaaacacacccacaaatttttatttcccagtcttgatttggttcactacttcacttaagtcattagtccatagtccatagagtcattattattgttattgttattttattatttgttacttgttccttgatagtcactattattgttgcataaaatagagcaacatgaagaacagaacatcagggtttctgaaggagatcatagcaaatctgagctcaatggccaagtcaaaaaccatggccttgaagtccaaaacaaacgccataagggcacgtttgatcatattctcacttatgaagaacaagaaattcttgatgagttccctctctgagaagttccattctgtgtgggggcaaagttcatctcaacaaaaggaagatcattgcttattggaagatggcagcaatgat

SEQ ID NO: 30636 - DNA, 617 bp, Glycine max
ttatttttatgcgctcctttggtaatgaccaggaggattttggtgcatggtgggggacacaaacaggtcgcacagggaaggcagttcattttgtaacattttacatgccactctggggtgcaattctgtataatggatttacatacttacaagtaatacgcatgctgaataatgcaacccgtatggcggttggtatgtcaggccaaacttttgtgtcagatacaagagataacatgagggctttgaatcgctggggatactatccactaattctgataggatcatggacttttggcaccattaaccgtattcatgatttttttgaacccaaccataagatcttttggctcacatttcttgatgttggaacggctgctcttatgggcctctttaactcaattgcttatggtctcaattcttctgttcgtagagcaatttgtgaaagactggacaagttctggcctgagagattaaacagatggctccctaacagtttaaagtacaagaacctacagcaagaaagtgaactagttttgttcaaaactgaagatcaataacagtgaatggacaaattgtgatcctccatgccaagtgacatttcttattctagtttacta

SEQ ID NO: 30637 - DNA, 475 bp, Glycine max
cagaaactgagccagaaactactaacactacctaccaccaccactcctctcctccgtttgagcagtgacggcgctgcttcctctgttcactcttctgtttcctccgtcaactccgttaacagcagcagttaccgttccaccagcagcatccgcgagatcgatctgatcccctccgacgccgtctacgacctccgctgcatcgccgagcgcatgctctcctccggctacctccgcgagtgcatccaggtctacggcagcgttcgaaaatcctccgtcgacgcgagcttccgcaagctccacatcgaaaagctcagcatcggagacgttcagcgcctcgagtgggagcagctcgagaacaaaatcagacgctggataaaagccgccaaggtctgcgtcagaactctcttcgcgagcgagaagaagctctgcgagcaaatcttcgacggcgtcggaactttcatcgacgacgcttgct

SEQ ID NO: 30638 - DNA, 472 bp, Glycine max
  unsure (1)..(472): unsure at all n locations
accagccgaaatccgcgaccctaaaaaggctgctagagtgtggcttggcacgtttgacacggcagaggctgctgctgctgcttatgatgctgctgctttgaagttcaaaggctccaaagccaagctcaatttccctgaacatgttcttcttcctcctcctccaatatcatcatcatcaccaccttgcaataataataataatcatcatagttattattatggttcttcagctcttgcacctcttgcaccaccaccacaacatgtttatgatcaaacaccaccaccacaacaacaacccttgctatcatcatcagcacaagaagaagggtttccaaatctaatgcagtacgcgcagcttctttggagtagggatgatgatgatctacagcgtattgcttcaggccttcatcaacatcatcatcacaatgaggctntttatgattcaagttcttcaactttgttctcatcaact

SEQ ID NO: 30639 - DNA, 450 bp, Glycine max
agaaaagaaaagaagcagagtggtaaacaaagagaaacaacaaaacccagaatctagagactaataacggctcttgctttgtgaatagcataccatagcaacaacaacaacacagaacacacaaagaaaaaaggtttcattggatcgtaactggggggcacttgtccaaattggaaaattcccgagtgattagggttttgatcggagggtgtgattgaaaggaagactgtgcttgttcattctctccgtgggggttgcgtaaaatgggcatgggctctgatcttttcaggggttcatattgaggatttagagctacggtggttgagcattcgcacttgcagattgcttaagatggtgtttaatattgcttctttgagcatggaagaagattgtctatattaataacagggaatcggtgatcaggatttggagaaccgttcttgggcacac

SEQ ID NO: 30640 - DNA, 552 bp, Glycine max
cagtcctgagtctcacattaaagctttgatgggtaaactggaatgctcaggtgatgcctccttacaaaacgcactggagcttgttcttggatatctaaatcaaatcccatcatatggtcatcgagaagttctgatcttatattcagctctcagtacatgtgatcctggtgatctcatggaaaccatccagaaatgcaaaaagagtaaaataaggtgctcagtcattggtcttgcagctgaaatgtttgtgtgcaaacatctctgccaggaaactggagggacttattctgttgcactagatgagtcccactttaaagagttgatcctagagcatgcacctccacctccagcaatagcagagtatgctactgctaatttaattaagatgggtttcccacaacgatcagctgagggttctgtcgcaatatgcacatgtcatgaagaggccaagaccggagggggatacacttgtccaagatgcaaaggtcgggtctgtgagcttcccactgaatgtcgtgtgtgtggattgacccttatttcttcaccccattt

SEQ ID NO: 30641 - DNA, 526 bp, Glycine max
ttccttttaattcaaccgcagcaatctccgtctctgccccacggcttacgttgagcgaggtagtggttagcattatatattttgggaacttgcagtatgtctcgtggatctgtgaatcggaaacatgttacacgtaaagatgttaagcgggtgcaggctcttattgagcactgtctgacacaaaatatgaataaggaagaagctgttgagttaataagtcaagtagaaatagagcctaatttcatcaaactagtttggcaaaagcttgaggaagaaaatcaagagttctttaaatgttattatgcaaaaatggcatggaagcagaaaatgatgctactcagcatattttcggaagaacaaggggaaataacgggcttaacttcaagtgcaccactccctacctttgatggttcacacaaccctgcagtttcatcccaagccaactgtaatgttggcttaactacaatcccatcatcattccctacctttgatgggttacatagccctgaagttttatcacaaccta

SEQ ID NO: 30642 - DNA, 359 bp, Glycine max
gagcatgctttgaagcaaacaatttctcatacagagctgtggaaatcattatcatgatctgaggagtttgagcaaaaatatttagagctaactaaaggtgccgctgacaattatcatggttcctggcggaaaagacatggtgtcgctcttgatggtgagatagcagctgtggctttttagcatggacattttgatcaagctgcaaagtcatatgagaaggtttgtgcactgtctgctggtgaaggatggcaggatttgttggctgaggtccttcccaatttagctgagtgtcagaagagtcttaatgatcaagctggctacttattatcttgtgtgaggttactttctcttgatgaagg

SEQ ID NO: 30643 - DNA, 537 bp, Glycine max
ccttgttgcaacaaggtaattggtaaagcacttgggcgggatgagataattaatgatgtccagtcactgcagcatcaggttgagttcctttctatgaagcttgaggcagttaattcgagattgagcatgagccctactattgaatgttttccttcaaaagaagtcggcactcagccatttgaccttgccggaataatatttggatcacaaccggccaggggatatgctcaaggatcacagccgggatggctgcatatgcagatagctggtggttttgagaaagcaacataattcgagggagattcatagggaatgacagatcaatcagtgtggttggttttacattgaaaaggaaaaaagtcacttgggctggttggttagcatggtctgctctattaacaacctagtcaattgatgcaaaatgttgtaaggtctgtatgttctttgtcatagtatgatatcgattgtaagaaatgcatctaatttcctcgcgcatcatctgactgggaatgtagtgctgcactatgttagcaattg

SEQ ID NO: 30644 - DNA, 456 bp, Glycine max
cggctcgagaaaaaagatgcaatcacttggtcaaaatgaggcatctctagcatgccctcaagggtgttgccctacttctttattgttcaaccctccaccaccaccaccacaatctcagaacacaacagccaaacctagaaacagttctgcagagtgtagacacagctttgcagccacaacagcatcctcaatcttcccaaacaccaaattcaccaaccatgagtcccttccttctctgcatgaatcattcagtgagttcaagaaagtgtatcctcaatactccgagactgatcaagtggaccatgtgagagccaaagaatattaccacctctctttctccaaccaatcatgccttgactacattggtattggcctcttctcctattaccaacgccaacaccaccatgacacctcaaaaacccaacttgcatcttcttcaacaccccaataatctga

SEQ ID NO: 30645 - DNA, 802 bp, Glycine max
  unsure (1)..(802): unsure at all n locations
agcttctgactacatggcttctggaggggaattggcttacaagcagctctgcagtgaaatcacgatagagtttaatgattgctcaaaaaaagtttgacacatgatcccaacattatcaattttttgaacttaaaaatatggggttttgtttcatatactgcctttgtttaacttttattttttttgtttttcctttttctgatttagcataggtccttgaaatggagtcactctttacaagccctgattactgccgagtcgatctagcacagctccttagagctattcaagatcaggaaaagctgaaactgcaactaactgccaccatccaggtgttaaagaaagccggtcgcccatctgaacgtctggtaagccatgagaattgcaaatttacaaagccagcagagcatgagtgtgttcatgttcaggagattacagaagcttctgggactgaagaagcagaagcagatgctgagtatgacaatgctctaaaagaagctattagaggtgtccaggatgctgtcatggccataaatgaacgtatggaagaagtcagatatgaaattgctgcccttgaagcagaatgattcttttccagcatatttactaaaacattattgacttcaattcacattcaatcatataatcatttgcctgtgaatgaataggttcagacccctagtgctaacaaatatttttatgggtttgcaacccgtggaatgttatatagaccccctaaaatgtagttcatgaattttgcccnnnnnnnnnnnnnnnnnnnnnnnnnnnnnnnnnnnnnnnn

SEQ ID NO: 30646 - DNA, 265 bp, Glycine max
catcgacaatcctaatggttccgacaaagctcgacctgagtgtgatctcatgatgtttctgctctaactatgtttgatttggatacccaacaacaaaaagagtgttgtcgtgttgttgtagttaatagtaataggactaagtaagagtagtggaaaacatgaacaacagcagtggcggaggaggacgaggaactttgatgggtttgagtaatgggtattgtgggaggtcgccattcacagtgtctcagtggcaggaactggagca

SEQ ID NO: 30647 - DNA, 433 bp, Glycine max
gacaattcttccattcatcaatgatattgaaggtggtgtggtgattggcctaatatgaaaataaagatgatatggaaggccctcaataacattaatcatttttcattcacttcagaatacagcacattgctgtctccttcggcaaatttggggttacaatcccctccaccgattcatccccttaatggtgtgttagaattagatgcggctttatgtagaacagatgctgagtgttcttttcgattttcctttaaatgccttttttgagaatgacaaaatgtcaaactctcttcatcaaactttttcttcacctgcatacgccttcattacagcaatattctctccacgagtacgacaaaatttgtccttcagcaacaaagttcttcattttcttaaaacctgacaaattttagatattttcgcacactaaaca

SEQ ID NO: 30648 - DNA, 271 bp, Glycine max
ggcagggaaggaggcaaaacaaattaaccaacaacaacaaaagcaacagatcgaaaacatcaaaagatggcaaacaaaaacgttgcgttgttgttgttggtgtgccttgtagtcgctgccggggttgaggcgaggaggccctacgccgttgtccgagatgaatgcttcggttattgctggcatggttgcatattcccctcatcatactgcaattggtggtgtgataaagtgtgcaaatacccaatagacttcggtgacgatggcctgaatc

SEQ ID NO: 30649 - DNA, 460 bp, Glycine max
ctcatgcctatgcaacagttccccgtagaaaacaaagtccataaagtgaaacataacatgctgctattttaaaaaccttaccttcaaacctaaatctcacagttccgagttctctaattcttgactccgttgggttcttaatccacttatatccccaactagaatcagaattactttcttttttcctttatcttgttcaattcattggcattcttctaaaatgattattatagcacgccttatgtttcttcttgcattgtttcttttactcgtaacaaatacaggccaaatggtatttgcacaagatgacaataatgttagagatgcttgcagtgtgacaaggttccaaagcctttgtgttcagacgctagggcatttttcccgcactgcaggaacaagccccagcaagtgggcacgcgcgggagtatccgtgtcaatacgcgaggtcaagaatgttgaa

SEQ ID NO: 30650 - DNA, 439 bp, Glycine max
gtgagctgcctgaaagtaaacagaaaaactctcagcgccgttctttcatgggattcaggaggaaaagtcagtccaatgatgaaagcatggataatgaactgattgaggatgtcagctctgagagtgaggatgataaagggcctgatagtttggaattagatgacaaagaaaagcagagggaaaagcgaaaaggtcttgatcttgctaccacgcttgaacgtatcgagaaaaacttcgtcattactgatccaaggcttccagacaatcctataatctttgcatcggatagcttcttagagcttacagaatatagccgtgaagaaatcttgggaaggaactgcaggtttctgcaaggacctgaaactgatccggcaactgtgagaaaaattagagaggcaattgacaatcaaacggaagttaccgtgcaactgatcaatta

SEQ ID NO: 30651 - DNA, 283 bp, Glycine max
gatttctactgtgtaaaaatctaatttgataaacggtgcattgttacaaactctaggcacactttacaagtttacatcaataacgattagttaaaggtgggctgtgattcacctcgaggccaataatgtagttagaatggggatctaatgggaatggccattaaataggaaataaaaattcattagtagacaagcactaaatcagcgttcacagtactacttcctgataaatggcagtaaaataaacagcaactcatggacacttcctttggatatatgaagc

SEQ ID NO: 30652 - DNA, 349 bp, Glycine max
acactatcagcatgccactgctgagccagaaaaacctattatagtttatactcgtaggtcctattccaggaaacaatgttcagacagcaatcttgttgtggttcctgaaaagccttttgtttgtgcagatgagaattctccggctgagcttgtgttgaactttgctgagctggattctgttccctcagaaatgcacctaaataagatttttaggcgatttggacctctaaatgaatctgaaacagaagttgatagagggagcagccgggctagagtggtttttaagaagtgtactgatgcagaggttgctttcagtaatgctaaaaacttcaacatatttggatcagtt

SEQ ID NO: 30653 - DNA, 489 bp, Glycine max
cacgttctgaaataaaattggcaaattcttacttttatgacaaggccatgtgtacgcttgcctggagacttttcctacctgaggaggaatttagtttggaccatccagctgctaatccccttgtcccaggccggggtcctcctttaaagttgatgcctccaacattgacagttgtggccgaacatgactggatgagggatcgtgccattgcttactcagaggagctccggaaggtgaatgttgatgcacctgttcttgagtataaggatgcagtacatgaatttgctaccctggacgtccttctgaaaagccctcaggcccaggtttgtgctgaggacattgccatatgggcgaagaaatatatctcacttcgaggtcatgaattctcatattgagtaggatatagcagatgatggttgacaggaagatatttacccaccccaactacaaaattagcttcagatcactcttttgctgctattgcatggg

SEQ ID NO: 30654 - DNA, 396 bp, Glycine max
atcatgtcggtgaaggtaattctagcagatgaggataacaagaaatggatcttctgtgaaaaggaagctgcctggaccaaatattcaaaacaggtcaatgtaggggacatttttgaagaaagagttgggttatgttgaggactatggtgcttttgttcatttgcgcttccctgacggtctttatcaccttactggactaatacacgtctcagaagtgtcatgggatctaattcaggatgtcagagatatcttaaaagtaggtgatgaagtgagggccaaagttgttggtattgattggggaaaatcaaggattaacctatcaattagacagctagaagaagatccactcttagaaactctggacaaagtaatacctcaggatggttcagctgatcc

SEQ ID NO: 30655 - DNA, 553 bp, Glycine max
attataacatcagcatttgctggcacccgaatttctaaatgggaagaaccaaacggagcaagaggttgttgggtcgtgtatagaacatttggtaacgagatgtttgagcttgtagcatatgagttgatgtcagccaatgatgcaccagaaagggatccaatggactggattcttgaagggagcagtgatgacgggatcagctggcaagttttggacaagcaaacctctcagttctttgaagaccgtttccagcgtagaacatacacaatcagttctgcaaattttccatgtaatgttttcagatttaggtttctggcagtcagagatattcagtctaattcccggctgcaaattggtagcattgacctctatgcgaaatctataggtaaattgcgagcataattgagcaaattcctgtctatatgtcttattaatataagaataagaaaaggaagattaaatttgtctataccgtaaaaggaagcctatcacggtggatgaaatgaggaggcaaaccaaaacttccttggcttgggtgtatagttaaacgcca

SEQ ID NO: 30656 - DNA, 455 bp, Glycine max
gttttccatgtaatgttttcaggtttaggtttctggcagtcagagatattcagtctaattcccggctgcaaatcggtagcattgacctctatgcaaaatctatatgaaatccggagactttaattacctcccgactaaattacgaaatagttaaggtctccttcttccgatgatccgaataattaagataaaagaaaaaataatctatatgaaatataggtaaattgtgagcatagttgagcaaattcttttgtctatgtcttattttataagaaaaagataattaagattaaatttgtctatgccttaaaaggaagcccatcaccgtggatgaaatgaggaggcaaaactaaaacttcctggcttgagattactgcccatacataacagtaatattatttatactggtcaatgttttattaaaaaagctatatatatgtgaccgcattgatttt

SEQ ID NO: 30657 - DNA, 582 bp, Glycine max
attcagtgcaagaggcattcacaggtttcactgacaaggaaagggaagacaaattcagaaaccgtgttaagcggtatgtgggcatatggtgttgtgtgccggatcacactcctggtcacatatattatgatatgtactgggatgagaaaccaggatggaaagcagttcctcctcaaacttctgaggatgatcatccaccttattgaaatcaccttagatttgtgttagttaaaacactgatgaatggggaaataagacacacaaatccaaaggagatttagtttctaactaattgtcaacaagattctatacttacacaagtgaagaatctgtatccatattgaaaatgtaagatattcttagagattagccaattagttcttgtgtaacaattaagaatttattttgttttgtatcatgttaccaatatattgcaaccaagagaaatggaggccctaaatttcttaagaggggtgcactttttggtctttgatgtcttggtagatattgtattgactgtaattaaatactggagacattcacttgtatcactcttttcttccatattttattttaaactga

SEQ ID NO: 30658 - DNA, 308 bp, Glycine max
agctagatacatatattgtatacaatgaaagaagaagggttacctcctctgctaagaaaaaaagaagacatggagacaagtctttacatcagacacctgatggcgctctattagatatcttacgaaatgctcatgatcttctttcacaatgtgatataagacttcctgagattgaagctaacgagaactatgttgattcgggaccaccatttctcatccttctgcatcctgctctcggtcctctttgggaagtcactaagcaaaaattctatggtggttccatatcagagggctccgagttacaaata

SEQ ID NO: 30659 - DNA, 268 bp, Glycine max
gtcggaatcggtcgaggtgcgcggtctcgccgcactgtcgcctccgccgcacgaatccgcgacttctacatggagatttctttccacttcgagagctccgtcattcccttcattaggtcgcattgcgccttccgacacttaccgcacttggaagcgcggctctaacctccgcgccgccatgacccttgccggattcgacggcccgcgcatacagcgttcggactaaacttttttgttcctcggtagaggttatgcctccgataatggg

SEQ ID NO: 30660 - DNA, 327 bp, Glycine max
  unsure (1)..(327): unsure at all n locations
cagtaacaaggacacaactgacaacaaataagnaattgagcatgagtaggataatgtaaattattgtgtactggcttgggtggctaatcatgcaacattaatcaggtgggaagatacatcctggaatttggcagggcaagagcatttaggacctctctgcccactgtatgtgtttttaataggggtattgcatttttattcccaccaacttctgaagctagagattcaatgtttgatgaggctttagctcatgcattaggtgctactgaattcttcacctggacatatcaattgtttagcttttgcccatataggtgctactaaatt

SEQ ID NO: 30661 - DNA, 285 bp, Glycine max
ggagcgtacgcataactccccgccgtccggacatttcttggttcctgaaatttcaaagaataccaatggctcacaggcgttgcctcttgataagagggaacctcatgaatcggaagtgccacccatctttcagttatgttctccatagcaatgaagggaaacgtgaatgccctgatgaaaagtcatcttcagctggcattagtaattctatccaaagaaggatgtttgggaactcagttgatggatcaatgcggtttgtttcctattctggtcaaagaatgcatt

SEQ ID NO: 30662 - DNA, 408 bp, Glycine max
  unsure (1)..(408): unsure at all n locations
gctgatatgataatgctgcctcctgggtggctgagtgaactcatatgaattggtcattattgctgcctggttcttaaagaaggccacatcatacaggcaggaaaatatgatgatctttgacaagccggaacagattttaaaactctagtttcagctcaccatgaagcaatagaggctatggatatgcctaatcactcagaagattcagatgaaaatgtacccttggatgacactattatgaccagtaagacatccatttcttctgcaaatgatattgagagtttggctaaggaagttcaggagggatcatcagatcagaaagtaattaaggagaagaagaaagcaaaacgctcgagaaaaaaacagcttgttcaggaagaggagaggngtagaggtagagtcagcatg

SEQ ID NO: 30663 - DNA, 496 bp, Glycine max
catattttaaatactttcctcctttccatttcaagaagccgtgtccacctcttcccaagatggaacctccaaagttcttttaccaacacccatggtttggaaactggcctccctctcattcatagactatcattgttctcggagtaacgttttttatatgtgcgttttctagcgtttttgcttcttatgttagcaataaaatccgaataacatccatgtcagtggatacagaatgtgagcagaagagcatggaaatgagagtaaaagagaaaaacaaatgatggagcaatgttgtttgagaaagtttgaagttaattttggtgaccaagttgaatgtgatgcgttaataagtgaaggtttctctgttagttttgtacaagtacgtataacttaaaaatgctttatgatccttatggtgaaaaaaaaaaaaaaaaaaaaaaaaaaaaggggggccccccaataattgacctcctcgcccggggatttattccgggcc

SEQ ID NO: 30664 - DNA, 586 bp, Glycine max
gactctctctgactcactcctaagaaagaacatacaaacaccgtctttctcttttctcgcgtgtcgtacggatcgtgcaattttcgtgaacgcgatcggcgaatgaaaatgaaaaagaaacgaaaggaaagcgaggccagtggacggtcgtcgaacttgccggatgagatttcgaagtcgcatcactccctggagcggcgttcgcggctgatcaaacggtgcagggaagacggcgtcgtggcgacggtgccgccgtcacgcggcgcgtcgttattcctaacgccgtcgcggggcttgaagcggaagataggttgcatcgacaaggccacgcagatgggaaggagcatgaggatcgaggacgattacgtgaccgggggcagcgcgatcgggcaggggaagttcgggtcggtgacggtgtgccgcgcacgtgcgaacggcgcggagcacgcgtgcaagacgctgaggaagggggaggagacggtgcacagggaggtggagataatgcagcacgtgtcggggcaccctggggtggtgacgctggaggctgtgtatgaggatgatgagcgttggcaccttgtgatggagt

SEQ ID NO: 30665 - DNA, 393 bp, Glycine max
cattaaccgctttcccttttggcagcacttgagaattgagaactccacgagatcctttcttttcctcagccaaagcacaaaaccaaaacagaaaccttttgatataatttctgttattcacttccttttagacaccacactaatccagattagacattgtacaaatgggttctctgttgttcttgcttttggttattgttcttccattgtgttattgtgttgatgctgcttgctctaatggaaactgcaaggtaaatgatgagtgctcgtctaatggtgattgtggagccggtctctattgcttctcatgcccacttggatatttaggctctaggtgtgtgagatcttccatcacagatcaattcaagctcacaaataactctctaccattca

SEQ ID NO: 30666 - DNA, 360 bp, Glycine max
cgcaacttgcctctgtgacagttggacgttctcatccttgattaccatatattcctgcactgggaatgtttcggaagctgaaagaatgttgaatgaaatgattgagtctggctctcagcctactatttttgttctgacatcgcttgtccagtgctatgggaaggttgggcgtactgatgatgttgtgaagacatttaatcaactcttggatttgggcatcagtccagacgaccgtttctgtggttgtcttctgaatgttatgacccaaacaccaaaagaagagcttggtaagctaaacgattgtgtggagaaggctaatccaaagcttgggtctgtgctaagatatttggtggaagggct

SEQ ID NO: 30667 - DNA, 384 bp, Glycine max
aattctttgttctttcttgttccattttcccaaacttccctcactctctgtttgctttctcaattttggaaaatgataacgtcgatagtggttaggaaggccgccggaaagcttgaaaagtggccagccgaggcgcccaaaacattgatggacacagttcttacgttagcagaagccataaggttcggttacgccgagacactgggcaaatggcacctcttggacttgccaagagccatcctttactctgccatggacaagggtaagaaaacagttgcagttgaatgcgctgaaagaagtgactgtgtacaactgaaagaccccgaattattaaaggagttatatgagctcaaaaaacgcttgacacagaccatgcttttcagc

SEQ ID NO: 30668 - DNA, 293 bp, Glycine max
attaaagcctccaacgtcgctctcaagatcctcttccccagcgagctccgtctctgcgaccgcgtcttcttcggattcgcctccgccgcggactgctctgtcatggacgtctgccgcggatcggcgattcagctgctgactttcgccgacgccgtcgcgatcgggagccggtccccggaaaggctgttccgaatcctcgacgtgttcgagacgctgcgtgacctatttccggagttcgaggctctgtttgctgatcagtttagtgtgtcgctcaggaatgaagcgattacgat

SEQ ID NO: 30669 - DNA, 466 bp, Glycine max
  unsure (1)..(466): unsure at all n locations
ggggtgatggctcacatgggcatggatcctattattaatgtcatgaatcttttggtggatctgaaattgtgggatanacatcttcaaatataagcttgcggcttgagcatacaagtctgaagttgcatatttattttatacacttctctgttattcctcttccacctggtttgtttcaatatatcaatatcaatttgggcataggtggcatagactaaattgtttaataatagttgggtaggttgtctttcaggtcctggagtaaggtattaataagatttatatggaatgggctagattttctttaacaacttaggtatgatgagatcagggacttgtatttgaggatgctttgttgattgtacaatattaatctttgactcatcaaatataaatttggtgattggaaagtttaaaggactattggaagcaaaaaatctttccagtgatggatttatctttttat

SEQ ID NO: 30670 - DNA, 482 bp, Glycine max
  unsure (1)..(482): unsure at all n locations
ttggtgggtgaccctgctttactggagaagaaaattgatgcaattcgattgggtggtccccagaagcttcagattcctgctaccgggtgattgctgattttgatgctacgttgacaatgttttgggttaatggaactcgtggccaaaccagtcatggtcttttgcagcagggtaatccagattataatgccaaaaggcagcagttatatgaatattaccatccattagagttntcgccaaatattggacttgaagagaaaacaaagctcatggaagagcggtggggaaaggcacatggtcttcttgttgagggaggacttacatatgactcaataagacaatcagttgctaatgccaacatagctttcagggaggggtgtttgtgaactttttgagtttttggagttgtaattttcaggaaagagatgctcctgtgttgatattctcagcagggcttgctgatatcattgaagaggtcctaa

SEQ ID NO: 30671 - DNA, 250 bp, Glycine max
tttgttgtctttcatgctctttttttttaccttatatggcccttctatctggtgttgtagtttgtctctttaaagaatcagaatggtaaagttacatttggagatttgccgcctttgatggtgaagctaaacgcattcagagatatgtacagtgaggatgagattaggggtatcttgggtgaatcaggcactgattttaccaatgacattgattttgaagccttcttaaaggttagttatttggtatctt

SEQ ID NO: 30672 - DNA, 447 bp, Glycine max
agtcctgtcttgggcatttgggagtgtctttgtttcccttcttgccctgtatgatatgagtgcttgattcgttgtcttcaaatcctgcaaggccagaggaagcaatcaactcaaacgacaccatgtctggaactatgtctcctaaaggttctttcaagaagaaagcaatcaatgcctctaacatgctgaggaattctttgaccaggaagggtaggcgaagcagtaaggtcatgtccgttgaaattgaggatgtccacgatgctgaggagttgaaaatagttgatgagttccgtcaagctcttattttggacgaacttcttcctgcaaaacacgatgattatcatatgatgcttagattcctgaaggctaggaaatttgatatcgagaaaacaaagcacatgtggtctgaaatgctcaaatggaggaaggaatttggtgctgacacca

SEQ ID NO: 30673 - DNA, 434 bp, Glycine max
ctgcgatatcttcctggtgctattgtggctgcggttcttgggatcattattgacatgcctgttatatcagttgttgccatatttaaaggcccttacatgcttttcaaagggtggaagcgtttgtttcatgatctcatgggtcgtgaaggccctttcttggagacaatatgtgtgccttttgctggccttgctattgttctgtggccactggctgttgttggggcagttctggcatctgtgttagccagtttcgttcttggtggatatcgaggccttgggaagcaggatccttctttcatgtcaagaatatcattgctgtattcatcataaagggacacagctgcaacaatgtaccccaggcctcgatatcgaaaaattactgaattgaaattgtcaaggacaccttctcgttcaatttccctcccaaaaacaaa

SEQ ID NO: 30674 - DNA, 424 bp, Glycine max
gcagagaggctgtgtcaaatggctcttgacattcatatagcaaataattcagctccatctcttgaagaggcagctgataggaggctcatgggccttatatgtgagacaaagggaaatcatgaaacagctcttgagcatcttgttttagccagcatggcaatggtaagtaacggccaggaagcagaagtggcatctgttgactgcagcattggagacacatacttatccttgtctcgatatgatgaggctgcctttgcatatcagaaagcgctaacagttttcaagaccagcaaaggtgagaatcacccagcagtgggattagtctttgtacgtttggcggacctgtataacaggacagggaagataagggaatcgaaatcatattgcgagagtgcacttaaaatctgtgagaatccaatgcctg

SEQ ID NO: 30675 - DNA, 275 bp, Glycine max
ttcggctcgccgtcgcctgcttagattctgctttaactccacaagaactagttcaccttgcaatagactgcttacctacatcttcagaaaaagcacataatggaacaaccccttcgttctctcgttggaccataatcgattattccagagcctacagctcgggagatataacaccactcatggctgctgcccgatttattgccgctgttaatgaatcttcaaaacctccactccgaatgggattttttattcactacagtgctgatgatatacta

SEQ ID NO: 30676 - DNA, 738 bp, Glycine max
atgaagacaagcacggcatgccgagcttttaccatcatgttgctgccgcccactgccatgaccatggtgaacatcatgatcaaactgggcactcttgtcatgaagatgctccacttgttcgtaaagagcatgaccatcgccatattgatcacaatatggaagggatatttttgcatgttcttgctgacaccatggggagtgttggtgttgttatatctaccctgttgattaagtacaagggatggcttattgctgatcctgcctgctcaatttttatttctattttaattgtatcttctgtgatacctttgctaaaaaattcagcagaagttttgctccaaagagtgccaagggcgcatgagcatgagctgaaggatgccttaattaatgtttcgaagataaggggcgtttatggcattcaaaagtttcattcctggaacttcacacacacagatgtagttggtacgatgcatcttcacgtgtcaacagatacagacaagacatccgccaagtcgcaggttttgcatctgttacgtaatgctggaatcaaggatgtacccttgcaggtggaatgtgttggataatttctttcaaaatagtttcatctatgactgttgttgcaagtggaggttgtccacagattactcacacactctggttggaacagagattcaaggttccttggtagtgtcaaacagaacgcttcttaatatttccacatcaatatttgtctgtttt

SEQ ID NO: 30677 - DNA, 121 bp, Glycine max
caaaagtttttgaaatgttgtcaccccttcttctatttctatgcctaactcttcctgtggatgtcgttgtccttctgcaaataccgtaaaaccttcaggaatccaccacttctaccaggtc

SEQ ID NO: 30678 - DNA, 371 bp, Glycine max
atcagtggttcacagtttgcagcaatccttccactggctgtggctcacacaatgggaaacctcttgaccaacattagtcttggcaaggttgctgtatctttcactcacacaatcaaagctatggagcctttcttcactgtagttctttctgcccttttactgggtgagatgcctactttctgggtggtttcttcccttgtaccagtagtaggtggagtggcactggcatcaatgactgaagtctctttcaattggattggattcactactgctatggcatctaacgttactaatcaatcgcggaacgttttgagcaaaaaactgatgactaatgaagaggcaactttggacaatatcaatctctactcagt

SEQ ID NO: 30679 - DNA, 376 bp, Glycine max
gtggcttatgacaatatgagcccctccgtcttcctcctgtggcttgtcattatttctgtcctcgcccactctgccctagcttcaatccctctagcttatttcttagactgtgggggcaccaaagaggtaacggtagacaatctcacatacattcctgatgaaagttacatcaaggtgggcaaaaccaccaccatcaacaagccagacttgttgccaatactctcaacattgcgatactttcccgacacgtcggctaaaaaatattgttattcattgcccgtcattaaaggcagcaaataccttgtgaagacaatgtactactatggaggttttgatggaaggaataagcagcctccggtgtttgatcaaatcattg

SEQ ID NO: 30680 - DNA, 312 bp, Glycine max
acagcaggtggccatggctatactcgtggatgataaagacttccgctcgagggggagactaccatgtggaagagactcacacttgagggggagatgtgttgggttacaagtgtgaggtgaagtcccacatcgggtagaagtggaaaggttgagcaccatataagtgaggagaagacccataaacctgagccttaaggttttgggttagagtgtggtgtcaggcctccttatgtggtggcttgtggtccacaggtgtacttctcgaatctccccaacaggtggattggaaggggtattcaatccttgtcaagt

SEQ ID NO: 30681 - DNA, 457 bp, Glycine max
aaaggcttaaaaatgagcaagtctttgggtaatgttgtggatccacgtttagtgattgaaggaagtaaaaatcaaagggaatcacctgcatatggagctgatgtcctccgactctgggtttctagtgtagattatacaagtgatgtgatgattggcccacagattcttcggcaaatgtctgaggtttacagaaagttgcgaggaactttgagatacctcttggcaaatcttcatgattggaaaacagaatacactgttccataccatgaacttcccaggatcgatcaacatgcactttttcagcttgaaaatgttgtaaaagccattcaaggaaattatgaaaattaccagttttttaaaatatttcagattttgcagaggtttgttattgttgacctgtcaaatttctattttgatgttgccaaggatcgactttatgttggtggatcaacaagtt

SEQ ID NO: 30682 - DNA, 285 bp, Glycine max
gcttgagggacttttccatttcccgagcatcagttgagtggggcattcctgttcctgatgacaagacccagactatatatgtatggtttgatgctttactaggctatatatcagcactatctgatgatcaggaacaacctgatttacttaaaactgtttcttcaggttggccagctgtcactgcacttgattggtaaggatattctacgcttccatgctgtttactggccagctatgctaatgtctgctggactaagccttcctaaaatggtatttggccatgga

SEQ ID NO: 30683 - DNA, 426 bp, Glycine max
gctaccctagggtcgtggattggttccacgtgtaccaggtccttaaagtccccgaatttaacgaaaccaatatgcagccgaataaccttcaccgcaaagtttctctctatttgcattccctcccttcaatagaagacgctgacttcaccaatctcataaccgctaatgaccaaaccgacatcgttttgcgcctcgacccgaaccaaaccatcgaggaccgcttcctcggggccacactctattggttcaaccaaaaaaccgaaccgaaccggatttcctccttcgttctccaaatcagaaaaaccgataaacgccgcatcctccgccagtacctccgccacatcgacaccatcgccgacgagatgaacaaccaaagcaagcgccatttacggctgttcatgaacgccggcgccggcggaggaacac

SEQ ID NO: 30684 - DNA, 704 bp, Glycine max
ctgataccaaatatagaagccaaaattgtgaacccagaaacaggggaagccatgtttcccggtgaacaaggagaactctggatcagaggaccttatgttatgaaaggttattctggtgacccaaaagcaacttcagcaactttggtggacgggtggttaaggactggggacctctgttattttgatagcaaaggtttcttgtatgttgtagataggttgaaagagttgattaaatacaagggctaccaggttgctccggcagagctagaagagttactcctatctcattcagagataaatgatgctgcagttattccataccctgatgaagtagcaggccaagtgcccatggcgtttgtggtgagacaacctcaaagttcccttggcgcagcagaagttattgattttgttgccaaacaggtttcaccgtacaagaaaataaggcgtgtagcatttgttaattccatacccaagaatgctgcgggaaagatactgaggaaggacttaaaactggcgctctctaggttgtaatatgcttcattttcgttttataagtggtgtttgatttagtcttttgctccaaatgaaaaaaaaaaagaagaagcaatgcgtgtgttcagtttaagaatttatatgtaatgaaagaccttcttttgtaaaatagatcttgaactttatcaaatgatgtagtatagtaacttctc

SEQ ID NO: 30685 - DNA, 289 bp, Glycine max
aaggtttaattattcgttttggacctaccaacaaacaaacagtgaagcctttgtttttattaccttacttacacctctctatggtctagaccaaataaaaataaatgtctggaaggtaaaattaaatgaagaagcaagcagccagattatgatcaaatggtggcatgtgatcatttgttatacaaccggttctttgaatgattatttgtaggatggatgagatgtccgcgcctccttctgtgcttaagctgacactctccgagtggagaacattcacaagtgagtgagg

SEQ ID NO: 30686 - DNA, 385 bp, Glycine max
gagatgttgactgcctccaatcttattcctggtgctgtctattggaccattcggagtattgtgtcctgtgcatcgcatattttaggcataactggcttgggtcaaggatatatgacatcaactacagagacttgggagctttccagtttggcccataagcttgataacataaatagtcaccttcgaaagcaactcaccgtttgtcgtcaccatttagatgataacagacagtgagaagcatatgcaacacttcggctcctttttgagacaccccatcaagataattcgaaggttctcaaagctatgttttgcagcaaggatgatccgttgccactgtttgatggttcttccaaacaaagggttaattttgaggtgctgaggagga

SEQ ID NO: 30687 - DNA, 558 bp, Glycine max
gtcagaactcgtctgaaaaacctgataagcgtttcctttcggggtctactccagatatctttacctgtggaagtgatatttgtcattgcaggcagatatatgtcaagggccaaatttgtgagagtgatcatatttgttatgatgaacatggagatgcatgtgactgctccaatttccttgatgtggactggctttcttcttctggaaattcttgtgaagaggaattgcttgaaaggtcaaccagcatctcctcggagaatattgcgaatgaactaataactactgagacatctgcaagtgaatctggctccagcattaaggtcagtatatgttgttagttgcagaatatcattacagaataacataatttgcttccactaaggaaatatcgttgacttgtagttagttaagaagaaaaaggcctttctgtatttcttttaagtcctatgaataagtatcaatgacacaattacttgtgaatttgtggtcagaacttagaacatctacttgacaatgcaagtattgggaatctagatttggttgtcctagtttcagcaa

SEQ ID NO: 30688 - DNA, 395 bp, Glycine max
gttttcactaggtcagaaaaagggatggtgttttacatgtgagtttgaatatctaattcagaaggcgaaagaagggatttctccactttcaccaattggcatattatctaagatacacaagattggaagccatcttgggcgtgggagggaagaagatgctcatgaatttttgaggtgcgtggttgatacaatgcaatctatttgcctcaaggaagttggtgtttcaagtcctttggcagaagaaacaactctagttagttacacctttggaggttatcttcgatctaagataaagtgcttaagatgcctggggaaatctgagaggtacgagagaatgatggatcttactgttgaaattgatggggatattgggactttggaggaagctcttggac

SEQ ID NO: 30689 - DNA, 277 bp, Glycine max
ctttgcactcttccatgtgacatctctaattaaagttgcttttactactaaactcgaagtactttcttagtggcttcactgagaattttgaattctcagtctttttcttttcagatcacatctcagatccatttttattttacaaacttttgggtcctctcccccattgtcctaccacacctgctccacattactgaaattctttattctcatcataattcccatcaaaaaatcttttcttgcaatcattatgccatgacaaatagcttttttgttt

SEQ ID NO: 30690 - DNA, 450 bp, Glycine max
ccctttttccaaaattaaaaaaaagcagtttgttccacaatggagcttgtaagatgtcagcatttcctcattgcgaggggtaaggggttcattcagccacagatgtcagcatttcaaatagttcttgactgaagttcttaaaatggttttattcaaggtgacctgaccttttgttaatgaatgacccttttgaaattcacggctaataggttgttgtcctttttttttttttttttcctggaaccaaatattttcagagcattatacaactgaggcctgtatctgcgcattgaatagaagataatccctgcttaccaattttctttatagtgcttttacttattacggaattttatggagcccgaggtagtgttgtacccttgtgttgtttctttcatgaaatttgctatggcaccataggagaataaatgtgttcaaaaaaaacaaaaa

SEQ ID NO: 30691 - DNA, 313 bp, Glycine max
gatcttgtgggtaacagtgaaagatcgtttttttttccgtcgctttttcatcgaggatgtctctcaagatctgtctggggagtggagcttgatttgattattgatattaaggaataaaatctcattcaacacactaaacaatacggattttgcaaatgctaaattttggaaggtccagaagtcagtcaagggcagccagagctacaacaatgggaggcatggattatgcagattcaaaaaagacgggcaattttgttgggaaagtatttcttgctgctgcattaacaacactgtgcataatcatgatcaagcg

SEQ ID NO: 30692 - DNA, 338 bp, Glycine max
  unsure (1)..(338): unsure at all n locations
cggatgcaatgcattgtattgaatccggtggtcagtctcccaacttcaagttctttttctttgctcagaaagcagaagcagcatcaatgtatcttgtagagtgtataatcaacacatcgtcagccaagtcacagattaaaataaaagctgatgaccaaagttcatcccaggcattctctactttattccaatcagccctgtccaaatttggtttaccttgaatctttatggtgtcttcagagcttacaaatcggcagttatgaaattttgcaatcctagaatgattatataagggaatggagaatatcgactccatacancaccccccccnccccccc

SEQ ID NO: 30693 - DNA, 367 bp, Glycine max
cagatgtcctgttcgagccattatttctattacaaaaacatcaccacataagctgggatttgatttgcataatcctccttcccctccagcatgtaatacaacttctggactgacctggattcaccctaatgtaaatagttcttccaattgcttggttaacacatcaacccatgtttctgatacaaaaccatcaccacataagcttgggtttgatttgcaaaatcctccaggtctgtccagaagatgtattacaagcaggaggggaaggagacaccctgatataaatagttcttccaattgcttagttaccacatcaactcatgtttcttctacaaaaacatcaccgcataagctgggatttgatttg

SEQ ID NO: 30694 - DNA, 494 bp, Glycine max
aaagaatataatgctcaatccaaggacaatgtaattgcaattatgcttgataccaagggtcctgaggttaggagtggggatttgccacaaccaatcaatttaacaactgggcaggaattcacttttaccatcccggaggggtgttggaactgcagattgtgttagtgtgaactatgacgatttcgtcaatgatgtggatgtgggggacatgcttcttgttgatggtggtatgatgtctttggtggttaagtctaagacagaggattctgtgaaatgtgaagttgttgatggaggagagctcaagtcaaggagacatttgaatgttagaggaaaaagtgcaacacttccttccatcactgagaaggattgggatgacatcaaatttggagtggataacaaagttgacttctatgctgtttcttttgttaaagatgcacaagtagttcatgaactgaagaaatatttgaaaagctgtgatgctgatatacatgtca

SEQ ID NO: 30695 - DNA, 261 bp, Glycine max
gagttcacctctaatttagggttcactttgtatttgcagtagcacttcctcgcgcgccactatttcccgccgcctccgtcgtcgtcaacagcaatggcagactcatcttctccgccgacgaaccaactcgctgccaccaccctcgacgacgttcccaaagccaatttctccgaccgcgtccccattcgatccatcatctcccgccccgacggcggctcgggcctcgccggcagcaaggcgcgcgtcggcggctgggtgaag

SEQ ID NO: 30696 - DNA, 565 bp, Glycine max
aaggttgggtttcgctgctttgaccttatctatcttagcttccgtgcctcgtcaagcattggcatcgagccatggctttcatgctagaaagatctttccagttgaaccgtcatcatttaaaggtttatgctcctctgcggtcactattcatggctacgagtgtcaggaacttgaagttactaccatagatgggtacattcttagccttcaaaggatccctgaaggtcgatggaaggttagtggccgtgagactatgaaacagccagtgataatacagcacggagtaatggcggatggaatgacatggcttatgaactctacagagcaaaacctgcccttgattctagcagataatggctttgatgtgtggattgttaattccagaggaacaagatatagccgcagacacacctctctggacccctctatcaatgcttattggaattggtcctttgatgaaatggtgacttatgatctgcctgctgtttatgattatgtgtccaaacaaactgggcagaagatagactatgtgggacattctttgggaactttggtagctttggca

SEQ ID NO: 30697 - DNA, 543 bp, Glycine max
agataatcactttcaggatttacctaagatcagtagggggttgtctcaactaagcttgttggatagagacagtagacagagtagaatgtctctccaacaacttggggtgatccgaagccaacgccaagtttggagacccatcagagggttgcctgaaacctctgtggctattcttcgttcttggctcttcgagcactttctccacccttatcctaatgattctgaaaagttaatgctggcatctcagacaggtttaactaaaaaccaagtttcaaattggttcataaatgcacgagtacggctatggaaaccaatgatagaagaaatgtacaaagaggagtttggagagttttctgaagactccaacccggctggtaacaactacttgacgagggaagataccacggattgtgtagaggattgaatcaaaagctccagtgaacaaaaaacttattgtttgacaaacatgggcctttaaatgcttgcctttttcctccaaaatcgagagataaacattatgtaacatgacaagatgatgagcca

SEQ ID NO: 30698 - DNA, 355 bp, Glycine max
caatgctcctcagctgtcaacaagtgcagggcacagtagagaagcttctggtgaattaaatccagggccagaaactgctggtactacttctgtggcatcagtgcatagagaacctgagttcccactccgattggagacaaggtctcgaagtcaagccatttggaggcggccatcagagaggcatgttcctaggatagtatcttctcctgttgttgaaacaagagctgatctttctgctattgaaacccagggtcggaatttgggtgaagggttgaagaactccgatggtgatactccaagggaaggaacagcaggacttcggcttcctggtaaggaccatttgggttatccgatt

SEQ ID NO: 30699 - DNA, 312 bp, Glycine max
gaaggatctcttgtatcagagatacatcacgaggtcttgaacgcactattcaatttatgcaagataaataagaggagacaagaacaagcagctgaaaatggaatcattccccatttgatgctattcatcacatcaaattctcccttgaaacagtatgcattgcctctgctatgtgacatggctcatgcatctcgcaattcaagggagcaattaagggcccatggcggtttggatgtctatttgaaccttcttgaggatgagctttggtctgtgacagcactagactctattgctgtttgtttagcccacgac

SEQ ID NO: 30700 - DNA, 425 bp, Glycine max
cttccccaaccttccttgaaatttcaaaccctaaactaaacaaaactattaattcccccatcaacccctcatctcatcactattattatattcagataataataaaaagaaaaaaacatcactcaaactcactcattttttttctcaacttctctttctttctttctctggctcttaaaaatgggcacaccaaacccaacccaacccgacgatgggccctgacccacttcgccggcaatgggaaagcccggagaacaccaccctctgccctcctactccgccgccgaggatcagcggcggaatgcggcgcctccgccgggatgcgccgtcggactccgatgccttgtcgtcatgcttttctcggtcgcggtttcctctccccactcttctggctaccacctttcgctcacttcgcagatcccaag

SEQ ID NO: 30701 - DNA, 427 bp, Glycine max
cctcacgcgtccgagttcttgaggctgttccttctagatctacatgcattgccaatatcaaattgtctaacatcacacacaaaaaaagaggatagtaagagtatgaatattgaataataccaaactagcgttgttcattttataattcatacacttaatcacttactattccaacgcttgtgctgggcgcgcaacatgtttctctcaaacaagcatgttgatgttacctttcttctgttcctatttatgtttgaaattggatcatcttcagcagcacccgtttacaacgctaattactgcccaaacaacacatcgtacaattccaacgtaacattccaaaccaatctcagagtcctcctcgcatccctcgtctccaacgtgtcccaatctgacggttcctataacttcgccatgggaatggggacca

SEQ ID NO: 30702 - DNA, 408 bp, Glycine max
tgtcactgaaatctgctacatctagagctcactgatatctttactaacaatcaaccggccacatgtattgcaaaaagcaattcaatttatgaatcaacaaaatagactgaaggaaaaagctgtcatcaaattgtaattcaatcaaatgctgatatagcacataatatcagctaccaattcctcttaccttgtctacagtttacttgtacttttattagtctacaattttttgcttaaactcctctaggtttatctgtagtgggataaggcttttattgtttgttgtttattccactaggtttatttcctaacattaaagattaggtttatactgtataactcaaacaaattgcctttgattttttatttttaggtggataatggatatatagctagtcgatttctatc

SEQ ID NO: 30703 - DNA, 383 bp, Glycine max
acaaagcattgttagcgccagaggattctatagaagacgagagttgtagccttagtgaggtggaagaagcaaaagcagtactaaggctggttcctatttgggctacaactctggtttatgctgtggtgtttgctcaagttcctacgttctttaccaagcaagggattactatggagagaacaatatttcctggctttgacatacccgctgcttctcttcaaacgcttgtcactgtggccattgttctgttcagccccatctatgaccgcctatttgtgccaatggcaagagctattactggcaaaccctcaggaatcacaatgctgcaaagaattgggacggaatatctatatccatatttaccatagtatttgcagcccttg

SEQ ID NO: 30704 - DNA, 350 bp, Glycine max
gcttgctatagggtttaggttaaatactttgagagtagtctggttattcagctctcacaaatactagtagaaacaaaaaccgcggaagcagccatggccgaagcagaacacaacgatcccacctcgccggagcgcgaggaccaaaccaaaagcaacaaaaagaagctccgaaagagaaaaagacctcaaaagaccgagcagaaacaagaggaggagaagaacgatgcgaacattgatagcgcccaaacacaaactgaagatgaaggagagaatcaagaagacacaaatgtgaacagcaacgtctcatctggaatcatgagcaccgagtctttctcctctctgggcttgtc

SEQ ID NO: 30705 - DNA, 325 bp, Glycine max
atcttgatgctgaaaaagagatgatgtctcaatgtgtggctcttcttggaaaatttattgctgtccgtgaaccaaacattcgatatcttggcttggagaatatgacaagaatgttgatggttactgatgtacaagatatcattaaaagacatcaagctcagattattacctcattgaaggatcctgacatcagtattcggaggcgtgctctagatttgctttatggcatgtgtgatgtttcaaatgcaaaggatatagttgaagaactactgcagtatctcagcacagcggagtttgcaatgcgtgaggacttgtcactaaagca

SEQ ID NO: 30706 - DNA, 363 bp, Glycine max
ctcgagccgctcgagccgattcggctcgagctcgagccgtttaaaactctctctctctcaaattattcgaaatccaaaaaacaaaaacaagtttcttattataaaaaatgaaacaaatagaaatggaaagtaacgcatcagcactagcaaagaaagtttggagcatggtacgtgtggtgttgttcatgcttcgaaaaggcataacaaaggggaagctcatgatggacctcaacatgatgctgaaacgccgcggcaagctcgccggcaaagccattgccaacttaatgtcctacaaccacaaccaccgtgggtcccacaagtcgcaacttcggttctctgctccaagggagtacgagttcagct

SEQ ID NO: 30707 - DNA, 304 bp, Glycine max
ttgaccttccccacttctgatcaaaatcaaaccgcgaaaaccctataacactacatttgagacaagactaaaaaatgcattcgtgcattcctcagcaccttcacttggcttcttccctaaaccccaaggcgtgtaattctcccctacgcactttgaggctccgtgctgcttcaaccacacataatcacataccagctgctccagtttttctgcccgatggaccatggaaccagcttcctggtggagttactgctgcggagggattcaaagctgcgggaatgtacggaggtttacgtgccaaagg

SEQ ID NO: 30708 - DNA, 431 bp, Glycine max
attgatctctcttttggaatttacttaatctttttctaaacctgtatttaatttaagatgtatgtctatattttctgatattctgagttacttcctgtgcacagattgtgctgggagaaatttgggtggactggccagaaagcagatgaattgatcctaccagtcttaaaggagtataacaagcgtgagactcaattgcggttggaagcattttacaattttaatgaaagatttgcaaaaattcgtagtaaaagaattaagaaagcggtaaaaggaatcactggttagcagccttcagatttgatagatgattctgcagaagagttctccaagagtaggaagactgggagagaacctgaggatatcacattggagacttcaaggggaatagagggaaatcttgagggtagaaggaaatcaaaaattaaaca

SEQ ID NO: 30709 - DNA, 382 bp, Glycine max
gaaaaatccaagtttaaagcttcttcaacaaagaagaaagacaagactccagccaagccatctgcttcattgtcaccaggtggtgaagcatccaaattgaactacataaaggaaaaacttcagggtctgacctcaatgctagaagcatcggatgctaaattacctgatatcaaggcaaaattagagagtgagatgaaacgccttttggaggatgtgaacagaatggttgaatcttcttcctaaataacgcatggaatactagcaattgtttagctagtaatcagggtaggtttatgatatgtcatttccatttagcgggactgtctttatttgaggatcatttatttgtctcatttctgagcctagctttaagaggtaaaat

SEQ ID NO: 30710 - DNA, 274 bp, Glycine max
gcaaggaggctgatataaaaagaagtgctgcgctttcggccaccaaatatgctgaagcttgtcaggagcttggcttacaggggcaaaatgtcagagtagcactcttgcgagacagcactattacttccgagcacgtttagcaaaattctggatgttgtaaacagtgacaacttgtcaagggcaattgagtattattccaattttgtcagggatgctcacattgaaaaggatagatctttgggagacgtactacaaaacttgaagaatatgcgcg

SEQ ID NO: 30711 - DNA, 756 bp, Glycine max
  unsure (1)..(756): unsure at all n locations
caaacaggcaaatttctcggatctttttccctcccacgttttgccgcggtgatgcggcaaactcacggaaatatgtcacgcactcgtatcgccattcagcgcttccgccacacctacaccgcgttatcatcatcagctgcacttactcgctcccaattccaatgctctcaacaacatctcacgcgcgcacccctcctcttccacgctcctcgtcattattcatcttcccccaaacaagactatcccaccggagactttgatttcaagcccatcacaggctggaaaaagttcaccgtcaacctcaagatgctaacggctttcccctgggagcgtctccgatacggcaccctgttaacaatcaagttgcgcggccagatatcggatcagctcaatagtaggttctccccgggattatctctgcctcaaatctgtgataatttcttcaaggcaacttatgaccctcgaatttccggcatctatctccatattgatattttaaattgtggttgggcaaaggtcgaagaaattcgaagacatatcttgaatttcagaaaatcaggaaaatctgttgtggcttacgtcccttcatgtcgagaaaaagaatattatattgcgtgtgcctgtgaagaaatatatgcccctccaagtgcatattnttctttgttgggattgactgttcaagccccatttctcagaggtgttntagagaatcttggaattgaacccagagtgggaagcatngccaaatacaaaagt

SEQ ID NO: 30712 - DNA, 287 bp, Glycine max
tggggttctgttttgttctgttctgtccccctcgtgcttgaaccttcacaaaagccagccaaaaaaatcgctccaaatttcttgcaccaagtggcattccttcttgtgctctcaactgcggtttccagtggctatgcttgggttggtgtgaactggggaaccatggcgacgcaccagcttcaacccgagaaggtggtgaagatgctgaaggaaaacgggttcagaaaactgaagctgtttgatgcagacgagttcattatgacggctctgatggggaccgatatcga

SEQ ID NO: 30713 - DNA, 407 bp, Glycine max
ggtgacagtgatggcggggagtgtgggaagaagttgggaattgaagcagtgattgttgctccttctagggagcttggaatgcagatagtgagggagtttgagaaggtgctaggaatggataacaagagggcggttcagcagcttgtagggggtgcaaaccgaaccaggcaggaagatgctctcaagaaaaataagcctgcaattgttgttggcacgcctggtaggatagcggagctcagtgcatccgggaaacttcgcactcatggctgtcgatatttggtattagatgaagttgatgaactgttgtcattcaatttccgggaagacatgcaccggatattggagcatgtagggaggagatcaggtgcagacccaaactcagattctagaaaggccgaacgtcagtt

SEQ ID NO: 30714 - DNA, 492 bp, Glycine max
tcgcgtgtcgcgtgggtttacagagagaaacatttttagagagataaagtcagtgacaagcaccagaagaagtagctagcacccgacaaccacaccagattttggataaaaagtaagatccattgagtttgttcttgcacatcatgattttctctggttcaacaacgaagggtgtgaagagatgggtttgatcatgacccttttgatgagtcacatgcccacatagctcagtagttaaaatcgcgctcttttttgtgtgttttgtggaatttgttcatgtgggtcgtgctaattcccttcgattgacgagagaatttaccttctagttccattcagaattgggtttctatttattgcgtgaaagaagagttttttttttttttttttttgagggggctctgtgaattttaatgagccatgggggagcaagtagcagcggtgcacactgcttctaacgctttgcaagcattagggaggggttttgatgtgaac

SEQ ID NO: 30715 - DNA, 408 bp, Glycine max
ttttgttttacatcgtgacctaaagtgttccaacatctttcttaccaaagatcgagatgttcgcctaggggatttcgggcttgctaagacactaaaagcagatgatttggcttcttcggtggtaggaactcccaactacatgtgccctgaactgcttgctgatattccttatggattcaaatctgatatttggtcactagggttgctggatatacgagatggctgctcatcgccctgcttttaaagcttttgatatggcagggctgataagcaagataaaccgtgcctccattggccctttgcctccctgttattccccttccttgaaaacactgataaagggcatgctaagaaaaaatcctgagcatcggccaacagcatctgaggtgttaaagcacccttatttgc

SEQ ID NO: 30716 - DNA, 486 bp, Glycine max
gggtataaacactatacatttatactgatcaaagaaactcaaaaaatggtgtcctacttggtgcccctaaggcttgcaaattgggtcatgaaccaagtgcttgttaaatcatgttatggattttctaggaaacttaaaagccttgggtttcgttggggtgatctttcatccaaacccttgcatcaaccctcccctttccctaatattaccaagtgcgatttggagtgtagagggtcacaaaccctagcttgtgactttcacaaagtcctcttaaggactcattccttctttccctatttcatgcttgttgcctttgaaggtggaagcatttttagggcattcttcttgctttgttcatgccctatgctgtggatcttaaactatgaaatgaagcttagggtcatgatcttcatctccttttgtggcctcagaatgaaggacatggaaaacacttcaagggcagttttgccgaagttctacttggag

SEQ ID NO: 30717 - DNA, 253 bp, Glycine max
gctctttgtccctcacttctcttcctttatattactgtagttcttgtttgttggagctaccttgaccaaatagctctggtctttatagtagttaatattttctcttttgttcaaagaatttgttgctaaatgccgattatatgttctgggtatttatttattcatctctcgaaatatccctaattgttctggtgttcaaccatggagcaatatagaacaatagacaggatagttttcaagtatgttattatga

SEQ ID NO: 30718 - DNA, 498 bp, Glycine max
cgacgccgtccaacaacaacaacgacgctactactaatgtcgcatctttttcctccttcgatgagcactccaccttagcctccaagttccgcaaccaccagatcacctccaataacaacgcgcccaaaaacgccgcggcggcggctctcatgctccaacaccaactcctcagagactctggtcttctcaacatgcctctttccttgcccggaaacgacgtcgtggttgacgcttctaccttcgaatcccccaatccggtaacataccgtaaatttctctttttctttctaaatttgtatacctaatttagttttttaattttgtcagagtggtaaagcttcagtccaaactctctacaacgggttcgccggatctctgcatggcgtaggccaatcctcgaaccagactcaacattttcaacaccctcagggaagttcgaatccgatgcaagggcaaaattttggggcggtgccagctggtggtggtagcgcgacgaat

SEQ ID NO: 30719 - DNA, 595 bp, Glycine max
ctcgagccgaatcggatttggcttttcacaacatcatcaccaaagcggtggagcaaggaaaccagtgctcatggctactacagtggcatcatcaatggtagtagcatccttttgttccttttcaaaccccatcaccaccaccccatcatcactctctttcaaagccaaaaccatcaccagaacaagaccaagaacaaaaaccagaactagaacaacgaggttaacatggctgaatcctcaccctcgtggtgctttggttgaggcaacaccacaaccaacaagttcacctccttcaccgagagatggatccatcaaggtgcttgcgtttcctgagaaccgtgctgatgacattcaagctgaggccagagcactggctcgtgctgccaatgcaacttcgtacacccctcagcttgtggcctccaaatatggctcccaacccatcaaggtggtggggagggcccttcaggttctgggtgcggtgggtttgtttgggttgaagctgttgttggaccagaaaagtggagtgcttgatcagaataaaaggattcgtgctcttgagcttagggacacattcactcggctgggaccaactttt

SEQ ID NO: 30720 - DNA, 345 bp, Glycine max
ttccattcttgtattctcgtattagcacaagatttcgtttttgtctatctatgtccccatcgtaattgatggtataacatcaacatgcatatgattatgggttatgagagagtgagagtgctgtttcttctgtttctgataccactgccaacggttctgggttggggcaaggagggccactatgccacttgtaagattgcacaggagtatcttagtgaagatgctctatttgcggtcaaacaattgcttccagattctgctcaaggtgatcttgctgccgtttgctccttgggctgatgaggttggccatactcaccgctatcattggagcagcgctttacatta

SEQ ID NO: 30721 - DNA, 492 bp, Glycine max
gttttatctgttgaagagagatgcaagtttttagtacttggcaagagcagaggaaatgcacatggtccaaaagtccatgttttctgtcctatgttaaaggacaaaagagatgcagtgagggtgattgctgagagatggaagcttgcagtgaatgcagctggtcgggagccaaagcatttcgtagttgttcatgttaccccaaaatcaagagctcctgctcgtgtgctagggtttaagggtactacaactgtaaatgtaccccttcctccggcatttgatcctttggttgatatggatcctcgacttgttgtctcttttatagacttaccaatggatgcagatattagtgcattggtgttgacatttggtggtgagtgtgaacttgtttggttaaatgacaaaaatgcattggccgcgtttaatgaccctgcccgtgctgcaactgcaatgaggaggctggatcatggtacggcatatcaaggagctgtggtg

SEQ ID NO: 30722 - DNA, 271 bp, Glycine max
tacagttccagaggcccgtcttcggagtgcccgtgggtattgaagcccgacgtcgtggcccctggctcgtccattttggccgcttggattccggatgtgcccgcggcccgaattggcccaaatgtggttttaaatactgaatacaatttgatgtcgggaacgtcgatggcctgccctcatgcttccggggtggtggctctgttgaagaatgcacatcctgaatggagtgcttctgctattaggtctgcgttgactaccacggctaacccac

SEQ ID NO: 30723 - DNA, 329 bp, Glycine max
gattcaacatacaattctctggtaaaggggttttgtaaggcaggagatcttgtaggtgctagtaagattcttaaaatgatgataagtaggggtttcctcccaagtgctaccacttataactacttttttaggtacttttcaagatgtagaaaaatcgaggaggggatgaacctgtatacaaagttgattcaatctggttataccccagatcggttaacttaccatcttctggtgaagatgttatgtgaagaggagaagttggacttggcagttcaagttagcaaggaaatgaggcataatggatatgacatggacttggctacgagtac

SEQ ID NO: 30724 - DNA, 413 bp, Glycine max
gttcgttggcttgcaaggatctggtaaaacgacgacgtgtacaaaatacgcgttttttcatcagaagaaaggttggaagcctgctctggtgtgtgcggatacgttcagagctggtgcttttgatcagttgaagcaaaatgctactaaagcgaagatccctttctatggaaggtacacgctggtttcttttcttgttggagaatttcagagctggttggatttaactgtagacttattgttctgttgttggacatgctgcacatatgatatacctgttgaatgctgatagtaaagttaaggttgtatttctgtatagatcatgccttgaatgtttggatttttttattatgttttgaaactattagatgaatagtattccaagagaactggtgattatttttcgaggcacaatt

SEQ ID NO: 30725 - DNA, 347 bp, Glycine max
tccttcccataatcatttcctacattcataaacgacgtcgtcatcgctcttccgccctaatctctatctagccccctctcttcctcgcctccgccctcatcggactcctcaccggcctcgacgactacctctacgcctgcggcgtggctcgccttccggtctccactttctctctaatccaagcctcccacctcgccttcaccgccgtcttcgccttcctcctcgtccgccacaggttcacgccctactccgtcaactccgtcgtgcttctcaccgtcgccgctgtggttctggctctgcgttccagcggggaccgccccgccggtgagtcgagtcgccagtacgtg

SEQ ID NO: 30726 - DNA, 289 bp, Glycine max
attttgatgatgttgataatctttggcttgaacctctatcctggcagggaataggatgtacaaaaatcacaaaagcaagaaatgaaggttccatcaatgggaattcagaatcaagatcatatcttgaaaagaagcttgtgttttgttttggttcttatgttgcatcccaaatgttacttccttttggggacgataacttactctctacatctgagatacagcaggcacaagagatagctacacgaatggtcattcagtatgggagtggacctgatgacagtcctgcaat

SEQ ID NO: 30727 - DNA, 408 bp, Glycine max
gctaacatgggtagctccgaattattattattattaacaaaatcatacattggcgaccagggtcgcagattaaagaaatggaggtgctgcggatgagggagttattgacactttggtcaacgttgcaaattaaccgcgttgccctagtggggggaaaccacaccgccgccagattttgcactcgctaagtccccgtttgcctcttcccctctctttgtccctcccacaatatcttttttcttcttctacctacacagaaaccaaacaagtcattacttataatataatccacaatcacaaaacaaatttctttctattctctttctaattatccaacatgatgaaaacacgttatcgcttgccgcttttggcattcttcgcattcgcttccttcatattcataacgag

SEQ ID NO: 30728 - DNA, 448 bp, Glycine max
atgcttggagtacattaaatatcttgtcttaccttggtttaatgagttcacagtggagcgtagtgcagataatggtgggaataagactttcacaagctttgctgagctgactgcagcctataaaagtggagagttacatcctggtgaccttaaaccagcattggcaaagtcgttgaataaaattctggagcctgtaagggaacactttaggaaggacagcaatgctaaagagctattgaaaagggtcaaggcttacagagtcaagtaatatgctgattaaggacttcaggctaatatctattctttgccaatcagccatagaattttcacgttgagattatgcacttctggacttctaaaatgtggcggaggttttctttagaatgagtaatgtgatttttgtttacttaaaatatagatgtgtctatttatatttatatttttattt

SEQ ID NO: 30729 - DNA, 542 bp, Glycine max
ctaggaggggtgctcatgtaggaaatgataatgtgggttctggtgctagtggtaatgttaatgctaatgctgcctctgctgtgctggctggtgcgaggggggagtctagtaagaaggctgcattgggtggtttgaggaggcggggggcaggaaacttggggaagttggatttgaatgtggagttcagcaatgaggtggaggagccttcccgtggagtgcgcgaccgcgaagggaatgctgctggacatgctgaggataatattgaagggattggtttttttgaaggccttgacgagttcctcagtagcttgcccattctcaatgttgtggcagatgataaggttaagggtcattagtcttgtagatgcttttttttttttttctttcctggttgttgtagaatttagatgttgttacttttatgtttgtactcgatgcacaaaatgatgctgagctatagtgaattcttgtcactgttaaattatataataatttgcggcaataatctccttactttggttttgaactatttgaggaggatt

SEQ ID NO: 30730 - DNA, 652 bp, Glycine max
cacaaggacccttgtttcagtttgccatggaagcaagattgcttccccatatgctccgagtcaagccctttgtaccacacaagcaacaaaccacgagcctcttaccccagaggaagaaaaagaccttcaacttgccatccagagattccatgagctttgccataagtgtgtgcaagtcaacattcctttgttggttgatgcagaacacacttctgttcaacctgctattgactacttcacatactcctctgccatcttgcacaacaaaggtgacaaccccattgtgtttgggaccatgcagacctacctcaaggatgccaaggagagactcttgctggctgcagaggctgcagacaacatgggaatcccaatgggcttcaaacttgtcaggggtgcttatatgtcaagtgaaacaaaattggctgagtctttgggctattcttccccaattcacgacaccatcgaggacacacacaagtgcttcaatgactgctcctctttcatgcttgagaaggttgctaatggccctggtggacttgttcttgcaactcataatgttgagtcagggaaactggctgctgcaaaagcacatgagctagggattggaaaggtgaaccacaagcttgaatttgcacagctgcatggaatgtca

SEQ ID NO: 30731 - DNA, 537 bp, Glycine max
ccactctttattgctaccattcctaattcaagcttcttacgagagattcgttcattgcttttttcctttcattttatacggcatacagcaccagagtttcctttctgggcatgacaatttttccataaaaattcgttttttttttctcctctctttttttttttttatttgggtcttttcaatcactttgattgagagaccttcttcttcttcttcttcttcttagttgtatatgggttccttccgttaattataacaacttaagttagaaggacttgagtttaggaaaaagaaaaaaaaaaattgttcaaccttgaaagatgtcggtttctgaggttgctgtgagaccgattttgaaaaaatcggtgcattggcaagggcgttgctctggcgaatctatccggatatatctaaccgtagacggtgcgttgagaccaatgcgtgtattggagtctgactccatagcttcggtgaaaatgaggattcaagcatgcaaaggaatcgcagggaagaagcacaagctggtctatggtggca

SEQ ID NO: 30732 - DNA, 407 bp, Glycine max
  unsure (1)..(407): unsure at all n locations
actattaaataagaaatgccgntttctgtgttgttgcccttcaacaataaaagcctgtaccagtacccagatacacacacagtctcagaagtggctactagtgaagcacacgcagtgcattttgactccaccctttatttttggatccataaattgattgaataacgaaatcttcaatgaccggccattttctccggacacccctcacactcaagatcgctgctttcttcttcatcgcagtcaccttcttctacttcggcaagcactggtccgatggctaccagcagctcgtcttcttcacccagcgatccgacccggattcgaactcgaacccgtttgtttccacgtccccgaataacgccaagtccttcaacgtctccgccctaattgagaacaacacacaaccg

SEQ ID NO: 30733 - DNA, 502 bp, Glycine max
gtacgaccagtagattcagcttacaacgctatcaatctcatcgtgaaggaaactgtaaaagtacttgagtactcactaagtacagttacagaaggcactgatgcaattgcaactacacgtgttgtaattcgtagagagaataagcagtcacctactcctgctttgaatggaaacgttatttatccaacatttagtggtaccggagaaggagtggatattgttacttcaagtgtagaggcttatattactgcactaaacaaaatgctcgattcaaaggaatgatttgtatttgtcgaaagaattctagcacctaaatgttagaattcacacttcaagttataaattcagcttgctatttgtgatttctttgttatctttttaagtatggaacatattattggagaatgttacctttgtaagtctccacatgggactaatatatgagaaatgaacttattatttgcttgatgatcaaggagaataaaagaaggaatagttcccg

SEQ ID NO: 30734 - DNA, 382 bp, Glycine max
agtaattgttcggctctcgcaaatacgagaaggaacaaaacaccgcggaagcaaccatggccgaagcagaacacaacgatcccacctcgccggagcgcgaggtccaaaccaaaagcaacaagaagaaactccgcaagaggaaaaggcctcacaagaccgagcagaaacgagatgaggacaagaacgatgctaacattgatagtgcccaaacacaaaccgaagatgaagaagaagaacaaaaagaagaagacacaaacaacttctcatccggaatcatgagcaccgagtctttctcctctctgggcttgtccgaacccacttccaaagccattgcggacatgggcttccaccgtatgactcaaattcaagcgaaggcaattcc

SEQ ID NO: 30735 - DNA, 518 bp, Glycine max
accgcggtggctgccgctcgatactagcggatcccccgggctgcaggaagggggcacgaggagagttttccaaatctgcttctaggtggcatgagtctcgagagttttccaaatctgcttctaggtggcatgcatttcttcaattattgaggagcggatcgaagaaacagatgaacaccttacatcctctcagtgtcctcaagctctcaaaaagaatgagcactagcatgagggagtccattctcccaagttgtctcttagatgctactgcttccccctgcaggtcaccttggaagatatttactcatcatgagattcaagttgcaaccaattcttttagccaagaaaatttgattgggaagggtggttatgctgaagtttacaaagggtgtttgccaaatcgtcagcttgtggcagttaaacggttaacaagaggaacagctgatgaaatcataggggatttcttatcacaacttggcgtaatggcgcatgtaaaccatgccaatactgctaagttg

SEQ ID NO: 30736 - DNA, 300 bp, Glycine max
gttcctctctttattctcactatagagcccaaactccattccttttctttcttttttagtcacaagtgtagtgttgcattgagaaattaactaagactaattaaccaattagcaccaatggcgtcgaagaagaacacggttgtttttgaggactacttccctgcaatgatggagaaactgggcactgaggggttcatgaaggagctgacaaacggatttcagttgctgatggacagagagaagaaggtgataacgtttgagagcttgaagaagaactctgcattgcttgggttggaaggg

SEQ ID NO: 30737 - DNA, 387 bp, Glycine max
aagaaattctaattaaaaagcaaagtccgatatctttctaactatatatatatatataggcgacaccaacctttctgcctctataccttaatatttcaaatacccagagggagtaacccctccaagcttcaattatctacattatccacattcctagctagctttatccacatctacaaaatagtccttagatttccctctctctttcttttgtataactgtgtcatatcttagatctcctttcacttccttcaaacaacaaaatcatgggtctgagagacattggtgcttcactgcctcctgggtttcggttttatccgagtgatgaggaattggtctgccattacctctacaaaaagatcgcaaatgaggaagttctgaagggta

SEQ ID NO: 30738 - DNA, 529 bp, Glycine max
ccagcacatgatggactcagtatagccaacttctctatctgcttcattaaatcctattcctatttcctagtactataaaaggtcgcattagcacggcaggttccctagctcaccaaagaaccaaaccaaaccaaagcatgccatcattcatggctttcctttcacatccttatttctttgcagctttgtctgcatctttgactcttttggtggtccaacttctgttcagaaaactgaacaaaaggcatagtagaaagaagtaccaccctgttgctggcaccatcttcaatcagatgctcaacttcaacaggctgcaccattatatgactgatcttgctgccaagcacaggacttacaggctgctcaaccctttcagatatgagggttacaccactgagccaactaatgttgagtatatactcaaaaccaattttgagaattatggaaagggcttatacaactaccacaatttgaaggatttactaagtgatgggatcttcactgttgatggcgagaaatggcgggaaca

SEQ ID NO: 30739 - DNA, 279 bp, Glycine max
gacagcgaacagagtttgagtgagtagtatggatcccgacggcgtggtcgcggcggaggcgcttatggcgtcgggtcggagttcggagaagctgagccttccatcactccaatccaaaatgaagtgcgatcccgaaggctacgaatcggagctactccttctctacaaccaattcaattcctcgctcgaactctttcagaaacaagccgccatgaacttcacctccatctccggcatcggcagcgaccccaccgtcgccaacgacctcggcgacagggc

SEQ ID NO: 30740 - DNA, 528 bp, Glycine max
  unsure (1)..(528): unsure at all n locations
atttgtcatcccctccttttcttcactactatcacatatatatatatatatgcccccttgccctctctttcccttcaacccattccatcttctctctaactctctctctctctcaaaaatctctctcaaatcagaaaaatctctcgctctctctaaaattcgaaataacctaaaacaaatagatatggaaagcaatacaccagtaatagcaaagaaagtgttgagcataatacgtgtggccttcttcatgctgaggaaaggcatatcaaagggtaagctaatgatgcacctcaacaacatgatgctcaaacgccccggcaaagccatcgccaacctcatgttccaccaccaccacaaccacggtgtctccggcaacaacctccaattctccaccgccagggagtacgagttcagctgcagcaacacacccaacaacttcttcgcggcagcccttgccagcaacaacaaacggcaccgccacaaccccttcttcacgtgcgctcacgcgccgncaacccttgacgacga

SEQ ID NO: 30741 - DNA, 277 bp, Glycine max
ggtatagtagagggaaaaaaaaaaatgggggcttcacaatcacaggaagagctacaatcacaacaacagtttcaacaacaccaacacccaaatgaactcaccagaagggaatcattgttgttgtctcctgcagctagtaacaacacaaaacaattcagcaacagcacaaaggtagtagataatgtcacagctgccaacagcaccaacaccaactgtttcatgttgaatgcgagagcactctcaatcacctgggcagaaaatccagactattggacat

SEQ ID NO: 30742 - DNA, 379 bp, Glycine max
ccctcgcgtccggcgtttttcctccatttccttcttcgctagattacccagatctacgacgagtctctgctatgaattaattctcatatctcaaaatcattcaccgttttcatttcattctaactaatctttccagaaccctcgaatctcttctttcgaacgtgcaaagatttttgacttgaccgaatgctgttgcggttgaaatcggtgtgagaaatagggtttcgacgatgccttcgcttccctttggactccttctacgccatttggtcccttccttggccctattccacggcggatcctcctctcatcgtctcaaacatcttgaaaaaagtgatcggcgttgtagacttagttaacattacgagcttttctttct

SEQ ID NO: 30743 - DNA, 477 bp, Glycine max
tctttatgttgatggctatcttcttcttgattgtgcttgatcgaataatatacctctgctcatttgccacggggaaagtggttttctatattttcaacctcattctcttcacatattcagttacagagtatgattggcaattgaagccatcccaacgtatagctcagtttgctctccgtgccatatttcttgcaaaggcagtttctctgggacttcaggctatacaaatccaatatggcattcctcacaagagcacattgtatcggcaatttttgacaagtgaagtttcaagaatcaattatttaggatatagactttatcgtgctctgcctttcctttatgaattaagatgtgttcttgactggtcatgcacaactacgtccctcaccatgtatgactggctaaagctggaggacataaatgcaagtttgtaccttgtcaaatgtgattcagtcttaaatagagttacacacaacc

SEQ ID NO: 30744 - DNA, 290 bp, Glycine max
cttcaaggttcaagtataagatcccaaaggggcatagatcagctaatagaatctcacgcatagtgtctgagacacttaggcttgggatggaggatgtgaggtggtttgtgatgggggatgatgacacggtttttgtggcagaaaatttggtgaaagtgttgcaaaaatatgaccacaatcagttttattacattgggagttcctcggagagtcacttgcaaaacatttatttttcttataatatggcttatgggggtggtggttttgccattagttatcccctggctgtg

SEQ ID NO: 30745 - DNA, 255 bp, Glycine max
ggacaattatcttgacgaagcaatgaaaatgaggaatcttctggaggagttccatgcgaatcatggccttcgccctccaagcattcttggagtgagggagcatgtttttacaggaagtgtctcttccttggcttggttcatgtcaaatcaagaaactagctttgtaaccttggcccaacgagttttagcaaatcctctcaaagttcgcatgcactatggacaccacagatgtatttgaccgaatattccacataa

SEQ ID NO: 30746 - DNA, 454 bp, Glycine max
ttttcgtccggttatgaatggcctattgcaacagagaaaatcctacatctgctaatcctgttcgtgtagatttcaacaagacgttgagtgttgcatttgatgatatttttttacgaaggaatagcaataggaagaagctttgcaatgtctaaaaattacactattgatggcaacaaacagatgatagctattgggaccatgaacgtagttggttctttcacctcttgctacctcacaacaggaccattttcgcgttcggctgtgaactataacgctggatgcaagacagcagcttccaacattataatgtcacttgcagtaatgttgacattgttattcctgacacccttgttccattacactcccctggtggtgctatcagccattatcgtatctgcaatgcttggactcatagattatgaagcagccatccatctatttaaggttgacaaat

SEQ ID NO: 30747 - DNA, 292 bp, Glycine max
tgtgataggagaattgaagaagggtttgaatccaccatcactcacaaatctggtatttgtgtcgccttacatgaccacagctgtcaaaactggcattgtcgttggcatcatatcgcttgcggaaggaatagcagtgggaagaagctttgcaatgtacacaaattacaacattgatggcaacaaagagatgatagctattgggaccatgaacgtagttggttctttcacctcttgctacctcacaactggaccattttcgcgttcagctgtgaactataacgctgatgcaaga

SEQ ID NO: 30748 - DNA, 403 bp, Glycine max
atcattcgtccgcccacgcgtccggcaacaacgaagaccattgcccctgccatcaaaattttgattctctgattcccctttgtgggatcagagggtcaccattgtcgttttctttctcaccctttcagagagggagaggaaaatggaagggtggctctatctcattcgcgccaatcggtttggtcagcattattcacgtaagaggtacttcatcctcaaaggcaatgccctccgaagcttcaagatcaaacccacttctcaaatggaggagccaattaggagtgcaataatagactcctgcattcgggttaatgacaatggaagggagactatgaacaaaaacgtgttgtttattttcactgtatataatgccacagatcaaagtgataagcttaagttggga

SEQ ID NO: 30749 - DNA, 280 bp, Glycine max
cgttctagatcgcgatctagaactctctctctctctctctctctctctctctctcatgaacgacgcacttcccatgtttcctcggttctatagatggagatggaagctctgaatctcgctttcgccgaatctcgtcttctgtgttcagatttcgctattctccgtttggattgatgaaaaaaaaagccttttctcttcccgatatttttttctcggcggatttggaattcgatcttcacctcatccactcgtaatcgctatccgagacatgtgggggggc

SEQ ID NO: 30750 - DNA, 391 bp, Glycine max
cctctttgctagttttgattagatctacaacaagaaattaaagaaatggctttcagggcagcgagaaatgtaggattgaggttgggaggaggaaggcgatcaattgctactgccagcgctaaaaagcatgatgattgggcgactctgaaggcagagttagcaccggtgtacatggtgtgcggaatggtggcaatggctgtggcaattggatcacacactgcgtttcaacaactggcgcgttctccaactgttcatataaacaagaagagaagagagagcatgccagaggtctctgatcctgatcgcaccttcaactccgccaccaaattcatcgatggttccttcttaaggaaactctctcacattcaagacaacaaccccacactccacg

SEQ ID NO: 30751 - DNA, 626 bp, Glycine max
atttggtgacaagctctggcttgaaaccaggaagttatggctcattgtggggccctctatattcagccgcctcgcgtcgttcaccatgaatgttgtcacccaagccttcgccggtcacttgggtgatgtcgaactcgctgccatttctatcgccaacaacgttcttgttggcttcaatttcggcctccttttggggatggcgagcgcgttggagacactgtgcgggcaagcgtttggggcgaagagataccacttgttggggatatacatgcagaggtcatggattgttctgttcatgtgctgtttcctgctgttgccgttttatgtttttgcaacgccgcttctgaaattcctaggacagccagatgacgtggcagagtggagcggggtggtggcagtgtggctcattcccctgcacttcagtttcgcgtttcagtttcctatgcagagattcctacagtgccagctcaagacagcagatattgcttgggtttctctgctgggtttggtggttaatgtggtcacaagctggctcttcatttatgtctgggattttggactctatggcgcagctatttctttggacatttcttggtgggttttggtttttggcatgtatgcttaca

SEQ ID NO: 30752 - DNA, 427 bp, Glycine max
tttgtacttgaactatcgggtcttcttcttggctctctctgtttagggtacgcaacctctgtctccttttcctccatactctctttttcttaattgtttttctttcaacttcatatcataattgtgttcatatgctaacttttcatactttttcgtcacttttctatagtttatttggtcaaattaatgggaatatccttatatgctcttgttttgaattttgttgtgcaaactgtgtctgagttttttatttcttggaggactaggagcacttgttcgtctacactctacatctaaatttctcttttcattatttctgattgcataattatactgtcttgtatgtgaattttctttacaatctgcatctgcttaatatattttttaatcaatggctagttaaagattttgttgacagatcgatatg

SEQ ID NO: 30753 - DNA, 259 bp, Glycine max
gcacaacacacggagaaagtgagaatggagttggaggagcagcgagtgaggcaatcaagaatgttgatagcggcgattcaagaagccgtggcgaagaaactgaaggagaaggacgaggagattcagcgcgtggggaagctgaattgggttctgcaggaacgagttaagaacctctgcgtggagaatcagatttcgaaggagttagcacaaacaaacgaagccacggcaaataatcttcgaaacaatctagaacaagttc

SEQ ID NO: 30754 - DNA, 360 bp, Glycine max
gtttcttgtttcatcttgtctaaacagtcaaaaaacattatacttgttagatgaaggtaagtacgtgttaatccttcttcatcttcaacaaagtctcttctcgatctcgcgagcatggctttgcggcttttggtatcgcaggttgcaagacgacagattaaaagtgtgtttgctacaagctatttttctgtcaataagtttggagatcgtgcagggaataggcttttgggtgcccaagagagatttcagtctagctaccttagtagcattgctcgtccagcacgtgatgcggatgaagccgctgaagttgcttatctcagagaactgtaccatcagaatgatcctgaggctgcgattaga

SEQ ID NO: 30755 - DNA, 284 bp, Glycine max
cgaaaaagtaacaaaatcgtaagacacagacgcataagtgaaccactgaaaccctaaacgcatcagcctcagccgtcggtgccgtcgagcaagtgaggtcgcaccgccgtcgcaggaccaccacccgggcgccgtcacaatttggcctcaaagtcacaagcaaattcataagcaaaaccctagcaagcagtgagtgaaagagtaaagtttggacgatgagggaggaagagatggagaagcttcgaggagtggtgcgggactgcgtgagcaagcacctctactcc

SEQ ID NO: 30756 - DNA, 409 bp, Glycine max
ggatattccttccttaagtgcagaggcagcaaaggaacatccagatgtgtcacacattgtaaccgcaccccttggtttccatcttctgctgctggatgttgtgaatgatagaatcaaacattgcttacagcatgtggctggacatgcagatgagtgttcagtttgttctgggactggtaaatgcaggctctattaatttgtgaaactagattgttttggatgctattaaatcaggctggaagtcgagagaatctgtaaattgggttgcaactgttctgaagttgttattacgacgcacttgagctttgcttcatgtttggttcgacgtgacttcttgaggagcttcgtttatgtttcttactccaagttgtatcagtatttaacattaatgttgaggtttcgcataccc

SEQ ID NO: 30757 - DNA, 371 bp, Glycine max
aagggtcagaagaatgatgcttgccgctattttgaggaatgaagttggatggttcgatgaggaggagcacaactcaagccttgttgcagctcgccttgccacagatgcagctgatgtcaagtctgccattgctgagaggatatcagtgattctacagaacatgacatcgctccttacttctttcatagttgctttcatagttgaatggagggtttccttgctcatcttggcaactttccctctccttgttctagccaattttgctcagcaactatctctaaaagggtttgctggagacacagccaaggctcatgcaaagacaagtatgatagcaggagagggagtgagcaacatcagaacagttgcagcat

SEQ ID NO: 30758 - DNA, 296 bp, Glycine max
tgcccatggacactatcaggacggtaatggtagcacctggtggtggacccttcggaggtgtgattggtgccttccgccacatgattcacctcagagggcttcttttctctttacaagggtttagcaccctccattatcagcatggcaccttcaggtgctgtctgctatggtattgatgatgttttagagtcagcatatctgcattcacctgaaggaatgaaaagaatccaacacatgaaagaagacggtgaagagctgaatgcactggaacaactggaattgggtcctgtcagaac

SEQ ID NO: 30759 - DNA, 624 bp, Glycine max
ggctcgaggatcttggaactgtgacgagatgccacattgattaacaacaacaacaataacaacattagatctcaagttggagtctttgtttggagacacccattatggggggtgtgagtctgagggaatcatggtgtttctgcaaaggggtgagtaagtctgagagaatgaaagctgctatttttacagggaaggctcaggccatggccacaatcgccgccaccgccgcgcctaatggggcttccggcaccgggtttttgatccacaggaaccttctattgaccactcacgccaatcttccgtcggtggtcgccgctgacaccgccgagatccggctgcacaatggggtggctgccactcttgctcctcagaggtttttcattacaagttctgtattagatcttacgattgtgggtttagatgacggggatggagactcaaatgcacagggtcagtgccctcactacttgaagaccagttgtaaagccaatctggatctgggaagtgcagtgtaccttttaggctacacagagaaacaggagctcactgttggtgaaggaaaggtggtcatagccactgacaatctcataaaactgtcaactgatggaattcaatggagtcctg

SEQ ID NO: 30760 - DNA, 919 bp, Glycine max
tagctccgacgaccagctccagctctgtctcgagagtggcgactgcgaatccaaaacgtcgtcgttcacccacgccctcttcgtcagcgccggcattgaccccttcgccaccattcaccacgccttccgtgcccttaggaacctccatcaacacgttccgcactccgccacgagatgatactccctggcatcgtcgcctgcttcggctggtgcacctgggatgccttctaccaggaagttactcaggaaggagtcgaggccggaatcaaatccctagccggcggaggcacgccgccgaagttcgtcatcatcgacgacggatggcagtccgtcggcggtgacgacgacaaacaaaactcaaactcgttgcagaggctgacgggaataaaagagaacggcaagttccagaagaaggaggaaccggaattggggataaagaacatggtggaggtagcgaagaagaagcattcagtggagcaggtgtacgtgtggcacgcgataacgggctactggggcggggttcgtccaggggtgaaggaaatggaagagtacgggtccgtaatgaagtacccaaaggtgtcgagtggagtgacagagaacgagccgacgtggaaagtggacccgttagcggttcaaggcttgggcctagtgaaccccgaagaaggtgttcacgttttacgaccatttacacagttatctggcgtccgctggtgtggacggcgttaaggtggacgtgcagtgcattctagagactctcggcgcgggactcggcggaagggtggagctcactagaaattaccatcaggcccttgacgcttcgatttctagaaacttccctgacaacggttgtatcgcctgcatgagccacaacacggacgcgctctactgctccaaacagacggcggtggtgagggcttcc

SEQ ID NO: 30761 - DNA, 462 bp, Glycine max
atcgagtgtgggaggccattacaaaggcttttgcaagccaaatgaagtctgctttcactggatcaagttttgttaaagagatttttacaatgggatatccaaagctttactccatgatagagaatctacttgaaagaatttcacatgacacagatgtcaaaggagtgttaccagctatcaatttgtctggaaaagagcagataatttcagctgtcgaaatattccagaatgcatttttggctcattgattgagtcgcctttcagatctagtgaattctgtatttccaatgtccagtcgtggttgtgttccctccaaggaacaaatatcaagaattatatcacgcattcaggaagagatagaaactgttcagatggatgcacgcttaactcttcttgttttgcgtgaaattggcaaggttttaattcttcttgcagaacgagctgattaccagatatccactg

SEQ ID NO: 30762 - DNA, 490 bp, Glycine max
acgcaaaatcggaatccagctcgagaacagcttgttttcctcatctagatggtggtacgtggtctgtctctgctgaaagcggcaaatggtccttcacatccggccctcttgagaagaacgtgtatgaacccctatatgaagaagcaggatggggtcctactggattctctgttgatcttatagcagcacaagcagttagatcactccatattgcaaaggaggcggatgaagcaaggattatcttctaaaggaatgctgaatgaagtcttgtttgtgtcttttctggtcactggagatgaagtcttaatcttctgttatcttactggaggttgtcttctgcatattacttctatataatatgcttgtcagctacgttctgcttcagttgtgactgaagaactttttgctgtgtcatcatattttcttctgattttcattaactgcatgcaaggctgctaattttctattggagtgacttttcatactctga

SEQ ID NO: 30763 - DNA, 266 bp, Glycine max
tctcgagccgattcggctcgagcctctgtatcccattcctctgccatctcctgaaatacgttttcacaacactcacctttgccatatacagcacaatcatcaattttctgaaatgagccagcgtgtccccaactgcgatgtggacgacaataacaacattcccacaaccacaaaaatccctcttcttcccaatttcaatttcatatcccatgaagtccctatgttgggctaccaagctgctgaactaccatgcaaaaagggacaac

SEQ ID NO: 30764 - DNA, 753 bp, Glycine max
attaccctaaaacatcctccatctacaacacacactcttactcttactaatccaacctcctttgcccctcatgcactaccattaacattaccctctcttttttttctccctcacgaaccttcatttcttctcccgccatggatccttgccctttcgtgaggctcacagtcggcaacctcgccctcaaaattcccgttgcttctaaacccgcgctctccgttgttcatccttcttcttctccttgtttctgcaaaatccagctcaagaattttcctcttcaatccgccgtcgttcccttcattcctccggattccctcttccctgactccctggtccatcctatcgctgctactttccacctcagcaagtccgatctcgacaagctcgccggcaaatccatcttctccgccaagctctgcctcaaaatctctatctacaccggccgtcgcggctccacctgcggcgtcagctccgggagactcctcggcagagtttccgttcccttggatctcaccggaacggtagccaaaaccacagtgttccacaatggatggattaggataggaaaagacgccaaaggctcttccgctcagttccatttgaatgttaaagcccgaacccgatcctagattcgtcttccagttcgacggcgaacctgaatgcagtcctcaggttttccagatccaaggcatcatttcacaacctgtcttcacctgcaagttcagtttcagaaacaaacgcgaccgaaatcac

SEQ ID NO: 30765 - DNA, 405 bp, Glycine max
ttattcgttctggccatcactactaaaagttccatcttttatggttgaatttaccactcccataataagggcttttcattcaaacgggacaaaattatcattttattccatgcctgaatatgaatcatggagagaaagcttggggcataatgcacctggttggaagataaagtactataagggtttgggtacaagtactcctcaggaagggagagagtactttcgagatcttgataagcataagaaagactttgtttgggatgatgagcaagatggaggtgcaattgagatggcattcagtaagaaaaaagctgaggataggaagatctggattcgtaattttgagcctggcacttgtcgtgatcatatggccaaatatataaactacagggattttgttaacaa

SEQ ID NO: 30766 - DNA, 303 bp, Glycine max
ttgcttttcgacaaaaccgttacccttcgtcgtcttatacctgattcttcatctccgttcgagggtcaacacttgaagatcttagctcgtggcaatggccgattctccaccgagaaggaattcaaggtccccttccccatggagggctgagtcaaggtctaggtcaaggtctagatctaggcctaggtctaggtcccggtcaagatcttttgagaaacaaaggccaagatcccggtcgagaagtcgtggaagatcaagatcaagaagtaacgaaaggtctgaggctaaaaatgctggaactac

SEQ ID NO: 30767 - DNA, 412 bp, Glycine max
caacctcgatgctcgccaatcctctctcctcgctctcctcaacctcgctgttcgcaacgaacgaaacaaggtcaaaatagtgacagatggtgctatgcctccactggtggagctcctcaagatgcaaaatagcggtatacgagaattagctacagctgcaatcttgacactctcagctgccacatccaacaagcccattattgctgcttctggagccggacctctccttgttcaaattctcaaatctggaagtgttcaaggaaaagttgatgctgttacagccctccataatctttctactggcattgagaattccattgaacttcttgatgcaagtgctgttttccctctgctcaacctccttaaagagtgcaagaagtattccaagtttgcagaaaaagccacagcactg

SEQ ID NO: 30768 - DNA, 321 bp, Glycine max
ctggatattttgtgggctaaaagttgcgaggggttgcaatgggtaaaatcagtagagcgtgaagaaaaagtgggctcaatagtatgttcaaatgtagatcactccagtgtcgatggttgcaacctgtatgatgattttttttcaacaggtttcatgcagcttgatcatgtgaaaactttaagcctaagggacaataatttcacattccttcctgaatgcctcaaagaattgcaatttttaacaagacttgatgtgagtggctgcttgcgtcttcaggaaattagaggggttccaccaaacttaaaagaattcatggcaaga

SEQ ID NO: 30769 - DNA, 274 bp, Glycine max
ggcgccttcccaccgtaaaccctaacaataatggagttgtggaacgtggtgtttgtgtgttgtgttttatgttacagtttttgtcacactgcggaggctatcgttaagctacgaggcaatgaaacaataccagcattgattttgttcggggattcgatagttgacacaggaagtaacaataacctaataacggggcttaagtgcaattttcctccttatgggagggatttcgagggtgggataccaacaggaagattcagcaatggcaaggtcc

SEQ ID NO: 30770 - DNA, 1070 bp, Glycine max
catatacattttttagccttttgttagccccaaacacccacacgggcacacccctgcaggtacaaaagggggagttcacaacaaaaagaaaacaatgagaaaaccttgttgtgacaaggaaaacatcaataaaggtgcttggtccaagcaagaagaccaaaagctcattgactacatccaagtccatggtgaaggctgttggcgttccattcctaaagctgctgggctgcatcgttgtggcaaaagctgtaggatgagatggttaaactacttacgaccaggcatcaaacgtggaatctttgctgaagatgaggaagacctcatcatcaaactccatgccctccttggtaacaggtggtcactcattgctggaaggttgcctgggaggacagacaatgaggtgaagaactattggaattctcacatccgaagaaaactaataaagatgggaattgatccaaatagccataagccacaccaaagctttcctcgtcctcatgtttcttctgctgatcatcagggtgcatcaacatctgagtccatcaacaacaacaaagtccctttcttcaattcccgtggttcagctgccactgatcatcataagatttcgttcactaaagaagaaacatcaattatttcatcaccccctttgaatcttgatcttacaatttctttaccttcgcctgtggaagaaaacaaaaattctgatcatgagtccgccaagacatgtgacgtggatatagatctcaactgttagtacttttagttgttggcaagagtattaattaccagcagtagtacttcatgtttgttacaaattaattttggagaaataatcagtttttcaaaagcaattcaaacaaaaaaacattaaaaaaatttgattatctctttaaaataagttgaattaattaagtacacaaaatgtactagaattttcctgctagatcttgatgagagatacatgacaacgaaagctgagggatgaatgaaggatttaacatgagttattttcatgtaatggcaagtgtcctttgtatatacatattatgatgacctaaattcggttc

SEQ ID NO: 30771 - DNA, 284 bp, Glycine max
gctggcggaggaagacgacagaaggggatagttacatacgtaaaaaaacttgcaattgttttataaggaatcagattagttacacttccattcccttccagcagctgggtttgagaagacaattgattatataggttttgttagtaaacaaaagaacaggaaacatgaaggacgcagatgtgtcaaggcagatccagcagatgatcaggttcatccgtcaagaggctgaagagaaagctctttggtttactgttgctgctgaagaggaattcaatattgagaaa

SEQ ID NO: 30772 - DNA, 270 bp, Glycine max
gttaattaagatgaaggaggacaatgggatagaggaactgtggagggaagtgagggatttgagtttgggaaacggcggaagagtacagagactagagtctccaccaaccccagttcagctcctgagagacttcatcacaccaaacaagccatgcataatctccaacgccattacgcactggcccgcactctcttcctggaccaacccttcccacctctcccaatccctctccggcgccaccgtctccgtccacctcacccccaccggcgc

SEQ ID NO: 30773 - DNA, 634 bp, Glycine max
aattatagcatctggtttccgtttaaatttgtatttgggtcctgtcctggtagggatctggtatggtgcacattggtccttgatgcccacaatcacttctgagatatttggtgtaaagcatatgggtaccatcttcaatactattgctgcagcaagtcctcttggatcgtatatactttctgtcagagttgttggatatatttacgacaagcaagccgataaagaagatcattcgtgctttggcatcaactgtttcatgccgtcattttttatcctggcagctgttgcttttcttgcgtttttggttggtttggcattattcttccggacccggaggttctataagcaagttgtgcttagaagattaaaacattatgcaagatgatggagattgcatttgcctgcatttcaacactaggtaaaggctgaggaaaccagtcttgttttctctggtctgtttggcataaatatagttaatgcagttttctatgggttgtctatgaggattatttgaattgtattttatttgttataagagaaatgtacacagaattttattaacagagatgtagtccattcatctataatcaccagtatgtttggttaaaagcataaacaaaaacaaaaaaaaagg

SEQ ID NO: 30774 - DNA, 609 bp, Glycine max
atgcagttgattgatgagttggaagtcgcaagaagggggccctatagtgggggatttggaggtatatcattcaatggcgatatggacatagcccttgctctgaggaccatagttttccctacaaatgctcgttatgacacaatgtactcctacaaggataagaacaaacgcagagaatgggttgcccatctccaggctggagcgggaattgtggctgacagtgatcctgctgatgaacaaagagagtgcgagaacaaagctgcagctcttgctcgtgccattgatcttgcagaatcttcatttgttgataaataatttggattgatccatcatcagtgatgctccttgataactgaggtgtgcatcctttttaaatggtagagaggaagtttgtggtgtgggcagatgataggggatatgaattacggagaatctgaaactttgataatgttatgacagaagtgatgaacataataaggtatttaatgataatgacagctttgtgactttagttaagtcgtcgtttaagagacttcaatagccatttccgtcggtccatcttaaaccaaagaaaggtgcctttgacggagtttcttttgctatcataaa

SEQ ID NO: 30775 - DNA, 372 bp, Glycine max
cacacatcattttctacgactggaatgctctaaacattcttaatattcccacactatacggaccatgttctcttcctcaacttccttctttctttgccttctcctcttctccgtaaccttttctcatgttttgggggataaagtatttacgggaacatatggagtaaactacggtagggtagcagacaatctaccttctcctgagagtgtggttacccttctgaaagctgcaaagattaggaacgtgagaatatatgatgctgatcgtcaagtcctgagtgccttcaaagggtcaggaattgcaattagtgtttgtgtaccaaatgagcttctgaaggagataagtgtgggtgaggatcgtgccatgaattg

SEQ ID NO: 30776 - DNA, 297 bp, Glycine max
gtttgtaagagtagaagagctgtatattgattcaatttcttgtttttccttcagaactcataagaattgagcaagtattgattttgattactaatgctgtggtgggttttggtcaaaatttcagaatcttaatggaaaactcagaccacgacgaacccgaaaagagcagcctcatctcacctctgtctcttcccgcactcctcgaaactccatcaactctcctaccaacaacaaaactgctgacgcaggagtcttacagttccagaatcagcagcttgttcaacagatagacatcca

SEQ ID NO: 30777 - DNA, 445 bp, Glycine max
ctctctcttctttctatctctaacgaaaccctaacgaagacctcttttcttcattctctccccgatttcaatcccatgctccgatctcttccagcatcggtttcatgtgatttgagtttggttactcaagaaataattgatggatgatgatagtagaaatggataaaatgtctgctccttcatcaagggagcgtgcacaacgcctctatgaaaagaacctggagttggagagtaagcgtcggaggtcggctcaggtgcgtgtcccatcagatcctaatgcttggcaacagatgcgtgagaattatgaagcaataattcttgaggatcgagctttctctgagcagcacaatattgaatatgctctttggcagttgcattataagcagattgaggagtttagggcatacttcagtgctgctctttcttctacaaatgcaaactcatc

SEQ ID NO: 30778 - DNA, 531 bp, Glycine max
  unsure (1)..(531): unsure at all n locations
ttgctaactcaaatggattagggggtcatatttggttttccccccaggttttttaaatttgaatttaattttgttcccttttcaatctataagatgctttcactttatccaataatttattgatgcatctaaaaaagagtttgacgtgacaaccatggcacaaacaaaggctttgttgttgtttgtttgttaactgaaaattgtgagaattacttccttgtagtgttgatttgtttagttttaacattaggcattgttcatgattttgataggttcttcttgtgtgttaaaacatagattgcggaagttattgaaaatctgaaacgagaagccatttagtgttcaacttttgaagtagatgtcctaaagcttaaatatttgacactatcattctatgattttgcccctcttactcatatttactgaatataattatggttatgtcaccccccccccaaaaaaaaatcatgctgaagttggctcacactttactntccttcatgtcatttggcatctggtggtcctttcttt

SEQ ID NO: 30779 - DNA, 371 bp, Glycine max
aattaagttcatgaattgcttattgctagctatatggtgatcgacaacttcaaattttgagtctgtcactccctcagttaaagctcacatcacattagattactatttgaaaccttcaagctagcgagtctcatatatctgttctttgtctctttactctttgttttcaaggattccttctaacgagcaaaatgtcggctaactgtgagaaaatggtagccatccctccaacgaccaaccaatggccacaggtggatgatcacaaggtcttgatgggttccaacggtggaagtagtaacaacaacactaataaggtattggcaaaaccaggtcaagatcagcttgtgcagcagcagcaacaacaacaagaa

SEQ ID NO: 30780 - DNA, 480 bp, Glycine max
cggctcgagcccgcttctctttctctctctctctctctcgctctgtagccgtcttcgccaccatcaccgccacggacctcaatttcgacgcagacacagctccggcgaaggatttcctttccaactttgcagacgccaatggcgaagccacatacatgaacatcctgcaagatgttgcaaaccacaaaactcgagcagcccagatcgaccttgaggatttatttaattacaaagatctggacgaggaatttctgagccgtgttactgataacactcggaggtatattgggattttttccaatgcaattgatgaactcatgccggagcccaccgaggacttcacagatgatgatcatgacatattgatgactcagagatctgatgaaggagcagaaggcaccgacggttccgatccacgtcagaagatgcctcctgaaatcaagcgttactatgagctttatattaaagcatcttcaaaag

SEQ ID NO: 30781 - DNA, 439 bp, Glycine max
gccagccatccaaaccccgctgcgattgtcctcgttctcgttctcgtcctctctcagccgcggaatccgtccccccggaatctgccatggaagatgtatcgaatattatcgacgccggcgtcgaagttccgccagttccggcgactccggtctcgaccgaaggcagcgacagcgacagcgacagaggaggagcacgcgttccagatcctatggcgttaccagatcctggaccccgacagcgacatcgtggcctattggaaccgggtgttccttgttacgagcctcctcgccctcttcatcgaccctctctacttcttcctccccaccgttggcggccccgcctgcctccaggctgatcccaaactcagcatcctcgttaccatcctccgctccttcgccgacctcttctacgtcctccacatgatcatgaagtttcgca

SEQ ID NO: 30782 - DNA, 360 bp, Glycine max
cacccttcttctctccacccaattaaggaagagtgtgttagtgtgagaaaaccctttagtggtgatagagtgaagagagatgaatggagtgaaggggcagtgtcaaccctccttgaggcttatgaggccaaatgggtgctaagaaacagagccaaactcaagggccatgattgggaggatgtggcacggcacgtgtcggcacgtgccaactgcaccaaatcaccaaagacttcaacgcagtgtccgaacaaggttgagtccctgaagaagagatacagatcagaatcagcagcaacagcagatcatgcatcatcatcatggcctctttattcacggcttgatcttcttcttaggggaact

SEQ ID NO: 30783 - DNA, 300 bp, Glycine max
cccaaagggataaaagaaaaaacttaatagtacatgggagttgatgatgaacaagagatggaggaggaggaggaggaggagagagaagaagagaaaaagaagcataagcaggctcctccttctctcttccctattagtgtgagaaaggggtttagtggtgaaagagtgaagagagatgagtggagtgaaggggcagtgtcaaccctacttgaggcctatgaggccaaatgggtgctaagaaacagagccaagctcaagggccatgactgggaggacgtggcacggcacgtgtcatcacgt

SEQ ID NO: 30784 - DNA, 305 bp, Glycine max
agagtggtgagattttgagatccatttgaagttgataatgagccaaagagtattagtagtcctgctgcttgtcttgaattatgtgttggttgcagaaggagaaacagctgatggagatttgaccacatttttgtctcttataattacctgggagaacacccctcctaattgggtgggttcagatccttgtgatgattgggttggaatcaagtgcaagaattcacacattacatcaataacattatcaagcaccggtttggctggtcagctttctggagatattggatcactatctgaattagaga

SEQ ID NO: 30785 - DNA, 528 bp, Glycine max
gctattgagtatgaagaaccagccggggatgcatttaaagctaatcatcctgaggcattggtcttcattaacaattgcaatgttattcttagggctgtaatggagaagtgtggggacacagatgattgtatctcaacatctgaggctgcagaattggctgcaaagcttgatgagaaggaaataagtagtttaccaatgcctggacaagttgatttcattaatggtggtcctccatgccagggtttctctgggatgaataggtttaaccagagcagttggagtaaagtccagtgtgagatgatattggcattcttatcctttgctgattatttccggccaaggtatttcttgttggagaatgtgaggaactttgtgtctttcagtaaaggacagacatttcgtttaactttggcttcacttcttgagatgggttatcaggtgaggtttggtattcttgaggctggagcatttggggtttcttactcaagagacagggcattcatatgggctgcttctcctgaggatgtg

SEQ ID NO: 30786 - DNA, 427 bp, Glycine max
catattcctagttccagaattcagattgattaattcaaaccccatagatcatacataccctctcccaatcctcattgaaccctctctctccatgcttatttagtgctcctttttgttctgcatcacccaatcaatcactgacccctctttgctcccttgtcttcattgcccacatatctttttctcgcaaagtttgcgactttgtgttgcgaagatgagcggtgcggggtttagggcttcaattccgagcagtgtcaggaggacgatccaaaacatcaaggagatcacgggcaatcacagtgaagaagacatctatgcaatgctcaaggaatgttccatggatcccaacgagaccactcagaagcttctccttcaggacacatttcatgaggtcaagagaaagaaggatagaagaaaggagaatctt

SEQ ID NO: 30787 - DNA, 330 bp, Glycine max
cgaagagatggatacagagttgggtgataaagttggctatgctatacgttttgaggatgtgaccgggccaaagaccattataaagtacatgactgatggggtacttctacgtgaaacactcaaagactctgatctagacaagtatcgggttattgtcatggatgaagcccatgaaagatctctaagcacagatgttctttttggaatattgaagaaagttgttgcccaacgtcgtgatttcaaactgatcgttacattagcaactttgaatgcccagaaattttcaaatttttttggaagtggaccaatttttcatattcccgggcgaac

SEQ ID NO: 30788 - DNA, 1060 bp, Glycine max
ttcaccaaggaacgtgggagtgcgtgtgaccctgatttgaggttaaggggtcatgataaagagggttatggtttgtcttggagcccttttaagaacgggtatcttttgagtggttcgcatgaccataaggtttgcttgtgggatgtgcctgctgctgcctctcaagagaaggtgcttgatgcacttcatgtttatgagggtcatgagaatgtggttgaagatgtgtcctggaatttgaaggatgagaatatgtttgggtccggtggagatgactgcaaattgatcatttgggacttgcggacaaacaaagcccaacaatcagtcaaaccacatgaaaaggaggtgaactttctttctttcaatccatataatgaatggattttggctacagcatcttcagatacagatgttggcctctttgatacacggaagctggcagtgccgctacatattttaagtagccacacagatgaagttttccaggtagagtgggatcctaatcatgagactgtgttggcatcttctggtgctgacagacggctgatggtttgggaccttaacagagttggtggtgagcagatagagggagatggtgaaggtggccctcctgaactactcttctactcacgggggtcacaaagggaaaatatcagatttttcatggaacagaaatcagccatgggttatcacaagcgtagctgaggacaattctttccatgtctggcaaatggcagagagcatttacaatgatggagatgatgacaacatgtggacggccaatgattaattaaacaaacacatgatcaaaggcgatggtgctcttactaccattgctttgttgttttaattttattgtaatctttgaccatttgatttatggcttctttcgccttttggtgtcatgtgaatgtcttgtgatcattagcggctggaacagtgatggcaacatagtatcgttgtcaaacatgaactctcttttatatgcagaaattgatctctgaagcgcatataaaaatcccccgatgataatccaactatgtccgtgcgcaacttgcttgag

SEQ ID NO: 30789 - DNA, 364 bp, Glycine max
cctcctgaactactattctctcacgggggtcacaaagggaaaatatcagatttttcatggaacacaaatcagccatgggttatctcaagtgtagctgaggacaattctttccatgtctggcaatggctgagagcatttacaatgacggagatgatgacaacatgtggacggccgatgattaattaaccagacacatgatcaaaggcgatgatgctcttattaccattgctttattgttttaatggaatctttgaccatttggtgtcatgtgaatgtcttgtgatcattaacaactggaacagtgatggcaacatagtatctttgtcaaacatgaactcttttttatatgcagaattgatttctg

SEQ ID NO: 30790 - DNA, 254 bp, Glycine max
ggactgtttaaatattcatggaaaacaaaagcaacatgcccgcactactacgttcttcaacttctgcaaagcagaaaaggggatcttgctctgtactgatgttgctgctcggggacttgacataccggatgtggactggattgtgcagtttgatcctcctgatgaaccaaaggaatatatccacagggttggtagaacagctcgtggggaaggtggaaaaggaaatgctttacttttcctgattcctgaagaat

SEQ ID NO: 30791 - DNA, 522 bp, Glycine max
acgagcaaccaaaaaccagcaactatatacattgccatattctgctactcctcaattcaacacacgcatatatatccatggcatcacctcaaacagacctcagaaagattgctctagaaggcttcgatttaatagacaagctctacggtcgaaggggccctgccaacaatgatgcgttccccggccgacgagaaggcttttgggtggttcatcaagtccctaatggcgacatggatcaaaagcctcggaaaaacaaagatgttgtaaactatggagtacctgttgcaaacctccctaggggaaaaccccagaatcgttggggtaggcctatcaaattttaagcagttatggcttaaatattattattataaagtgatcttcttgtgagtctctagatctctgatccatgcatgtaggttaatatattcagtgtagcatgtaatgtaattgtagagctcgatgacctgccacagtttataatatataaggcaaggtcttctgcagctaaggagggatatgtag

SEQ ID NO: 30792 - DNA, 253 bp, Glycine max
tggccaaagagctattaaaagaccatgaccttgaggttagtggacgatctaaattacttagccagcagaaattgtcctacaatgggttagagattatattttccgcatatggtgagttttggagagaaattagaaaaatttgtgttgttcatgtccttagctccaggcgtgtctcaatgttttcctcaatgagagaatttgagatcaagcaaatgattagaacaatatccttgcacgcctcatcttcaaaagt

SEQ ID NO: 30793 - DNA, 406 bp, Glycine max
gcaaaggagttaaagaagcagtcttggagataccaccgaaagtataacacatggtttcagcggcatgaagagcccaaagttgcaaccgatgaatatgagcagggaacttatgtgtactttgatttccatattgcaaatgatgacatgcaacatggatggtgtcaaagaatcaagactgaattcacttttgagtataattatcttgaagatgatcttcttgtatagaagatgccatctgggacactgaaaggaaagaaaatatgattaaagtgaagataaaataagggaagattgatgaggtatgtatgaactttgtttgaatgtgactgtcaaatagagaaaagtttggacatacaatccaattataattgaagataagatggcacaagccgaattgatgagggtt

SEQ ID NO: 30794 - DNA, 439 bp, Glycine max
ctcatgaaggcatcagagaaattggaagtttcacttgagccatttacttttgagctattgacagtgtctccagtgattgtgctgtcaaaaaagttaattcaatttgctccaattggattagtgaacatgcttaacactggtggtgccattcagtccatggagtttgacaaccacatagatgtggtcaaaattggggttaggggttgtggggagatgaaggtgtttgcatcagagaaaccagttagttgcaaactagatggggtagttgtaaaatttgattatgaggataaaatgctgagagtgcaagttccctggcctagtgcttcaaaattgtcaatggttgagtttttattttgatccctgaaggtgaatttgggatactatgatgtttgactctctttttaagtaataagagtcatatttttctgttgtaggtttt

SEQ ID NO: 30795 - DNA, 290 bp, Glycine max
gctagttactgcttagcttctgtggtgtgtgtgggtgagaggaagaagaagaagcaaatggagtttcaacgcagcgattcatcatcgtccccgcccacacccaacaacgccgatccgaagaaaaacacttgttctgacccaatgcattcatggtgggaatcagtctcaaaagcccgttcccgaatccacgccctcgccgccatcctcccctcctcctcctccgactctctctcctctttagcggactccgaccgccccgctttgtcgttactttcctcccccgccgccta

SEQ ID NO: 30796 - DNA, 322 bp, Glycine max
tacagaaggggagtgacagatgccttaaatgcaaccaaggcagctgtagaggagggcatagtaccaggtggtggtgttgctcttctctatgcatcaagtgagttggataagcttcaaactgctaactttgatcaaaagataggggtccagatcatccaaaatgctttgaagactcctgtgcacacaattgcttcaaatgccggagttgagggtgctgttgttgttggtaaactattggaacagaatgatcctgatcttggatatgatgcagccaaaggtgaatatgtcgatatggttaaagctggaatcattgatccattga

SEQ ID NO: 30797 - DNA, 1051 bp, Glycine max
  unsure (1)..(1051): unsure at all n locations
aaaaaaagaggcaacatattgaagatggatcgccacaagtatgtgaaagtagcctatcatggattcagagagttatcaaaagaagataaagttgggacctatggaaatactttagtacgcgattcttttgatgaaccagactatgctctaattgatacactcttttcacttgcggaagcctacttgtttgctcaactggttgattataaggattacaatcctggcaagattcaagagggtgttgattatgcttgcatgtacaaagatgttcgagcagcagttgatttgtgccaccgtgacggaacattgaagcaaatggttgctatggaaccaaaaaggtatattaatgaagacccctcaatagtgcccatgctcgaaatgctcagagactctggacgtgcaatgtttttagtgacaaatagtttatgggactatacaaacattgtcatgaatttcctctgtggatccagtatggcagatgtcagtaacaattttggctggcttcaactctttgatgttgttatcactggcagtgcaaagccaggattttttcatgaggaaaatcgtgctaacctatttgaagttgtgcccgagactggaatgctactcaatacagataatggctctcctatgccccaggtggtaatacctctgcaaggttattcacagaagcaaagaattatgcttgtccagttttccagggaggcaatgttgctcatctgcataaactgctttccattgaatcaagttcccaggttctctatgttggggatcacatttatggagatatactacgcagcaaaaaggttcttggatggaggacaatgcttgtaataccagagctggagaaagaggttaaactcctctgggaatctagagatacccgcaaggaacttcaattcttgaggagtgaacgggaccgcattgaggatgaaatacatcatttgaagtggtctctcaaattcaagaatccagatgctgattccaagcagaagttatcttctgaacttgaaaaattgganacttgaaagagagaaagtgcgattaagtc

SEQ ID NO: 30798 - DNA, 296 bp, Glycine max
agcgtcgttgatagcaagaagaggccagagtcgttttaaatccaatttttccatgtcgttcgcatcatcattctcgatgctccgccaccgcgcggtcgggcatacgcgcccactctcctcctccgccgcttccgctgtctcccaacgatcgccgccagacaccaacaacaacaacaaaaccctaacaaacaagctgctgccccgagccgcaacctcctgaaggcgaaacaaacactgaaagagtattcctgtcttgcccctgtcctctccctcgaagacagccctcctctgacgga

SEQ ID NO: 30799 - DNA, 296 bp, Glycine max
gcaactgggtcagagtccgagcaagaaatatcctttgaaaaacacagatggagagctgccggagtgggaagacttccaatattttatgttgcagacaaagtgtcgatgtggatgctatctcttttacccctggaaaaaggggaccaggtgcatgacagaaaagcacaataaggttgtcgtagtcagttattctggcatggcatggcatagcagatgacaagacaaattctatgtaacaagctctgatgggataggatgggttggttgcacacgtgacttcagaaagttaaagctac

SEQ ID NO: 30800 - DNA, 320 bp, Glycine max
ctcgaagctattacaggtgtacccattcatattgttgtgctaagcagattaaattttgcgaccattcaggacatgtgatagagattgttgataaaagtcaacatagtcatgatcccccgcataaaattgataccgccaaggaaagtaagctcctgccttccagtgaacctatagttggaagcagttgttgcaaagcagtctaccaatgttcggaatgattctgatccatcatcttctccgaaagaacctttgcaagaagcaccctgcaatggtgataagaatctagaaaactcatctaatgttgagaatggtaaaattat

SEQ ID NO: 30801 - DNA, 290 bp, Glycine max
tacaccgaactagtttaataagtctcagaaacactcactcactcgattcttctcaaaccgtcaccgtcgaggctatgcccaccaacgaagacttccagagtgtttcaaattgctatgtgttcaagagccgattgcaggagtatgcacagaaggcggggctgcccacgcctgtctatgaaactattaaggaagggccttcccatgaaccttctttcaggtcaacagtgatagtgaacgacgttcggtatgattctttgcctggatttttcaaccgcaaggcagcagagcag

SEQ ID NO: 30802 - DNA, 668 bp, Glycine max
agattatagagattcagctatggccttaaggacacatgatgatgccaatgatactcgaggtgagggttcgttgaaagtggcttctgagggaggagaaacagggagatccattccttatctttcatcaagcattgccaatacattttccttcaaaatacaagataagaagggcagaatgcacagattcacatgtgatacccggagcatgatggaggttataacttcaatccttcagagacttggtgatgatatcgatcctaacaacataccccaaattctgtatgaagacgaagatcatgataaagttgtattggcttcagacagtgatcttgcagcagctgtggatcatgcaaggacagctggtttgaaggggttgaaattgcatttggactacgcaggaccacgtgataatgtgaaaggttctcgttcaggaagttatgcttattcagatgcatgggcttcagcatatagtgccgccgctgctggtgctgcacttgttgctggcttaggcatattaacgtacttgaagcgagtttgattaaatgaagaaacgagttatgccagtgaagaggccaagctgaagttagcttcaattttggaggggcgcactgtctgcttgccatctttatgttctgaaattttgtacaactacatttatatatacgagg

SEQ ID NO: 30803 - DNA, 487 bp, Glycine max
atgatatctcgagatcggagattgtttctgatgatgttgatccaagagtgcaaacatttttcttttgtggaaagcctctaaagcgtaggacaacagcagaccaatctttgaaaaatgcagtgggcttagagtcttcctttcctgcaggagggactgatattttggagaaggatgatggtatttctgccacaattattcgatcacgtcctgatcgagactctgttcagtcaatgtctgactgtgatcaagcagtgcttcagtttgccaagacaaggaagttgtcaattgagcgtcctgacccacgaaacagtaccctcttgaggaagcgccaattttttcattcgcacaaagctcagccaatggcaattgaacaagttgtatcagataaagatagcgaagatgaagttgatgatgatgttgccgattttgaagatcgaaggatgctgaaaattttgttgacgtgagcaaggatgagaagagtttaatg

SEQ ID NO: 30804 - DNA, 581 bp, Glycine max
gcaaaagctctcaaacaacaatttctgctgggtcttctcttcagagtcagactctaaaagcaagcatctatcttattgatggaagcgtgttttggttattttatttcatttcatgattcatgatcatcatcatcatcttctctcgacaaaatcaataactgtccacttctacttcttttcacgttttcaatcgttcttgttcttgtctttgttctttgatcttcattcattcttttttcgatcacctcattcttaaagagaaaccatcaataaccacccttcagtttccgcaacaatcaatattttgtttttgttttcaaaagattgaattttaaccttctttgaaaaaaatatcccatcaccaccgttatgttgctaagaaacccttctttatacacaaacccagaaccctgccagcaccttgctgagtaccagctcgagcatggcttcgatggctacagagccatccggaagctcctggtgatttctccagttgggagagccagtgtcacgagaccctacacagagggatccagatgcggttcctgtagtgggtgtgaagggagcttctatctatgcct

SEQ ID NO: 30805 - DNA, 369 bp, Glycine max
aaaagttgtaagggtggctggaatgttcagcttttcattttgcccccccccccttttcctttcatttcactatcataacttgagttgaacacgttcccgagacatctcaaatttcctctgctgagaatttcacgagtatcaggtggtttattcaaccaacagtggatcttcaatttgttggtttcagtgttcttgtatgtgtgttttcattttgatgagttcatgtttatgagccacaaatgcaagtgggaacgaagaatggggtttggagttagtttggacaagtggtgtggtgtggtgtcctatgtaatgagtgcacatatgtgaagtgaaaattcctcatccttttcctcttttttcacgccttaa

SEQ ID NO: 30806 - DNA, 588 bp, Glycine max
gtacaacttcttgtgcacattagagaagagaggacccctcttcgttctaaccctaaccagcgaattcgacgaccagcaccgcctcaaccccaccctcctatcttccctcctcgctgcgctctccgaagtcaagtcccaagccaccgccggctccgccctcctcaccgccgcgcacggcagattcttctgcaacggcttcgacttccgctgggcccaggccgccggcgaccagccctccgcccgcctccgcctccgccgcatgtccgacgccctccgccccgtcctcgccgcgctcctctccctccccatccccaccgttgccgccgtctccggccacgccgccgctgccggagcaatcttcgccctcgcgcacgactacgtcctcatgcgcgccgaccgcggtgtgatctactttccggaggtggacctgggaatcactcttccagaatacttcgccgccgtcgccggggcgaagatcccggcggcggcgctgcgtgacgttgtgttggccggaaggaaggttagggcggagggggcggtggagatggggatcgtgcactcggcgcacgatagcgcggagggcaccgt

SEQ ID NO: 30807 - DNA, 293 bp, Glycine max
atctcggagtggttacctgcaaagatgcctaatgaaaaaccttgagtgccttaaagtttgttatgatcatactgtccgtgatgcggatggttcaattattcagtttcactatggagaagatggtgttgatgtccatcagactagctttatcaccgagttcggtgcattgtcaactaatagagaattggtttttagcaactattgccgtcaactagacagatccagtccatatattaacaaattgcctgaggctcttgaaggaaaagcagaaaaattctcgaaacagagaaatc

SEQ ID NO: 30808 - DNA, 348 bp, Glycine max
tcggacatcggctcgagccttgttgtgttctctagccagcaccatacacgatcccttgtgtgtgtttctgaaacataatccaatttttctctgacttcgtctctgcaaatgcctttcatgatttcaacaacagcatatgaatgtctctaatttcaggatcattctttcataaaaaagtttgaagataaagatctagatcttgggattttgttagcagcaaaatcagtgaacaacgaagctgaagacaaagatgccattgaagcagctgaagctcgcggttcctgctcaggaaacccccatcacatctttcctgactgcaagcggaacattccatgatggagatctact

SEQ ID NO: 30809 - DNA, 457 bp, Glycine max
tgatgatgagtaccaaagactcagaagaaggcaaagactttggtattggtaatggcatcttcctcagttcaactgtgccttttcctcaaagtcaaagccttctcttccccttcacaacatcaaactcctttgacacaaaccaatgtgcaatatcgtcctctttgcgatcctccagtgtgtataactatggtgaagagttcaaaataacggaggagccaaccatcaacagcataatgcccaacgctagcggaggcaccaacacacagccatgggagatagctgcaacaagttctggcttggaaatgtcaaactattggacttgggaggacattgattcgtttgtgtcaactgatccaaatgttccttgggatgattctgatatcaaaccctgacaaaagaaaagaagaaaaaaatgaaaatagtaacccatgtccttagattagttattaattaattg

SEQ ID NO: 30810 - DNA, 410 bp, Glycine max
gcctcgaggccggcccagaaaaatggcctggcccactggaggccttggtgaagtatcgcaggccgcctaaggcgaagcctgtcactagtaatgggaggcctagaggtaggcctcccaaagtgaaggccgtattcactgaaattagtgtttgactataaaggcttatagggcttgcatggaatagggaagtgttgtttctacaaaaagttggactgagtaacggttttgtgtgtttactagattcttctcttatgtgttacacttagctgaaatgctgaattgttgtgtacaatcgtgtagtgtagtgtagtgtagttagttgctgaggctttgttcgtttgtaaattgtaactgtgaaaataggacaatgggtggagctaatggacgcaatctctcaaattcttgatgtg

SEQ ID NO: 30811 - DNA, 346 bp, Glycine max
cttgatttcaagagagaacgagattacttcaaccataacagcttaatagtagtgtggtgagtgtcacctttttctgtatactctctagtgtaagagtcatggattggcttagacgcagcctatctaggggttcaaggaatagcaaaaccccaaatatccaaacgcagtccaactccgaagtacagcaacacctagaagaaagcatatacgggattaccgaggaactcatcaaccacatcaagaccttcacccttgacacctttaagaatttccctctccaagatgaagttgaaggcagttatggggaagacactcaatcctcttcaaccaaagtccgaaatgaact

SEQ ID NO: 30812 - DNA, 318 bp, Glycine max
ccttttacgaacaatggcttcagattgtcttggaaaaccagacaattcacttggtccactgggtctcagtaaaatacctccaaaggcagagttctataatgggcagaatgctcttgtggctgtcaatgtacatctgggatacaatcaagaggattccctggtgatgaaccgtgcttcactgtcgcgtggtatgttcaggtctgagcacataaggagttacaaatctgaaattgacaataaggaatcttcagataagaagcgaaaacctgaagacattgtaaattttgcaaagctacaaagtaaaattggccgagttga

SEQ ID NO: 30813 - DNA, 263 bp, Glycine max
cttctttagggagaggagcatggaattcaaacctcccaaattctatggagaaggattaaattgccttaagctgtggagagctgtaacgagattgggtggctatgataaggtgacttcatgtaaattatggcggcaagtgggagagtctttcaagcctccgaagacatgtaccactgtctcatggacttttcggggattttatgagaaggcacttcttgattatgaaagacataaaataaaaggtggtgagctgaatgttcctg

SEQ ID NO: 30814 - DNA, 565 bp, Glycine max
tcactgccgccgccacagcctatcgtattgcctcaagaaaacaacaacctctgcgtcgaaattcccgccggacaatcagataaatttgaagagttacaagtctccgagggtaccgcgaaggacaatggtgttttccagaacgtttctgctatggatatattcaaatacggtggtctgtattttcttgggttttttgtgttgcagacgatatacaccgtttggattgttggggtttacaaatccaaccagaaagacggggaattggagatagatggaagggaaaatagggatgagaaaactgtgtcattgcctgttaatggtgctagcaatgcttttctttctgaggagcaacttttaatggagaagaaaatcgaggaaattaagttaatggcgagggaagcgcggagaattgaatcagagaagaaagggaaagaggatgaggatgaggattttgaagtggatgatgatgaaggtgctgtttctggtaatagacttggtattgagaaagagattggtgagcgattgttaaggctgcagaataggataaatggtagtgctaaggata

SEQ ID NO: 30815 - DNA, 259 bp, Glycine max
ctttgtgcttggtgtggcacctggataggagacgcgctttgtagtagttgcagacatgcacggtattgctctgagccacaccaggctatgagttggcgcacagggcatataactgcttggccaacagatgaaagtttcttcacctgtttttggacccaacaaaagtggatccacctccttggagtctcataaagttggaagcaagaatctgtggcctggatttgagatcagcattgaagatgaaagtgaatataatagg

SEQ ID NO: 30816 - DNA, 459 bp, Glycine max
atagatgcatcagatccaaagggaaacataggcacagcgccataggccactgcaaaatttaaagatgtaccgatgaagatactgagcccccgtgaatccaaagtcagccaatgacatcttttaaaagaaaagttaattgtatatccccagaaatgatttggaaagtccaggaaaggtgacgatattgaggctatgagacgtgtatctatcccggctagtgttaagtcatagctaaaaattgtttatgaatagatatagttctcttcctatttgactctgcgcatcgcatacaaaaaaacggttggttttgtgtaatacttcacatgaactagctggttttacctcatacatcataaaggttgtattagccatagcattaaatttcatagtttgactttgattttgtagtattaacttgttcaaatcattaataagcaaaaaaaagaaaacactagttcc

SEQ ID NO: 30817 - DNA, 432 bp, Glycine max
gttgaaattttctatactcaggaacctgaaagggattacttggaggctggcattaggacagtggtacagatacacatgtgtgagcctccaggagatatacttgtatttttgactggagaggaagagatagaagatgcttgccgcaaaataacaaaagaaatttctaatctgggagatcaggtgggccctgttaaagttgtacccctgtattctacacttcctcctgctatgcagcagaagatttttgagccagctccacctccactgaaggagggtggacctcctggaaggaagattgtggtatcaacgaacatagcagaaacgtccttgacaattgatggtattgtttatgtcattgaccccggttttgctaagcagaaggtttataacccacgagttcgtgtggagtctttattagtgtcaccaatatcg

SEQ ID NO: 30818 - DNA, 465 bp, Glycine max
aatgaagttcctacatattcctcttctccgtgggaacaatagctctaaacaaacgatgtcaaaagtgactatgccaatattattagccttttttatatttattctcaccacaatttcttgttttttgttaatttaccattcactactgaagatcaatgatgaatataaggagccatcttttgatgttgatgatttgattgtgccagaatccttgccctcaacacctgtgaataagtgtgacattttcactggtgattgggtgccaaatccagaggcaccatattacacaaacacaacatgctgggaaattcatgagcaccaaaattgcatgaagtatgggagacctgacactgatttcatgaagtggagatggaagccaaatgagtgtgaactccccatattcaaccctttccagttcctacaaattatgaggggaaaatctttggcttttgttggagactccat

SEQ ID NO: 30819 - DNA, 440 bp, Glycine max
gcaaaaaagcgtaatcaaattgaaatagctgctgagaaaaagaggatggaagctccaaccgagtctaggggtgtttctaaacagaagtggctcgaggataggaagacaaagattggaaaacttcttgatgcaaatggattggatatgacaaaggcatatatgcttgacacacaggaggcagcagaagaaaaatacaagaaatgggagaaggatcctgctccattcgggtgggacgtctttaatcagaagacattatacaatgcatacaaaaagcggaccaagaatgttgaagtcgatgtagaagaatataatagaatgaaagaagctgatccagagttctaccgtgatgcttcaagtctccaatatggaaaggcaccaaaaatctcagaggagaagattgacaagatggttcaagagctaaagaatacggacgacaagcg

SEQ ID NO: 30820 - DNA, 326 bp, Glycine max
tgatggtcatcacatgtttaatgaaaatgttggtttccattatggggcaaaacaagaaaggttattaggaacctcttgcaatggtaatcatctgagtcctggatccgttttggaagcttctttttcttccagtagtctggatgaaagctcagggcatggttttcaccctgaccccatgaattactcttattatggtcaaccggaacgtgatactgaactttcagattctgcaacatcctttaacaaaggaaggatggatgagacactgagtgatgttgtcaaccaaattccccgggcattagaaagtttgctcacttttgggacag

SEQ ID NO: 30821 - DNA, 325 bp, Glycine max
ggaattgtcaattccaggttggtaaatgagttggcagatgtcaagttattagcaaaacgctacatgcaggattatgagaaggaaaggaaggccagagaattgattgaagaaatttgtgatgagcttgctaaggaaattggagaagacaaggctgaaattgaagcactgaagagggaatctatgaaacttagggaagaagtggaagaggagaggaggatgttacagatggctgaagtatggcgtgaagaacgtgttcatatgacattgattgatgcaaaagttgctcttgatgagaagtactcacagatgaataaacttgtagcgg

SEQ ID NO: 30822 - DNA, 492 bp, Glycine max
cttttcttcagcccatagcttacctgattctcacgcatggtctcactctcaacccaacgatgatgattatgtctcattcaatgatgatgcatcatcatcatcattcatacccatcatagacctcatggatccaaatgccatggaacaaataggccatgcatgtgagaaatggggtgctttccaattgaagaaccatggcatacccttttgtgttattgaagatgtagaagaagaggctaaaaggctctttgctcttcccactgaacagaagttgaaggctcttcgatctcctggtggtgcgacggggtatggcagagcaaggatttcaccgttcttcccaaagttcatgtggcatgaagggtttaccatcattggttctccctctcatgatgccaaaaagatatggcctaacgatcatgcagggttttgtgatttgatggagaatgatgagaagcaaatgaaggttctagcggagagactaacatagatgat

SEQ ID NO: 30823 - DNA, 411 bp, Glycine max
ctccgagtttgactacatataatagcttgatgtatatgtacagccgttctgaaaacttccaaaaatcagaagaaatgttgagggaagttctggagaaaggtatgaaacctgatagaatttcatacaatactgttatttatgcatattgcagaaatggtaggatgaaggaagcttctcggatattttctgaaatgaaagattctgcacttgttcctgatgttgtaacttacaacacatttattgcaacttatgctgctgactcgatgtttgctgaggctattgacgtagttcgatacatgatcaagcaaggatgtaagccagaccagaatacttataactccattgttgattggtattgtaagctcgaccagcggcatgaggccaacagttttgttaaaaaccttagtaatc

SEQ ID NO: 30824 - DNA, 254 bp, Glycine max
agttaacgagtatggtaggtcatcctcagcgccaagacatattcataggactccggtagctgttcaggccctcccagttcaatctcaggcattgggaccacaggaaaattcaataactaatttgaatagttccttgctacctagcaattcctctgctgctcctcatatttctttgtccaaccctgcctctgtagatactttgaatgccatactaagtgatacggaaagacaacaacatttttctcgaaccccaa

SEQ ID NO: 30825 - DNA, 498 bp, Glycine max
ttatgatttggcagctctgaagtactggggtcccactgctaccaccaacttccctgtttccaattattcaaaggaagtggaggagatgaaacatgtaacaaagcaggaatttatcgcatcattgcgaaggaaaagtagtggtttctccaggggagcttccatatacagaggtgttacaaggcatcatcaacagggtaggtggcaagcaagaattggccgtgtagctggaaacaaagatctttacttgggaacattcgcaaccgaggaggaagcagcagaggcatatgatattgcagccattaagttcagaggtgcaaacgcggtcaccaactttgagatgaatagatatgatgtggaagctataatgaagagttctcttccagtgggtggggcagcaaagcgcttgaagctttcccttgaatcagagcagaaagctcttcctgtgagcagcagcagcagcagcagtcaacagcagaatccacagtgtggaaacgtgag

SEQ ID NO: 30826 - DNA, 912 bp, Glycine max
agaagttgtgcacacctgatgttaaagctgtggtgaacattaaattttcagtttctgatgtcaagagcaattacaaggatgctacccttttaccaaaatggaaggcattccaaacagtcatatttcttgaacgggatgatggtctgcatgattcaagtaaaatcgctgcatttgattttgatggatgtcttgtaaaaacagatgtgaaaagagtgggtgcagatgcttggtcccttatgcattcgtctattcctgataaactacaaagcctatacaatgatggctacaagttggtaatttttaccaatgaatccaatattgaacgttggaagaataagaggcaagtagctgtggactcgaaaattggacgtctaaataattttattgtgaaagtgaaggttccagttcaggtttttatagcttgtggggtaggtagtaaatcaggtaaagtaaacaaaaaggaagatgatccttttcgcaaacccaaaccagggatgtggcatcttatggagcaacacttcaactctggcatcgccattgatatggatcaatccttttttgttggtgatgcagccgggagagaatcagatcacagtgtcgctgatattaaatttgcagaggccattggtttaaaattttatgtcccagaagagcacgtcgcttgagcgtcgaattaagtcattggttcataggaaggttaaggtctcataggtgtccagttttgtttgaaagtgacatttccacctgcaagtatggaacagaaaggatgtaaatgaatgtctgggctatcctaaaccctaaacttaacgcatagtcggctaatttgtgaccaatcccaaatttattctatggtgcttcaactatgattcttatcgaccagctttatttccttttaaaaaagatataatttct

SEQ ID NO: 30827 - DNA, 367 bp, Glycine max
tctggagcttacaaagatgcgaaaggaaagtgttgaaaaggcttccataatttgctccctgaatgaacttgattcattaggcggttgtgaagggaataccccagagcaaatcagtgcacaattagaaagactaaatcagacaattaggcgtgagagccaaaggtactctgaatcaatcgatgatctcaggatgctgtataagaaaaaagagcgtaagattataaaaaggcagctagtttacaaaactcttcgacagaaattggatgcttgccagagagccttagagttacgaaagagaaagtttcagagaaatgcaacttatctgaagcaccagctatgttggaaatttaatggccatttgagaaag

SEQ ID NO: 30828 - DNA, 146 bp, Glycine max
ctttatttgcatacaacagaaagtcgaacgagatatacttcaccggcgcttcaaacacatcggcattgtcattgaattatcattttggtcttgtatttgatggtcagaactgccaagtaccaagagataaatgagtcattcattac

SEQ ID NO: 30829 - DNA, 264 bp, Glycine max
tatatacttcaaaaagtatttactaggctgggttaggacatattttggggtagccaatcatgcaaattgacaatatttatttatttatttattttgtaaaagtttggtgttttctcataattttaggtttgttttttttattcttttttaagttgttcaagtttagtcatattacttgatgttgaagtttccaaacatttgattttgatatagtttgagactggagcttggaaaaggcatgaattttcaaacaatttatttagt

SEQ ID NO: 30830 - DNA, 371 bp, Glycine max
ctgctataaaaaacccagtgaatggtatgcagaaatcactcccaccgaagaatcatccatccattccaaaacagattgtagaacaaagaatttcgaagcacagtgttgaacaaagaattccaaagcagagtgttgaacaaagatttccaaagcagagtgttgaacaaagaattcaaaagcagagtgttgaacaaagaattcaaaagcagagtgtggaacaaagaaaagacatacgagaactatatagacctaaaatggcaccaaaacaaccagtggcatcatcaaaaccacagataaataggccacttaaacaaaattcagtgcatactgcttcgcaagatcgtcgtcccaagcctaaggctgctaaacga

SEQ ID NO: 30831 - DNA, 359 bp, Glycine max
ataatgattcagctgagattgggaagaacaagcggccgcatgtgtcggtttgtgcggatttgaagttggcattgaaggggattaatcgcgtgttggagagcagaggggttgcagggaagcttgatttcagaggttggagggaagaactgaatgagcagaagcgaaggtttcctttgagttataagacttttgagaaagagatttctcctcagtatgctatacaggttcttgacgagttaaccaatggggaagctattgtgagtaccggagttggacagcaccagatgtgggctgctcagttttacaagtacaagaggcctaggcagtggttaacatccggtggtcttggtgctatgggg

SEQ ID NO: 30832 - DNA, 439 bp, Glycine max
cggctcgaggaaaataaaaaattgttcttgtttgtccatttagccatgaagaagttgtctttctccatccccaccgcaaaaccccaatcggtggacacttccaccacccgaaaggacgacgacagcgacggaaccaaacagtacatcaccgaattcgacccttccaaacccgcaaaccccaaaatcacaatccccccaatccaaaaccagtggaacccccaacaagacaacgaacacagcaccacgcggtggcgccgcactccggaggagaccgagctgctgcgtaagctgaaactggaggaagatctgcagaggttgccggaggaccaggggttggaggagttcaaggatgtccccgtcgaggttttcggcgaggcgttgctcgctgggtatggctggacggaagggatggggattgggaagaaggccaaagaggacg

SEQ ID NO: 30833 - DNA, 459 bp, Glycine max
cggaaatggcgtggccaaagctgttaaaaatatcaatgacaagatatctgaggcgttgattgggatggatcctacgcttcagtcgcagatgccctcaggccatgattgacctcgacaaaactgagaagaagggggaacttggagccaatgctatattagctgtgtccattgctgcctgtaaagctggtgctgcagaaaaggaggttccactttacaagcacattgctgacctgtctggaaaaaccagcccaacacttcctgttcctgcctttactgtcataagtggtggaaaacatgctgggagtaacctggccattcaggaaatcatgattctcccaatcggagcaagcaaatttgaggaagcattgcgaatgggcactgagacctatcagcacttaaaggctgtcattacagaaaaatatggtgcacataactgtaatgtgggtgaagatggtggct

SEQ ID NO: 30834 - DNA, 421 bp, Glycine max
ggaatgatcgcctaaagatagctcttggttctgcccagggtttggcatacctgcaccatgaatgcagcccaaaagttgttcattgtaacataaaatccagcaacatactgcttgatgaaaacatggagcctcatatatctgattgtggtcttgcaaagcttttggttgatgaaaatgcccatgttaccacagtgggtgcaggcacatttggttatttggcacctgagtatctacaaagtgggagagcaactgagaagtcagatgtatatagctttggagttctattgctggaacttgtaacaggaaagaggcctacagatccttcctttgtaaaaagaggtttaaatgttgttggttggatgaacacgttactgagagaaaacagaatggaggatgtggttgacaaaagatgcactgatgc

SEQ ID NO: 30835 - DNA, 297 bp, Glycine max
acgagacacaccctcatatatccccaacttggaagagtaagctagaggcacacacacacacccaatggcctccatttatgctccaacgagatcacttctcttcacccatacaaccaaatgcttcttccgtcccttcaaaccctcttcttctcccttccctctccactgcgccacaaaaaccacctgcagcaccctccacctccaccaacaacaacgtcgccgcaacagcgacgataacgacgtcatcggtatcctcgaagagcgtggtctggtcgagtccatcaccagcgacgcgct

SEQ ID NO: 30836 - DNA, 439 bp, Glycine max
gggtggttctggtgtgcatggctagttttactaagttggcatgggtggttctggtgtgcatggttgtgatgggtgcacacaacactgtccaaggcatcacgtgtgggcaagttcagggtaacctagcaccgtgcctagggtttctccataacggtggagctgttaccagaggatgctgcaacggggtcaggagtattgtgagcaatgctaggaccactgctgatcgccgtggtgtgtgcaactgcttgatggttgctgctggtgctgttcgtaggttcaacacttacaatgcgcaggctctccccgggaaatgtggggtctacataccctacaagatcagcacctccaccaactgtaacagcatcaggtgaaggacaaaaagatttggatagtgatttggccgcgatgaactatgcatatggtactacgtatacgtgct

SEQ ID NO: 30837 - DNA, 687 bp, Glycine max
gtcgagtggaatgccccctgctttaaataaccagtctcagcaagagacagctatggcatccgggccaaagcgagccaactactataaaaacctcaccaagatatgaaaccggtacataacattaaacaaagagaagtgaaacccaaaatcctgaaaccatgcatatattttaaaagcccaagggggtgccgaaatggttccaattgctcctaccagcatgatgtttcagctcaggagggagctggtaacgtcttaagggcacagagtgcataaagattgaaattgggaggggagaactaaatcttaaagaggcatatcttgacggtaaaaaatataatgtttctttttgtttcaccgtacagaacttgaacataagaaagtgggggttggaaagagggaggaggagtaaaaagtgggacattgattaattggtggtttactaagttttctggaagtgtttttggtggcgggatttcgggcttgcagtaattttcctacaattgggtcgagggttttatggtcctccaggggcagtactcagtagttggtttgagaatttgacattagtgtttttgtcagagttgtattttcgattttgcaggttggggagatttgtgcggtttcggtcaagtgttggccatcgtgggcggatggtacccagccatataaataattcattttcagtgc

SEQ ID NO: 30838 - DNA, 258 bp, Glycine max
cctctcgcgttcgcccacgcgtccgtgtccatgttgaggcagagagagcgtaatcataaagtccgtccgaaacaaaaagtccctccctccctccctcccaccagcttcactcccgaaaccggctcataattcataaacaacgtttcatcattaatacggtgccgtttcgaagatgttcaataacatagagccacgtggttggcgacaagctaagacatgactacgcggtttcgctgttatctttgttccacacaacat

SEQ ID NO: 30839 - DNA, 351 bp, Glycine max
ctcaagacaagttctccaaaagtttcggggccgaagaggatcatgaaaaacaagcgactcaaaacatgaagtatcaagctgaagatgctgcttcaagggccacggagagagtgaaatctgcagcatcaggagcctcggactatgcttctcaaaaggctacggatgctaaggaagcagtttcaggtgctaaggtcatcgtaatgccaacagatagcattatcaatgcaaagcacacaatgggagatacctacgaggatgctaagcgaataatgaacacagcttcagataaggcttcaagtatggctcacaatgccagagataacacggctcaatccatggaatatggaaaag

SEQ ID NO: 30840 - DNA, 416 bp, Glycine max
gataattaagttctagtactttaatttatagtaacttatactactagtgctatatatatataaatgttgtttgttaggagaaattattagatgatcggtctttgagcatcacgtcattcatgatcatgctaaataattatgtcatatgattattgattgagatcatggatggatgataggttgatttcagaccacctaataatttagtttgtcaggtcttgttttattgtttgtcaagtgttgttttatgaggccggttggttcttagtttgtgtggttgaaaataaaatgcatgtgggggagtcatgcatgtgagagcaccctatagtatcgtagtggtataataacacgtttgtgagaaggaagtgtatctttgcttggaagtggtataatactgttgtgtcttttttgcttat

SEQ ID NO: 30841 - DNA, 377 bp, Glycine max
attggatttttggttatactatgctacatacttctgtggaggtacacttggtctagtctatagcaataatctgggacagattgcacaatctgtgggccagagttcaaatacttctacacttgtcatgctctatgcatccttttctttttttggtcgcttgctttcagttggaccggactacattcggaataagatctactttgcaaggactggttggctatcaattgcacttataccaaccccagttgcgttcttcctccttgctgcatcagacagtcttctggcacttcagacaggcaccgcactgattggattgagctctggttttatatttgcagctgctgtgtcagttacatctgagttgtttggacctaaca

SEQ ID NO: 30842 - DNA, 532 bp, Glycine max
tattaaagcatgggaagcgtggtagaaagcagagaatggtacttagctgcatattcccctcacggtgtaccaaattccgataatctgaaactccgcaccgtcgctctctcattatcctctgattcaatccccgacggccacgtgtccctccagatcctctttctctccgtagacccctaccttcgcaccagactcaccggcaccctcgacggtctttacattcagcaatatccactcaacgaggtgattacagcatatggagttggcagggtaataggatctaaagacagcaagtacacggagggtgatcttatattaactccttctgcgccagtggctgagtactgtatcttaccctcctctcgtgtaattcgaaaaattgacgctgctagtggaatttcgctgccggattatctaagtgccttaggggtgccagggtttgcggcgtgggtgggtttagtggctctgggagacccaagcctggttcgaatgtgttcatatctgctgcgtccggtgcggttggtatgagtgc

SEQ ID NO: 30843 - DNA, 779 bp, Glycine max
aaactcaacaccctcaaccacagcatcgacggcaacagcgccaccaccaccaacaacgacaccaccaaccggaaaaagatccgattctgaaagcgacccttcacttgcaccaataaataacaccaccagcactgccgccatgaccgtcaccgcctctgaggtgacgcaactgtcggagctgccccgaacaatggtggccgatgaatcttgtaggcatggtagccttgttgcaacggagtttgggaccgcttctgctgcttctgaaattggttccactctgatcaggtttgggaccaccgccggtgacgtgtcactcacgctagggcttcgccacgccgggaacatgccggagaaaactccgttctccgttagggactttggaggcatttaaaacttaatcaattccccctatattacttcacatgatcataaaagataagaatgatacgtataggaggttgctttattattactattattataattataataatatgattattatgatatgatatatcaaaagaaaccatttttccacccttgtaacttctctttgatgttagttcctcctctcagattaagttgcattttatggaaggaaaggaagaagggaatacgaaatgagaaaggtaggcttatatgtgattatcagctggcgataggtaggctctgtggtgatctgtgcaactgtatagtaggttgttttctacgtttttttatttatttatcacgtgtatgtacttaaggtttcatatcttaatttgataggactttatctg

SEQ ID NO: 30844 - DNA, 550 bp, Glycine max
tttgggtccacctttgccttctgaattctgattagattacacacattctaacatcagtaattaacctcagaacaaatccacttttctcttttacttttttcctctctgcttgtctgttcttcatccccacccttttcctgagaccgagatctgtgacaccctttagaatttggtttgtgatttgcatgttttctctgattctggtcttgttctgaagctgctggattcatttttgtgggttttcccttcgaccctttgtttggtttgagtctctaattgggtcggtattaaaaagttgggcacttgtgcatttcttggccaatcatagttttgcaagttgtgttttttattattttttttttattttacttattttctttataggtttttttggtatcagttgttgggtttttggccttttggggtgttggggattgacatagttttgttgtgggatttgtgatctttcaatggactgtttcgatgaggcgaatggggagcttgaaaatgttgtgagtgttgggtgtagtgaagagggtctgagaaagag

SEQ ID NO: 30845 - DNA, 401 bp, Glycine max
ggatgagaatgcacttcttcagctgaaagatgggttaggggatgatgatattgaggtcatttatgttggatgccttaaggaggaggttcatccaagtgaacaagatgaagtttcacagacacttcttgagaccttcaagtgtatcccgacttttctccccgctgaccagtttactaagtactatcatggtttttgcaagcagcagttgtggccactgttccattacatgttgcccttgtcacctgagctcggtggcaggtttaataggtcactgtggcaggcttatgtgtcagtcaataaaatttttgcagataggattatggaagttattaaccctgaagatgattatgtgtggatacacgattatcatctgatggtgttgcgactttcttgaggaagag

SEQ ID NO: 30846 - DNA, 458 bp, Glycine max
gcagggtggagggttaccagaaatttatagcttttaatggaatggctagatattttttttttaggttgggctatgcatggacacatgaatatgtgatgctctcactctctattaatgggttggttggttataaaacaggttgcatgggacggttgggggagtggtggtgttgttgggaacgcatggagtgttcatgaagagtgtggggctaacaaggcgaatgtgaaagaagaaacgagttggaagttggcgcagagagaggcaagtgtgcagaggtacaaggagaagaggcaaagcaggctcttctctaagaggatccgatatgaagttcgcaagctgaatgctgagaaacggcccaggatgaagggacgattcgtgaagagggaatgacaagtgtagaaggataggtacggttgataataagaatgttgtcatattacagcgttggaatataattt

SEQ ID NO: 30847 - DNA, 666 bp, Glycine max
attcaagcacaaatatgacctatggcatttgccctaagacatcactaattcatccgaaagttaaccatcagcttggaacttctgcaattggttcggtgtgtgagaaagcaagtagcgtggcgcatgaagatctggttggttctcagggactggttcttaacgagtcagtaaatacatctttgaatacagagagtcttaatcaaaagcctttgaaaaaatcaaaaaagaagttccttaagtatcaggtatcttggatgcatcttcgcccaatcttctattacatggcatacttgggcccacgggaagaagaatcacaaaagaattaaacgccgcactttgagtatgaagaatccaaacaaagacaagcttgataagcttgctttctcatcagaagatgccaaacctgatgtatttccttgtctatcaagttgttctgatagtaaagcaaccaaggctggttatagacctagtgctaattttaaatctagtgatgaatctctaatagagactagggctgaaggggaatttaggaagagaattgatcatagctgtgctgtgcttgcatcagcggcgcaaattgaaaatatatctggaagtggttcagtagtaagtcaatttgaagctagacaggctgatagtgcacaagatagtacaagagatcaaatg

SEQ ID NO: 30848 - DNA, 333 bp, Glycine max
cttaatttctactttctacttctagctaacaaagttaagtaaactttcgcttcagtactttatatatatataatggctgtcgctttgacgattctggtgaccctgctctcggttctctcttctgcatcgtgtgcacgaatggttggggggaagacggagatccctgaagtgagaaaaaacaggcaagtgcaagagcttggaaggttcgcggtggaggagtataaccttggtttaaagctgttgaagaacaacaacgtcgacaatgggagagaacagttgaacttttcagcggtggatatggtggtcgtagtggcggtggcggtggcggtggtg

SEQ ID NO: 30849 - DNA, 288 bp, Glycine max
ctccaacaacggaacttctaaagatcaagtggacgtttcgtgtaaagtttatgtagcacctgttccaagaacggcaacggatgatgagattcgccctgtattcgaagaacatggaactattgttgagattgttcttttaaaacataagaaaactgggacacggcaaggaagttgttttgtaaaatatgcaacatttgatgaagctgatagggctattaaggttttaaacaataaatatacatttgctggggaatcatatcctgttgttgtcaaatttgctgatcgaga

SEQ ID NO: 30850 - DNA, 207 bp, Glycine max
caacaacacaaaacacgacagagtggagaagaagatattgcttctgtttattttttcccttatgtaatgcatcagaagaaatccgaagttcagattggacaagacagcagcggcgtctcttccgatttcaaccagcacccgcacgccgccactcccaaccctaactccgcacccaaaccacgaatcactgacctccatcgcacctta

SEQ ID NO: 30851 - DNA, 470 bp, Glycine max
aacgctttcagttgttatggcgcattgagcgacaggttgggagacctgcatttgatgagtttctgaagaaatatattgataccttcaagttcaaatccattgataccgaaacattccttgacttccttaaagccaacatccctggcatagagaaccagattgacctattgctgtggactgaaggtaccggcacttctcctgatgcttatgaacctgaatccactgcttataaaacgattgtatcactggcgaatgagttcacaaatgggaggatgccaagggaggatgaagttgctggttggcaaggtcaggagtgggagctctacttggacaacttgccaaaatccattgaagcttctcaggtcatagacttggattcacgctacaagctatctgagtcgaaagattacgaggtaaaggtgtcatttctccaaagggctatttcatgtggatgcaaaacttactataat

SEQ ID NO: 30852 - DNA, 541 bp, Glycine max
cggatttagacagggcaaggaaaggaaagcccacttcgaagagttcagatggaaagagaaaaaagaacttgagtcccgaaatgctagagaaaaagatatctcaaaccaatgcaaaaattgagaaaatgcaacgtgatatgaagacaaaagaagatctgaaaactgtggcattgggcacatccaagataaactaccttgaccctaggattacagttgcctggtgcaaaaggcatgaggttcctattgaaaagattttcaacaagtctctgctggcgaaattctgctgggcaatggatgtggatcctgacttcagattctgagatctatagaatggagccatgttgtgatgggtggggaaaaacatttcttttttacttatttcttttctataagattttttttgtatttcgtcaattttagcggaaattgatgttgtaagtccatctaacctcattatggggtgagtttccccttcttcattgaccagttttatacttgagctgttaaccattcatatgattttaatgtgaaacccactgcc

SEQ ID NO: 30853 - DNA, 343 bp, Glycine max
atttttcatcttttctcttgaaccttccttcgcccatcttctccaccactccacacaaccttaaatctcacgacccagaccaaacgaaaaacacacacacacacaccccaagagaagaattttctttcttcaggattccgagaagttggtgtgatctgatgcgagtgttaagaagataatctgaggagaaaaaagaaagaaaaaaaagtttcatttttttttttcaatggagtcagatcttcagcagcaccctcccatgtttttggatcaccaccagcagcagatgaattcagggttgacacgttaccgatcggcgccaagttcgtatttttcgagcttcatt

SEQ ID NO: 30854 - DNA, 593 bp, Glycine max
  unsure (1)..(593): unsure at all n locations
gtcaaagatagagagtcgtcctttgaagcagcgctcattgagggttgtggatcatttaaatgaagggagtgccacgtactttgactacctcttctatattgatattgaagcttctatggcagaacctcgtgcacaatatgctttaggacagttgcaggaatttgctagatttcttcgtgttcttggttgttatcctatggatacagtattatagaagttcagtgtcttaactaggagcaacagtcatgctgttcattttgctgataacataagtggctactaccccagaggttcatcttcaatcagagaggtgggcaagaagtatcctttaaaagcattgcccctgtcacctctttcaaaaatcttttcatctcctaaggaggtgctttgaagtatatcatcatagttttgacagtggagtgaatgctgctacaggaatcttcattgtgttttattccttcatttagattttagaactcttcatattaaagagaattccaatgcaaacttagtgaccaaagtatgtacatatggctctattgagctaccccaaatcaatgaaggaccaagccacccaantatttctactgccg

SEQ ID NO: 30855 - DNA, 472 bp, Glycine max
  unsure (1)..(472): unsure at all n locations
tatgagattcgtatgttctcatctagttttgtatccgtaatgaatttgttcagcctaaaactatgctattgtacctctcaatgtttagtacagatctgggtttcactaatccagttctagtccagcctaccatcatcctcatttcctccaatggcttccatttcgactacatgttcaagtccccaactcacaacatccaccgtttaatcctaaacggcactgaggccgaattaatagcatcatagggaggctcgttcaagttttggaacaaagaggagttagacgtccaatgcctggttaattggtgcaagggtgcaaacgattctttgatcctgaatctagatctgtggatttgtttaccttttgtgatacatgttttcaatttttgtttgttgtggattcaaatttgttgctgctgtcatagatattcaatgagctaatatgttgaaaacctaagggaaacanattatac

SEQ ID NO: 30856 - DNA, 223 bp, Glycine max
gtagaagtcgatgatagaggtgttcacaatctttacaagcagcttgtttgctctggacctgcatttggtgcaaaacgttgggttgcaaccgtagatcgacaatgtgaaagactcgctagtgccatggcttcaaacattcccactgtaggatgttggcgtgataacatgccaggacgggagacagagcatgatgaagctggctgaaagaatggtgataagcttt

SEQ ID NO: 30857 - DNA, 285 bp, Glycine max
atttggttcttgtagaaacagtgctggttcaaattcaaacaatcttggtggatacacacactagtttctcctccctcagaatgagtttagactcgtctcgctctggtaattctaaacgaagtttctctaattctatatcctccaacgattacattaagaagaagaaaaagaagaagacaacccccaaccagaaaaccctaggcgctgcttggggctcaaagtctaattcccgaaaacccgccttttccgattttgccagttatatgacagagaagaatcggaaat

SEQ ID NO: 30858 - DNA, 528 bp, Glycine max
tgctaaaataatgtcatcatcggtgccattatctgttttacttattccttcattaaaagaggctattgctgatgatccagaactcgtgagggcagttatcaattctttaataaacatggagggtacaaaacctaaatcctgtgatgtttttgtcaaaaagttgcttcagcgattggcaagttcaaaggaagattcattgaaggacctgcagggactggcagaccaactattcagcaagaccaagtcagctcaagaaacccgaaatgcagaggctgataacaggaagaaacaacaaaacaaggaacataattcaaatagcaatttaagcccactagcaagatttcttctctcaagatggcaaggccaaacctcacgggatctaaacccatcttgagcagagttagaagttacaagataccaatttgtctgttgtctctatttgtgcatttttttccgattaattgtacatatattattgtaagaaattatttttctatgttctattattattaaatttatttttctttg

SEQ ID NO: 30859 - DNA, 385 bp, Glycine max
aatctgtgttccacaaggagaaatatcaactgctgttgatgctgatcgtgttgcttcatcaaatgttatgaataaaggacacactgttaacatggccaatagtgattttactaataaaaatgggtttaatccatttttaactagttcccagcacacatctttgaatacaaatgattcttatcaagggactagcttgccagcttatgcttctttgtcaggctatcagggtccaagaagcacccatggtacacagctgccagtcccttcagatgtgtccttagtatctgatagacagtccaaacatggagccaaggttggcttatcttcatcagtagtgcctgtgaaagattttacatctcaaaggaatcaaagacttcctcagcca

SEQ ID NO: 30860 - DNA, 278 bp, Glycine max
ttcccttattctctcttctctagtgttttcacagaaacaaccaccccaccatggtggaaactcctcctaaatgcaaactcacattcacattaatcttctgcatcgttatctcccactctcttggcttagtttccttcaccttgtgcatagcctccgagactaagaggaacaaggtgcatgatgtctacactactttaatttattaagactctgcagttaggattttctgaattatgatgctttaatttgtttgttttgtagaagggggatctcagatg

SEQ ID NO: 30861 - DNA, 236 bp, Glycine max
gcagaagtgttctcagtgcttatctcccaatcagtttcaagacagttgttgcatggtgttaaaatttgccccagggcacctgcctattactcatctatttttttcaaatgaccacattttggttgtcagagcggatgttcgagaagcaaatcatgtttttgaagtgattcatgcatgtgaaagggtgttgggacagaggataaatctcaacaaacccgagatctccttcagccaaa

SEQ ID NO: 30862 - DNA, 223 bp, Glycine max
aggaacaaaaattcattgatgaagctgtagactttctaacggagaccatagatgatgatccggaatgtagttaccttgagaaagaaaaagtgagagcagttacacgaatgttattggtgccatcgagatctgagaccctggttcttcaaaaaaaattccaaactggacccagccatgccccttttgaggccttggttgtcccccatcaagatagggtgttatc

SEQ ID NO: 30863 - DNA, 494 bp, Glycine max
tgatgaggccaaggctgatggatttcttcccggtggtgcaagtctccataattgtatgactccccatggtcctgatacaaagtcatatgaggctaccattgcacgaggaaatgatggaggaccttgtaagatcacggacacaatggcttttatgtttgaatcgagtttgataccccgtatcagtcaatgggccctggaatcaccgttcttggatcaagattattaccaatgttggattggcctgaaatctcattttacagttactgagacatctcctgaaaacacgaactagcggaatggacagtgaggagtgaaatgggtgttaaaagtgaactcaaccaaaagattgtggaatggacaattagaccaccaaaagattgggttgttttgtacatgtaattaaagaaatataatcgagtttaatgtttatatactaaatattggaaaataattttatattatcatttaattataaattatcatttgaattactt

SEQ ID NO: 30864 - DNA, 276 bp, Glycine max
cagctttgagtgagatgttagtgggggcttttagcaaggccactggtgctacatgctccccggaagatctgacttgtttagctaaattttctcaacattttggtgccactaatatagagcattctttatgcaagtttatagaacttacccaaaagagccaggatgttgcccccctgagcaaagaaacaaccttgcactcatgtgatgtgaccaaagatgatgcaaacgaggccgtcaaaaccctgcaggttttcaaaccattaccttcagatacac

SEQ ID NO: 30865 - DNA, 278 bp, Glycine max
ttcagctctgcggtttctatatctatatcggcaattgtccagttttgagaagaaaataacaattctgggtgcatttggttgaaacaggagtttgtggatttgtaaaagattgtgtggtagagtgaaactcagatttaaaaaagagaagaaatactatcaggggttgatactcaatctgtctgttacgtggagttctcaagcaatttaagaatatttggtgcaccagttgtgtcaggctctggacagaaacatatcctccacccaaggggggggccccc

SEQ ID NO: 30866 - DNA, 545 bp, Glycine max
gacgcaaaggcacaatagatccaaagcaaagacaagttgacaataaactaatctccaccaaagaattaaaggactttgcttataaagtaaatatccattaaaaacaaaactcaactctcaaagctagcaatcttagcagaacaaagatgagtctcaatgtagatgatgatgagttagtgagtgaaatggatgaagcacccagttttgcttcatctctaccagtccccaatgttcaagaaatggtaaggaataaccctttgcaggttcctgaaagatatgcgaggagtcaagaagagttggagaaagtcaaccatatgcctcacctttcatctgaggtccctgtcattgatttagcactgctttcaaatggaaacaaagaggagttgttgaaattggacgtagcatgcaaagagtggggcttctttcatatagtaaatcatggtgttcaagaacacctgcagaaaatgaaggatgcatcatctgagtttttcaaacttccaatagaagagaagaacaagtatgcatcggcctcaaatgacacacat

SEQ ID NO: 30867 - DNA, 511 bp, Glycine max
caaagatttgtaagaaaaaaactgttttcaactttctttttttctctgtacaagtatgtggattttccattattggtaccaatgggggtattggagtgccccagttaaacctatactgaagaagtatctgagatttcgttttctgggctactttctgaattaactaagctttctgacaccaaatagatgaagtagtttgttgattctaagattgttctatggatttaaaatatttcatcttcctgtgaaacaatactactactactactactactaatcttgcgatttatgtgtgtatcttagattctttttacataagtgtgcataaatatctttctatcttctctatatttcattcatgtttttttaatccgcatttctttcaattcaagattccagtatggatagtttttgttcctctctagcagaggtgttctccccaagagtttttaaaaacaatttctataagccagaaaactctattaaaacaaaacaatattagaggtgtcgt

SEQ ID NO: 30868 - DNA, 326 bp, Glycine max
ttaggattagggtttatctcaaatcgccctctacaattttaaatccgaacttctcttcgattcattccccctccccaataaaaccggcgcgagaaccaataaaggttaggattagggttttaaattcgtttgcatttgattcgaatgaacatggagagatcgttggacagatcgagagaacctggtcccaagaagcctcgattgatcgaggaactcaacgcccgacagttacctcaacgccctacggcagttactacgttgccgtctacgaggtttcgagcatatggcagagactccgaaatcagcgatttgggtcgtggcggtgg

SEQ ID NO: 30869 - DNA, 441 bp, Glycine max
accagtggaaacaagcatcctcttaacccctttgaacagcagcctgaaatgactgcctggattaccaagggcacagtacttcagatcttgtccaagggaaacaatgatgagggatatcaaacacagtaaaagtatactaaatctttgagtggtcttgctatagtgaaaaggaaaggatgccaatagcttctccaaatatcaggacaagtaacttagtgaatgatgggtatggtctggaattgaattactgagctgtattggaaactagtggagttcataactcaggcatgaactgatctgtggttggctttctttcttgtgcacaagttcgtttatatcttgtgggtaactgcaaattcatggttcagttaattgcacaagcaacttctgtatttagattgaagcccgttatagaaattcaactgctagagttactacgaa

SEQ ID NO: 30870 - DNA, 307 bp, Glycine max
ccatcactgtacaaaatgtcaatgttcgcacgcacgccccaagagaatgtcgagaaatcgttcttagcgttctacgaggggtggcttgcgcgtcaagagaatttgctgaaacagcttctcagcgtggcgcgcaatggtcctctctcactaccagcaatttatggaagagaaatccaacgtggcaaacgacgacgtttaccttctcttttctccaccctggctttccgcgtacgaaagggctctcctctggattggggactacaagccctctctaattcaccgtttagtagacggcgccgtgaagggg

SEQ ID NO: 30871 - DNA, 315 bp, Glycine max
catacagggatgcaggagattatgcctgtaggtgctaactttcccagaataggcaagatggttacagtgctcataggtgatccgatcaattttgatgatataattgaatttgacaaagacaaaggctcaaatgtgcccagaagacgactatatgatgcagtagcatctagaattggtgatcggttgcatgagatgaaggtccgggttgacactatcgcaattgatcaagaaatgcagctacaagataagtcctcacacagcactgaacgaacatctaaaatactgcagcaggttgattgggaattatttggaatg

SEQ ID NO: 30872 - DNA, 254 bp, Glycine max
gaaaagagatgtttttttctctgtctgcaatttggggtttgaatccaaggatggctaccatcaattcggaggtttgtttgccagtgttggtcaaatgggaatgggggttggcgtgcaacctaacgacccttctgactcgcgtaacaatggtggcatgaaatttcccttaaacgaattgttcctcaagcatgttcaatctcaggggaaggaagaggctgttgaggaaggagttaaggggaagaagaataaaaagg

SEQ ID NO: 30873 - DNA, 680 bp, Glycine max
  unsure (1)..(680): unsure at all n locations
tcggcgcgaggtggcgagtgaactcagtgggttagaaaatagaattgggttttggattgggttgtcgtttcgtttatctactctcctcttgttcatttcatcgcctctcagccacctccccttcgctcctctctctctctctctctcgcgcgcactacaatcaaagtcatgaaagcattttgttcatagaagaagaaattcctcttcctattagattagggtttttttcccattcaattcaatcatgcttccggcactgtctcaattcaaggttaaccatgtgggtgtggggttcaattcgtcccctaaccccattcccatgcttcccgcgctccgtcgcagccgctgtgttgtcctctttcgcctgcgatcctattcctccacagacttcaaaatcaccgcccacgtcgaaactgactccaccgttcacttggagcgttgctttaacgcgcccgtcgcttcccacctcccttccatttccatgaagggcggccagtatggtgccttcggtgccgttaccttggagaaatccaaactcgatatgtcgcaaaagcaaacaaggtctagccccgagctagacattgngggaggtgggggagatatcggaaagaaaatcaatcatggtggtggtgatggaggtgatgatgatggggacgatgaccattactttgatgacttcg

SEQ ID NO: 30874 - DNA, 466 bp, Glycine max
aattaagggagggtgaaggcggccgagtgaactcagtgggttttggattgggttgtggttcgtttatctactctcctcttgttcgtttcatctctctcgcactacaatcaaagaaagccatgagagcattttgttgatagaataatttggtctttctattggattagggtttgtttttccatcgctctccattcaaagatgattcccgcactgtctcaattcaaggttaaccatgtgggtgtggggttcaattcgccgtcccctaaccccattcccatgcttcccacgctcagtcacagacgctgcgttctccgtgtcagcgtgcgatcgtattcctccgacgacttcaacactcttaaaatcaccgcccacgtggaaactgactccaccgtacacttggagcgttgctttaacgcgcccgtctattcccatcttccctacatctctatgaagggcggccagtacg

SEQ ID NO: 30875 - DNA, 264 bp, Glycine max
tgttagcagttaacacagttacttcacgagctggtgctagttctgcgttccgtgtctattattcccctcaaactgctgcataatctctgttgtttgatgaacggttaaagtgtgtttgtttgtgtggcagaatgttagaggcaacaaggtggttgttgggtgcaggtattttgatgtggatgttggcatggctgggagaatcagcaataggggtgaactggggcacggtttcttttcacaagttgaagccttccacggtggttg

SEQ ID NO: 30876 - DNA, 256 bp, Glycine max
tgctgaaagatagttgctgaaacaattcatctgctcgtacaacctgagagagtcatttttgcttctactaacaggtgaagtgcagaaagaaacggcagcagagatcttgggcttgcatccttgtggttttaggcctcaacactctagcaaacttggaaatgagtttcggctggtctccaactgggaccctggtacaagactaggagggtgggaaaaataggttcctgtcctttggttgtccttccttcaatgtctc

SEQ ID NO: 30877 - DNA, 270 bp, Glycine max
gcgcatttgatgtccaatatgtcatacacaaagttgagacccccctttcttcctccggagcctcttactctggatgtcacatgatgtcgtctcgagtttcgaagcgtatgagagagccagaatcttgtcaggacttgttcgaatcgaaacgagagaagaggtttttgaaagggattcccaggctcaaggaagtatttacgcagtacaaggctaagacaagaaacagggcttcgaaccattgggcgattcgagttggcgtatggtcgagtc

SEQ ID NO: 30878 - DNA, 286 bp, Glycine max
aaaagcctcaatctaatactcctgctcctggcaaggtggaggagattgcaaaaccagtttcagctgtggttaagtcagatgctggtcagacaggtcgaactggggcatcaggagctgaagaagtaccctctggacgttcaagattgggtagtgggaatgctggccagggatatacgtttgaagaggtcaaggtgctttttatgatgcttatggatctatgtcgccgaacagctgggctgcaacaccctttgccagtttctcaagtggggagcaacaacattcaggt

SEQ ID NO: 30879 - DNA, 431 bp, Glycine max
tagatggcgtggtttcactttgcaagaatttgcaaaccagttattttccaatatatatgagtatgggaaaggaaggcagatgccagctcattatgggtccaaaaagcacaattactttacagtagcatcaactattgctacacaaatttcccatgctgttggagccgcttattccttaaagatggataaaaaggatgcatgtgccgtcacttacttcggtgatggtggctcaagtgagggtgatttccacgctgccttaaattttgcagcagttttggaggccccagttattttgatatgccggaacaatggatgggctatcagcacacccatttcagatcagtttcgaagtgatggtgttgttgtgaaagggcaggcatatggagttcgtagcattcgtgtagatggcaatgatgccctggctatctata

SEQ ID NO: 30880 - DNA, 241 bp, Glycine max
gaagattgttcagtctctctcaccaaaagtgtcaaacatgagagcccacgtttaatttgcttcttattttcctattcttaatttgagctagtggttgtggttgtaggatccaaacgcatcaaagtcagaatataagagagaaaaaaagactccttttgttcatggagaggaaggagactattgatttttcttcttattttttcttgaagcctactggtgactctgaagaagctgattttga

SEQ ID NO: 30881 - DNA, 310 bp, Glycine max
cacactctccaaacccactgtttcagtttctgctaacacctctcctttctcagtgtgcccccatttctccaatctcaataatgttttagggttttccctcctttctcagagcttgcatttcccaggatcaatggcaaagctccattttgcgttcagtttctcacttttgtttctactcagcaatgcctcagctgcaccatccaccactttacccgccaagattgttagtgggtttctctcaaatgccgttcctgcgttcaccaaatgggtctggtcactcaaagcagccaccataaccgcgattggtgcg

SEQ ID NO: 30882 - DNA, 536 bp, Glycine max
cagctattggccaatgaacaggaattaaacaccattgtggagaaggcattgctggaaaaaccggaagcaaaggatggactagtagggaacacagaaataataaggagcttccttgagagaaacgcaaaggaattgggtttaccgccagctcaagctgacaatgcagttgttcttctttatgacgctgtctttgctgaaataacaaaagaaaaagatggtgctgaattagataaagaagagctggcaaaacttgtgaagaatatcctcgagaaattcgcagagcagcttgaggttagtcctgtgtatcaggacttagcttgaggaccgtgagttaatcggccacatttcatatgttatgtttgaaactttgcatcattacagagtatttgggattcgcaccccctctcccccaaacttcagcaatatgtatactgtataatgaattttacttatgtggattgtggaggtgccttaaatagcatgcatggtcatgagcttgggtaattttgttttaaaattatgagattttttttgct

SEQ ID NO: 30883 - DNA, 477 bp, Glycine max
ttgaccatttccttgccatggatcaggttactggcggtgcctctccatgctcaattgatgatggtcaattgattgggtcgccttcactgactccaatcaccacggtagcaaagcttattgatggttatttggcagaggttgccccagatattaatttaaaacttcccaagtttcaagcccttgccgctgctgttccagagtatgccaggcctttggatgatggtttatatcgtgccatagatatttatttgaagtctcacccatggttggtggagtcagagagagagcaactatgtaggctgatggattgccagaagctctcattagaagcatgcactcatgctgcgcagaatgagaggctacccatcagaataattgtccaagttctattttttgagcagctccagcttcgcacttctattgccggttgctttctagtttcagataacctcgatggatcgaggcagctgagaagtg

SEQ ID NO: 30884 - DNA, 470 bp, Glycine max
gtcattccattgcaccagctgagagctgtaaacgcatccacaagcaaaaccaaccaatctgaaaaatatatacagattatctctgttgacaaccatgaattttggtttatgggctttgtgcactatgacagcgctgttaaaaatattcaaggagcattgcagcctcattgacaaacaagggattgaaaagcaccatgtattgtttataccagagatgaggtttgtgttgataaattatccacccctcaaagaaacatttatatgtttatctttacgtggttagttcgctagtctagtttgtggagctgttattattgtattaaaattgaaactcattcagtgttcacatgatatatttgctttaccttgttgctttctgaaagcgagagtcaattgatttgttgtaagttgaattgatatatagacggtgcatttacatttaaatctattaaaatatcttttttttttgt

SEQ ID NO: 30885 - DNA, 444 bp, Glycine max
agggattttagcccttacttgtgtcagggtattatttatactctccttaggaagaaagatgaagctgataaacaattcaataagtttcgcaggcttgttcccaaggaccatccttacaaggactatttcgaggacaacatgttcgctaccaagttcttctcgcagaaattggagagggagggagctggtgctaggggctgagaaaggttatcactcttgtgattgtcacagagctcctaatgagtttttttttttgtcttatcttgtcccttttccttatactgatattcaggtgttgccataggaggttattagtttaatagtttttagtttttcctcgtaataatggttcgaaattactgttggttaggtttctggtggatataaatggtagggttaatgaaaagaatcaaaaaaaaaaaaaaaaaaaaaaaaagggcggcc

SEQ ID NO: 30886 - DNA, 366 bp, Glycine max
ttctgcgtctccaatgcccttggagaatagggtgcttgaccctaagaagtctcagaacattgccattttgcttagagcgctgaatgtgactattgatgaagtttgtgatgctcttagggaaggcaattgtgatacgttggggacggaacttcttgaaagtttattgaagatggctccaactaaagatgaagaatctaagctgaaggagtttcaagatgaatcgcccttcaagcttggcccggctgagaaatttcttaaagtcgtgcttgatataccttttgcttttaagagagtggatgctatgctctacattgcaaactttgattctgaattagaataccttaagaagtcctttgaaactctgga

SEQ ID NO: 30887 - DNA, 376 bp, Glycine max
attctatcttgggatctgctttttatgttggctggtagtgtatgcttaggaattttttcctttctttttggcaaggcacacccatataggtcagctggtgtacaatatatgattgttcttatataaagaaaacgttttacttacaattttctgtaagtcttgtggttgttaaaattggatgaagttaggtaaccaagtgatgacaggaagaatcaacactacatgccaattctagcttttgtacaagtgtccacgctattctcatggtggaaactatggagaagtttattatggatgaaagaaaattcagttctttttcaccattttgcagttttgggtaaaaaaaaaataagaaaaaatagaaaaaagggggggg

SEQ ID NO: 30888 - DNA, 293 bp, Glycine max
taaatgaaattaattgtactcttcttcctgcgggcagcatcatcatcatcatattcatacgctcaatcccctgcagcaccatgcagtggctcatgtcccttccaccagagcaacgcttcccatgttactcgtgatcttcctcttcgccctcctcttcaccgcattctgctccatcttcattcgctactgctcccacgaagaacaaccccacgcgcttccacaagccacgcgcgccacgccgcgcggagacgacccgcgcgtgctcgccacgtgtcccgtcacgtcctactacg

SEQ ID NO: 30889 - DNA, 395 bp, Glycine max
gtcaatgtcaggactacatcaagagatgctgacaagcttggcgaggtgtccatatcaaatgcctcaaagcggcggcttgccggatccggggtatagcttacaggctcaatttagttatatgagcaagatgaccaaaaggatgacatttctctgcataaataatgctactggtgtcacatccatcacctaccagaagaacgatgctggtgtgatttgttgagcctttatgtgaaagtcacgtttcagtacttctactttcaaattattcgttaattgtcacaatggaataataaacagataagcatagtttacatatctcatgggagcagtaccatgtacaattgattagcaaaacgtttgtgttaaagaaataagagagttttctgtgtaccagt

SEQ ID NO: 30890 - DNA, 670 bp, Glycine max
tcacatgggcattggttgttgaggctaaatgtgagtggtgcctatgatcgctcttcagatactgctgcatgcggaggtatattcagagacaacaatgatagattcgtgcttgggttttcggttaagcttggggaatgtttgtcaaatgatgagggtgaaatatggggtatttatcatggtatgaagattgcaaggaggtatgatatatggggtttatatcgtgatattctaaggcagcatagcattccaataagtgctaagattgcaaggcagcatgattttggtaaaataatagtggaatcgggctctgagacagctattgggtttgtgttagatggatgccctacatctacatcgctggagcattgtttcccactgtgtgatgagttgaaagctctaacctctgctacaaatcacttatacttcgataacgattatgctgctgattcctttgccaaattcggtttatccatgaaacggcagcctgtgaaaatttttcgtgtttgtccccctttttgccaaccttatatttcagaatacagataaatgttaaataaataagtacctcaatataatattcatttcttacttttctgtttagttttagttttgtccttacaggttctactgtataaacaattgaattatatttatgtaatttacttgttgt

SEQ ID NO: 30891 - DNA, 470 bp, Glycine max
actgaatgtaaatggcaaaggcacatcaaatagtgctagggagcaattgggggatcagaaacatttttcagtctcttgtggccatcttaaccactattctagttgtcgctgccatttatctaacacaggagggagaacaatggtctaatgaaaggaacaagttacattcattatcaaaatgtaacttgttttctggcaagtgggtttttgataatgaatcatatccactctacaaggagcatcagtgcacgttcatgtctgatcaattggcttgtgagaagtttggaaggaaggatctaagctaccagaattggaggtggaagccccaccaatgtgacttacccaggttcaatgccacagcattgcttgaaaggctaaggaacaagaggatggtgtttgtggggggattctctcaaccgaggccagtgggtttcaatggtttgccttgttgaatcttctgttcccccaac

SEQ ID NO: 30892 - DNA, 504 bp, Glycine max
ctttttgtcagaaatgcgaattaaaatatcaatgcaacttcttggtttgctggatttcttctttcgtaattggtagcttccaatttcctcttgccttggctttgacccctcagaattctttaccttcatgacaagaaactctctgagaaaaactgttgctgacccatgaagtttttctgtgaagaatacagggtctatactgtaaacttccacgttcagtgccaaatcttggatgtttgacgctgagtcatcaacaggaatgacaaacttggttctccatacaggatttgctctcccggactcaacaactttggtgcaatatttgctgttatgatcaatccacccaacagcaaacacatgacgcttccaaagtgaggttgaaagctggagtccatgtgcagatatcaagcagacctccacccatataatccccatagaaagtgcaggaaagaaaaaatgagatgttcaagggatgatgtctccgataagcttctttagataagg

SEQ ID NO: 30893 - DNA, 455 bp, Glycine max
caacacaacccaaccctagcgagtagcagcagcctcaaagtaccctacaccctcacttaaagctctctcactcctgaaccctaaaatgaagacacaacaacaatctctcttctcagcctcaattttactagttatagcacttataacctttttccacaccacttcagcccccctcacaccaatccaagccccagtttcatcacccccatccccgccgcgtaccacaaccaccagcattcacaccaccatctccaccagccactgctccagctccaggattcaacacagtacccttagttcccgtgacaccaagtggcgctcccacacccaccatcccacaagcaccctccattgacatagtccaaatcctaagaaaagcaaagagattctctgtcctcattaggctgctcaaaaccacccaactcatcaaccaactcaactcacagcttctgacc

SEQ ID NO: 30894 - DNA, 384 bp, Glycine max
gtatggaggagattggctttaacatctctcacctttatggcctcacagaaacatatggtccaggaactttctgtgcatggagacctgagtgggacttgttgccccatgaagagagatcaaagatgaaagcaaggcaaggggtgccccatgtggctttggaggaaattgatgtgcaagatccttccacaatggaaagtgttccatctgatggcaaaacaatgggggaggtaatgtttagagggaatacagtgatgagtggatatttgagagatttgaaagcaacaaaagaagctttcaaagatgggtggtttcatagtggggatctagctgtgaaacattctgatggttacatagaaatcaaggacaggttgaaggacatagtag

SEQ ID NO: 30895 - DNA, 413 bp, Glycine max
taacccttttcgatccaccacttgagcttggcctagctagctttgcttcccattcctcacttaacttcaatccggttccaatggatcgtttttcttctagtaccattctccccgaagcgtttcaaggtgccaaagatacttcaccatgcagcttgcattggtctggaaccaaatcaaagcgccactcattgtcccgttgctgagactagcactgtttctgtgcttgatcatgtcggtgatgatgttcattgagagagtctacatgggcattgtcatcactctggtgaagttgtttgggagaaagccagagaaacgttacaactgggagccaatgaaggacgacattgagttgggatactcttgttacgcggtgtgatcttgttcaagtccccatgtacaacgacagagaggtt

SEQ ID NO: 30896 - DNA, 666 bp, Glycine max
caaacgttcattttattaagcacatacatgataaatgaacagaaactcacagtcacagcatctccaacatgaattacgagatgacttattctaatttcccatttcgtacataacgtacttgggagtggaaatacaaaggaacaattcacaagaactactgttaagattttccacaaagacaaatagattttaaacactgtttttattttgccacatgagatcatgaaactaaggggtgtttatcgaatttagcagcggctcttgcagccaacagcttcttcaacagtcagaaagactctgccaccgattttgccgacaaagttggacacctttagcttgtgtatcacttgccacctagggttcgcaatggctaactgttttccttgtgaagacaaactcttatgcagttcctctagagcagtaattccagaggtgtcaatgttcaccaaattggaggtgtcaagaatttcgagttgaatggtgcttcttgaatttcccttgtcatcttctgattcttcctcagtgacccatttatgatcctttctctaacgaaattggcatttgcaaagcaaagcaacgcagacttgactcgtattatcataaccccgggaaccttaactgccataggatactgatagacatcgcagaacaaatcagttcccggaa

SEQ ID NO: 30897 - DNA, 695 bp, Glycine max
aatatatctgtatatcttcagtctcttagtcagaaaacatagaccatgtcgaatttgagtttccttcaatttcatagtagcagccctttggggcactcctcttctcaacccaaaagtccaaccccaaacagcaacaacttcaaatcatcaaaacatacatcaaatgtagggtgcaatattcaaccaaaatcggaggaaatgaaattggtgttcgacaagtttgacaccaacaaagatggcaagattacccttgaagagtacaaagcagctatgaggacaatggggtggggaatcgaaggcactgagactgatgagtcttttcaggtgatggactctgatggagatggcttcattgacttcaaagagttcatggacatgttcaacgtggaggagagggtgaaagagacggagatcaagagtgcttttcaagtgtttgatttgaatggcgatgggaaaatcagtgcagaggaattgtcacaagttctcaaaagcctaggggaaagttgcagccttagtgcttgtaagaaaatggtgatgggggtggataaaaatggggatggctttatagacttgaatgagtttatgaggatgatgatgagttgcaagaaactcacctaagttccgagaaggtctagaattgcttgaacaggatgcgcggagtgtgagatgttgtgaactctggcttcttatgcatt

SEQ ID NO: 30898 - DNA, 284 bp, Glycine max
aaggaagctagtattggttttggtgcaatctttagaaatgataaaggtcaattattagctgcaacatcgaataagctggaaatatgtgtggacctattcataatcatattgccatgggatcttgaagctgacactgatgatttgttgcttgctcttaacgcccaataccattgaatatcgaccaattgttgcgaagaagaggtcctcagcctcaacctctgtgatgcacatggctggtcctaggattgctcatgctactttgaaaggaccaagtgttgtgaagg

SEQ ID NO: 30899 - DNA, 636 bp, Glycine max
ggcagatttcacatgaagtttctcagtccaatgtcactgggtggggtagacgaccagcggcactacgagctcttagccaaagattgagccggggtttcaatgaggcactcaatggatttaccgatgagggatggacaacaattagcaatgatggtgtagatgatgttactattctagtgaactcatcccctgacaagttaatgggtctgaatctttcctttgccaatggatttccgtctgtcagtaatgcagtgctatgtgccaaagcatcgatgctattacagaatgtgccccctgccattctccttaggttcctgcgggagcatagatcagaatgggcagacaacaatatggatgcttacacagctgctgctattaaagttggcccttgcagcttatcaggatctcgtgttggaaactatggaggtcaagttatactccccctagcacacacaattgagcatgaggagtttttggaagtcattaaattggaaggaattgctcattctcctgaagacacaataatgcccagagaaatgtttcttttgcaactctgcagtggaatggatgagaatgctgttggcacctgtgctgaacttatatctgctccaattgatgcttcctttgctgatgatg

SEQ ID NO: 30900 - DNA, 379 bp, Glycine max
agtacctcttgtttgtttgttgaagcagaagcctctcgttcagcttggttagttaattagctgagtgagagagttttttttctttcttttttttgctttcccaatttcaaaattttaatggaggaatacactaataacaatcacttgagtgaaaacacaggtcctagtccaagtactccaaggccaaatttcttgtactcttcagctagtggtggaaaccatagtcataatcatcatcagcatcatagccatcaccgccaccatcagtttccactcaacatcttaggccgtcaatcgggtggatcagatcattgctttcagtctgatcaagtgtcaccacaccattctgtgaaatccgaagccagcacttctcagcttc

SEQ ID NO: 30901 - DNA, 273 bp, Glycine max
cctttttcttttctttctcaagctgctgtaatattgcttacctagctagctaggtagggacatctctctctctttctatctatctatggagcttggagacactaccacagtgatggaaacgtcgtccggtgaggctgtggcggcgccatgccggtggcgaggtgattatgatggatgcgaattccggtgaagaagagaataataatcataataataaaggaaaattagaagagggtggtggagaagaagaagaaggtgacaatagatcaacaa

SEQ ID NO: 30902 - DNA, 268 bp, Glycine max
cattcggctcgaggttcccagtgtgctagaaacatggactctgctttgcaaagactaattttgagagttctcagtttttggactatactttcctagattttcagggtgccatcatgtgtcaaaagctattgacgaataatccatctccagatccaatcttgttagtagagtcacaaccaaaaatgcgatgtttcttctcgaagttgctgtgtaagtttagtccaccaagtagaagagattgacgaaggagggatgatggatcaacaaa

SEQ ID NO: 30903 - DNA, 262 bp, Glycine max
cgttgaccttcttcattgattactatttctccctcagatttcgcttcaatcttccatccccgttccgttcacttctactttcaaggttgtgtattacatgaatcgttggttgaaagatgtttgactgtggttacaagtcgcaatatgtgggtgggcaatgtgaaaaatttgtgaggttggatgacttggattctagactatcatcatcttctgaagctgcagttaaaacatgtggatttagtattgataaattaagccatgg

SEQ ID NO: 30904 - DNA, 189 bp, Glycine max
cggtatttggggtaaaggagcacatgacatgtaacgaatttggggtaaaggagcacatgacatgtaacatttttgttttgtaatttgggattattttttcaatatcaaagtaactgtataagctataaagcatgaattacattattgtctggttcacttttactgaacatttgaatgaaatcacaaaag

SEQ ID NO: 30905 - DNA, 524 bp, Glycine max
gattatcctaagacttccaactacttagtttgtgttattgaattcttttcatttccatttcgtcaacttattgctggctgcctccttacagttatagtgttatagcatttatttttatttcattaacactcatcatatgatggctaaccataccatgaagatggccaacttgttgcttctcgtgactttggctcagctcttagccaccgcaatctcatcagatcctgaccttcttcaagacctctgtgtcgccgaccttgcctcaggtgtgaaagtgaatggattcacttgcaaagaagcatccaaggtaaatgcctcagatttcttctcaaacatactagccaaaccaggagccaccaacaacacatttggctccttggtgactggagccaacgttcagaaagtcccaggactcaacacaacttggtgtctctctgtcaagaattgactatgccccaggtggcatcaacccccctcacacccacccacgtgccacagaagcttgtgtttgtccttgaaggcca

SEQ ID NO: 30906 - DNA, 411 bp, Glycine max
cttgaacaatattcttcagaggatgctgcaattctcttccaccatttcccaaacaaattaaaatgtttctgaatccaatttggaaaccaaaaagttcgtagcttttcatagagctttcaagtaattagccccgtgaaatatttttctttttacgcaagatgacaccacgggccttctaactgaaacaagcaataataataacaggccaaggaaaaactcagcagcattctgttagaaggaaaacacttatctctattagcatatttctctccattaatctcttacttcagtcctctatcaggaaattcctaccaaacaaaattcatttgtgttggcctagaggtgaagtttatagcatttgctttgaagtttggaaattgttgcttgttcaatcacaacaatggctttagc

SEQ ID NO: 30907 - DNA, 292 bp, Glycine max
catagcttcctcttctttcatcacagtttgaaaaaagaaaaaccagaaaagaattccaagcttaaatattggttgaaccagaggcaacaatgggtttgacggtgtcacggctattgagattgttttatgcaaggaaagaaatgaggattctgatggtgggtcttgatgctgctgggaaaacaacaatactctacaaactgaaacttggagaaatcgtcactacaatacccacaataggcttcaatgtggagactgttgagtaccaaaatgtcagcttcaccgtctgggatgt

SEQ ID NO: 30908 - DNA, 653 bp, Glycine max
ctcaacaatggatcatggcagagaaaactcaaaggtaccctttggagaacaagaacaatacacttttccatatttttcctacccttctttcagcctcttcactccaaataatcacacccttttaagcacattctgccccatgttttctaccatggaattcaatgatctgaacaattccaattgcttcacaccaaatgaagactcatctggctattgtgatgttcttggggagcattctagtgccaagtcagacacagattcatctaatgagggagttggtgatgcatcagatgaagaagtgatgatgagtttggatgagttgctgtttgatggaaaaacaaaggagaaaatggaactattggctgcaatggttggagttgacactactgatccagcaattgtgttgaatgaagtagtgagagttctcaaggttttgaagaggataaatcagtattagttaagtgcttaaacaaagttaagaattttagttgggctcaaacattttttgtaccttttgaaatgtgtcttaggtaacacctatgagatattgagcttgagaaatttccaattgattattttctaagctagttagcacaaaaatcttccatcacgggggatggtttcaataatttaaaagcaaaataactccttac

SEQ ID NO: 30909 - DNA, 300 bp, Glycine max
gtccatcttcttcttctcttcctcttcgcacaaagcagcaagcatccttgagatggaaactttcctcttcacctcagaatctgtaaacgaaggccatcccgacaagctgtgtgaccaggtttcagatgccatcctagatgcatgcttggagcaagacccagaaagcaaggttgcttgcgagacctgtacaaaaactaacatggttatggtctttggtgagattacaaccaaggccagcgtgaactacgagaaaatagttcgagacacttgcaaaggcattgggtttgtgtcaccagatgt

SEQ ID NO: 30910 - DNA, 509 bp, Glycine max
gttttgagctcctctccatcaggaagtaacaagtatatccagtttcaatttgtcacagacattttctaaattctaatgcacctgtttatccaagaactatcgatctcgagcattatggaatcatgttcatgtatattattgaattgccatgagccatgatgtcataatcaacttcacttcctgttaccaaattatgggccaaggtggacgattttctgccccctcctagattatgccttcggaagaaagatttctcggatgttgtatcatgttcctaaaacatgctcactgcgaactcaaccaggggtcctctcctttttactagaaaagatttgttttcttttttttgaaatcaaatagagtaaagtagagttgtagtttatgatacaattgttattggtttttcgcattgagacccaacactgcctctatgtttcccttgttatgagtggaattattgatgttagaaattggtctcaagctacaagagcggtttgagatcttccgtt

SEQ ID NO: 30911 - DNA, 337 bp, Glycine max
gagcacagaagtgaaatacttttctgataccggctacaatgattccaaaccaattggatttgattttttgttgggaaccgatttttgcgcacccctaaattgtaaaattgtatttctttgaacatcagtccttggtgctgcaattttggtcgaagatgaagaattggtcgaaggagggttggaggtggctatctaagattgattttcacggaaatgttgcttcgaaggtgatcgtgactcgccgatttggaagcggcgttaacggtggaaaggaaaatgaaatggatgttcacaagttgacgagggagttcctggtaaagctttgggttgatgatag

SEQ ID NO: 30912 - DNA, 324 bp, Glycine max
ttttgattctggaatgggattgaagtatctctaatggcgattgcagctctcagatattgtttgggtgtattatgtccctttcgggagaggtttttaagttggacctgcacaatttccctatctataagagaagcaaagtatgtacaatatttgatctctatcataagagaagcaaagtagatacaatatttgttaggggtgttcatggtttgattaggttggattttttgttaaaaaatcatccaaatcaaacttaaaaaacttgtgatttggttcgattcagttttcatttaaaataaaattcaaatcagaccaagttaatat

SEQ ID NO: 30913 - DNA, 304 bp, Glycine max
ggaggacagaagggcttgacccggtttacgctcaagctgttcagatgaaggagagggatccggtcaccgggaagatgaggattgtcaatccacagagcagtaggcttgtgtgggaaacttatttgactgaattcaagtccttggggaaagttgcagtgaggctattattccttcacgcaacctcgtgtggcttcatatgcaattggtctttgtggagatgggtttgtgcacaaggccaccattccagaactgcactcaacaaggtgcagaagttgatatttattgcagctcattccaaacttga

SEQ ID NO: 30914 - DNA, 464 bp, Glycine max
tagcgatctgcgaggatatatatgctgctagagctgagggtgagcttggaatcgaagaggtcctttactggactctagtgaagatataccggtccccgcacatgctgcttgagtacacaaaacctgattagaattttcagtgtaccattttctggtcactaacagctaaccaggtccagtgctcacgtatggtttgactgacattgaacgatgtcggagtcaggagcaatacaatgcaagttgatgcctgcatgataagattaatattgcaacatttttggtgcggtattcattatgcggttatgaaacatttctctgaacagattggggagcacggcatcgtgattcttgactgttatcatacataacattgatgctaatgattattttgggggaaatcatgtatacaatgtacaatacagtcaatgccagaattataggaaagcaaacttgtatagttaacc

SEQ ID NO: 30915 - DNA, 450 bp, Glycine max
cagtaccatgtttcttgttcggccttgtactcctgcttctggtgatgattctgctgaaaaggggcattttttgtttatccaaggtgctagtgtggccatgggtttatatattcttgctacaactctacttgacaactttatccacataagggacagtgtttcatatgctttgttggctgtgatgattcttcttctcttggctccacttgttatccctataaagatgacactgtgtcccagaaaagcctctagcacagaaattcctgaggaacatgttggatctacagactatttggttcaagatggcaaagacaacgtagagccattgctatcatcttcatcagctagtggtcttggaagttttaatgatgtggtggatggttcagctgaggtggctatgcttcttgctgagggtgagggagcagtgaggaagaagagaaggcccaaaag

SEQ ID NO: 30916 - DNA, 403 bp, Glycine max
cgacagaagggggcactaatatgaccattcctaaggaagaggaagttaaaatatcagatcaaacaaagcaatcaagagcaccaaagggtcttgtcaagaacaagaatgcaaaggctccaagttccagtggtgttcatgcaagtttggtgaataagagcaaaattggaaaagataaagaagcatcttcatctgtttcaaatggttcttcagctttagactcccgcccaagacagtctactaaaggcagcagatctttcaatgaccggcagacgcaattgtccaagcctaagcacccttcaaagtctgatgcagcatcttctgaagtatcagtggagaagacaaaaccaaaatcattgagaaaaggacccattgataaagttcaaggagaaggagaatcttcctt

SEQ ID NO: 30917 - DNA, 441 bp, Glycine max
tcggcttaatgctttcccacttggtaaaggagcatccttattacataatttgttgctatgtcggtctcttgttgttgctcttattagtatgttgggcactttggtgcaaaaacaagtcctctatcggcattcctccgggaaatcgaggattgcccttcgtaggagagacacttcagttcatggctgccatcaacagcagcaaaggagtctatgagtttgtccatgctcgccgcctccggtatggaaaatgcttcaaggcgaagttgtttggggagacgcacgtttttatatcgagcagggagtcagcaaaagtgattgtaaacaaggagaacgagggagggaaattctcaaagagctacataaaatcaatcgcagagctgcttgggcgcgacagcttgctctgtgcagcacaacagcatcacaaactcatacgcgcccgtc

SEQ ID NO: 30918 - DNA, 390 bp, Glycine max
ctggacgagtaagtaggttgtaagctagaaactcggcgtctcggtactccaacgaagccaaggataagtatgtagtttgcgcgggataaaaagaagaatgaaaacctacagatatcaatggcggagtccaatcctcacttctccgacgacacgccctcacctgcttcttccgtcgactccccatccccgccgccgactttcaacggcatcgtcatggtgtcgcagccggacacccaggacgttttccacacgccgccggagcccgcatcgcttcactcctccgacaacggaggcgtcgaacgttgtgccgttaatctcgccgtcgacgtagatgccgtgagtcaggggttcgtcaatttctgcgatggatcgaagttcgttgattcgggg

SEQ ID NO: 30919 - DNA, 324 bp, Glycine max
ctcgagccgctcgagccgaatcggctcgaggtcaagactaaaaattcttgcacatttgcgagatcaataacttcattttaatgtcaacatcccaacaaacctgacacagagacagcgtgaattaattgaagagtttgccaaggaaggacaagaggaatgtgataaacggagagctgcttcggcttctggttgaaaacttttgcagaatctcctctatttgtttattgtcaagtcatatgctcaactaggtgggaacccacttgttagaagttttgtaggagcattaaagttttttttttctttgccccatccacatatagtgta

SEQ ID NO: 30920 - DNA, 564 bp, Glycine max
gttccatccttatttgtgaatccatctgaccatatctgctctgagtatgttggatactttgagcacagaagaaaaatggaggagattggtgcaggaaacattgaaaagttagccactcaaacttcccttaattgtctactgatgggtgtgttggggaaggaatctgatgaacccctgcacctcattccttcagcttctctgacagttaatcatactccttcaaaggatttcaaagaagctcatgggattcaccaatggtggaaacctgacttacgcctagaatccaagctctaccgatactaataattcttgtagttgttgtagtgtgtgtctggaatactagcacaataaggttggattgattatttctttttcccattgaaagcataacaactcattgttgctttcagattttcatgtattttgcgtgatttttgggtactcactgttaatccaaacacgctgatattatgttggtggatgtataattgtatattgacttgaattatgctgtatctggttttccatgtgaagttaattttgtaaatgaacagttcatgttat

SEQ ID NO: 30921 - DNA, 462 bp, Glycine max
taatttttgttgcaaagtcagggactaaaatgaggattttagaatgttaaggactaaagtgtctgacacctacaatcttagggatttgattgagggttttactctgattctgtgtcttctgttactgaacttgtcctagtgaacagaagcagatgttggagtgaaagggcacaaaaaattactgtgttattgtgtatatacattgacattcgtgtatcaagcctgacaagatgaggccaaaataactgattgtgccaaaaatacagaaactgactactaacaggtgccaaaatcctatgaaccatgaccctgaggacccgataagcatcggttgcttgattttctatattgaaatatagaaaagttggtattcctttgtctgtttggttgtttatttgattaaattgaatgtaatactacagcagatgggacagcggaaacaatatcaatgaccagttctgc

SEQ ID NO: 30922 - DNA, 449 bp, Glycine max
ttcgtccgcccacgcgtccggttaggcaaaagggtgatcaagcttctcaggcaaaatggcccatttttggtacttcatctgaggtatgagatggacatgctggcattttctggctgtacacaaggttgcaacagtgatgaagtggaagaattgacaaggatgagatatgcttatccttggtggaaagaaaaaataattaactctgatttgaaaagaaaagatggtttgtgtcctttaacacctgaggagactgcccttacacttagggcccttgacatcggtcaaagcattcaaatctacattgcagctggggaaatatatggtggggacaagagaatggcaagtcttgcgaagaactatccaaaattggtcagaaaggaaacactgttggaaccatctgatcttcagttcttccaaaatcattcctctcagatggcggctttggatta

SEQ ID NO: 30923 - DNA, 288 bp, Glycine max
gaacgtcggcattcggttcggctcgaggaaccacaaggctcgagtgcttaagtgatgctggattattccttgcattctgctgatgtttctggtcgtcgcagcttaaggaatttgttcggaggtgtggttaccttgcagggagtgcaaagaagtcttccaaggagttgtactagtcgcctcaatccaattttgtgctattttcctcagcacttaattgctggtgtcaggacaccactgtttcttctcaatgcagcttatgatacttggcagattcaagcgagtcttgct

SEQ ID NO: 30924 - DNA, 601 bp, Glycine max
gagcaagacccaacttctggcaactttcaaccgctacagagatgaccatggcgcttctataactaagaaattgttggataatgcatccactgactttcagaaggcattgcacactgctattagatgtatcaatgaccacaaaaagtactatgaaaaggttctgcgcaacgctctaaaaaatgttggaactgatgaggatgcactgacccgtgtggtggtctcaagggctgagaaggacctcagggacatcaaagagcgatattataagagaaacagtgttcaccttgaggatgcagtggccaaggaaatctcaggggactacaagaaattcatcctcactctgttggggaaggaagattgatgtgattgctctctagctaaggacatatcttatagtatttggttatgctggtttcttgtgctgtgatttggttaattttcctactttgagtatgcttttatgagtgctgtatctcactatctattatctttgttgtgagacagtgtgtacttctgttttaaattgcggtttttcatgtatgattaaggcaataaactttaaataaaaaagacgttgtagatattacaaaaggttatactt

SEQ ID NO: 30925 - DNA, 267 bp, Glycine max
gggattggccttatagaaaagaaacttaaaaaccgaattcaatggaagggactggatgtttcaagaccgggtgaggctgatgatagtcttcccagtttacaggcagaagttgaaaatttaacgatgaaggagcgccagttagacgaacaaataagggagatgcaagacagactgcgggatcttagtgaagatgaaaataatgacaagttgctttctgttactgaggaggatataaagaatttgccctgcttccagaatgaaacctta

SEQ ID NO: 30926 - DNA, 263 bp, Glycine max
cggctcgagagcgagtatccatttctaggtgccatcataataactaataacccaacctctcgagagtttgttatattattactgataaattgttggtgggggtggcatagttgcagttggaaatcgaaagaagagaaaagaaattggatagtgattatttgggttcgttatcgttgaaacgtcttctcaaatctggtgtggtgaataacatcacccctcacactcactcaacctaaacaaaatgcagagccagagaaccacgc

SEQ ID NO: 30927 - DNA, 397 bp, Glycine max
ctgacagcagcattgtcagagagacatgggctagacttatagatcaagctatatcaagagggggtattgctgaagcttgctcagtactaaagagggtcgggccccgcatttatcctggtgatggagctgttttaccactcgacattatgggtcttcacttagagaaggctggactgcagaggttaaattctggggttgaagctgttggacatgaagatgttgcaagagcccttgtttctgcttgtaagggtgcagctgaacctgtattgaatgcatatgaccaattgttatcaaatggggctattttgccatccgcaagtgttagattacgtatgctgagatcggttctagtggcacttccagagtgggcaatgtctgtatattcacaaagaatggg

SEQ ID NO: 30928 - DNA, 714 bp, Glycine max
gctaaatcggaaaccagaagaagagaatgggggggagcttgtttttggtggtgctgatcctgctcactacaagggcaaacatacttatgtaccagttacacggaaaggatattggcagtttgacatgggagatgtgcttattgctggtaaacccactggatactgtgctgatgactgctcagcaattgcggactctggaacttctttgttggctggtccaacgactgtggttactatgataaatcaagcaatcggagcatctggagttgtaagcaaagaatgcaggtccgttgtcaatcaatatggacaaacaatcttggaattgctcttggctgaagcaaagccaaaaaagatctgctcacaaattggattgtgtacctttgatgggactcatggtgttagcatgggtatcgagagtgtggtggataagaatgaaaaaaaatcatctggtggcattcgggatgctggttgttctgcatgtgagatggctgttatttggatgcagaaccagctgaggcagaatcagacagaagataggataatagactatgccaatgagctttgtgaaaaattgcctaacccaatgggaccatcatccgttgactgtggaaagctctcttcaatgcctattgtttcctttactattggtggaaaagtttttgacctttcccctgaggagtatatactgaaggtgggtgaaggtcctgaagccca

SEQ ID NO: 30929 - DNA, 264 bp, Glycine max
ggcaagatcagatgtttacatcaacctcgcagctttgcagaagcttgacacaatgctcatagaaatattggatagtttccaggatactgaattttggtacgcggacaagggagcatatcggggaattcaactcggtcacggggaggctcatttcgaaggattgttcagaggaaagatgagaagtggtggctgccggttccttgtgttcaccctgggggcctctctgataagtcaaggaagcacttgaatgagcaaagagactgt

SEQ ID NO: 30930 - DNA, 231 bp, Glycine max
gaaaatatttgtgttaaattaacaaaattaatttaagctctttaaaaagttaatttaaatatataaaagaaaatatatatcaacatatcattattaccttctattgtaggtaaaataaaatgatttagccgtggaccacttaaaacttcttcatggtagacaaacatgagaacacacatgtaaaagagtgagaatattttgtccatagattaatcaaattaaacacatcta

SEQ ID NO: 30931 - DNA, 306 bp, Glycine max
cttcttattggtcatgttaataagatgagtcataggaagtctcattcacatggaagcatacccttttcatgggaagacaaacccggggtttgtaagacccccaacagtgatttccctctaaacaacataggaatacgataaaaaatcatgttctcccttaccaccaccaccatttgctcctacccatttgagcaactcaaggagaatgttggaaattcaagacaacgaggaagattcctctgcctccatgtccattacaacctcctcgaagaagcacgtccgagaaggaaaagggctttagatggc

SEQ ID NO: 30932 - DNA, 432 bp, Glycine max
cttcctggtcccaatcatcccaggaagatacaaggattcatttccaagaggtgattagaagaacatatatgggattggtgggtgcaaaaaggaaagaggtggatcttttggtatttaatttttgcattgatgagacacaattgcgtaggtaaaaagatatggctgctgagctgaactagaaatcaacataagagtgaattgtgaggcctaagatgttaacagggatcaacaaagcagtctcttgtaaattcttttctctcacagggtttgcttattttacattcattatagggtatatatattttccataaatatctttttttatgccgataggagaaagaaatcaaacaagggatacatttagtcgtaggataaagggttaaagggtctaaactttggttatgtaactataaattagaatattaatattga

SEQ ID NO: 30933 - DNA, 606 bp, Glycine max
atcattctgatgggctcaggttatggccgccttctcggcatctacatgggacctcatacaaacattgaccaagggctgtttgcagtacttggtgcagcctccctcatggctggttccatgaggatgactgtatccctttgtgtgatcttccttgaactcaccaacaatcttctcctactaccaataacaatgattgttctcctaatagccaaaactgttggagacagtttcaacccaagcatctatgagattatactgcacttgaaaggccttcctttcattgatgcaaatcctgagccatggatgagaaatctcactgtgggtgagcttgttgatgtatagccaccagtggttaccctccatggagtagaaaaagtagccaaaatagtagatgtcttgaaaaacacaacacataatgctttccctgttatggacaatggggtagtaccaccagtagtaggacaggccaatgggggaacagaacttcatggactgattctaagagcacatctcatccaggcaataaagaagaagtggttccttaaagaaagaaggagaacagaggaatgggaagtgagagagaaatttacctgggtagagctggct

SEQ ID NO: 30934 - DNA, 354 bp, Glycine max
ggggttgccccgctataacgtttgccacaattatagttgaggggatattagcaaaccttgttcaccaatttgattggtcattgcctggtggtgctgcaggagaggacttggacatgtctgaaactcctggccttgctgctaatagaaaatatcctctttatgcagtagcaactgcatatgagagaaattagtatatcatgatcagaagaagaagttatgagcaataagtttgtgtttcaaaatattgtagcttacatgactcttttatgttgtggaagcatttgtgttgttgctggttgctgtcgtttccaattgtggtttaatggattgcacaagctttgttcctgcttaacg

SEQ ID NO: 30935 - DNA, 441 bp, Glycine max
ttctttttgtaaatggtattaaaggcatctcccttctcttaacaaaacattcttcatgtccctaatgactgataaagccatgcaaccttcaatctgtgatcttttttaaatattttggaaaactttgcatgcccatacctgataaaggagaaaaaggaaacttcaaagtcagctatttgtgctagtttaagatctcaaatagtatgggggtctttattcttttgtattcaatcaaagtatttttgtatgcgtaggttctaatactcagtttctgaatgacgcaaatgcggtggatgaatgtccaagtaaacatgcactaagagaatcactttattttctttgtgtgtgagagagagaaaactgtagaatgaaatatcggtcgcttccttattcatcatcagtttagagctgttgaagtttgttaaaaagaaacaaaaacaa

SEQ ID NO: 30936 - DNA, 954 bp, Glycine max
gatatataaactcatttattcagttacactattataatcatagggacgtagctttccatcctgagcttttagactagtatacatgcttatggacaattgacatgccgaaaggaagcaaaaaagaaaaaggaaaaaagaaaacagaaaaaccaaaccaaaacaagtctaaaaaaaaaaagagtaacataacatgttggatgttccacatttttatttatgtttgttggatatcatggcaaggtgagtccagaggagaagcttataccagccatgttccaacccttcattttgcaatcagggaggggcatccacgtccaccggttccacctggtatcaaaagagagccacgtcatgtcccaaactccctcacaattagaaaccaacgcagccctaacgacaccgtttttctcctctaagcaacccatcattgccgcgtaaggcttctcaatcacaccaggaaccgcagacacaaactcccactttctcccgttcaaactcaaaccccaaagctccactcccttcaacaccctcacgttcctcgtgttcccaccctccgatttcacaatcatcatgtacccatcgccgtacacgtgtaacatgtccatcacgttcccccaactaaatccaaccgtcagatcatcattagcctcagtcacgttgaatctgggccgtagaactacgggcttgtcgcactctggcgtcgccgcgaccagaacgctctccataggcccgtgaacaacgttgagaaacacgtgactcgcgccacgtggcgaaaacgaaaatgaaaactctttgttattatcttcctctgcctccgttgacttccacgtgtcggtttcggactcgtacgcgaacaagacggggcggttgtcaacgaactcagcgaacatgaaacgaaactggcccgaaccggaggagtcggtgacgagcttcatcccggagcgtctcaacgag

SEQ ID NO: 30937 - DNA, 865 bp, Glycine max
ataacactcatcgtacttatacttttcacttttatctctatctatccattccattttctaattctgaaatttgttgatccagggtgttttcactggccgatgtgggacaaacctagaccatggtgttgtagcagttgggtatggaacagaaaacggcactgattactggctagtgaggaactcatggggctcagcatggggggagaatggttacatcaagctagagagaaatgtgcaaaatactgagactggcaagtgtggaattgcaatagaggcatcataccctatcaagaatggtgctaaccctccaaaccctggtccttctcctccatctcctgcaacaccttcaattgtttgtgatgagtactactcttgcaactctggaaccacatgttgctgcctctttgagtacagagggttctgctttggatggggatgttgccctattgagtctgcaacatgttgccctgaccagaccagttgttgccctcctgatttccctttctgtgatgattctggatcttgcctattgagccgtgacaacccatttggggtaaaagctttgagaagaacgcctgccacaagtacttggacccaaaggaaagttgccatgaaaggcaactaagcttgagagaagccagtggaatcagtaaaatggtttaggcacaacaaaattaaattcattggtacctgtaattgtgtgtttgtgctagagaatgcttctgtaatggttgtcttccataaatatctagataccaacattctcttttccaaactggttgctgtaaatttctctacaactactcaagtattatgcattttggatgttgatgttaattttaataaattgtatatacttggttcc

SEQ ID NO: 30938 - DNA, 349 bp, Glycine max
cgccgtcgtcttctctgtttcatccttccgctctttattttactcatacgctcagtctcaaacacaaacacaatctctctctccttcttctctagatcagatctgtttttttttcccccaatcgttactgattcgacgtcgttttcgaaaccctcccgcccgagcggaacctggtcgtcaacgagagaccctccaagaggatgaagagaagggtcacagctgatcttcgtgattttcgtacttttcccgagcctggcgtcactgcctccggctaacccttccggaactatgtacagcggttcctctctgaccatgcgcgactcagtttccctacctcactctttctcgt

SEQ ID NO: 30939 - DNA, 441 bp, Glycine max
gcttattgtttcgagaattaaatgctcagactgtgaaacatttggacacgcttcatgagtatcttggattaatgttggctgttcatagtgcattctcggatcgttcaagtgcattattgacggtgcagactcttctgtcagaattgtcttctttggagtcaagagctgaaaaacttgaagtggcctcatctaaaatttttggggctgacaaatcaagggttcgtaagttggaggagctaccagaaactattagagccactgaagatgcaaagaatgttgcaattagagaatatgagcggatcaaggaaaacaataggagtgaacttgaaaggcttgataaagagaggcaggctgacttcttaaacatgttgaaaggatttgtagttaatcaggtggggtatgctgagaaaatagcaaacgtctggacaaaagttgttgaag

SEQ ID NO: 30940 - DNA, 249 bp, Glycine max
ggaaagacggatacagttcgacatgaagctggaagaaagaatgtatgcagaggaagcagagattaatcaaatgcaagcaatgtcacaggtcaagacagatgctgatattaaaaaactccggaagagtctcacactttaaagcaacaccaatgccttcattttactgcacaccttcaccgtcacaaccacatgggaataagtttcaacctcaggctgtgtcaaataacaccagaagtaagacagaacata

SEQ ID NO: 30941 - DNA, 228 bp, Glycine max
tatatatccctatatgtataggactgcctctttaatgaagacagggaatgttcaaggtgcactggctgaaatcaaccggattcttggctttaaactttcgttagagtgcttggaattacggttttgtatctatctggcccttgaggactacaaagcagcagtccgagatgttcaagcaattcttaccctgtgtccatcttataaaaaaaaaaaaaaagggcggccgcc

SEQ ID NO: 30942 - DNA, 433 bp, Glycine max
ctccaagttgcatacagatgaggaatatcattctaagtgcatttccacgtagtatgaggctgccagatccatctactcctaatctgaagattgatttgcttcaagaaataacccaatcgcctcgcattctttcggaggttgatgcagcactcaaagcaaagcagatgaaggttgatgtagatgaataccttaagacaaggcaacagagttcgccgtttttatctgaactgaaggataagctgcttctctcacccaatgaagcagcttctgctgggactcgatataatgtgccgttaattaactcacttgtgctatatgttggaatgcaggcaatccatcagcttcagggacgaactccccatactcaaacatcagcaaatgctttccccttagccgtattttctgttggtgctgcattggatattttccagac

SEQ ID NO: 30943 - DNA, 412 bp, Glycine max
ctcgggcagtggcagcataaccagaaaaaggttccagaaattctggtaaggaacgaagcaaagcaaacgcagcgtttcgtttcgtgtcgctgctggttatggatggaatgtacggagtgccggcggagtacgccgacaaggctctcatgacgccggagaatctgattttcccgccggactaccaccacgacttcctcgccgccggccggattccgctgttcggatccgacgagttcttctcctcctccgccggaattcaccggcagcaggaagatgacgtggcagccaccactgtcatgaaggccaaaatcgcctctcaccctcactaccctcgcctgctccaagcttacatcgagtgtcagaaggttggggcgcctccggaaatcgcgcgcttgttggaggaaatccggcg

SEQ ID NO: 30944 - DNA, 378 bp, Glycine max
gatttccaacacaactttgttcgcataaatgcccaaattcttgctcaaacaaaactgagagtactatatatctgcctttacttgagatctgatcatatccttcaataaagcagcaaagcagcaatgagatccaaaacaacccaattcacatgtaccttcaaggtagcccttctcagccttgcggttttctgcctcttcatcttggtattcaggtcatccatattctcattgtctcctcaactcacctcacaaaccaacatgtcaagctcagtcacaatagtaccagtgtcaccacaagatacaggaaatgcaggcacaccatcatcatcatcatgcccaaattcaccccccttgaaccccccatgcaccaaggcccct

SEQ ID NO: 30945 - DNA, 442 bp, Glycine max
agaaagtttctttgcctgttgggtcctgcaatttggctctgcctctatgggaacaaggaatcgacaaggtgtacgacacgtggaacctggaacaaagcgttaaaagcgaagcgcgatcaaaaacgtgagggcctatgcaacagtgctccactcctcagaaggctacgtgtgcggcgcaataacgctagcacaaaccctgctccaaaccggaaccaagcgtgacctaatcctcctcctggacacctccatctccgtcgcgaaacgccgctccctcgaactctccggctggaagatccgactcataacccggatccgaaatccgcgggccgagaatggcacctacaacgagtacaactacagcaagttccgactctggcagctcacggattatgagagagtgatcttcattgatgctgacatcatcgtcctccgcaaccttgat

SEQ ID NO: 30946 - DNA, 332 bp, Glycine max
tggtgctgttcagttctaagactggtagcagatgctttcaatgcgtatatatatgacattataatgaagccaagggtttgccttatttagaaactcatgctgaaccatatatgaggcagctatcagtaggcgatgtagtcacaggcccacttcagacatttaatggggttgagaaggtttgcaacatagggtttattctcagaactacgggacataatgggtttcccgttatagacgagcctcctatttcgcaagctccagttttatttggcataatcctccgtgaccatcttctcacattgttgaagaagaaagcttttatgtcctcacct

SEQ ID NO: 30947 - DNA, 287 bp, Glycine max
ccacagacgggggtaagtgatgaagtttatccctatgcaatacactagtgtgctcactgaatcaccaatcaccagccatggaaaaggttgaccaagctttcatccaatacccacaacacaggccaaatctcactatcatccaacctgaacacattcccataatagacctctctccaatacccaaccactcagtttcacatccatctcccattgcaggcttggtgacggagatcaggaaatgcatgcaaagagtggggattcttccaagttatcaaccacggggtgtc

SEQ ID NO: 30948 - DNA, 574 bp, Glycine max
ttttgatcccaaaatatcagacttcggcttggctcgatcttttttgggagatcaattcgacgcaaagacaaatagagtggctggcacatatggttacatacctcctgagtatgctgcacgtgggcatttctcagtgaaatcagatgtctttagttatggtgtgatactactagagattgtaagtgggaagaaaaacagagaattttcagacccacaacactacaataatcttctcgggcatgcatggagattatggaccgaagggaggggcgctggaactattagatgaagtgttaggagaacaatgcacactctctgaaatcatacgatgcatacaaataggcctactatgtgtgcacaaagaccagaagatagaccagacatgtcatccgtgggtttattcttgaatggtgataaattattgtcaaagcctaaggttccgggtttttacaccgaaaaggatgttacatctgaagcaaattcttcatcggcaaatcacaaactgtgctcagttaatgaactgtccatcacaatattagatgcaagataggggatggaggcaagcaaatgttag

SEQ ID NO: 30949 - DNA, 267 bp, Glycine max
ctcctttagctttacccaggaatcattccaattaccactacaccaacatcctttttagcaaccattcttccttaagtcctaccctaaccacacacacactctctctctctctataataatggaaaccactcaccgttctagctttcatctgtcactgcccaggttgctctcttctcggtcttccctttccagcaacacccccacttttctcaggcaatctttctttccctgcatgatataataaatatatataatatccttttcatt

SEQ ID NO: 30950 - DNA, 530 bp, Glycine max
gaaatttgaagggctgtacaagcttaagaaatctcccaagagaggtatataagttgaaatctgtgaaaattctgatcctatctggttgttcaaaaattgacaagttggaagaagatatagtgcagatggaatccttgacaactctaattgctgacaatactgctgtgaaacaagtgcccttttcaatagtaagctcaaaaagcattggatatatatccctttgtggatttgaaggattatctcgtaatgtttttccttctatcatttggtcttggatgtcaccaacaatgaatccgctatcttatattggtcatttctatggcacatcatcatctctagtttccatggatatacataataataattttggtgatctagcaccaacgtttagaagcctctcaaatcttcgcagtgttttggtgcaatgtgacacacaaattgaactatctaaactatgcagaacaattctggatgacataaatggctcagattttactgaattacgaatgacaccatatatatcacaattt

SEQ ID NO: 30951 - DNA, 855 bp, Glycine max
cctatcccaccggattccacccccgctccaaatccgacgttacgcgctggcagagcttccttcgagagcgtcaggccacgcgctcttctgcttcgccggcgcgccgcgcgcagccttccccgacgactttaggggacttctgctgagtcagtgccgcgactcgggcgtgtcgtgccgcgccgtgaactgcaccgggacgcggtggtccaacggcacgtcggcgattatggaaacctttctagactcggatttctgcttgcagccgagaggggacagcttcacgcgccgctccatttttgactgcatggtggccggttcgattccggtttttttctggcggcgaaccgcgtatttgcagtacgagtggttcttgccggtcgaaccggagagttattcggttttcatagaccggaacgcggtgaagaatggaaccttaaccgtgaaaaacgtgctcgagaggttcaccaaggaggaggtgaggaggatgagggagaaagtgattgagtacattccgaggttggtttacgcgaacacgaaacaagggttagagggtgtggaggacgctttcgatgttgccatcgaaggagtgttcaaaaggattaaggaacaggaacaaccgcagtttcataagtggaaataacggcgacaccaaggcttccttgttcttacatttagaagaattattataaataactaaagaaaaaaaatacgatgtgttttattcaggtgaattcgctaggatagagtttcatttttttttcaattttaatttctcacacgggctatttatatatatagatgcacaaatgggatcgatgtatgtaccatattgatattgatattgtgattcttttc

SEQ ID NO: 30952 - DNA, 737 bp, Glycine max
ccactaccttaattgcctctagttctctcactttaactattttcataaaccaaagattaaaagggtcactcctttctttttttacatagttacataacatgtcttcctcagagggtgcctttgaattgggaagtgagttctcagaagccaacaatgttcttctcatgtctctaatggaagaaacacaagaagaagagtactatggcgatgagagacttgtgagcatgattcagtcattggaggcagagatcactgacactgaaatgggtcaaatgtatgagatgggacacgtggatagtcaagattgctccacgtcagtcagtgatcctaatcaatgggttgacatggaattgatctcttccttgccttttgatgagatgaatgcatggatcccttgtggagatgacatgatggaacatgcagcaatggaatatgaagctgggcatgatatcaatgattttcaattgttctatggagttttcttggagcaacaatatagagagactaattatttggcacaagggtgtgatgcagtattatgaaattaattaaactgtagtttttatatatatgaaacagaagagaacttggattactttgtaattaattttgtgaaggtgtccctagctaagtacatgttattgccaaaccttttaaattttatcttttgtttgcattttcctcctttactttcatgtaatttcctagctgaaaattaattagaatagattttcctc

SEQ ID NO: 30953 - DNA, 399 bp, Glycine max
ccactatcttaattgcctctagttctctcactttaactattttcacaaaccatagaaaaataataattttttttttcattgtaacatgtcttcctcagagggtgtctttgaacagggaattgagttctcagaagccaacaatgttcttctcatgtctctaatggaagaagaacaagaagaagagtactatggcgatgatagacttgtgagcatgattcaatcattggaggcagagatcactgacactgaaatgggtcaaatgtatgagatgggacacgtggatgatcaagatcgctccgcgtcagtcggtgtccctgatcattgggttgacttggaattgatctcttccttgccctttgatgagatgaatgcatggatcccttatggatatgggatgat

SEQ ID NO: 30954 - DNA, 291 bp, Glycine max
tgcctctagttctctcactttaactattttcacaaaccatagcagagggtctctcccatgttttcatcgtaacatgtcttcctcagagggtgtcgttgaactgggaattgagttctcagaagccaacaatgttcttctcatgtctctaatggaagaagcacaagaagaagagtactacggcgatgatagacttgtgagcatgattcagtcattggaggcagagatcactgacactgaaatgagtcaaatgtatgagatgagtcacgtggatgatcaagattgctctacgtc

SEQ ID NO: 30955 - DNA, 412 bp, Glycine max
gtgacgctttgccgcccggtttcatttcatttcaccgcagccacttcgtctcggtgactccataattcccaatcatcaccgcagcaaccaaatagggtctgcgtttcgtgcaatcaatccattacattacactgcatgttatataatcatacacacacacacacacacctgaaccaatttaggtttagaggaaacggcatcgtcgatggctgagaaggatgcgacgacgcttaagctgaagcctcgaagactcaagggtcacgacgacagcacaacctgctgcattgcctcacgtgaacgctctcatctcatcgtcacttccggcgatgatggtcgtgtttgctggtttgacttgcgatgccctgatgagccgagctggttatggatgttagcgtggagccagtttcctccc

SEQ ID NO: 30956 - DNA, 520 bp, Glycine max
cttctcacagaacaaggaaattctatgcacagctttatgaagagtctcaaacttaaaaagtgggagcaagcataggaaaacttatatcagttacatcttccagttatcaagggaatcaatggagactggagagtatcactacggtttgaatattgtgttgaattgttgtgtgcatatactctgcctctcttatctctcttttgggctcttaagtttaatatttgttagagaaatgctagtagtacaattttttattactttttttgttaggttaaattcatgtgtatcctattagatatatgagtttcatttttatttgataggtcctatttataaatgagtaagaatcacatgaattttaacggataaaagagggcatgagaaagacagtgctagaaaatttgttactagcacttctctgtttgtaatcttttttcatactccgctcccttgttgattttatacatgcttgggaaggaagacttgttatgaaatatgttatgtgtgttcccgtgtatgt

SEQ ID NO: 30957 - DNA, 316 bp, Glycine max
gactagacagtaataataaggactctgcatggcaaaaggggagatttggtgaaaatacaataattggtaacatcgacacaggtgtttggcctgaatccgagagcttcagtgataatggatttggctccgtcccatcaaaatggcgagggggtaacgtttgtcaaattaacaaactccctggctccaagagaaatccatgcaacaggaagctgattggagcaagattctttaacaaagctttcgaggcatacaatgggaaacttgatccatctagcgatacagcacgtgattttgtggggcatggaacccatactct

SEQ ID NO: 30958 - DNA, 525 bp, Glycine max
ttcttctctctctctgggaattgaacttaattagaatgccggcttggtggaatagaaagtggagcaagagcaaggaggagcaggagcagccggaggaggaggatgaggaggaagagccacgtgccgcttttcagctgaatttcatgagcggtgagcgggacaagaacaagggtaggagttgtagtaagaagaagaccaagagcttcgacgacaaggtcaaaggggttccgttaccacttccctcgcatagtctcagcgatccaattcaatcatttggatctgtttcggtgtccggtggttccagcatcagctcctccacctcctatgacgatcatccaatttcgcctcccaacaccaacagaggacgagaggaggtgaggttcaatgtgaggtcaaaaagtccgggtcctgggtcaagaggacctaccagtcctacctcaccgcttcatcaaaggttgcatgctttgagccttgactctcccacggggagtgagtgtcatccattacctcttccacacagcatac

SEQ ID NO: 30959 - DNA, 672 bp, Glycine max
ctcagttggggacttcaatttagattccaagtggcttgtagatcccaaacaactatttattggtccaaaaattggggagggtgctcatgccaaagtatatgaaggaaaatataaaaatcaaaatgttgctgttaagattatcaacaagggagaaactctggaagagatttctaggagagaggctcggtttcgcaagagaggttgctaatgttgtcgagagttcaacacaaaaatctggttaagtttattggggcttgcaaagaacctgtcatggttatagtaactgaacttctattgggtgggacattgcgcaaatatctcttgaatatgcgtccaaagtgcttggatatgactgtggctattggatttgctcttgatattgcccgagcaatggaatgtttacactctcatgggatcattcaccgtgatcttaaacccgataacttgatcttgacagatgatcataaggcagttaaacttgctgattttggtctagccagagaagagtccttaactgagatgatgactgctgaaacaggaacatatcgttggatggctccagaactatacagcactgttactctaagacaaggtgagaagaagcattacaaccacaaggtggatgcctacagctttgcaattgtgttgtgggaactcatccataataagtta

SEQ ID NO: 30960 - DNA, 612 bp, Glycine max
gaactatggagcatctgattttgcatattctgcatactccttggtcacggtgtcactagcaagtgttgcttcattgttccttctctctaagagcaaaggtttcgttgggatctggattgcactaaccatctacatgagtcttcgcatgtttgctggcgtgtggaggatgggaacaggaactggaccttggcgttttctcagaggccgctcaatgtcttgatgatgacatctaacaaaagaaatttcgttgttgagcagaaaaaatgttttgtatcacttttcaccatttaggatcagttgtaatttcgttgttgagcagaaaaaatgttttgtatcacttttcaccatttaggatcagttgtcttttttcaagacatgatttatgcactctacactatggtgatagtcttattatatattatattggacgggtccaatttacacgtgcaagtgttatattcaaagtatcgtttttttcttttggcctccgtttaatgtatcctctgctcattgtaatattttgttgtatttagaagattattcttcgtaatgttagtatgtaaactctgaccgtatgtatccatatgagaaaaataaatcccttttctgtcc

SEQ ID NO: 30961 - DNA, 562 bp, Glycine max
gtgatttagctttggaggatgttcgcaaccttatccataagggccttgagatatttcatgtgtcccgtaataagctttatgctcaggttagatggggaaatttcttagtcagactactcaacaaatataggaaaaagatttcactgactactgaatggaggccactgtatgatacactggttagcacacattttactagaagtacaggaccagaaggttggagaataagacagcgacattttgaaactataacttcccttgttcagtcctgccggagattcttcccatcaggttctgcctttgagatatggtctgagtttaaatttttattgcaaaacccatggcataattcatcctttgaaggttctggctttgcaagactgtttctccccacaaatctggataatcaggccttttttacacaggattggataacagagtgtatagagttgtggaatctataccaaattgccaattctggaacaatcaatgggcagatgttattgctcgtgttgtaaaaaattaccacaatgttgactgggagtgcttcttgcctttgctt

SEQ ID NO: 30962 - DNA, 384 bp, Glycine max
gattgcttgctaacccttccatgaagcaagcaatgcttttcccacagcctgctcaacccggagacgcgttccatcaagttttaaatggacatgcacgtaagctgcctcacgacaacccgtgttcttgaaaccaggggagaagatcttgaattggactgctggacctgtgggagcccttaacccttggtaacaattatattacttttatgaggccattataggattctttgggtttcttgcccaatccttccaaagggttaaaaggggtgggtaatttaaaaaccctttttctttttctttttggatgggaaattttgatttttccatagaaaaatggcaaatcattagatcatgtgatccattttacaacaggattggaggttc

SEQ ID NO: 30963 - DNA, 351 bp, Glycine max
aaattgaaaaccgctcaacttatctctcagctataaaatcagaagttcaaagacaaggggagttcatcagtttcttaattaaggaggtagagtccacctcttttgcagatgtttctgaggtggaagcatttgtcaaatggctagatggggaactatcttcattggtggatgaaaggtcagtgctaaaacattttcctcaatggccagaacaaaaagtagatgcactcagagaagcagcttgtaactacagagatctgaggaaccttgaatctgaagtttcatcctatgaggacaatcccaaagagtcattggctcagactttgagaaagatacaagcactgcaagacaggt

SEQ ID NO: 30964 - DNA, 522 bp, Glycine max
gcagcaacaacttgcattgcaatctatcctttctacatagttgtcattgctttgctgcatatccatcatttcttcatagcatctggcttggcagttggtgtcttgctctttttgggaacaagctttttccagtttggtggtctctatatttgtacccattctttttgccataagatggtttccatcattcattcttgcatggtgttctatatcagttttgagaatgcagagtcaattgtgattggaaagggaactttctctagaatgtgtatattatgagtgttaatagtgcgattgagtccaaaagaggaggttagggaattgtggcgtgggagcttctcgttctattcctcaattgttttttcttaccatattgcgtgagaatatagggttgtctgtggggcaattcttgcagttttggcctattgtattggttttatttccttatcagacagcatgaagttgtaccatatgaaattttaatgctatttatttattaagtttgcagacaattgtttcttc

SEQ ID NO: 30965 - DNA, 476 bp, Glycine max
ccctacttgtgctaggctttggacattgttcaacgaaaattcagtacacccaacaatttacaaagaatcagccctcgcttttccaagtcccaacccctaagatgaaggtaagattccttgctttgttcctactcatttcaggcattcaagccatatcaacctcagaaggtaaaggcctaatccagagcaatggacaagcacaagaacttcttgggaagttatatggaagcatagaagagtcaataaggttgaacgacaaagttgaggaaactaaagacgggtacaaagaagaaatacttaatactacaagaaaagcacaaggtggaggaagttcaggaggcacaggaagtagaggaaagacaggagctggtggcactgctgatgttaatcgccggccacgtcaaagttctgcaccatcagagcctctcttttgggtctcaatatttaatccatttgtaagcttggctttagtcata

SEQ ID NO: 30966 - DNA, 373 bp, Glycine max
aatggctgttaggcttgatgatgctcaccaagaactttcaaatgctattgtggttgctcaagacacatccaaccagatgtccaggcgtgatcctctgagatgttacatggatgtaattgatgatatgctaactcaaatgggaagatccatccttcaaaccacaaggtggccgattaggggaaagcgacatggattatgatactgacgagaagtcaatggcaacactaaggcgtcatcttcggggagctcctgaggagtattatagatataaaagtgaatatatgacttatgtattggaggcacttgaattggaagatacaataaagaattatgaacgccgcaactcaactggatgggaatataattcaagcat

SEQ ID NO: 30967 - DNA, 520 bp, Glycine max
ctcaggaaggcacaaattcttttggtctttcaaactttcataatcagctggatagttcacgttcacacgattctgtttcagtactgagagctagtcaagagttggttccctcgtgtaaaagtagatgcagagtctttgggatttgtcattaactgagggtgctcccgttgcaagtaaagaggcgactgactcatctgcagttgcttgtgctggaccttcctttacaagacatgttgaagatgatttccatccagggcattcacttaggagcaaggcagtggcaagtgattgcaccaagggtgtgctgcaatattgacttggaaatcttgatgtatgctggtactgatgctggcataaggtagcagaagagaatgtccacagttgttgtacttgtgtgctttgctctagtgacttggaatattgggagactaaaatattgtaactattcgtctaatttagatacttgttaaattggctatgacccgttctagattctgtattaatcatgtatctacccttc

SEQ ID NO: 30968 - DNA, 421 bp, Glycine max
ttatggattcttggctgttgcaaagatatcgggtgactatcatcttgaaaatatgctggatgatttggtggtgtcactttgtaagtttgttactggttttgatccattatctggtgaggagtcaatcctagcctttggagatgacacaaaagcaagaatggcaactgagacagttttcactattgcaaataggtatggtgattacatccgcacagggtggaggaatattcttgattgcatcttaaaatttcacaagttaggtcttcttcctgctcgtatggccagtgatgcggctgaagagtcagagctttctacagaaactgaggatggggggaagcagaatactaattctttatctttatctcgtcttccatctgttaatactccgaagagaccctcaggattgatgagcaggtttagt

SEQ ID NO: 30969 - DNA, 454 bp, Glycine max
  unsure (1)..(454): unsure at all n locations
cagtggtagtgctctttcgaatacttattactgccaacttcagcaacaagctaagcaaccctattccactagcttggctaattgtggaggcaaatcttgtcctcctgatcagaagctcatcccccaaagttgtgaatgtgcctatccatatgtaggaacattgtactttagaggaccctcattcagagaactgtccagtgtaaatactttccattcacttgaaatgagcctatgggtgaaattgggtctaactcctggctcagtttctttacaaaaccccttcttcaatagtgatgattatcttcaagtgcaactagcactctttccaccaatggggcaatacattaacaggtcagaagttcaaagaattgggtttgaattgagtaatcaaacttacaagcccccaaaagaatttggaccctattactttatggngggtccttatccttttcca

SEQ ID NO: 30970 - DNA, 512 bp, Glycine max
cccacgcgtccgcccacgcgtccgcccacgcgtccgctcaagactcttgttgtgaaggcattgagagaaagagaggaatctattgtaaaatcaaatcctgttcctgaccttaattcttttgacgatgatgggaaccatagcaattcagaaatgcttgacaaggaggacagcgaaaatggaaatgattgtagcgatgacgatgaagatacagtgtttgtcactgcagagccttctcaacaaagccctagtcatcttacagaagatggttgtgaaactgaaaccgcgaccaaatccaaaagtttgccagcatctactgagaactatatttcaagtggaaataggttgctggttgacagttgtccttgcactcttgtatctcaaatttgctctttggcaattggacttcaagactgtggcctcgctaccgggcagacaaagggggatcaagcaaaaatttgcaggagcaaaagccttcagttgagcacttatgacacggacaagtgttccagaaa

SEQ ID NO: 30971 - DNA, 541 bp, Glycine max
ttcggtctctcaaacaaacccaccaagatgggtaaaagagctttccttattgtccatgccttcttcgtcttattcagctttggttcctcaaaggctgaaatggtttctgccgtttatgtgtttggagactcacttgttgatgtgggcaacaacaattacttgactctttccattgctaaggcaaatcatcgtcactatggtgttgattttcctacacacaaaccaacagggagatttagcaacggcaagaatgctgcagattttgttgctgagaaattgggttttccaacttcaccaccttacctgtcccttataacatcaaaggccaacaaaaacaatgcatccttcatggatggtgttagctttgcctctgcaggtgctggaatatttgatggtacagacgaacgttatagacaatcaataccgttgagaaaacaaatggactactactcaattgtgcatgaggaaatgactcgagaagtaagaggagcagctggtctacagaagcatctctcaaaatcaatattcgttgtggtgattg

SEQ ID NO: 30972 - DNA, 966 bp, Glycine max
ctcacacaaccttctttcgggtccaattcctcccaaacttataaaagggggtttggtggaaagctttgctgggaatcctgggttgtgtgtgttaccggtgtatgctaattcatcggatcataagttccctatgtgtgcaagtgcctactacaagagtaagaggataaacaccatctggatagctggggtgtctgtggttttgatcttcattggctctgccttgtttctcaaacggtgggcccgcaaagacactgctgcagtcgaacatgacgacacgctgtcttcttcgttcttctcttatgatgtcaagagcttccacaagatctctttcgaccaaagggagatagttgagtccttggtggacaagaacataatggggcatggagggtctgggactgtgtacaagattgagttgaaaagtggtgatattgttgcggtgaagaggctgtggagtcacgcgtccaaggattcggctccggaggatcggttatttgtagacaaggcattgaaagcagaggtggagaccctgggaagcataagacacaagaacattgtgaaactgtactgctgcttctccagttatgactgcagccttttggtttatgagtacatgccaaatggtaatctttgggattcactgcacaaaggttggatcctcttggattggcctactcgttatagaatagcactggggattgcgcagggtttggcatacctccaccatgatttgcttcttcctattatccaccgagatatcaagtcaactaatatcctgttggatgtggataaccagcccaaggttgcagactttgggattgccaaggttttgcaagcaagaggaggaaaggattccactacaactgttattgcaggaacatatggttacttagccccagaatttgcatattcatcaagggccagcaccaagtgcgatgtctacagttatggggtgattttgatggaact

SEQ ID NO: 30973 - DNA, 305 bp, Glycine max
gatgaattgaggttggaatgagctactggtggatttagatcatggtgcatatactgaagacaataagccgtgcccataataaccctcatccttgcgctccagtcaagaggttcaacttccttaacatgcagatgctcaaataagtttccattcggagcatactcaaacaccatcatccttgtgaatggttcttcttcgtcacagtacccaataaggttggtaaagttcttatggttaacacgggacaaagcagcaatctttttgcgataggctgtctccatgttctttctagttctagatcgcga

SEQ ID NO: 30974 - DNA, 400 bp, Glycine max
tgccatcacccctatgggaaaattggggagactgcggctttgaatggggaagagtttgatggttgtgaatttgagaacctgcagtgtctggcaagccagaatttggggctcaaggatcttcgcgcctgtggggttggggttggacacacagggtctaatgtaaattcttctgccttatcaaagaaaagaaaagggggatctcgtgctgcaacagctggttgaagaattgataatttggtggttttcatccttggcatgggaatatctccttccaataaatatctcgttaccagttgcagcatcagctatccatcaagtctttttttaaaactaattctctctttttgaccctctgctgcattatcgtggttcgattggctgctctactatggaagattag

SEQ ID NO: 30975 - DNA, 267 bp, Glycine max
cttcagatagagtcagttcagtggcaaaagcatctgttgtgacaggttctcgaggttctgtgcctaagcccacactaccatccaaatcaccttctggtccgacagtatcaaccaggactaaatcagtgacttccacatcttctggtaacaatttatctgacaatattggtaaatcttcttttagttacttaaaaagaagttataagccaacctcatgttgcccagttgtcaaaacaccttcaagggttgcttcaagacataaagctg

SEQ ID NO: 30976 - DNA, 257 bp, Glycine max
tatcccttcctcgtttacctgtttatccactctcacccccgtcttccacacatcttctattgacccatcgcattagtcttctgttcgatccactgaggaaatgcaaacataggaacccccgaagccaagctttccattgtcgaattccaaccacagtgcgtcacaaaacaccccacagaacgatgtgaaagaacttccacttgagaacaccaatttactatcttccccttctgttccaactcctccctgcagcttag

SEQ ID NO: 30977 - DNA, 263 bp, Glycine max
ctacagttgtccttggttccctagcctttgcggtcttctgggtactagcggttctcccagctgtgccttgtctacccattgggagaactgcagggtccctgctaggtgcgatgcgtatggtaatgttcaaagttcttagtccagaccgagcttatgctgcaattgatcttccagttacttggtcttctttttgggactatggctgtcgctactttgcttgacagagcgaacatgttcaagtacttggggaaattgctttcttg

SEQ ID NO: 30978 - DNA, 264 bp, Glycine max
aatgcaacagtccaggccaagatgggaacaaattttggtggcatgtacggttcaagctcagtactcacaacaagtcatcatgggagtgaggcagagaataataataataattattcaggtgatttgtcacaaataccccctacaaaaagacggcacgtacagaatgaggagagtgcatggggacaaactagggactttcttggtgttggtggtgccaaccatttgccacccttcatcaaccaacggatggatttgatttgatat

SEQ ID NO: 30979 - DNA, 256 bp, Glycine max
gagcaacagcaaggaaggcatctttgtccataattgctgaaaatgctttattagatgctatccaatccaaaaggtatggggatgcactatatttttgggtgcgcatggatatggattcacgaaacccttcgcaaacggacttttggtcattttgtgatgccgttaatgcgggaaattgcaagtttgctttctcagaagccatgaggggaatgtatggggtaaaaggtgatgcggattctttgcctcccatgccggt

SEQ ID NO: 30980 - DNA, 255 bp, Glycine max
tcttgattcacataacaaatgagcccttgaattattttgttttgttttcttttagtagtggttcctatttaatgattgtagaatgcttcatctatacttgaatgtgtgtattttgaattctgatatatggaggatgctaaagttagctgattttttgttgtttattttcctgtttgaacagaagtagcagttactgtgcctttggttcttctggtgaacagaagtgccttgattttcatgaatggtaaaatggga

SEQ ID NO: 30981 - DNA, 275 bp, Glycine max
tttttctccattggaatagccttgtcttctacagacccccaagctctgagattctaatcctctgtggttttccaacctcagaatttcctcgaaacttgacagcagattatgtcaaatctgtggcttataacctcccagaagagagaaccttgacaactcaggactatatctgttttgttgccatgagtatcaattagcagctttctctaggccactgttgtccattgttctgcttctacatataatctgctggaagagatcacttgaactactat

SEQ ID NO: 30982 - DNA, 225 bp, Glycine max
gaacttcaaagaatatgacatctggctggcagcagagaatgggatgtttttaaacccttcaaagggagaatggatgacaacaatgccagagcaactgaatatggaatgggttgacagtgtgaagcatgtttttgattacttcacggacagaacacctcgatcatattttgaagaaagggaagcctcacttgtatggagttacagacatgcagatgctgaatttgg

SEQ ID NO: 30983 - DNA, 375 bp, Glycine max
attcgttttcgttggcggaatatagaaaagggagatcctgaatttttcccgccccattttccttcgatccaaacaatggcaccaaaatccgatagcgccgaagcgatcgtgttaaacttcgtcaacgagcaaaataggccggtgaatgcacagaacgtggcggatgcattgcaaaagttcaatctcaagaaagcggcgattcagaaagcgttggataatctggcagatggagggcggatttcgtccaaggagtatgggaatcagaagatataccttgcgcggcaagaccagttttaaattcccaacactgaagagctgaatcacatgaagaaacagaatgctgaccttcaaaagcagttagaggatcataaaaag

SEQ ID NO: 30984 - DNA, 486 bp, Glycine max
ttgtgattcaagaaatggtgctcgacaggtagatgtagatctagagggcatagaagatactagtggagagaatgttaccaatggaaagactcaagtgaacgtgactgagcaaggggggcaattatcaaaatcagaagacgagaaaggagtttttgattcctgtcggttgtttgtccgtaatctgccatatacgaccactgaggaggaactggaagaacatttcagtcgctttggaagtgtctcacaggttcatctagttgttaataaagatacaaagcgatccaaaggaatagcatacattctttatacagccccaaatattgcagccagggctcaagaagagttagacaattcaatctttcaaggaagattattgcatgtaatgccagccttacaaagacattctgataatcaagagaacaatgttttgaaggaccaaagctcgaaaaccctcaaacaacagagacaggaaaaaaggcaagcaga

SEQ ID NO: 30985 - DNA, 255 bp, Glycine max
gattgtttaattttcattatgtattttacaatcaccatatttcaatctgctataggctattacaaaattgaaatccaaatgtttgaaaatgtgaagagtttccattagttgctcaagttgtcaagttattagaaagaatattgtggtttactccgtataatttgtgcaattgatccttcagagatggataaacttgttcctatttggttgctgtgttacagtttgaagatgatgacagaaggtgtcacatggaac

SEQ ID NO: 30986 - DNA, 439 bp, Glycine max
gaagtttgtcacctagaatcatgctattattagttgttttttttgtgtcttaaaggaatcccttatcccttaccttttcatattgtgtgcagaggctctttctttcctcattaccaaagcagtgcaaaatcaatccctccatggagttaaaatctgtcccgtagctccaagtatttcccatcttctattcgcggatgacaacatcatttttacgcgttccactcacgaggaggcttgccaaatagaccatcttcttcaagtctatgagcaagcttttgggcagagtatcaaccttgataaatctgagctaacctcaaccgaaatgttccttctatcagaactaatcaactagccatgcttttgggtgtaaagttagcggttgctcatggaaagtatttgggtcttccctctttgattgggaggtcaaagactcaagtct

SEQ ID NO: 30987 - DNA, 246 bp, Glycine max
aattaatcattcttttggttatttcatccaaaattgtaattcgcttgtgttcctcctagaaattactttcataactgttggaaaataggagctttttagaaaataaagagcatttttttatcattgcttctctttccttgatattttgtatagctaggttcactgcatcttaggaagtattgataacttaattgctctcttgtaaattgtagttggagattgattatctttgtaatactttgtgaa

SEQ ID NO: 30988 - DNA, 452 bp, Glycine max
atatggtgctccgcagggtggccagcctggttatggtcaaggcgttgccttcatacagcaccagttcttatggtgctggttatacacagactccggcgtataccggtgatggtaatgggaatgctcaggcaccccagagtgccattgctaaagcatccccttgatattttggccacccttcccctccccttctcatagacgatttttattgtgtttccccgtttatggtactagtgacaccaatgtagcattgcattgtttagatggaagaaatggtgtattgttttttttttttttactttttgaatatcttgtacggttaaattgaaactcattttggaggcgactgaaaaaactagttgggaagcttatttgaacttgtgacaataatttaaaatgttcattatctttaaaaaaaaaaaaaaaaaaaaaaaaaaaaaagggcggccgcc

SEQ ID NO: 30989 - DNA, 554 bp, Glycine max
gggagttatcaacacaaacccagtggagaagacttctgtggatagcggcttatctgaaagagggaagaaacagtctataaaatcagctttgatttgaaagaaatgggagcgtgtgacaagggctgttggatctggtctgctattactcagagagcttaccagactgctgagattattgcttctgttaatggagttacccgtagttatatagtcccagaatacagctttctggatgcccgtggattaggtgcctttgaaggaaaaaagttggaatatgtttcagaagtgtatgcatcagatggtatatctccgaacatcaagcctcctcccattaatgacggaactccgaatgagagtgttgcagatgtttttgttcgtgtgacacagctcatgtcaattcttgaaactcagtattcgggtgacaccgttattattgtgtcgccagattctgacaacttgacaatccttcaggcaggtttgataggactagaccttcgaaggtatggttttaatcaaaagcttcaattaaggttttaattttggttactagttca

SEQ ID NO: 30990 - DNA, 419 bp, Glycine max
gaacaaaatatcaaataacaatattccgattccaatataatataagaaaagaatcaacgtacgtaggaaaagacatataagatccttcttattttcccctatgagctacaataaataacacaaaataccttaaaaattccctcatattctgtatatatatacaaacaccaaactcacaataaacatcactcggtaaagctgtatatagaaacggatgactcagtgcttgaagatggcaagcatggtgatcacaaccgcagccccgatcatggaggcggagcttgaaactgttccggctgctccgccatcgggagccggtgttggggagccctgagcagaggcggtggcggagaagagagcgatgaagaggatgacggccaaggacatgaacatgctttttgttgattccatggaaaaaa

SEQ ID NO: 30991 - DNA, 349 bp, Glycine max
cggacgcgtgggcggacgcgtgggtctctcttggagggaatgctacggattactttgatgatggcctttcgatcggggcctttcatgctaacatgaaaggcatccctgtcatatgctctgcagggaattacggaccaacacctgcaactgtttttaatgttgcaccttggatactaacagttggtgcaagcaccttggacagacagtttgatagcgttgttgaactccacaatggacagcgcttcatgggagcacgcctttctaaagctatgccggaagacaagctttacccactcatcaatgctgcagatgcaaaagcggctaataaaccagttgaaaacgctactct

SEQ ID NO: 30992 - DNA, 640 bp, Glycine max
caaaaatatgtggtacaagggaatacaagtgtgactgtggtaccatcttttccagaagagacagcttcattacgcacagagctttctgtgacgcactagctgaggagaacaacaaagccaacgaaggacaattgccaaagataggtccaaacttgcaatgtcaacaaatcccaaacctcgtttcatcattaccaatcaacaccaacagcattgttcccaaccctgcacaaatgggtggcaccacctcggagttcaaccatgctgatcacaagcacccactatcactcccacacgagctcatgccaatgcctgcacaaaaacccttcaacaacaacatggctgcaggaacagtgttcacgagaagcctgtcatcaacctcttctccctctcttcaactaagctcaaacatgttcgatgaaaacgggctccaccttgctgcagggtcgccacacatgtcagccactgcgttgttgcaaaaagctgcacaaatgggagcaacagtgacagaaaaaacctttgtaacaaacatggcaccaccatcgtttggtgtgctgcaacagcatcatcaacaaccaaatggacaacccttcatgaaccaatacatgcacagtggccagcaacaaggggaaactggtgcacc

SEQ ID NO: 30993 - DNA, 619 bp, Glycine max
  unsure (1)..(619): unsure at all n locations
tggatgagcttgttgagaagagggaaaagaaagatgttaaagcacagccactaaagcagaaaaagagttgggctcagatctgcttcttttcaaagtctaacaaaagaaagcgtgacggggttgattatgtgaaaacctgatttcattcaatgacaccattgttggcaagcaacagattctatgtggatatgcatttaaaaatagagacaaatatatctcttagtgtgcggtcaataatatgcagagatatggatcgtgcaagaatgaattgacagcctctgtaggctgttataatttgctttgacttggcggcacaaattgtagatttcttgttcagtattttctgatttttttccctgtataatttgaattttcgatttatttcatttgtatttctattgctgctttgaaagtagaaagaagtgtacacaacccaacaggcaaacagagacgacggatagtgggggagaaagagaaaccgaagatgattatgtactatggttattatatatgtacaattgtaacttcactctattgttaaacgaattacagtttaccctttgtaccccttccaaaaaaaaaaaaaaaaaaaaaaaaggcncgccagccannnnnnnnn

SEQ ID NO: 30994 - DNA, 549 bp, Glycine max
tgattgtgaagaaagcattgtttcttctccacttatggagcatttgccgccacaaccgcatcatcatgcgggtccttcttctcagctgcagcaacagttgccagaatcaatgattgagttaatttcacaagataaaccgttgccagaaaagggtaagcttttgcaagcagtgatgaaagctggtcctttgcttcagacactgcttcttgcaggaccacttcctcaatggagacaccctccaccccctcttgagtcctttgagattccacctgtcaccattccttcaccaccacaaccacaacttcctcatcaagattccttcacctcgaactgtgggagagtcagtaggaaaagggttttctgtgagggcactgattcccccacacagaacaagttccaaaggattgtactccactgacaactactactattgttactgagtcagctttatttattatccttttagtttttcatttataatatgttttaacaacggttcggacgcgtagcacggtggtgtttgattcgactgatctagtgtttaatgta

SEQ ID NO: 30995 - DNA, 391 bp, Glycine max
gccggcgcagcgcgccgcagagcttcctcgccgaatgctacatgcaccgcgcctccgcgcaccgttccgcagggcgaatcgccgagtcaattgccgattgcaaccgcaccctcgcattggaccccacttgcatccaagcactcgaaacaagagcttcactcttcgaaacaattcgctgtttaccagattctcttcacgatctcgaacacttgaagcttctctacaattcaatcttgcgtgatcgcaagcttcctggtcctgcgtggaagcgccacaacgtgcgctacagagaaattccagggaaactttgcgccctcactattaaaattcaggaacttaaacagaggttggcttctggtgaaactggaaatgttgattactatgctttgat

SEQ ID NO: 30996 - DNA, 416 bp, Glycine max
cactcgagccgcgctcttcgcattctccgccaccttctcaattctctttcgattatctttgcatctttgcaccaacctccatggccacgaacacgttcaccggagcattactctccgaacgttgtctccgtctcaacttgaataagagattggtatcgttttcattttccgtttgatcctccctggcgctttcaaccttttaattgtgactgttattctgcgatttgctttactcattctttttgtgataaactcgtgattgatcgctttatgattcctccaattgtctgcttatttgcttctatttctttattattggtcttacgtgcaagttttctctgaattctcaattctgtaatccacttctgcagaggttcgtttctagaaatttttttatatctaatttgtcaaatact

SEQ ID NO: 30997 - DNA, 334 bp, Glycine max
actcgagccgctcgagccgattcggctcgagattttctcttgcctcacctgcactccagatgctaatgctacgagtttgcacagcttgttcattgtctagccatgatggtcatcagattgtagagctatggacaaaaagaaacttcagatgtgattgtgggaactcaaaattcggtgaattctactgcaagattttcccaaataaagatgtagaaaatgttgagaattcatacaatcacaactttaaaggttcttattgctcatgtggtcgcccttatcctgatctagatgctgaagaacaagtagagatgatacagtgctgtctatgtgagga

SEQ ID NO: 30998 - DNA, 627 bp, Glycine max
ggtcttcctgtcacaatgggtgcatatatctatacattgatctttgtcactgttccatcattggcctctgtttataatgagtatgctttgaagagccaatatgatacaagcatttatctgcagaacttattcttatatggatatggagctatattcaattttcttgggatacttgggactgttgttgtcaaagggcctagcagctttgatatcctacaaggtcattcaaaagccacaatgcttttgatagcaaacaatgctgcccaagggattttatcctctttcttcttcaaatatgcagatacaattttgaagaagtactcatcaacagtagcaacaatcttcaccggtatagcatctgctgtactatttggacatactttaacaatgaacttcgttattggcatttctattgtgtttatctcaatgcaccaattcttttcgccactttcaaaagttaaagatgaacaaaatggtgtgctggaactgcatgatgttcatgacaaacaaaggtcaaaggaatcctttataaatatggcagctggagcaaatgaggaggccactcatcgtgttggacatgatgacagacagccacttcttccctcctagattgatctactgaatttc

SEQ ID NO: 30999 - DNA, 327 bp, Glycine max
gtgggatgattgcactagctcatttctcccaaaatctaagacagataaatttgtcatatagctcagttacagatgtggggcttctgtcacttgctaatatcagctgccttcaaagttttactgtgcttcacctgcaaggcttggttccaggaggactggctgctcccttattagcatgtggagggctaacaaaagtgaagcttcatctttcactaagacctctgttacctcagctacttatcagacatgtagaatcacgtggctgtgtgtttgaatggagataaagagtttcaggctgaattggacccaaagtgttggaaattacag

SEQ ID NO: 31000 - DNA, 395 bp, Glycine max
tgaaacgcgcgtctcactcactcactcactctgtggaccttagacattgccctctcttgcctcactccaaacggcgcacatcaccggcgcggcggcgatctccttcaccggcggcttttttttttttttacaactcaaattttgcgttcgcttcacttcctctggaaatctctttctattcgctgatttcattgttgttgtttaaccaccacagcgatggcaacgattttgaggagcagcggaggaagattgggcagcgttttagggttcttcaataggctcattcattcgctgccccaatctcctcctttatctgcgaccattgattttagttccccaactttctcttcttcttttgggggctctatggagcttatggctgtcccaaaacgcaa

SEQ ID NO: 31001 - DNA, 537 bp, Glycine max
ctcaccatattcttgttctcatttttctgccacagtctctcaattaggttcctcaaccaattggccatcctcatttgcgcaccacaagatgcaatgtcattggtgaccccagagtacttaaccgagattttggagaaaggaacttttttgaacactgttgggaacaggatcttctactcagcacttcctcttttgctttggatctttgggccagtgctggttttcttgtgctctattgcaatgttgcccgtgttttacaaccttgactttgtttgtgggaaagtaaaagcaaagatggtggtgatcaatgataaaagtgactttgcttgatgtattaatattattattattcagctaagactaagaacatggaatagataagattagtatatattgggtatgcgtcatcatgcgtatgtgttgtttacttgtttacaacttttatgttgtaaaggtagtggtattttactcgcacaaaataattaagtgcatgcatgtcgaagcgctttaccgaaataattcaaaatggcttttgat

SEQ ID NO: 31002 - DNA, 288 bp, Glycine max
tctcgagccgaatcggctcgagagatcctgttgatatggatgaagacgaaaaggagatgcttactgaagcacgagcccggttgcgccaacacaaaaggaaagaaagcaaaaaggaaagctagggagaaacagcttgaggaagccaggagcgcttgcttctttacaaaagaagagagaattgaaggctgctggaattgatattaggcagcggaagagaaaaaggaaaggaatagattacaatgcagcaaccccatgggagtgttcctgttatttagtaaccttggtgga

SEQ ID NO: 31003 - DNA, 282 bp, Glycine max
tatggatatgtaccagaaagaacaacttcatgataataccgtgtcaatgatgcaatctcaacatttctcccagatggggaggtctgctggtttcagtttgggaggatcatatccatcacatcgtacacaacagcaacagcagcatgccccttctgtcagtagcaatggtgtctccttttcatctgtaaacaatcaagatcttctccatctgcatggaacggatatttttccatcttcacactcaacatatcattcccagaccagtggacctcctggcattgg

SEQ ID NO: 31004 - DNA, 318 bp, Glycine max
gtgatcctcttgttgacttgataccaatttatttcgctgtgtttcgcggtgattcttatctccttaagaagtttttagaacgctacaaacttccttttgctcgtaacatatcaagatatgcgtcaacagcgggtgctcaaacgttcggccgactttcatatgttgccatgtgctattgtatcttgcatgatgacaatgtcttgggagctctttttagcatatgggaagaactgagatcagcaaagtcatgggaagaagttgaactaacagtgtggggggaattgaacaattacaaaggctttccgtgaccattggctg

SEQ ID NO: 31005 - DNA, 360 bp, Glycine max
aagagacatcacgttcgagaactatgcgggaccagcgaactatcaagcagtggcgctccgtgtcggagccgaccatgcggtggtgtaccggtgcaacattgtggggtatcaagactcatgctatgtgcattctaaccgtcaatttttccgtgaatgcaacatttacggcactgtagacttcatatttggcaatgctgccgtggttttccaaaagtgcaacatttatgctcgtaagcctatggctcaacagaagaacaccatcacggcccaaaatagaaaagacccaaatcagaatacgggtatatccttgcacaattgtcggatcctacccgccccggatcttgccccggttaagggcag

SEQ ID NO: 31006 - DNA, 344 bp, Glycine max
gcttccccgccgccgatctcctcctcttactatccctccgcgccgcacatgctcctcgccctctccgccgggctagcggctccgccggagagcaccgcagcgccttccgccgcgctcagcagaaagcgtttccgaacgaagttcagtcaggagcagaaggagaagatgcacaagttcgcggagaaagtggggtggaagattcagacgcgggacgaggatttgattcacgagttctgaacgaggttggggcgtaaaatgattaagttgtgatacaaaaaacttcgcaaaagtacaattgtatatatgtatatatatatagatatatatacagtatatgtgtatgt

SEQ ID NO: 31007 - DNA, 322 bp, Glycine max
gggagcaattgtttgttggtggctaccatgtttcctatgaaggacaactgttacattagtcttgtggatttcagggacaagaagatggtgtggtgttggtctgatgtgggggctccttttgccgtggatgagaaacgggtcagggatgctattgccatggaggataataactccatttgtgtggtcaatgagtttgaggatttggggttcatggatttgagaagttctgctgccaatagcattaggtggagctccaggagtaggttgatgaaggggaagatgcctgaggaaccttggtatcctaaactggcattgcatgggg

SEQ ID NO: 31008 - DNA, 374 bp, Glycine max
cgaacgtggcggcgaatgtgaacctgggagcgttttatctggtggggatgcccgtggcagttgggcttgcgttctggctcgaggttgggttctgtgggctctggctgggcctattgtcggcccaggtttgttgtgcgggcctcatgttgtatatgattgggaccaccgattgggagtaccaggcctgtcgggcccagttacttacggcccttgatgaaggatccgacggccacaaacaaccgttgattgccactttggacaacaacaactactcttgatgaaataaaaaaaaaaattatgatgattgttgattgacggtgtaatattctttttcttttgtaataattcttacttattattaaagggaatttgtg

SEQ ID NO: 31009 - DNA, 757 bp, Glycine max
ggatttgttgagggcttcggcggaggtgttggggaagggtagcgtggggacttcgtataaggcggtgctggaggaaggaaccaccgtggtggtgaagaggctgaaggatgttgtggtgacgaagaaagagttcgagacgcaaatggaggttctggggaagattaagcacgagaatgtggttcctctcagagccttttacttctccaaggacgagaaattgctcgtttacgattacatgtccgctgggagcctgtctgcgctgctacacgggagcagagggtctgggcgaacaccactggactgggacagccgtatgaaaatagccctaggagccgcaagagggcttacatgcctccacgtggcaggcaaggtggtccacggcaacatcaaatcttccaacatcctcctccgagggccggaccacaatgccggcgtttcggacttcggcctcaaccccttgttcggaaacggagccccgtcgaaccgcgtggcgggctaccgggcacccgaagtggtcgaaacccggaaggtgagcttcaagtccgacgtgtacagcttgggagtgttgctgctggagcttctaacgggaaaagcgccaaaccaagcctcgctcggggaagagggcattgatcttcccaggtgggttcagtcagttgtgcgtgaagaatggaccgcagaagtgttcgatgcggactcatgaggttccaaaacatcgaggaggagatggttcaactgttgcaaattgctatggcgtgcg

SEQ ID NO: 31010 - DNA, 282 bp, Glycine max
cttttctttatgggtcgttatccatttgtaccctttccttaaaggtctaatgggtaggcagaacagaacaccaactcttattgtcatatggtctgtgctcttggcttctatcttttccttggtttgggtcagagttgacccttttgtgttgaaaacaaaggggcctgatgtcaagcaatgtggaatcagctgctgaatctacatctcatttctttactactatgaagcgtgaaacaaaaacctaggtgcacagatgaataatggcagaaaaaaaaaaaaaca

SEQ ID NO: 31011 - DNA, 373 bp, Glycine max
gtttctcatcaaggtcatacaggattttcacgagactaaaagtgctggactcaaaggttcctcgcttccgcaggaacgctcgcttcacgtttggtgattgttgatcaatcatgactaagaatttggaatctcttccccttctgtgaatatgccaaaccttatttatttttgtgtaaatactaaatactaaatactgtaacacatgaccttagttttttttttttttgtcacgttttagatttgggaaattagctctgtgcttgtttttatcaccggctagctaatttcaataagtgaggcttttatttagctcacactccgaagtggaatttttcgtttatctctgtctggctatgaattgaattgttgtgtg

SEQ ID NO: 31012 - DNA, 531 bp, Glycine max
ctttcttctcttttcttgcagaagaaccagttgactggttctcttagtgctctcgttggtttgcctttggatactttaaatgttgcaaacaataatttcagtggatggataccccatgagcttagttccatccataatttcatatacgatggaaattcttttgagaaccgtcctgctcctcttccgccgacagttacttcacctcctcccagtggatctcatagacgtcatcattctggatctggttcacataataaaacacaagcttctgataatgaaaaatctaatggccataagggtttgacagtgggggctgtcataggcattcttttaggttcagtactggtggctgctattgtgttccttgctcttgttttctgtatccgaaagccaaaggggaagaaaaagggtgcaagaaattttagtgggagccttcctcgtggagttattaatgtaactcctcagatgcaagagcagagggtaaaaagtgctgctgttgttacagatctcaagcctcgtccagcagaaaat

SEQ ID NO: 31013 - DNA, 656 bp, Glycine max
caaagatcgttttctgcactctctctctctctctctcaggatgggattgaggctgcaaatctattaaatatacatataaagcactgtatgtatctgttgcacacctaatcaaaggtatggattgtgaagatggtgctaaaaaggagcttcaaggagtggttgttggtgtaagaaaatcaaagggttttcctcttggtgggagtgggactagtctagcttctatggagttcttgtccatgcctcaggttcaggaggttgttctctctgcagacatgcaatgtgagaagtgccagaagagggttactgacattattgcaaaaatgaatgtagagacagagtctgtggtgattaacgttttggaaaagaaagtaacacttactttcagattaccatcaatagggaaagttaccactcggaaaattactcacatcaacaacaggaattccctccccaaagttgccatcatcaagcgattatttcgctcttcgcgtgcttgacccacatgttcataagaatattttgtagattgatttgactatgtacaaaagaaatatttgtggattcatttttttttttttggattcatgattcaattagtttggtgaatgcaccctgaatttgacaaagaagaaaggaagattttaaattcatgactg

SEQ ID NO: 31014 - DNA, 551 bp, Glycine max
gtgaaagggtcaaagactgggtggatgagcatgagccgcaactggggtcagaactggcagtcaaacgctgttctggttggtcagtcactctccttcagggtcacagccagtgaccgacgcacctccacctcctggaacattgtacccgccaattggcaatttggtcaaacattcaccgccaaaaatttcagagtctaataattactgtgtttgatggtttttttgttaaattgtttattcaatttttataattttattttttagtttttataatttaaaagtgatttttttaatttttttaatttacattttaatttttttagtctctaaaattacaaaattacaaaaattaaaaagatcacttttaaaattacagagactaaaagagaatcaaaacacaaattacaagaattaaaaaggttatttttaaatcacagaaactaaaaaaacaaaaatcatgaaattataagaattaaatgaataatttcaattttttttgggtagttttgaatttaccttgggatgtggatataagggaaaccgcgagagag

SEQ ID NO: 31015 - DNA, 567 bp, Glycine max
ctgccattttcccgggcaaaggaagaaacgaataacgctcaagttaatgtggttgtatcagacaaacagcttgttaaacatttacaaaaggaagttgcaaggctggaagcagtgttgcgcactcctgatccatctaaagaaaaggattggaaaattcaacagatggaaatggaaattgaagagctgagacgccagagagatcttgcacaaactcaggcggatgaattacgcagaaagcttcaggatgaccagaaggtctcaaacccagttgaatcaccacatctgccagtgaagaaatgcctgtcattcactggtgcactatcatcactaaaaccagagctaggatgtgagagagtcagaagctcaacattaagacagtcgatgaggcaatcctctactgctccttttacccttatgcatgaaattcgaaaacttgagcacctaccaagagcagctgggtgaagaagccaatagagctttggaagtattacaaaaggaagtggcatgtcatagactaggtaaccaagatgcagctgagacaattgcaaagctgcaagcagaaataag

SEQ ID NO: 31016 - DNA, 624 bp, Glycine max
caacagcaaattggtgaagttaatgagatcttcaaagatcttgctgtgcttgtccatgagcaaggagccatgattgtgatattggctccctcgtggagaactcccatgcagcaactgcactagcaaaatctcacacttgcaaaagcttcaaaacacccaaagatcaaattcctctttgacatgcttgcttttggtgatttttgggattgtgcttctcatcgtgatcatagttcttgctgcttagtcaaagattgtctcaattccattatggagcaaatgcatatatacagggaagcagatagcatctcccttgctgatgatgtcacttgattggtgttttgccgggtctggtggttgactggagtttgttgcatctgatttcagttcatgatgtgggaattcccataattttgttgtgtggttttatgtgctctctatgttagtgtttggggttttaaaatgtgtcacggattatggtgtaagttctctccatgtttctttaattaaaaagtatttaattctttgattgtcctttacctgtaaatgcaacgctaaaactggctagctgtgctgagtgctggctcttcggcaaaaccttcgtatatggtattttgtttttgtttt

SEQ ID NO: 31017 - DNA, 450 bp, Glycine max
catacccgaacaactcgtatcgggtttgcgcaacattgtacaaatcgaactctacgaaaactctctctccggcgcgttgccacgcgccgcgtttacaaacctcgccaacttagaaagattcgatgcctccacgaacgagttgactgggacgattccagaagagttgtgtgggttgaagaaactcgggtcgttgaatttgtacgaaaataagctcgagggttctttgccggagactatagtgaaatcgttgaacttgtacgagttgaagctgttcaacaactcgctcactgggtcgttgccgagtgggttgggtaaaaactcgaagttgcagtctctcgacgtttcttataaccgattctccggcgagattccggcgagattgtgcgacgggggagcgttggaggagctgattctgatatacaattcgttttccgggaggatcccggagac

SEQ ID NO: 31018 - DNA, 268 bp, Glycine max
cagaaatgatgttccgaaggacaacagtggcataaacctgaattttgacagtactagctgcacaccaacaatgtcatccactaggtcttttatctcttccttgagcatagatggaagtgtggctaacttggatggaagtgccttccatttaatcggagctccacactcttctgatcagaattcccagcagcacaagagaaagtgttctgccagaggtgatgagggaagcttgaaatgtgggagcagtgctagatgccattgctctaag

SEQ ID NO: 31019 - DNA, 286 bp, Glycine max
gtaagctctcatctgatggagacagtcattcattggagtcagactaaggaagctatctttctctcttctgccatgtcattaattttagtgggtgctaacctttggaaaccaaatggtctagtcacgttaataaagctgctcatgtttggagcacataagtaccaacactaactttaagccgagaatttttctagttcttttggcttttgatgctaaatccaaacatggttgaagtataagcatcaagaggactatataaaaaattacatgtacaggagtttcacat

SEQ ID NO: 31020 - DNA, 252 bp, Glycine max
caacattctcttcctcccttcactcgcttaaccactgaatctcgaagaagaagcgagagagacactgcgattcaaaaccctaacaaaaatggcgtgcgagatgccattggatctgataaagcacctacgaatacttctccgcagagaggccaatctctcgtggtacgaccccgagaaggaggcaaatctcgcgctcccaaagctcccttcggtggccgaacccatagcgaagctcgatccctcgccgaatta

SEQ ID NO: 31021 - DNA, 333 bp, Glycine max
cacccagaaagccatcaagtagcactcgattccaggagtcagagtatgtgtgggtggcctaatgtcgttcgtgctgttctggacatttgcctatgacattgttcatatattttgatggacggaatgtgcaaatgtttcaagtgaaggttattttgacatccgttgcttctgttgatccttgccagaatgcagttacatccaccagttaccagatagctttcataatgctcccgtttttaaactattgagatttactatcagaattttgtctatttatgtattatttaaaatagtatcccaagtgggaaggaggcataatgtcgtcctttattt

SEQ ID NO: 31022 - DNA, 534 bp, Glycine max
caccgttgcagtggtaatattgtggttctgggaaagcgtagattacatagtgatagtagcggcgggcgaaggtttgatactgagtgtttgagaatggcatcatcgaaggtaatgtgtaggttgtcgtgtcggatacagagtgttgttgctcataatcataacaagttcaccaaaccctcaccactctctcctctttctctctctctctctgcgcgacgcctttctcgcacttcccggttaccagtggaattgggaagcttggaatcaatgatgccgttgcatagcgcggtagcttcagctcgattagtgtcaagcttgtctattgagtctctgggttggggattagttcctcaaggtatttccatgcctttatgacagcatttgtctgcagttagttgctgaaaggtagcattttcattggatggcaggctcatgttgatgttttcatttgttgtaatcttgaggccactggcatagaatccttcatctgacatatttgaggaacatgccgtgcaactgatgttgcttacgtat

SEQ ID NO: 31023 - DNA, 295 bp, Glycine max
atcccacgaaggattgagcgaccggcgagagagttaatgagaggaagaataacgcttgaaaggttctaagtgagctacaggaacatagaacaaacatacatggggactgccgctactttcttctgcattatgggatccttctcataactgtgattcctccagtgtggagtttatcaggcaccttctatcagcttctaagtcagcttctcttggtttgaagttgaactgccaacaagtttgcaagggaagatcaaaattgccaggagttttagtttgtgccagtcgaaggcccaaa

SEQ ID NO: 31024 - DNA, 606 bp, Glycine max
tttgaagccagccacccttgacgttccagtacccagtggtgtgcagaagaattcaaggggcaatgtaagggttatgaatcttgagagtcctgtgaagactgaagtggaggaagcttatgaaggggaagatgagcatgaagaatcaccttccatcaagagggagctctctgattttgatctccaagtcctcgaagttgctgcaagcaaaggaggatgtgatccatcaagtgaagagataaaataccctagtttatacgaaaaccaagctaacattcaattggaagacaaagaccatgaatacagcaaaaagagttgtgacataattcaaagtggacatgtcagtgatcctgggattggcaaagctgaattttgtgcttctccaaagctcaagcgatcctgctctgacctggaaagaagggatgtactaagggagacttgtcatctctttccatcttcaaagtcacagtcttttgaggatttgcaggggttatcagcacatcagatggttaatctagaaagccccaggtctgtgatgactcaccgcagtgctgatagagtgatgttgaaaaggcattcctcaagtcaagttctcccttctagaagtaa

SEQ ID NO: 31025 - DNA, 545 bp, Glycine max
gattgttggtggttgtgttgtgggttggggttgggagtagctgtttgcattgtggcgctgggaaccatgctcgaggaatggtggtgtgatatatttgtacaaatgatttcggaaaccaaattaatcatcaaaacaatttggcggccagaaaggagagtgaaatgtgatgaaatcctaggatagactcgttaaagatttgggaatagaatgcagggaattagtgttttttgagttgtaccatgtacacattaacaacagtatatagatgaaactttttccttcaagtccctttttgtgtatctgtgcgttgatgttttttgtgatcgttaattagttaaaagatcacctcatttcatttttgatgtaccgaggagatgcttgaacaccaaggaaactaggggtggagaaggccacaaagaagaatcattctatttaaagtcagcctatcagtcaggttagttgatgcctggtcctcaaaggttcaaaacattcctttgggggtagctgatgggtgtctccttacaaattctcagcgtttaaaggga

SEQ ID NO: 31026 - DNA, 437 bp, Glycine max
gtacataccagggtggtgtttacaattgtggttaatagcagttgttagtgtgaccgtggctcatgtaggtgcatgagaggatctgcaaagctagtgacaaattgtgtattagaggaccctggcatgagaggatgcattgtcgaaaactgggtattattgtacccattattgagtgctttcggattaattctggttgaaagccctgaaactttattgggacctttaaaaagtttaatattggcttttaactgccagatagttactgggttcagtttgggtttctgttgattacctttgcagatttattttgtcagtacatgtttttagtattgtagttttataattgaatggtttagggataacatacctttttatgaaacatattccttgcctatgctattatcctaaaaaaaaaaaaaaaaaagggcggccgccga

SEQ ID NO: 31027 - DNA, 360 bp, Glycine max
aaaacagacctttctttctcttgtttagattttttttgtggtgtcaccaggcctctctgtcttcttgtttctcgtaaaaggggaaaaagggggaaattttctttaagtaaagaaccctaatctttctctttccatctcaaatcgattcgattggaggttttcagggcatcgatggagtgaaacagaagagagtgtgtggcgcgattccgtgttagatcagaaagaagagagactcagagacggcaccaccaaatccaatggcggtagcagataaagaattggaagaacaacttatcgaagccgtgtacaagcttgcagatcctgcttcgtcagtggaggagctcctcgcactcctagaac

SEQ ID NO: 31028 - DNA, 393 bp, Glycine max
caacgttctttctatttcatcatttccactcactcaccattcactaaccaacttttactatggcttctcgctacgggcgcgagctgaagctcgcatcggcgcgcggcctcaagaacgtgaactggcgccacggccctaaccgcccatacgccgtcgtttgggtggaccccaggaacaagtgttccacgcgtgtagacgaagacggcgataccgaagccacctgggaccaaaccctacttattcctctccccccggagcccctcgagaatctcaccctctacgtagacgcggtccacgccggctccgaggaagataccgagccgcttattggagcggctcggctcaagctcgtcgatattctcgacgaggtcggagtcggcgagagcgtgaacc

SEQ ID NO: 31029 - DNA, 950 bp, Glycine max
cgggcaccttgttggcaaacataaggacaaggaaacaaccttcttctcagccttcttcttcttcttcttcatcctcttattattattattcttcttcttctcaacaagcacaacaaggtcactgtgttgaagttggtcgctttggacttgatgaagagattgatcgtttgaggcgtgacaagcacgtgttgatgatggagcttgtgaagctgagacagcagcaacagaacacaaggtcataccttcaagcaatggaggagaggctaagagggacggaaattaagcagcaacaaatgatggctttcttggctagagctttgaaaaatccaacctttattcagcagctacttcagcagaaggacaacaggaaggagcttgaagaggccatgtccaagaagaggagaaggccaattgagagagggccaaaccatggggttgttggagaagaatcaagcagtgttaaggttgagtctcttgtgtttggtgatgaatatggttttggagtgtcagagttggaagtgttagctatggagatgcaaggttatggtaagggaaggagggaacaagaggaggagcctgatgaggcactagatcaatcacaagagaggctggagaaagagcttgatgaagggttctgggaagaacttttcagtgagggttttgagggtgaattggatactaatccaactaattcccaagaccaagatcaagaagaagaagatcatgtcaatgtgttcgccaatcgctttggttacttgggttcaagtcctaaatgaaaccaaccacatatagtactcaagattattattggttaacattgttcattaatttggttcaagtggaggcactcatgtggtgaatggaggaggaggcattccatttggcatgatacatgtggaaatgatttactttttggtgtttctaacccccccattatatgatgatgcatg

SEQ ID NO: 31030 - DNA, 319 bp, Glycine max
tgaattgatgtctggttcagctgggatgggattcactcctcatatcatcaacattgcaagtggagaagacattgcaacaaaaatcatggcattttctcagcagggacctagagctgtatgcattttgtcagccaatggtgctgtctctactgtcacacttcgtcagccatcaacttcaggcggcactgtcacatacgaggggcgcttcgagatagtgtgtctgtcaggctcttacttggtcaccgataatggtggctcacgcaatcgaactggtggattgagtgtgtcccttgctagtcctgatggtcgtgtcattggt

SEQ ID NO: 31031 - DNA, 573 bp, Glycine max
attagttggaatgaccatttcttcatcctcaaagttgaagctgatgcttactgcatcattgacactttgggggagaggctctatgaaggatgcaatcaggcgtatatcttgaaatttgacagcgacacagtaatatacaaaatgcaagatgttgctcgaggttctggcaaaaaaacagccagtgatcttcaaactgttgcagaagtattagagcagaatgaaaggcagatccagccaatcaatggtaaagaaatggattcttctgtggagacagaagaacagttgaagagtgaccaagaagaggaggttgtgtgcagagggaaggaagcatgcaaagaatacattaaaagcttcttggcagcaatccctattagagaattgcaagcagatgtcaagaaaggtttaatatcatcaactcaaacaccatttcatcataggctacaaattgagtttcactacactcagttgttgcagtcttgtgttgcacctccagtagtggctgaaccatccatgactgtgccagagactcttgctcttgcagtaactgaggtttccgcataattgtactactgt

SEQ ID NO: 31032 - DNA, 264 bp, Glycine max
tgttaatgttgtgtctaaggaagatgcactggaatttattgagcatgaccagacgcacaatgctgaataaggtgctgcttgctcacttggactgaactgaaatatttcaattctgggcactcttcgaagattgtaacatagagattgcagattcaagttcattcaaattcttcaacctactatttgcctgttgtgtagtgactgtgtgatgccaacctaggtcctggagtaaccaaaaagcttgatctgtttacaaagttgaaa

SEQ ID NO: 31033 - DNA, 331 bp, Glycine max
atagctagatgcaaatctcaaagatgtgcttttaatctcccagcccctgccccaggggttcatagaagatctgtgcatgttgaaactctggtgcttgtgtggaacagcagagatctcatcagaacagtggtgaaggaaaggctttagtaaatgtatgtctgagcattcatcatccttctcacatgttgatgagttagttttacaagtgatttggtggcagtaagtaaaacgcttagtgattaagatgatcatttgtttgttaagtagtaaacatctgacaaaacgatgtcaagttgattgagaatccagccgttgcactttgataacagtc

SEQ ID NO: 31034 - DNA, 285 bp, Glycine max
cccagttactcgctcccactcccttcatcctcggcaagcgcatacgcaccgacgaagactcttccaaagacgaagctgtttccgtcggcccctctctcgtggggccgtatgcccctcccggaccaggggtcgtcccggcctggcccgatttcggacaaatttggagttttgtcgccgccgctgctgctcccgaaatggtgtcggtgccgcagcagcagcagcagcaggcttcgttgttcgctcatcaccaccgtcagcagcagcagctggccatcggagaagctt

SEQ ID NO: 31035 - DNA, 253 bp, Glycine max
aacaatttcttcaaaagtacgtcttcccttcaagcttctagttttactcgaattttaacgtgaccacacatttgtagtcaatacgtatccattgattcacatgatatattaaattttatggatgacaaggacttgtcatcaatgcaattgttgtactccttagaatgtctttatagcaaataagagattcaatgatataacacacgggtagagtgcctggtacggttaggctggaattgcacaagcccgtgaa

SEQ ID NO: 31036 - DNA, 477 bp, Glycine max
ttcataatctcagttctcccaatccaaacatccaaatagtttcagctccaaggcctctcgcactctctaaacataatggccaattcgaagcttgggttcaacttcatggtcagtgctatttttctttccttaatgacttttcatggaaccttttcagcttcagggaaggccactgaaattggacatcaaggagcaagagtcacaacccacgaaaacattatcgatgaaatagctaaagcggcagaatatactgccacgtggcatcgtcacaccttagaattcgaagcttcgacagcacctgaaaccaggaatccacaatatgacatggttacaaacgatttccaaccaacggatccagggcacagtcccggtgccggccattcctccccacacgctaacatagtttcaatttcaaagccataaacctatattattcttatatgtccatactcaataaccagtaatatgcatttttta

SEQ ID NO: 31037 - DNA, 268 bp, Glycine max
gcagtttcttgtcttctctccattgaccatgtctgctactttcaaataccaacctacgggacttcacggttggggcgcgccgagatcttcttctagaaatctcgcaaggttcttctcaatgcgattcgcgtgcaactctcgccaccataaaatattgcatgcttccgtttctcacccttcatcactctccatttctcacgactcatctaccgagactgagagtactttgatattgattcgtcatggggagtctttgtggaatgagaag

SEQ ID NO: 31038 - DNA, 541 bp, Glycine max
  unsure (1)..(541): unsure at all n locations
ggccagcatattcaaaacacttggtgtaacatcactttctggcaaattctgcccagtccctacgtttgaagagggaaatgaatctggttgtcttgataagaaagatttggacacttgtggccctgaatctgaatcacatccagtgagcaagatgcagtcttctggagacatttgtgaagttattaggactcataagaggaatgattttccagtttctttagacaacaaaaacagtttagatcagttgaagcagtttgatgtaattgataattgctcagatcaccactttattcaagaggggaaaggattgacatcatctcagtttaaaaagggttgggtgaagaaggtacaacaagaatggagcatcctggagaaaaatcttcctgaaactatttatgtccgtgtttttgaagaaagaatggatctcatgcgagcagccattgttggtgcatcagggacaccttatcacgatggcttagttttctttgatatatgtttgccttcagagtatnccagcgaacccactatggtgcattatcat

SEQ ID NO: 31039 - DNA, 342 bp, Glycine max
gaacaacatatgtgtatgactccttcttcagaccatatgttgcgaaacatgagacagaaattgatcgcaacttattggaactaaggacaagggcaggggatcccgcagtttcgtattggcacagacctttcagttctgcccagactagaatgtatgacattttgcaatttgttgctgcacaatcgactccagctcctcgacctgctcagcaaagacctggtgtgagggtccgtcaaccggcacctgcaaaaccagcagctgctgctgcagcagacgctcaagttgaggaacctccatctcctacctctagcacatcttcgagtctgctccagagggaggtag

SEQ ID NO: 31040 - DNA, 1076 bp, Glycine max
tggaagagtggataaagtggaagccttgaagcactacaaatttagcttagcatttgaaaattctaatgaggaagattatgtaactgaaaaattcttccaatcccttgttgctggaactatccctgtggttgttggtgctccaaatattcaggattttgctccttctcctggttcaattttacatattaaagagatagaggatgttgagtctgttgcaaagtccatgagatacctagcagaaaatcctgaagcgtataatcaatcgttgaggtggaagtatgagggcccatctgattccttcaaggcccttgtggatatggcagctgtacattcttcctgccgcctttgcattcacttggccacagtgagtagagagaaggaagaaaatagtccaggcttcaacaaacgcccttgcaagtgcactagagggccaaaaactgtgtatcatatttatgtgagagaaaggggaaggtttgagatggaatccatttacttgaggtctagcaatttaactctagaggccttgaagtctgcagttgtttcaaagttcacatccctgaatcatgtacctatatggaagacagaaagacctgaagttcttagagggggcaatgatttaaaactctacaaaatatacccagttggtttgacacaaagacaagcactttattacttcagcttcaaaggggatgcggatttcaggagtcacttggaaagccatccttgtgcaaagtttgaagccatttttgtgtagcatgtactaatgacctctctgctctacatgaatagcttctttacttaactgagcggtagagttttaggggaatgagtatagcaatgaaactggcatggctttattaatgcctagcttcttggccaactcattgatgatttatatgcagaagatatcttttttgtacaagtgaagttccatatttaatgcttagttttagttatagtgtttttatctgttcatctagaaaagccacacgctggacaattggacagcatgacagttcttgtatactgtgtgtgaaaaaactgaaaatttaataggaagcaacagatgttttact

SEQ ID NO: 31041 - DNA, 294 bp, Glycine max
tgctgtgtcatggttcacgggggaggctgcacagagtgattttgaggatatagatgaagttgattatgatgatgaagaaggtgatgaggatgaggatgaggatgaggatgaggaggaggaggaggaggaagagccggaaaagaaagggaagagcaggagtaagagtggtggcagggtcaaacctggtaaggatcagccgactgagcgccctcctgaatgcaagcagcagtagtgtttggctgtgtacaaacagacctggatatgtttagtttcagagaagtaattagtgtagag

SEQ ID NO: 31042 - DNA, 276 bp, Glycine max
atcgagccgaatcggctgaggaaatctgaacaaattataatactgccatattcagttggctgctacagctttgcctacaacaggaactcaagcagcacccaagaaagttacaaaggatgaactaggtaatgtagcaggaattgcagcaactgcaacagctagtggggggaaatttgacaagaaattggcaggtgaaaagcctcagaaacatgaaggaaaatatcggaagttcctgccagtagtggaaggaaccgggataggattactggagaggga

SEQ ID NO: 31043 - DNA, 646 bp, Glycine max
caaatccttgcaccattcttctttggatcccttatctctgccgcgaacttgccccaagtcctacgcctcacaccccggtaatgcttccataccggtggcgcgtgaacttcacgctcctccctagggtgttctcttttgcatgctaaggaatcgtttgcatcatggacgacaccctccaagctgaacgtagggcttgggaatgcattgtacgttgcagaatagcaaacttcgtggttggaaatgttcatgagagcgttggaatcgtgttcaggctcaagaagatagtgttgaatagattccattgaagagaaatcacaagatattgtggtggccatgttttgaatggtgatgaagacgatggttttttctgattttggggttatctttttttattcttgaagcactatgaagaataatgcgttgtgtatttataccactgggttctggagttgtatatttttttatgtattcgttgtaactatagaaacatagtttgaacaacgtgatgctaattatttctttaatattgttttcgtttgtgtgatgtttctttgaagctacaagagtatttgaaaatagcattgaatgttgaagtggaagattcttccccacgtgtggttagttgatatgacgttatctttgcttt

SEQ ID NO: 31044 - DNA, 480 bp, Glycine max
gcttatggcttgctctctgaattgaccgtgcatgagattctcaccttctctgttatagctgcttccaatgatgagcttgctgagctttactggagtgctggtttgacggacaaagctccaggtcttgtgcagaaacttattgacaggagcaaacatattctggctgtcaagtttgtttttgagttcaatcttgctcataagattccaccagttcccattttggaagctcatgtgaatgagtctcagaaacttgttaaaagactttctgaagaagggaagtcacttagtgagatcacggcgagagaaatccatgcactgaaatcggcgattaaggttattgagagtcataatcttcaatctgaatatccacctgaaagccttcaacagcgtatagagcaattgatgaagcataaggcaaatgtaaaatatgctgcatcggctttttctgcaaagcctcctccacatcagcagcaacaaagt

SEQ ID NO: 31045 - DNA, 569 bp, Glycine max
tagctacccaatcctccctaattctgcccctgtgaacctattaaacttcccagcattcgttttgacaatgcttgtcatgataactgtttggtgaaatagtatgtaggcgagatccaattattttctgtgaaattttgaagccaagttttcctacacacaccacaacgtacatcaggtatgaagaatcttacggaattgcttgaaaaaaaccaagcccgactcatgaatgtgtgtgttgtgattcacaagtgcttatcagatgctgaatagtgttggttaatttgaaaatcgagatgatactggataaatctgaagttatatgtgtgtgttgtggtgtatagggagctgtaatttgatgtattattccagtagattgaaaataaaccggatcataatactcacctcccctattcgtcagaagagttttgattagcccattttgataaagttctacctctctcttataaattttaaatttatcaagagcttcatcttttgtatttaataaatatacataacaataccttcatgcatcatcaataaaagtaacaagatattttttatgacct

SEQ ID NO: 31046 - DNA, 365 bp, Glycine max
ttattttgcacctgagtatgcaattgttgggagagcctctcttgagtcagatgtcttcagttttggagtggttcttcttgagcttataagtggtcggcaacccatccctaaatctgcaggcaaagaagaaagtcttgttatatgggcaacttcacgcttacaggatagtaggcgagcattaacggagttggctgatccacaattgaacgggaacttccctgaagaagagctgcagataatggcatacttagcaaaggagtgcttgctgttggatcctgacactcgaccaactatgagtgaagttgttcaaattctttcaagtattccccgggaaaatctagaaggagaagaaccattccagtgag

SEQ ID NO: 31047 - DNA, 270 bp, Glycine max
agaccaacatgttctggtacaagaatgtgattactgcttgtgttgttcagtgttcaagtttgtcttttgaaatggttaaagtttgggaccatgtttgaacttgcaagcacgtggataaccaaaggagtcctatgcttgcatggttgtattttgcaattgtaaatatttgtcatgatggggggggggcggtgcggtccggtctcaagtgaatgggggcgtttcttgacctaatggggggttcatggaaactgtgaatttgtagaataatta

SEQ ID NO: 31048 - DNA, 313 bp, Glycine max
aaaatggatacccagaagagagatgttgtgcttttcacatcaagtgccttcttggttgctgaagggggaggctagcaatttgcctgaaaggtagttgggaccttgatccggctgcaactccagatgagcttcttcatgctgctacagaacctaatgctttgtaggttatgcaatagtaaaaacaattatttgggttgtgctttagcattcttcccagagtattttagatttaactgtacactatgtctcacttggttagagaccgatgagatattaacaacggatgttttagaaggtgaaattttattttgta

SEQ ID NO: 31049 - DNA, 418 bp, Glycine max
acctttttgactcagaagaccaaagagagagggattacctgaagactatcctccaccgtatttatggaaagttcatggtgcatcggccattcattagaaaagccatcaacaatatcttttacaggttcatatttgagacagagaaacacagtgggattgcagagttgcttgaaatattgggcagcataattaatggttttgctttgcctttgaaggaagagcataagctgtttcttgcccgtgcgttgatcccgcttcacaagcctaagtgtgttgctctttatcatcaacagctttcgtattgcattactcagtttgttgagaaggacgtcaaactagccgatactgtggtaagaggccttttgaaatattggccgataactaatagtgcaaaggaggtagtgttccttagtgagtt

SEQ ID NO: 31050 - DNA, 364 bp, Glycine max
gaattaaatcatcccccttgatgaaggaactgcttgagaaatccaagttgaataaagagaagtatttttttttttaattatgtttttatttgcatagtcaaaaccataggatactgccatggattaagatggttaatgataatcaaggttttaaaaaaatggtccgcgactgcaattttgactggttctatctatgattctatatgaccacattgtgactacatttgagggcatatgagttgcatttgtccgcatttttttacaatgttaaggattgcagcaaaaccgtgactgtggctacaattttaaaatcttgatgataataatgactatttttttatatgatttttctgcatctattgtt

SEQ ID NO: 31051 - DNA, 337 bp, Glycine max
ctcgagccgattcggctcgaggctatttgtgcccttttccgtggaggattagatggcgagagcggactgctggcctcatccattctggcaatgagattttggagacatacacttattacccagatgccagtcttcaagagagagaacatgttttggaacagcaaactgtgttacgacaacttgagtcaatattgtctattcacaaattagtaaggcttggacattatgttgatgcattaagggaggttgctaaacttccatttattcctttagacccccgaggccctgacattgctgttgatgtgcttgaaaatttatctcctcatgtccaagcttg

SEQ ID NO: 31052 - DNA, 478 bp, Glycine max
ggcgtgtaataaagggcaacatgtgagaaaggcaaagaagaagcaggtgaaagacaagttggatagactgaaacaggctgaaaagaaaaagaggcgcttggaaaaagctctagctacttctgctgccatcatttccgaactggagaaaaagaagcagaaaaagaaagaagagcaacaaagactcaatgaagagggtgccgcaattgctgaagcagtggctctgcatgttctacttggcgaagactcagatgattcttgtaatgttgttctaaatgacagtggatgcaagacctggaattataatcacaagcttggtctcttcatgggtgaacgaacagcttgttttcctcatctagatggtggcacgtggtctgtctctgcggaaagtggcaaatggtccttcacatctggccctcttgagaagaatgtctatgaacccctatatgaagaagcacgatggggtcctactggattctct

SEQ ID NO: 31053 - DNA, 370 bp, Glycine max
cgaagatgtgacccaaactcctagttgttgtgctcatttgacaagcaatgttgggcatggagacagtgaacacaatttatgtggaactgctggaaagaaagggatgccaacagagactgtggaaattctgggaaatcagaagtctttcctcaacggttatcttgaagatgttttcatggctagattatcaaatctttctaaggatattgattggcgtgaatttacgtgccctcaatgcacgtctctccttggagcctacccatgtcgtgagggacagacacctgtagatgggggagtacgatttttcaaatgttatatttcaacttgtgtgccagttggaggatcaggggatatgttcagggtgatagag

SEQ ID NO: 31054 - DNA, 392 bp, Glycine max
catgagaccctaccttcacgagtttcttacttcagtttattctgagtatgacattatgatatggtcggcaaccagcatgaagtggattaaagtcaagatggaacaacttggggtgttggacaatcctaactacaaaatcaccgcacttcttgaccacatggcaatgatcacggttcagacttcttctcgtggggtctttgattgcaagcctcttggtttgatctgggctaagttccctgagttgtacaatgcttcaaatactatcatgcttgatgaccttagacgaaattttgcgatgaacccacagaatggcttgacaattaaaccattcaggaaggctcatgccaaccgagatagtgatcaggagcttgtgaaacttacccagtccttac

SEQ ID NO: 31055 - DNA, 289 bp, Glycine max
atgctgtatatcatggacccgaaggacttaaaaccattgcccaacgggttcatggtcttgccggggtgtttgctcagggattaaaaaaacttggaaccgtggaagttcaggaccatccattctttgacactgtgaaaattaagactgccaatgcccatgcaattgctgatgctgctcgcaagaatgaaatcaatttgcgggttgttgatgggaacactatcactgttgccttcgatgaaacaaccaccttggaggatgttgataatcttttcaaagtgatttctgatgc

SEQ ID NO: 31056 - DNA, 370 bp, Glycine max
gcatggtcggggtgacataatatgtataggtgacattagagatgataaagctctctatgagttacgtcctccttctattgtgtccatcaagtctactgatgaaaattgcatggaaaagagcacagatgttagcaatggatcttgagtcaaggtagtgggaaagctttgaaacaatggctcttcatcttctgaattctatccctagtatctgcagtgcatatttcattccaagctctcatcaagtttcatggctaagagatgaatgtaatggaggctggaacacaggttcagactaggacaaggtgataatagtcacggggacacaagccgttgtgtgatgatgatccctctaggaaataggaatgcttaa

SEQ ID NO: 31057 - DNA, 259 bp, Glycine max
cagaatctctcttcacctcgaaaattgaataaatgcttatacaccctctcttttttatcttcttatatctgaaagattatgaaaagatttttttctgttcctttgtcttcaaaacttctgaatcaaaagcaacctcatattttcaatccttaaagccatattatttttctgttcacctttgaattctttcattttcccacttttgttttcatccttttgtgtctgtggaaggaacctgtgtggttatgtgctcagaaac

SEQ ID NO: 31058 - DNA, 422 bp, Glycine max
ggttgggtctgtgatggaaaggcgagaaggttgacaaatgagcaaagaggagctattgctgactattttcgtgtctacaagggcaatgaaaacagtcacaagaaggtttctttgatgggtgctgctcttcatcctttcttggcgacgtcatacactaatgttctcaaggactattttgagaaaaatctgcttactggtcaaaatttacttgctaccgaggagagatatgagaagatccttggcatgattcctgatgaatccattgcttctgaacttaggggaagatggcaagatagtaggcgctcttctagtgcaaaagaagacatcaatgttgttcgttgggaacagtgcaaacagttgctgcaatctggaaaacataaggcacaagggctgcgtcggtgcattgaagagatgtgttctgc

SEQ ID NO: 31059 - DNA, 465 bp, Glycine max
ggaatacatgctgtctgttcccgagcattatggacagatgaaattgaaagtatttgatcatgacacattttctgctgacgatataatgggagaagcagacattgatcttcagtctctgataacatctgctatggcatttggagatgctggaatgtttggtgatatccagataggaaaatggttaaaatcagatgacaatgcccttattgaggatagcacagtcaatattgttgatggtaaggtcaaacaaatgatgtcactcaagctccaggatgttgaatctggagaattagatcttgaactcgagtggattcctcttgagcaatagggacttgactgctgttggcctatgcgttctcttagaacaaattgtctgtaattttttctcttcactttttgattcatcttcctagaagaacaaataaacctgtatttttgcccctttactttgaccaaacattcagt

SEQ ID NO: 31060 - DNA, 572 bp, Glycine max
gtaaaaagaagcattctctctctctcttatctcagtctcaataaactaatcaagtttaaagcaccacacacagcatatacacaaagaagctctctttcactatcaccactctccctttcgcttttcgtcctaaccaaaaaagaagaagaagatctaataaaccaccaattcattcatcatttcaacaacgtgtgtgtgtgtgcgtgtgaattattatgggaggggtgacgtcctcgatggcggcgaagttcgcgttcttcccgccgaatccgccgtcgtacaaggtggtgacggacgacatgacggggctgctgctcctgacgccgttcccgcacagggagaacgtggaaatccagcagctgccgacgcggcggggcacggagattgtggcgctgtacatacggcacccgatggcgacgtccaccgtgctctactcccacggccacgcagctgatctcggccagatgtacgagctcttcatccagctcagcatccacctccgcgttaacctcatggggtatgactattctgggtacggacagtcatcagggaagccaagtgagcagaataca

SEQ ID NO: 31061 - DNA, 437 bp, Glycine max
tgttcgcgtgggaattggcacatgcattgcttttacagaacaagaagccgctgtggttcatgaagagactggaccatctgaagtgaacattttctccggaacaagactaattgattcaagtcaagctccaacaacgcaagtgaaacctgtgtgtcagcttcacaaggttctcaagtttaaactatcacctgattctgaaattcagaacgtcacagctaaggaggccaaatgaatttaaagcttatgagatcctgggaattgatgtcaatttgggtgtatttgtgtgtaccttggtgagcaatgacttattcccttagattttcttttagatatgtacagagagcctttttcaatatagcttacattgttctttggtaggtatacgtttaaggtacagagagcctttttctgtatatcccccttcatttttaactaat

SEQ ID NO: 31062 - DNA, 628 bp, Glycine max
cagcttcttcccccccacaaaatccaaaaatcagatatcccagataaaacaaacatcccaaaaatcaatgaacacacacaaaaaaataatctagggtttctgaataataaattcgctcttgcgttttttcgtttgtcgcttttttttctctttcaactttttcctttccgccaaacaaacaccgttcccgctcctccatcgtccattctttcattccaagaaagcgagaattcaactgttctcggattggtaccagctggtgcatctttttttcttcaattttttttttcggaattctttttggttcctaattttatcaggagaagctgaattttccgggaaaatttgcgttgttttctcttccttgcgaccttcgccgccggctgctactgattcgtcaacggcaactccttcgaggtgttttgcctgatttgttgatcctgcggagaaggtgcttggaaagagggaagggaaggcagagggaatgttataataaatcccaaatttccaattgatgaaatttttatgttagttgatttcttttatttggtgaaacgttgttggtgatttcaagttgtttgagggttttgaatgcattttgatctatggcttcggaagtagccccatc

SEQ ID NO: 31063 - DNA, 277 bp, Glycine max
gataagctcgagctcgagccgctcgagcaattatgaatgaacattgagaaaaaaggcagaggcagaaacagagacgcagaagacaaccacacttttttcatggccaaaatcattggcaggagcagaagaagaagaataacaacgactactactcaacaactatgcaacagaatggttcatcatcatgtcaatgtccgctgcaacctgttccatagcatgtcctttcttggtcgttttatttgggacaggatccttctctgctctcttggaaggcctt

SEQ ID NO: 31064 - DNA, 229 bp, Glycine max
gaagtttacagcttgtcgacgagtgttgccaataggccctatttgtaattgtaggaatgatgagttgagaaaaagtgtgagcttttgggaagaagatatgagctgcttgaagtggctagaaaagcagaaggccaagtccgttgtatacatctcattcggaagttgggtgagtcccattggggaagcaaagttgaaaaatttagcactggcactcgaggcttcagggagg

SEQ ID NO: 31065 - DNA, 391 bp, Glycine max
ctcaggttttatatcttttggacattggcaaggttgttggttatgaagaagatttatcaggaaggcaaagtccgatggcaaatgcttatagagtccgaactcgaagtagcttgcagtgaataggaccaagaatctgtcatgtcctgatttcagaaccaaaagataaagaaaaaatcaaccttggtcagctaatgaaggaaacatcggctgctgcttactatatagaaggtcaatattaattatatttgtcgtacctacattgttggaacaagttgagtctgatcaaataagtaacacccttaattccatagtgtaatagtgttttacagtaatattgtattgtcttatcagaccacatgaaatactcttatttataatgaagaaggtttac

SEQ ID NO: 31066 - DNA, 768 bp, Glycine max
gagaaacacgcgaacaatgtggtgagtgcatcatgcaagcctctgcaattgtctctgtttctgtctctttcttccctttttcggaagtcagcgtcaccgcttcatcatcggtgaaatacccaaaaccagacaccgcgatcaactgattacaacagtttcttcatagcgagttctgtcttcaaaatcattgctttatgttggtgtctttctgggttggttgcttcttccacaatggtagagagagagagagagagagaaagaaaggaaagaaagagtttggaggaagatagagcgacatactgagaagggggtcctactgcttaattttttaggggcatcaacagtctctgtccatgattgttacttgggttgggtggtgctgctgtgtcctcaaattgacccatccaatcaccatcactggattcagcatcacactcctttctatctcaccattttgatcaataaaccaaagcttctctctctctctttggtcctttttccatcactaggaggatttcaaattggtcattgagggtggctcaaaagctctgcttctggtcaaacgggacaaagtggatctcactcatatgaagagactttcaactttggtggatgggtttttggttcttgcattgttcagttgtagcacatggacagtgtggagcagctcatgctgcaatcagataaactcgtacgaagtccggcctcacagtgtcagtattactgaatttggagctgttggcgatgggatcactctcaacacaatag

SEQ ID NO: 31067 - DNA, 355 bp, Glycine max
gaccagtgtcgttagggttcaccgacaggaggaggctgacttgttatacatacccttcttcaccactatcagcttcttcctcatggaaaaacaacaatgcaaggccctttatagggtgaagctttgaagtggatcactgatcagcctgcttggaagcgctctggtggcagagatcacatactccccgtgcatcatccctggtactttcaagtccgttcgaagatatgtgaagaatgcaatatggctcttgcctgatatggattccacagggaactggtacaagcctggacaggtttatctagagaaagacctgattctcccttatgttcccaatgttgatttatgtgatgccaag

SEQ ID NO: 31068 - DNA, 489 bp, Glycine max
ataaaattgcatcattgagttcactgtcttgtacacttttgcttctgcatctacaattggcctgaaagccttctcacttactagtacatctataattgggccttcttttgctgacattttatccacattgtgtgcaggggacctgtgcaatatgcctttacacaatgaaaccagggcagggccatgccatttttactgcagaatgttctcactctttccatttccattgcatcacttctaatgtgaaacatgggaaccagatttgccctgtctgcagagcaaaatggaaagaagttccttttcagagtcctgcttcaaatatgccccatgatcgactcaaccaagtttctcctcggggtgatgctactcggcagatttcatcactttatcatgttaccgagccagctatttttgatgatgatgaagccctggatcaacaaacttcagttgcccatccaaaaaatgaggctgatcatgatgtaataaata

SEQ ID NO: 31069 - DNA, 326 bp, Glycine max
cgagaagaacaaacctagggtttacgattggagagggtatgaggaactcgtcgcgatggcgtgcaagtgtggacttaaggttcgagtggttctcgcctttcatcagcatggcacgggacctgatgatcccagttggtaggtattttcctagtcatgagcctcatactgtggaagtgtgtcccccttgtgtaggatacctcttcctctatgggtgcttgatgagatacagaaagatatagagttagcgtattgtgacaggtttggaagaagaaatattgaatacatttcccttggatgtgatattcttcctgtgctacatgggcgtt

SEQ ID NO: 31070 - DNA, 489 bp, Glycine max
ggtcaatctaagaatacccagaaaagagttgcttaggttctcccaccaaatcccagctttcaaactgacagacgagcatggcaatcttaagggcttctaggaacttgatccaggtgcactaccaatgcattattatggcttgacatgaccggccatgggtgactgaatagcccaatgttttttttttttttcattagatggagctagtgctggtagtaacattttggtattgtgttggctacccctaggaagtgtgaattgttagtggtaggctgtggattactaacggaagtgaggtttaccaagaactcactactcatcggtgcatttactttatatatagcagtcatattatcttccctaagttagatatctttcaagttgaaaagactgactgccatgtatgcctcttaatgtactttgctggaactttcagccatggcaaatataacacttctccctctctcttccccccataacactttcttc

SEQ ID NO: 31071 - DNA, 506 bp, Glycine max
gtcttcatcctaacgacgagatttttgggtaaaaggaagaagaagctgttctggttggcatcaatctctcctcttgtatccgttgttctgtcaactctaattgtgtttatcacaagagctgataaaaatggagttaaaattgtgaaacatgtcaaaggggggttgaatccaagctccctccatcagttagacttcaacaacccctacattggagaagtggccaaaattggactagtggttgctgtcgttgcccttactgaatctattgctgttgggcgatcgtttgcatccatcaaaggataccaacttgatggaaacaaggagatgatgtcaataggtttgacaaacatcataggatctttcacctcctgctacgttgcaactggttcattctcccgtactgctgttaattatgcggctgggtgtgaaactttggtgtcaaacattgtgatggccatcacggtgttgatatcactgcagtttttgacaaagctattgtattacac

SEQ ID NO: 31072 - DNA, 266 bp, Glycine max
ctcgagcgaattcggctcgatgcaagtcaaattggattacgtcatggatctgtgctcatctcaatctaacatggatgctgatgacaaaatcaccccacaagtttttaagggacacaggaattgtgagacagtgaagggtgttaacttttttggacctaaatgtgagtatgtggtgagtgggtctgattgtggtcggattttcatatggaaaaagacaggtggtcagcttattcgtgtcatggaagcagataagcatgttgtgaact

SEQ ID NO: 31073 - DNA, 348 bp, Glycine max
cgaaaattgtggtgttggttctgggggaggaggaagatggttgcggggttttggaagcttgattaggaggaagcaagttgattctgttcatgtcaggagacatggtcaatcggctaggaagttgtcagctgctgatctcgctggaattggggttggagctaccataggagctggagtgtatattctcattggaacagttgctagagagcaagcaggaccagcacttgtgatatcacttctcattgctggaatagctgctggactgccagctttttgctctgctgagcttgcatgtcggtgtccgtctgcggggagtgcttatcattatacatacatatgcattggaga

SEQ ID NO: 31074 - DNA, 579 bp, Glycine max
gtggaatttgtggggttgcagcaaatgcatctgtcaaggctttggcggatatgaaatccataaatctttttggtgttcagcaaatttgtcgaaatgctattgcattagaacaggcattggcagctattccatccataaatagtgaagcagtgcaacagagattggatcgagtccgcacctactatgaactattgaacatgccatttgaggctttggttgccttcattacagaacatatacacttgttcacccctgctgagtatgccaagcttcttaacgttcaggttccaggaagggaagttcctcctgatgcgcaagatagattatctgaaatattatccatgtagaatgttctctttcgttcctattccagaatttttggactgttggggtgattgcatcaattatatttctgattcatatttctgaaaaaatgatgatgcaacaaaccgatgccgatgtccgatcttacagcaaattacaagagtagactaccagtgaaaagatggttttgattctgcccttggtgatagcaattccatttgctcactcaattgttggtaatgtaatggtgatgtc

SEQ ID NO: 31075 - DNA, 354 bp, Glycine max
ggaatgttgctcgatgcaaaatgtattataaacaataaagaaggaaaatttttctggtgttgtaaaagagtgcagaggaaaagtgagaaagagcaacgtcagagtttgccgtagggttctccttggttcgtggtttctggtacagatagaagggaatccttcttctctctctctctctctctttctctctctttttctgagtttgaacttggagtaactgggtctatatttttgttcatattagagtggcgatcacgggattttcttggtatatataaaagaaacaaaaattgtctcttgggttggttccaagcaagtagaggaaactatccattaagtttatagtatttgtgt

SEQ ID NO: 31076 - DNA, 499 bp, Glycine max
gttcgtcagcgcagttcatgtataataacgatgccttaattacaaaaagtgtttggctttcaaggtgcaaaatgggctattatacagtattcagctgcttgtatggatttgtaggatcttgtgcacacctagctatggtcaattcatcttggactaaatcccatattgaaaatctttggagatttcctgaccgtattaagcgagtttatcctccttgtgatacttcaggactccaggtacttcccttggaacgatcagcagaaattccagtattaatatctgttgcacaatttcgaccggagaaggcacacactctccaacttgaggctttttcagctgccattaagagattagatcctagcttgccaaaacctaagttccaaattgtgggtagctgtagaaataaatcagatgaagacagacttcaaatgttaaaagagaaagcaatcgagctgaatgtgaatgaacacatggaatttcataagaatgtaacatacag

SEQ ID NO: 31077 - DNA, 297 bp, Glycine max
cgactgctagttcaagtccagaacatccatcattgcgagctcatggacggtccaagcttagtggtgacaggacttcttttagagatcttgctgatgaccagtctacactaagatccagcgtcaagtcagatggcgcttcctcatcagaagctcgtaggatacgaagtcgaagtatcagcattacaccagagatgggtgatgatattgctagggctgtccgggcgatgaatgaaccattaaagcaaaatcgtacttctgagagagctggggggtgatagttcattgtctcattctcca

SEQ ID NO: 31078 - DNA, 234 bp, Glycine max
agggatcaaaggatcggagagggtcctataaaagaaggtctttttttttctttctccttctccgatctaaactgattttacgttatgcataagttaattttagtttccggcaattttttctttctcttcacttaagaatagttgtagtgaaacttatctaaatggggttatattatgtggatgctgctatcttatgacttcctcagtcaacaaaggttgtgtgtcaggactttg

SEQ ID NO: 31079 - DNA, 557 bp, Glycine max
  unsure (1)..(557): unsure at all n locations
taatagagncagaaactaagaaaccttcataggaaactcttatcgttgaaccagctaaggaaacggtgatacgagagtcagaagctgggaaaccttcagaggaaactcttatcagtgaaccagccaaggaaacagagatagtagagtcagaagctgagaaaccttcagaggaaactcttatcaatgaaccagctaaggaaacagtgatagtagagtcagaagctcagaaaccttcagaggaaactcatatcaatgaaccagctaagaaaacagtgaaactagagtcagaagctgagaaaccttcagaggtaaacaatcaaagcagcgagccactgaacgaagaatttgtacaggccatggagatactttcagaggaaacacaaagcaatggactcatcaaactcaaagaagtgcctattgaaccatcagaagaaggtaagccaagtggggaatcagagaggaatgcttcagaaactgaaaaacctgaaacttccattgtgactgaggtggttcctatgcctgaggagagagtaattgaagaaactccaactgatgca

SEQ ID NO: 31080 - DNA, 233 bp, Glycine max
accaaaatcaaaaccttactcgcgtattgtcataaacgacggtcgaataaaaaaggaaaagaagcgaggcaagtggtgtgttgagttaaacgacagacagcgacagtagtgtagcagacacgataaaaataaaagggtaaccaaccccagaaacctattcatctactctctttaggctgcccttgttcctccaaaattctatgtggtgttgcagatggtgatgattactgctt

SEQ ID NO: 31081 - DNA, 465 bp, Glycine max
gtccctgcatcatcaaataaaataggagttcctgttgaagtatcaaaggaaaactatgatttgacaactgatgaagtagggatagaatctaagcaaagaataaccacagactgtgggggaataattgagtcagttgataagcccacaacatctgaagtaggtttagaatcaacccccttttctagtgatattggtcagcaaaatcccaatttactagatcttggcgatgcctataagctagctgtcagtaacagcagaggaagacctggcatgcttgtagagcattggcttggaaaggattctacaagaattagtgaagatttgaagatattgctgtcacaattttcagctactcgagggactgatctgtccgttaatgatatcagtcctagattgtctataaacagtgatgaagtgaagacttgtgatgtttctaactctgctggaatccagatacttcaaaaa

SEQ ID NO: 31082 - DNA, 337 bp, Glycine max
gaatggtattcctctagagttgacaaatgatggagaaattccaacattggatccactactcaataatgtacattctccaatacacttggctcctttatccattgctgtaattgtattccccaactttgatgctccggcttgtgctgagcacagaaaactttaaccgaaaggctccttgaatcttgtagactaggtattaggacttaagggaatgtgagctctgccattgaaatggtgtttaattggctaatatatttgtatccgcagcaaagttgtgaccacctttgcaataatttaatatgaaagacacttgctagaagcatgattatactttgtt

SEQ ID NO: 31083 - DNA, 275 bp, Glycine max
gatgggagaagaaggaagcacaggaagagtaacgtgctcgattttatccatagaccacaccaatatgttttacagagtctgcgccgtttgcgaaagaactatttccgaccccactttcgtctgccacccctccaaccctccctccaaacgactctttcgcatcctcatgtcggttgccacagacacacaggttctcactgtcgtctgcttcgacagggttgccaggctcctcttcggctgctccgccgatgagttcttccactttgccaaacttc

SEQ ID NO: 31084 - DNA, 464 bp, Glycine max
atgctgcagaagcgtgaaattgggcatctaattaatgtaactgaggtcatgctcagtgaagttgtattaaaagggagacatcaagagcaggagcacaatggaggaagatctaatagtggactaaagtttccaagggtaagcatatatagaggtcaccctgtagttagaagagaaaaatgttccatggaagctgggaagctaataaggttgcctgattcaatagaggaactaaaaactattgcaggtgacaaatttgggtttgatgcaaaagatgcaatggtgacaaatgaagaaggagctgaaatagactccgttgatgtgatcagagataatgacaaactttttttttgttggataagctgagatgcgaaaatgtcaagtgtaaatatatatataatctcgcacaacagatttacttagatgtttcttttgtgttagtaattttgtcttcttcctgtagccat

SEQ ID NO: 31085 - DNA, 265 bp, Glycine max
ggccaatatttctactatttctgatttagttgcctttaaaccttatttccaaattggaggcattgtccaccgttatctaggccgtcaaacccttgttatggaagatgttcaagaaattgcttcatatatgtttcgtaggactgtccctcctatgcgcttatcccctgagggatgtacgatggatggattggagcttggagagacaggatcataatgtgcacagggacatatggacctactcatgctcttatcaaggcctttctgg

SEQ ID NO: 31086 - DNA, 476 bp, Glycine max
gatcaaggtgaagtgctatgctacatggtgcggctggcgattcagcggttccgttccctcttcagacaccaccactgaggagtttctcaatgagaaccaagttgaccaccccgtgtggctcattgccactgtggggttgcaagaatcgatcatcaactccatcacggtttgcaagtacaagaagaatgaagggttggttgaaggaaccgagtgttcggtgtgtttgaacgagtttcaagaagaggagacattacgactcttgccaaagtgcaaccatgcttttcacgttccttgtattgacacttggttgagatcacacacaaattgccctctttgtcgtgccggtattgtttctaatagtgtcaattctgaagcaccagcacccgtgtcgaattcggagcaagaaaatgcaaatttggggaggaatcaagatacccttttggacaattcacggattaatgaaggtgggttaagca

SEQ ID NO: 31087 - DNA, 564 bp, Glycine max
ggattatattaatataaagtttttgaacttggaagcaatcgaaacagagtcacgaaagccaaaacagcacgaatacagacacttcacacacatccacgataatcagtaaggcaggtatcatatcaccctgtattaatttgccttctttttcttcacacatgctaacagctcaagtttctgaactacagggccatcgaaacacagacacttcaaacaccaacaataatgatttaactttgaagacacagctacaatttttgaaaacaaaagatggtaaggggacaactgatgcttattgtgtagcgaaatatgggcagaagtgggtgcggacaaggacaatcattgacagctttgcaccccggtggaatgagcagtatacttgggaggtttttgatccttgcactgtcattacaattggtgtatttgataactgtcatttgcatggtggtgataagcctggaggctcaaaagattccaaaattgggaaggtaagaattcgtctttccacccttgatatagatcgtgtttatacacattcctatccacttctagttcttaatccaa

SEQ ID NO: 31088 - DNA, 235 bp, Glycine max
cttgcatgacggatcacccacccatatcaacaaattacgccgcaaaattcctcgcctgctgcacggccgccgccgccgccgccgcgattaactccgcggaccgtgagcgaagagcgaaaggcaaatagagacgaacgcttgcaggtgacgtggcatctccaaacttacttttgatttcacttacccaaaccgccacacagcagacactggttccttactctcgattcgacgcttc

SEQ ID NO: 31089 - DNA, 563 bp, Glycine max
tgtagttcttgcaactatgctggtacataccggcctgccaagtgccaacttggttgtggacaacctactcaacgatggtatcatgtgccaagatcatggttaaggccaacaaagaacttgatagtagtatttgaggaattgggtgggaactccttggaaaatagtctagtaaaaaggacaacacatactccagcaaactagtgaacccgattcaaagaactgaaaaaacgtgaatatggccagtcaaatggtgatcgacagggcaacgtgcaatgggcccatggtatagaaattggtgatcataatgttgagggaataagttaatgcttggttcaaccgttgatgtcttcatctccaattctacattattcttcattgcataaaaaatagagaaccgtgaataatacaaaaaaaaaggtgtggccaagttgttttttaatttattcttatagtatgtacttaaaaagagaaaataacaaaattcagaggtgtgcttttattcacttgtgtaatgtgtatatctcaaattctcaatacatgtaatgcattttagtggtaacctt

SEQ ID NO: 31090 - DNA, 749 bp, Glycine max
  unsure (1)..(749): unsure at all n locations
ggaacaagcccagcattactgtgcattcgtcaggccatgctgttcatgtgtttgttaatggtcaattttcaggctccgcttttgggacaagtgaagacagaagttgcacatttaatggccctgccaacctacgtgctggaactaataaaatagcacttctcagtgttgctgttggattaccaaatgttggattccattttgaaacatggaaggctgggatcactggagttttgcttaatggacttgatcatggacaaaaagatttgacttggcagaagtggtcataccagattggtctaagaggagaggctatgaatttggtggctcccaatggggtctcatctgttgactgggagaaagactcactagctgtccgaagccagtcacagttgaaatggcacaaggcatatttcaatgcacctgagggagttgaaccattggccttggacctgagcagcatgggaaagggtcaagtatggatcaatggacaaagcatagggagatactggatggtttatgcaaagggttcttgtagttcttgcaactatgctggtacataccggcctgccaagtgccaacttggttgtggacaacctactcaacgatggtatcatgtgccaagatcatggttaaggccaacaaagaactngaaaaacgtgaatatggccagtcaaatggtgatcgacagggcaacgtgcaatgggcccatggtatagaaattgggatcataatgttgaggggataagtta

SEQ ID NO: 31091 - DNA, 412 bp, Glycine max
gaggagagtaagagaacttctgcttcgagtaatcttgctaaacttaaagatatgtatggtgatttcaggggatagtaaaggagatgccaacatggaaagaattcctagaaaggatagtggaggtgaagaggttattagacttggcgggtctacttggaaggattagttatcatggaatgcttgtatcaggtgttggatggctttcatggagaaaaacattgggactagcccttttgttgccagatgtttagattggtgaatgctatcattaacatttatagataatgtatactaaaacttattcctggtgcattgaatttcatgctttgtaatcgcaagttttagactaaagatcattcctgaactatctgaactaccatgtttacattaatggtttaaactttgatatttt

SEQ ID NO: 31092 - DNA, 553 bp, Glycine max
  unsure (1)..(553): unsure at all n locations
caagctttggggctggtgcacagctaaaaactgcgattggtaactggtctagatggctgactggtctatttggtatggatgatgacgacccacttgaggatatagatgataatgaccttgatagcaatgatgaaagtcaaaataccttcaagtccttccatcttcttaatgctttaagcgacctcctgatgcttcctaaggatatgctcttaaatgcatccatcaggaaagaggtgtgtccaatgtttagtgcatcgctaatcaagaagattctagacaattttgtcccggatgagttttgccctgatccaattcccactgatgtttttgaagctctggactcacaggatgatcttgaggatgaaaatgagtctatcagcaacttcccctgcaatgcagctcccactgcatattcccctccaccagcagctaccattacaaacattactggggagtttggaagtgaatctcagctaagaagaagcaaatcttctgttgntaggaagtcatacaccagtgatgatgagctcgatgaactaaactatccattatc

SEQ ID NO: 31093 - DNA, 568 bp, Glycine max
  unsure (1)..(568): unsure at all n locations
cccacgctcacgttcaaccaccatttctagacacattaccctcacaaagtaagcaatggcataccaaaactacaacaactatgggtggcgatgcccctctgacgagtaccaagtgtacgaccccccagtagaggcaacatatcctaggcaaaatcatcacaagaagggtcatgtggcattcagaaccaactatgaggattctatagctgaagtagaatccaacgttgaggctcgagaacataacagcaggttatggaatcacagtgcttacaaaagcgtggaccaagaggctgaggcgtttattcagtatgagcataagaggatggaattagccaggcttatgtcaacaagggctgtctgagcctctcttgaaatatatatatatatattatcataggggcttcatgtgcattgttacatattattgtgtatggttaatttgttgtatccttaaatggttaaaagattttggggtgagacttttatgataaagttttacgaataattcatccctcaatttttttagctctccttttaagttggtatcaaaaaaannnnnnnnnnnnnn

SEQ ID NO: 31094 - DNA, 273 bp, Glycine max
gggcaagagagaggttgggaaagactgcaatatattctctcatgcaaaagaaagcaccaaaaaaagtaagggagaatttaattccttcccacccttcaacaaaaactggcatgagggggagcaacctttagaagagacaacattttcttttccacttctatttaattattactactttaaattcatctcttatatagctcaacctatatctcagtcttccccggtccatcttgttcggtttctgttccatttcttttttatagcagcataaga

SEQ ID NO: 31095 - DNA, 654 bp, Glycine max
ataggaggatgaaggctctcacactggcatccctcttggcctctttctccttcacggagcttacctcgtacctggcatgcttcatcctcctcctgcttctcctggaacagatctcgtacatagtcaaaaaaggttccatcccaggaccctccctggtccttcccttcctaggcaacgcaatccccttggtccgaaaccctaccaaattctgggaccttcaatcctctttcgctaaatccactcccttgggcttctccgccaactacatcatcggcagcttcatcgccttcatccgagactccgaactctcccacaaaatcttctccaatgtcaggcccgacgccttccgcttagtgggccaccccttccggaaaaaaactattcggcgaacacatcctcatgtacatgactggccaagaccacaaaaatctgcgccgtcggatcagcccccaatttcacccctaaagccctctccacctacacctcgctccagctgattatcatcctcaaccacctcaagtcatgggtcagtcaggaccaagcccaaggctcctactctattccgctccgcatcctggctcgtgacatgaacctcgagacctcacagaccgtctacgctggtccgcacttgggcctcagaccccgagagcgatt

SEQ ID NO: 31096 - DNA, 775 bp, Glycine max
agaaaataggaagcaaatcataactcaacatttagctatagatctctcttctctttctttcccgtttctccaaatccttcttcaaacactttccctcattcaatctttcgcagtgttttctgtcgatcgatctttctcccattcttttccgcctctactctttctcatgtagtggctcttttcaatcagttaccgccatagttttcgtttttttttttttccattttttcttaaagtaatggcctcttttcgacggactctgtcgccggcgtatcccgatcgccagtaccttaacggttcgttttcagtctcctccccgtcgcacaagctcccgtcctcaaacgcaaagtactcctcgccgctgccggagattgcggcggcgtttcgtcgtctcgccggcggagtgttcacgcgccggcacggtcggaaaggccagtggaggcgcgtggcattcaggtgcgtgctttgcttcttcgtagggttcttgctgggcatgttcccgttcggccacgtgtcggaggacgttcgctcgcacgaaatctcgtttgagatgaagccgccgccgctgccgcgcgccgccgagaacaacgcgcagcagctgctccgcgaagatcgcgtgctgcggaatcgcgtggagacggagggtttggtgatcgatccggtgagtttaagcgcggagtgggagaggcggagtgagaggttcgatttcacgccgaggaagccgctgattgtggtgacgccgacatacgaccgcgcgtttcaggcgtatttcctg

SEQ ID NO: 31097 - DNA, 267 bp, Glycine max
ctcgagccgcgaaaatggtccttttcagcttaccaagaacttgtctcttgtgtggaatgactacggctgggacaaggcatcaaatattatatttgtagaccaacccactgggacgggtttcagctatacttctgatgagagtgacattcgccatgatgaagagggtgttagcaatgatttgtatgacttcttgcaggcatttttcaaggagcaccctcagctcactaagaatgacttttatattactggagagtcatatgctggaca

SEQ ID NO: 31098 - DNA, 482 bp, Glycine max
aaacatggagcttccactcctagcacttcatgctctctttgcactaagcttttgcatctcaattttcttggcatcgtgtgatgatgattttctatccgtgaaaaagaattcaagttcatctccatttcctagcaactttctttttggaactgcatcttcttcatatcagtgtgaaggagcttacttgactgatggtaagggactaaataactgggatgttttcactcataagccatgcactataatggatggaactaacggtgatgtagctgttgatcattaccatcgctatcaggaggacgtggatcttatggattacatcggagtcaacagttatcgcttttctttatcatgggccagaattttgcccaagggtagattcggcaaggtgaactgggctggcattgatgattataaccagctaggtgacacaattgtctctaaagaaatagaaccttttgtcacaatgtcacattatgaca

SEQ ID NO: 31099 - DNA, 460 bp, Glycine max
atctatttttagcaaactaaacacacttctcttagaagataattgtaaaatggcatcactcaaagctgagaaacctgttgaatctcagtcatcagggcaggttaagaaagaacctgcaaaacccagtggtagcactccaaaagctccttcttccaagccagctccaaagaaaactcagaaaaggtctcgtcctaaacagaaggcaagcagcaataaataagatatattagtagaatgatgaataagaaaaatagttgttggaatcttgtgaagagtttgtaagcatgctgtcgtgtagggctcttcaacaaaatttgataccagtactctacctcttgcttctgttgcttactagtcatctgcatgtaacttattacaaggctaagctaaaataaataaaagatacttatttattagttatgagaacatgagatcattaaaataggttcttgattacaca

SEQ ID NO: 31100 - DNA, 467 bp, Glycine max
gtaagaaagctgcagtggaggcggacctgaaaaagattgaagaagaactggagaagaaaaaggcagaagctgcagagaaaataaaaaacaaaattgctacaatccacaaggaagctgaagaaagaagagcaataattgaggcaaagaaaggggaagatcttcttaaggcagaggagcaagctgcaaagtatagagcaactggaacagctccaaagaaactccttggttgtttctaatgctttaaatcttaagcattgtgggaaacaaaaaaaaatggttaatttttattgagtatctttggttattaactctcatcaatacaagtgtgtttttagtttatatgttggagatttagttcatgttcatttattatgcgtgaaaaccgacatgttggcgtgtatataccaactactttgtggataaagaaattaaattattcaatctgtgtattagttacttgtcgcttg

SEQ ID NO: 31101 - DNA, 279 bp, Glycine max
ctcgagccgcaagtatggaatggccattgagaaggcaacaagcaatactacatggagttggtcaaatatatccagccccatattcagatgctcagacaaggtggtatctttgttgtcctctctccagtgcagtatactgagtatctcagtcaaggatgttcatgatggtcaaacaaaaggtgctactaaacattttgcagctatatttgtgacatctaaaacgaagcacaaggatgtatttgatccattaattgtgatccttcatggagggcctccgat

SEQ ID NO: 31102 - DNA, 312 bp, Glycine max
gaaagagacattctaacgactattaaaccagaattactacaatcactaaaaggtggactaactagcgaaagaaaaatagaactagaaaaattcttaaaagaaaaaggtggaacttactatatatgatgatgatgaaaaaaattaaacaatatctaatcatcttgtttttttcctgcttagtgaagtattcgttttcatcattttttgatattgatacgctccttgcttttttcacgcccgccttttgtatggacgacgtgggcgccagctcacagtcgtccttgcccactgtaaaccccaaaccctaccccc

SEQ ID NO: 31103 - DNA, 401 bp, Glycine max
aaagctcaagtgatcttttatgagggcgaatcatcgttcaatcatgcaaggtccagtgccaaaaccacaagaagtgttcgacagagctccagagcagactcctcagattctgagtaacctgcatttcctgatgagtttgttttatttacctgcaccctgagcgaccgggttatacactctaaacttggtctcagtgactgctttgtggtgtgtctctatctgtaagaatttatcaggattctaggtctagtagatcttcctgagggtcatctctttttttacagtgcctttttttgagttagcgccctcccccctgattatagtaacttcattaatctttgttaatagttttattttatgagttttcccctccccacaatgcttaattattgtgttttgct

SEQ ID NO: 31104 - DNA, 435 bp, Glycine max
gccaagcatcactggcctcgcgggtttagatgcaacggacacattatgctcaattctgagaaaatgtccaagtccactggaaatttcaggacgttgcgtcaggcaattgaggagttttcagctgatgctactcggttctctttggctgatgctggtgatggtgttgatgatgcaaattttgtctttgagactgcaaatgctgcaattctccggctcaccaaagagattgcatggtatgaagataatctggcagcagaatcttccatgagaactggcccaccatctacatgtgcagatcgcgtgtttgccaatgagattaacattgctgtccagacaactgaccacccgtacaccaagtagatgtttcgagaagctctcaagactggcttttatggtcttcaggctgctagggatgagtatagattctcatgtggg

SEQ ID NO: 31105 - DNA, 651 bp, Glycine max
  unsure (1)..(651): unsure at all n locations
tttacttcatcacaagcccaatatcaaacggcaaaatttgaagagaaacccaactgccccaatactctattaaacaagctcaagagagaagaatcaccagacgcagcgaagaaaaattctcctgagcctgcattcaagaggcaaagaattgagactccatctccattaccaacttttaaggttaggaaagaaaagctgggggaccgcatcactgctcttcagcaattggtttcacctttcggaaagacggatacagcatccgttcttcacgaagccatcgagtacatcaagttcctccatgaccaagttttgagcactccatatatgaaaaacaacggagctcccattcaacaccagcaggattgtgataatctgaaggactcagaaggggcaaaacaagatttgagaagccgagggctgtgtttggtgccgatttcaagcacattcccagtggctaatgagaccagtgttgatttctggacgtctacatttggaggcgcactcattggcaggtagagacaagtggagaactcgtgacaataataactatatatttataaataaactaaaaggaagaagaagaagaagaaaacacgattatgctaaagagaaaattaaagcttgagagaacanaagagcaaaaaagaaaaa

SEQ ID NO: 31106 - DNA, 500 bp, Glycine max
agttggagttgttacttctttcctgaaacctccctggaatgtcggcggcgtgcatttgaactcatgaaaagtgaagatgcgtggagtaagggaattgtgaccacaaaagagaattatacaacaaagcatatatgggcaggacctactccaaggaaatggggtcttcagtggaattatttgcaacctactactgatataaatgggactctgttagcttctcatagaaaaatggatatacggtggtggagagcacaggcagtacgctacttaatgaggttcccaaccgaatacacatgcaatttaatgaatgaggcccgccatgctagctttggaaaattagctgcagaaatggtccttcaaagtcttgctggggattggccaaacgaaagtagtgccaggccaaggcctgatgatattgatgaatacgtgtggtccaatcacaagccatgggtccctaggcctcttctatgtatgcatgtaaggatgggagacaaagcatg

SEQ ID NO: 31107 - DNA, 473 bp, Glycine max
ctcgagccgctcgagccgaatcggctcgagggaagatagctcgctctctttcagttcctgccaatgacaaagataaaagcctaaggaggatggattcatttttccgtgttgttccttccactcctcaagtaaaggtaggaaatgaattgttggccacacacacaacaaatgatactgaaaatgaagatgctaatggtgaagatatagctgaagaagaggctgtttgtagaatctgtctggttgatttgtgtgaaggaggcgagaccttcaagttggaatgcagctgcaaaggtgaacttgctctggctcaccaagaatgtgctattaaatggtttagtataaagggtaacaagacctgcgatgtgtgcaaggaggaagttcgaaacttacctgtcactctattacggatccaaagtgttcgaacatcggaataatggtggtaataggactcagctggaagatgtaaatggata

SEQ ID NO: 31108 - DNA, 519 bp, Glycine max
gttcttacgtgaacatctgaatccaaacccatcagatccgaaatccacatccaaatcgttttctggctctctcaatccctcaatccaagtttaagctgcaaatccaaccgggtcattattggttcgaacccacaactattctctgtgcatttatacactaaacagatcccttttccgattggatcgacatggaatttcgtaattttgacccaagatacactggggagttattgaagcacatggatagtcagaatgaggtccttatggaagcatatagatccatgttccatgaattgcggaaacttcaggtcgaagaagagatgcttatgcgcaagatgcatgaagttatgtcagctcatggtcccactaaaagtgtagatgaagaagaatcagtagcacctgaagcagtactagcaactagagaaggggagcgaatggcaagacaatttctgaagctcactggtagaggaggcacttgggaggcatcagagacgagacagagacgatcaaggagttccc

SEQ ID NO: 31109 - DNA, 298 bp, Glycine max
actcgagccgattcggctcgagaaagcccagaaagaagtatttgaaagctaacaaacaggatataactgttgccatgatgaagacttacccattactcttgcgaaaattcatttcagataaagcaaaagtctcatcactggttgagattgttttgcatatgaaccttgaatactattccttgaagaggcaggaacagaatttcaaaaatttactccaactcgtgaaagaagcattttttaagcatggtgacaaggaccctcttagggcttttgtgaaggctattgatttttggtgcat

SEQ ID NO: 31110 - DNA, 337 bp, Glycine max
agaagagcttctcgacccttttaggggttgcgttaatttgaaacacttgtatcttcatcgttgtcagtattatggtggaatccacaggtttcaaatcttcgtcccccaacttacccacttgagcatttcctggatgggaatgaatgaaatgtttgattctgattgtgttgttgagcttttcacgccaaagcttcaatattttagataccatgactctgatctgtatgatttttctattgagggcaaccttccttttatagaacaagtggatattgatgtgggttgtttgaccaacgacactgattcactgcttttgctgattcaattgtttgaaatg

SEQ ID NO: 31111 - DNA, 516 bp, Glycine max
gtcgttacgacatgctctggacccttatcagacttgctaggccggcgtcctatgttgatcatctcctctatcctttattttgttggttctctggtcatgctatggtctccaaatgtttatattctcctctttgcaaggcttttagatggattaggcattggtttggcggtcaccttggtacctctttacatatccgagacagctccacctgagattaggggattactaaatactcttccgcagttcactggttctgctggaatgttcttttcctactgtatggtctttgctatgtcactcaccaaggccccaaactggagactcatgttgggtgttctttcaattccctctctcatttattttgcactcacgctattcttcttgcctgaatctccaagatggcttgtcagcaaaggccggatgctagaggccaagaaggttttgcaacgacttcgcggcagacaagatgtcgctggtgagatggctttactagttgagggtcttggagttgggcgt

SEQ ID NO: 31112 - DNA, 644 bp, Glycine max
aagggtgatcactggacctcaaggtgtccatacaaggatcttgctccgccatctgagggattcgtcgataaacctgcggcggcagacactgtggcagccactgctggtgcaaccaagggagcatatgtgcctcctggtatgagggcaggtgctgagaggactactggatctgatatgcggcgcaggaatgatgagaattctgtgagggtaactaacctctctgaggacacgagagagcctgatttgctggagctgttccgtcctttcggtcctgtcagcagagtctatgttgccattgatcagaagactggcatgagcagagggtttggctttgttaactttgtcaacagggaagatgcacaaagagccatcggcaagctcaatggttatggctatgacaatctcatccttagagttgaatgggcaaccccaagagcaaattaaatgttgagtgttttttgcccctttctttaaaacagtattttgaaggtctatgtatttttgtagtccgagtcttgcactatctttttcctttgagatgatttattaaaagtatacattaattcaagatatcatgttggttattcaaaaaaaaaaaaaaaaaaaaaaataaaaaaaagtaaaaaataaaaaagatggggggg

SEQ ID NO: 31113 - DNA, 356 bp, Glycine max
catccttagagttgaatgggcaaccccaagagcaaattaaatgttgagtggtttttgcccctttctttaaagcggtattttgaaggtctttgtatttttgtagtccgagtcctgccccatctgtttcctttgagatgatttattatttaaaaggatacattcattccagatttcatgttggtcattcataatcaggtatcatcccgcctataaagtatctcattttggaggtggaaatggttaaaatttctttgcctgcaggagttatggtttatcattttttttcttcataagcatgatgggtctcctctgtatatttttttctttggagtaaatacatttcctttgtgtgacag

SEQ ID NO: 31114 - DNA, 490 bp, Glycine max
cggacgcgtgggcttggtgaaggtaacactgctgttgtaaaatatttggatgaacatctctcactcatcatggaagaatcatatgaacacaagtatccatatgattggcgaacaaaaaaaccaacaatacttagagcaacagagccatggtttgcttctgtggacggatttcgtcacactgctatggatgctattggccatgtaaaatgggttccacctcacgcagcgaacagcatctcatcaatgacttctattcgctccgattggtgcgtgtcatcgacacaggacatggggtgtggtcttcccattccagtattttatcatcttcagtctagagaacctcttatgaatgaagagactattgatcatatcaaatctatcatagcccaaaagggtagtgatgcatggtggtacatgacagtagaggatcttctcccaactaaatatcgtgataaggcagcagaatatgaaaagggaactgacactatgg

SEQ ID NO: 31115 - DNA, 281 bp, Glycine max
ctttgagtgccattattgggtcctgggttcgagacaagacacccacattccctaaacccttccaaatccaattcaacaacaaaaatacgcgacagtcaccggttctcttcacctaatctgaatcacactctcttcgttgcgtcagttcatctcctcatatctacaactctccctcattctctggttcttttctcactccaaactgaactgcgaaattttggttttgttcactcagtacagggtgcgatttgcttccattttccagtcattcccatactcct

SEQ ID NO: 31116 - DNA, 531 bp, Glycine max
ctcacgcgtccgcccacgcgtccgcccacgcgtgcgcccacgcgtccgctacaaataggcaccttagtgtgcttcaccctattcataagctattgcatcctcactttcgtgacaccatgaatataaatgcactcggacgacagattctcattaatgcaggtggtgctctagagttaacagtttgtccatctaagtattctatggagttttcatctgtgctttacaaggactgggttttccctgagcaggcactgcctgaagaccttgtcaagagaggagtggctgttaaggactcaacttccccgtatggccttcgattattgattgaggattacccttttgcagttgatgggctagagatttggtttgctatcaagacatgggttaaggactactgctccttttactacaaggaggatgacactatcaagaaagatactgaacttcaatcttggtggaaggaaataagggaggtgggtcatggtgacaagaaagatgagccttggtggccaaagatgcagacatgtggag

SEQ ID NO: 31117 - DNA, 319 bp, Glycine max
agttgaccctggaaattagtgataataaatggcctaatgatgctgagcttccttttcttttaagatacaacaaaatgagcatgcttaatcttgtggcaagcctggtgaagacaggagtgcatggaagaatatattcttcaggcgatggaaggccattaccaggctctataactgtcagtggaagaaattacacagttagagctggaaatacttttggtgactatcatcgcatactcgccccaagagataaatatgaagtagtggcaaccatgccgggctacaaagcaaaggaatacaactattgtgtggacgaaggacc

SEQ ID NO: 31118 - DNA, 735 bp, Glycine max
ccggttcaaaacgaggaaattctagccaagaagtataggattcggttaaggggaattgatgcaccagaaagtgcaatgccatatggaaaggaagctaaaactgaactgaccaagattgttcaaggcaagcctttgaggatccttgtttatgaggaagatcgttatggtcgttctgtaggtgatatctattgtaagggcatttttgtacaggaaatgatgttaaagaaaggtttagcatggcactacgtagcatatgacaaacgaccggaactggaaacatgggaaaacaagccagagcaaagcgtgttggattatgggcttcaaaaaatcctgagaagccatgggaatggagaaaggacagacgagaggctgcatgacaacacctaaaatcagactagcagcattattgccaaaagaaattgagtctagggcaaaacaaaagcccttcattcaatattagtgtatcattgttgtaacaaattgcatgtatataaaacaactgtcaaccaactagatctatttgtcaatggaatgcttggattattaaaaagtctgatattagacctcccaaacaagtttttatcaataggcttgaatacctgagataaggagagaatgaaaattaaggacattacatatattcaatatatgttcaattcattgcaatggcttaattactcagtctcaaccaataaaggttggtaaagtttgattctgttgtcgatgtgaaaaaaa

SEQ ID NO: 31119 - DNA, 443 bp, Glycine max
ctccaaaatattgtaaaatcaggatattgaaagtttaatccatcattaagcaaccgggtttcttgcacctccaataacatagcaaaataaaattacataaattaaatgttattgtaaaagatctaggaaaaaatgttacgttcctgcatgggaaaacagttttagaatacctgtttatactcttaacacttcagagacaagtatggttcttccatgcaagtccaagctccttttgaagtattaatcctcccaagagctgaggtcgtactcatgcaaagattatagtcctattgccttgtccataagactctatagggccataggcatgataatggtggcaggaacctgaatagtgaatatatatcgtgttcacaacttatcaaataggcaataggcaaatggataatgctgtatgagctcatggaaggtcttttaatttactt

SEQ ID NO: 31120 - DNA, 659 bp, Glycine max
aaaattaagcggaagtctacccagttagagaacatgtctatgatattacaggagatggagcattccgctttgaatacaaatagtatcctaactgagatgcggcagagagttgaggacttggtggaagaaacaaccagacagagagtacgggctgctggtaatgaggaagcactttctagagtcaagcaggaatttgagtctctggaatcatatgttagcggtctaataacagtaagagaaaccttgctttcttcagagaagcaatttcgaactattgagaggctgtttgaaaagctagttgcaaagactactcaattagagggtgagaaaatgcagaaagaggctgaagttcacaaacttatggaagagaatgtcaggttgaatgcactgcttgacaagaaagaggctcaacttcttgcattgaatgaacaatgtaaggtaatggccttgaacgcttcaaacatgtaaatgccaatgcacgtgccagactggttgctttgcgttttatgctgacctctggaggcactaaaaagaaggtttatccataaacatcattaatgccttaagttttattttgtggtgccatttgttgttaaaattgaacgaagaaaaaaacctgtccctggaatgtaaacttggcttgctctttcacggggaag

SEQ ID NO: 31121 - DNA, 297 bp, Glycine max
ggagggttgactaggtttttccgcaatctgtttggttgcttcagaggaagtagtactcagcgttctgcttctagtagagagtctatgagggcgagttcctctcgttctagtgctatggatccttcgccgcggtcccgcaggacttggtctatggatgtaaacagtgggatgagagcgtggtagttgttgtaatgggatcgatgaccgatgagggtaaaaggctaaaaatctcaactttgtttctggggttcccctgtaccgtatcattgtgatactgcacataatgggactgattga

SEQ ID NO: 31122 - DNA, 269 bp, Glycine max
taagctctctcgctctctctcttgggctgaatttgacgtggcaatccctagcctgggaattcttcagagaacccgttgttctgctattctgggtctgtttcatagtttgcagcattcagagcaaagtttggaagggtggagcggtgatgcttctggtttggtagtagtccgttggagattcggtcatggctaggcgtcatggatgggagctcccctttcacgcctttcaggtcgcagctataactgtatttttcttgctatctatagca

SEQ ID NO: 31123 - DNA, 512 bp, Glycine max
gattggaggaagaaaggtgctgtcactgatgtaaaggatcaaggccaatgcggtagttgttgggcgttttcaactattgtagctgttgaaggtattaaccaaatcaagacacataagctagttcccttgtctgagcaagaacttgtagattgtgacactacacaaaatcaaggatgcaatggtgggttaatggaatctgcgttcgagtttatcaagcaatacggtataactacagcaagcaattacccttatgaagcaaaagatggaacttgtgatgcatcaaaggtgaatgaacctgcagtgtcaattgatggccatgagaatgtccccgtgaacaatgaggccgcattgctcaaagctgttgcccatcaacctgtatcggtagccattgaagctgggggaattgacttccagttctattcagagggagtatttacgggaaactgtggcactgctctggatcatggggtagcattgtgggctatggaacaactcaagatggaaccaaatat

SEQ ID NO: 31124 - DNA, 274 bp, Glycine max
cgagaacccaaaccttttcctccacttggctttcactgctacgttctttgctggagttttgcaggcatcactcggtctcttcaggttagggtttatcgtggattttctgtcacatgcaaccatagtagggttcatgggtggagcagctacagtggtttgtctgcaacagctgaaatcaatccttggccttgagcattttacccacgaggccgatctcgtgtcagttatgcgctctgttttttcccaaacgcatgagtggaggtgggaaagcgct

SEQ ID NO: 31125 - DNA, 480 bp, Glycine max
cttgttttgcacatatgcgttggagttccctgctgtagccaaaaaagattctgtaaaggaggaagagagaccaaatgcgagaaggagcatcttgtatcaacataaagaaaaatattagacaaaaccaggaaacacagcactaacagaacaagacaaattacctttccaaatgcagaaggatttctgatcgataggtgaaccagttatagtctgaataacttcaaacaacatgctctgcggagtgctcctgagctcttgtacaaccccatatatagttttcccattatcaaagtaaatgtgattattggggtgttttgtcttgcaaccagcatgtcgctcaaattcaaatgcattaataacctgaagaaatgtaacattagtcagagatagcaatttggctcgaaaaggattctcctctatgataaatggcttggagaaactttaccttggaaaaattacatgagtgacaactgcacaaat

SEQ ID NO: 31126 - DNA, 454 bp, Glycine max
agcttcagagagtatctgaagaatgcaagaaacttacatctgaaaatgattccatcaaggaagagttagaacgaatgtgtggttcagaagcaattgctaatcttgaatgaatcagcttcttattatcatgccaaagcaacggcgaaaaattatcaactcccaaaagacacgaatttgcagctgaaattttatcaatggcgaaattgagcataggatataatttttttccttggtttactatttttaccattaacccttaattgtcactccccttatgttttgcccgtttagtattgtaaaacaaattatagcaaaatatttttttcaacacttttattgggcagatttttatatgtaggttatatagtaaataaccttggcctacattatttatcgagacttacatgcaattcagtgataataaagattgtatcgaagagactgttccagtcac

SEQ ID NO: 31127 - DNA, 453 bp, Glycine max
accaggttactgaaaagcatggatcccacacacagattgttgatgctgaagctgatgcaactggtctgaacttatcaccaaacactatcaacatgctctcacctatctcatcaaagaattcacagccaaactctcctttttcatcaagaaagactttgcaacatgacaagaagaactatgatgatgaagataattggtctgtcgcctcctctgctatgtctatgcgcacagctagatctaaggtaactcatggttcagcccctacatttagatgctccgaacgtgcagagaaacgtagggagttttatctgaagttggaggagaaacaccgagctcttcgagaagagaaaaaccagtatgaggcgaggcttaaggaagagcaagaagcagccatcaagcagttgagaaagaacttggtaattaaagcaaatccagtaccaagtttttactatg

SEQ ID NO: 31128 - DNA, 358 bp, Glycine max
gagctgttgaggattgtcaagcagaggaaggtggaactagctaatggaatgtccacaccaacacaagacattttgtctcacatgctaatatattgtgatgagaatggacaatatttggctgaacatgatattgtcaacaagatccttggcttgctgataggtagccatgaaaccacaagtactgtttgcactttcgttgtcaaataccttgccgagctccctcaaaatatttatgaaaatgtctatcaagaacaaatggcgattgcaaaatccaaagctccaggagagttgttgaattgggatgacatccagaagatgaaatattcatggaatgtagcttgtgaagtaataaggctta

SEQ ID NO: 31129 - DNA, 415 bp, Glycine max
cttcgtttttcacctaaaatcattctttttcctgatttatgatggatgtgaaaatttttttcaatctctcttattggggattgggtatatcaatcggaaacggaagacgcgtacgcagatgagttggaaacgactggaaaagcgaaaaaaaagcaccgaaaaacgttgcgccaccttgattactctctcgcggaagacaaaggctcggtaggataggttggtccttgagctgcttgtgtcagcacaaaggagagttgtattgatccctcaaggaacgattcagacatgggtgactcagacaaatgcgggttgtatatcgaaaaaatccttcctgcctagttgtcttaggaaaagtttatgagggatccacaatccgttcacaacattcctttgttgtatgatacagtcaaggttg

SEQ ID NO: 31130 - DNA, 554 bp, Glycine max
ggaaaagtcagagaatctacacaaaggcactttcctgctgatggaacatatacaattaaggaaactgatgacaggaatcattcacattaagccacgatgcaaccttttggtttctaatgcaaagaggtttgttgatggtcttctctttgattgcttgtgtgccttgaattacacactgaggatagtttggttccatagttgcagcaatttgtggtttgtaagaaatttccaatttgctgactcatgcaagttcattgatgctattcatgctggaaatggggagattgaccctacacttctctctaattttagcataaaaagtgtggcaagtgtttgttgtaagctgtaaacgccacttgcattcaaaataatgctcaaagattttctgcctaagtttatggtaggtgctgtgctaggtgtgcatatctcttccactcggtccgttgttaaagatctctaggttggatgattttttatttaccactagaaatttagaatctgtaagtcctgcactaaatttatttatatactttgaagaatgaaatttttcattc

SEQ ID NO: 31131 - DNA, 425 bp, Glycine max
  unsure (1)..(425): unsure at all n locations
acgaggccataggtgctcccaagtggcatggtcccgtcgagcaagacagccgttggtttgaaccaatcaagtggaagaacttctcccatgtaagcactgcaccaattgagtacaccgaaactagcattggggacctgtccggtgttcacatcgtcacaggtgcccagcttggtgtttgggactttggtgccaaaaatgtgttacacctcaagctccttttctctaaggtaccgggatgtacattacgccgctccgtgtgggatcacaatccctccgctcctgttgctcagagaccagatggtgcttcatcatcattgatgaagaaaacctccgaagataaaaaggaagatagttcaatccacatttggaaactggcaaaaattgtggacatgacaganatgtncaaaggccccccagatattcct

SEQ ID NO: 31132 - DNA, 639 bp, Glycine max
tttgtccgcttacgcgtccgacaagcttaggcattggagggcacatcactggaggagcatatggaaccatgatgagaaaatatggccttggagttgataatgtcctagatgctcaaattgttgatgccaatggaagagttcttgatagggaagccatgggggaagacctattttgggctataagaggaggtggaggtggaagctttggtatccttctttggtggaagataaagcttgttcctgtgccaccaactgtgacagtttttacagttaccaagagccttgagcaaggtgcaaccaagattcttcacaggtggcaagaagtggcaccttatattgatgtgaacctcttcatcagagtcatcattcagccatctagtgatgcaagaaacaagactcagagaaccatcgcaacttcttactatgctctcttccttggtggggccagaacactcctccaagtcatgtagacaagttttcccgaattggggttgacaatataggattgcttggagactagttggatcacatctgtgcgctatattgcaggctttccaagtgagacccccccagaagttctgctcacaggggagtctccattctcgagcttcttctaggcgcaatctgattttgtgaggg

SEQ ID NO: 31133 - DNA, 505 bp, Glycine max
cggctcgagcggctcgagctcgagccgaatcggctcgagagttgattgatctctatggttgcacattttggtgctggggttttcctcctaattcaactaataagcataatcagcttcattaactggctgactgattgttttgactctgaaaaatatgcagaaaaatgccaaatccaggtgatgttatttgcaactatttcatattttatctgcttggtggggatcattttgatgtacatttggtatgcgccacaaccatcttgcctcctcaacattttcttcatcacttggaccctagtgcttctcctactcatgacaagtctatctcttcacccaaaagtgaatgctggcattttaagtccagggttgatggggctctatgttgtcttcctttgctggtgtgcaattagaagtgaacctgcgggagctgaatgcatcaggaagtcagaatctgcagacaaaacagactggcaaagcatccttaagcttgttgttgcaatactag

SEQ ID NO: 31134 - DNA, 269 bp, Glycine max
cccttcgttaatcctcgcatatatgggacaagctgcatatctttccagacatcattcccttgaaagtgactatagaattgggttctatgtatctgtacctgtaaaacttagatggcctgttcctgcaatagccatacttcaagctgtggttggaagtcaagctgtcatcacagggactttctccataatcaaacaatgttctgctatgggatgtttccccaaagtgaaactaattcacacatcatcgcaaatgcatggccagatttaca

SEQ ID NO: 31135 - DNA, 269 bp, Glycine max
cactgcaacaataacaatcaaagaaaagaaaccttctcagacacacaacaaaaataacatggaaatggaatcgaaagactatgccttcagcggcaagataatgctaatcgccattgtggttctcttcatcgttatcatcataatgctttgcctccacgtctacgtccggcggcgcctcgtaaacgctcgccgccggccacagctccgccgcagtaaccgcccgcagttcgtgttctacatggaccccgccgcccgcattgccctcacca

SEQ ID NO: 31136 - DNA, 380 bp, Glycine max
gtccttcttgacattagtggataacattgatggagcgaacaagtgctcttccataggttgtctgggaaaaaaattgaggccaaagattttgggaagaagtcttgaatcaaatgttccagaagtgatatacggaatattagatcaaccccttggcaaagaggaattagagggaaggtctgatattcctcagacattagaagagttcttgacccaattgaaggaaggtggttatgatgccaagacatttgcaattaaactaagagaaatggtaacgcttatggaacaaagaaccagagaagccatagttcaagaatatttatatcgccatgtcgcctcaagtggcataccgaaacagcttcactgccttgccttaaggctgg

SEQ ID NO: 31137 - DNA, 550 bp, Glycine max
gccgatgacgggaacggctggacggttatgctcgattaccgaaccctaaagactccttccaagagacccctcaagcttccctctcttcctcttgctaaagccattgctgctgaatgggaataccagcaaacggatggcataaggcccttcacaatgcctcttatgagacttgcttgcactgccttggaaagagttccactcacaaggagcattgttattgagaatttgatgaagaaatttaatcaagatttagtattttgccgtgcacctgatgacgatgagctgacaagctatgtacatgctcctcaggtggagaaaattgatccatcgcttcgttgggtggagccagaatttggctttaagccagttctttacaccagcttttttggtggaaagcaggaagatggtcttgtaatggctattgagaaccttctaaagaaaacagatgattgccaattggcagcaattgatgctattgcagcatcagcacattcgttaattatagctattggcatggttcaggggaaactgcaaattgaggaagcaattg

SEQ ID NO: 31138 - DNA, 823 bp, Glycine max
gtgggtaatgaatgttgttccatctcacaagccaataactcttgatgcaatctttgacagaggtcttattggagtttatcatgattggtgtgaacctttctcaacatatcctcgcacctatgacctgatacatgtggcaagcatggaatcacttgtaaaggatccagcctctggcagaaacagatgtacccttcttgatttgatggtggaactcgatcgaattttacgcccagaaggcactgttgtggtgagggatacccctgaagtaattgagaaagtatctcgggttgtgcgtgcagtgaggtggaagcccaccatatataataaagaacctgaatcacatggcagggagaaaatcctagttgcaaccaagaccttctggaagagctaattctcatcccactaacatagctgcttaatataggtaaaatttccttctcgctgtttcggggatgaggttttcaaggctacctttctctgtgcatcaaagcgatgtggtttcctttcctgttcagggcttatataaagagaaagtaaagttaggatctgagaaaactaagatgtgaagagtgtgcagttttatatggaaagcacgagccagtgttagttatatattttctctttgccattaaggacttgtaattcagtgcttttatttatcattgcgaatttattaaagcagccatcactgatctaattggcttttttaacttatgttataatatgtacggtgtaatttaattctctcctcactaccatgtctatgaagacttcttccctgatcttcgctccaactgctagcattgtttttaaaatttcgagt

SEQ ID NO: 31139 - DNA, 261 bp, Glycine max
aaggaatgcacccaacttcttaaaagctgcctgcattccgtcattcttccaattggaagcttacccattggcctttgtgtccatcgagctttgctgtttaaagtgttggctgacttagtcaatctaccatgccggattgcaaagggctgcgagtagtgtaggaaggatgtgggtgcctcatgtatagtgcaatttggttctgacagggagtatatgagtgatttagttggaagacgtggggcaacatgccagcctgattct

SEQ ID NO: 31140 - DNA, 635 bp, Glycine max
cggtttcgtggggttgcggaaaatcaaagcatggaggtggaagttcatggtgaagatggttccaaattcgcactgggaagggatcagaaaacagtgtttggacgaggctgcggattcagcacccacgaccgcacagtgtctcgtcgccacgtgtccttcgaactcgaccattcacactcagaggatgctaatgctagggtttctttccaagtcatggggaagaaccccttttgggtgtacgacggacaagcgcttcggctcttcagaaagttcgacaagggtcacctgcaactcggacaccgtttctgcttctctcccaacacacccctctggttcactcttactaatattcagcctctgcctcaacttaaccttgatgaaattcacgtttcggaaatcgatcccgttaaagagtttggttttcttgtgatggggcatgagtttgaccactatcccaaggggatgatccggaatgcaaagaattgggactggttccttgaggaacgtaggaaggatagtgaggatgaggaagatgttgagaagcagaggaggaaaatgaggggaaagcgaaaaatgggcaaggttaatgaagatgatgagtggaccggtgaaagtgaagatgataagggccttgt

SEQ ID NO: 31141 - DNA, 350 bp, Glycine max
atcaaccgagttggtgagagtccaaaagtaaatgcaagagcttgttctgttatacgcccacgtgcagtcttatctagtcccgaaaatgatggattaattggaagcataaatgacttgaaccacagtgtatcttcagctcacagaaagaataatgctaaagtgaagatagaaggccaagctaaagttttgtctattcaggtgaaggaaggaaaatattcggacaaggaggaatgtgaggcattcaacaaaggcagaactccttccaaagtgcatgttagaaacttttaatatttaagaggccatgcttaaagaagagacatcaaagaaggttcattgagttgggcttttat

SEQ ID NO: 31142 - DNA, 468 bp, Glycine max
gtgatgttatggaatggcaccacagggaaatttgtggcttctcttccgtggtcatgttgggcctgtttaccagatcagctggtctgcagacagtagacttctattaagtggcagcaaagattcaacacttaaggtttgggatattcggactcgtaagttgaagcaagatcttccaggccattctgatgaagttttttcggtcgattggagtccagatggagagaaggtagcctctggtggtaaggataaagtgttgaagttgtggatgggctaggctaatttttggatgaatattgggaatccaacgaagtgcaatctcaatggagttttgcggatgcatggatttcatggaaatcaatggttggtattatgtggatgcaaggtctttaaattatatagacagcatagaagatatgtttatgacttgtcagaaatattactctcatagcaattgagaatataggcact

SEQ ID NO: 31143 - DNA, 450 bp, Glycine max
cggaaaaggcatcagagcagtatagatgatgtggattctgaaaaggaagagaaggaagaatctaaaaaatcacgaaggcatggcagtgaacgcaagaagtctcggaagcatgcaaactctcctgaatcagacaatgaaaaccggcatagaagacacaagagggaccactgggatggttccaggaaaactggggggcatgaggaacttgaagacggggagctcggggatgatgctgagaactagttgttctttcctaacctttttgcagttatgagataaagaacttcacctgcatcttttggagaatactgactttatttaagtacatttaattgttaattctctggcctctgggcacatctatgaattttgccctcaaatgtaaagaaatcttttggttctcgttatagttctgacaatttctatgaccgcttaattttataccaagag

SEQ ID NO: 31144 - DNA, 270 bp, Glycine max
aggttctcatccgctgcttgccgccccagagtagataatttgggtatgggaaactgctggattgaaggacgaagctgcagcacatcaaatagctgcgatgaagacaatgaagagtatacagcagagacattcccgtggagaaggcaaacaagggacctgtcccgaggcgactctttcagtcaaaagacaatgaccatggggaggaactcgatgaaatttggaatgattgataattcattttatgcctcagattaccagtatagtccacag

SEQ ID NO: 31145 - DNA, 278 bp, Glycine max
caagaagtaccatatacctatattggccatgacagctgatgtgattcacgcaacatacgatgagtgcgtgaaatgtgggatggacggatatgtctcaaagccttttgaggaagagaatctgtatcaagcagttgcaaagtttttcaaccccaagcctacctcaatacaacacaatgccagaactggaaaagcaacttaatgttaattgcaaagtttttcactctctcactactgccatttttcctagttggctgctaaatggtaatttcaatgtgctt

SEQ ID NO: 31146 - DNA, 576 bp, Glycine max
ggtttggggtcatgctctttagaagaactgcaacagatagaacaacagttggaaaggagtgtaagcagtgttcgtgcaagaaagaatcaggtttacaaggaacaaattgatcaactaaaagagaaggaaagagccctatatgctgaaaatgctaggctgtgtgagcagtatggtggtatccagccacagccagcaacaaaggatccgaaagaaattcaaccctatgcagaaagcagtccaagttcagaagtggagactgaattgttcattggactactcaggtctagctattgaacataatttaatccttgcctatgcaaatatcaaataagaagcccaactgcaatgtataaatatcacatgtttcctaatactgagatgaataatattatcgcttgtattatataaagaactttctagccttatgattagggtttaattattgatatgtttgcctttcctcatttctgaagctcttttcatatataatagcatgcacaaaagggatctaattcaattagttgaacatggtatgtgagtgatataaatcttttgataccgtcttcgatttccatc

SEQ ID NO: 31147 - DNA, 280 bp, Glycine max
gaaaattgtatcaagtaaaaatgaagagcagtagaggtttcaaccaattattactgggcatgccaaagtcatagtatagtattcctattcattttcctggagagacgacgcaatatcctatacatcgatgtaacataggatattgcgtcctctctccaggacaatgaataggagaaattcattaataacaaaaaataaaaaaaaggggggccccccgattagtagacctcttcgccccggaatttattccgggccgggacccttcaggcttacaagtttc

SEQ ID NO: 31148 - DNA, 339 bp, Glycine max
cttgttggttgattatatgaagtgtggaaagagtaataaacaacaccaataaaatacaactacaaaaaagcaaaaccaaccgaccaacaacctaccatctcttctagcttcattcttttctttctcgccttaaactacaaccttagttcttcattattgtgattgtttccataatggagttcagatcaaaatcatgcaggaatgagagtctgcagattgaaaactacagtggtggaagggtggcaccaacaagcatgcaagatctgaggtcttatagttacagtgcaagctatgctggttctgcttatccatacaagataggtaaggaaaaggaagtga

SEQ ID NO: 31149 - DNA, 981 bp, Glycine max
acgagtaaatgccccagaattactgcctcatggatcatggccatggattcgaaattttcttcaaccatcaagaataatagtgataatgattataatctgaagaagaagaaggatgaagaactctctgtgcagatttcaaccccacccatttccaaagttgaaactttaaactccaatgacctccaatttgatcgattgcagccatcggatcaagaattgggtcgagtcaaaaggtttgagtttgggcaatttgtcgcacgagaaactgtgcttgatgaagagtattggacagcagcatggttaagggcagaaagtcactgggaggatcgaccattcgaaagatatgttgataactacaaaaggaaatttgcggagcaggaatttaatgcattaaaaaggcggtgcaaggtgcaaaatggtgatagctgcgcatgcatcatcacgtttaacaggtgaggaaggagcagaaaaatgccaagcactcaatattaaaaagtgttgtaggaacccttgatttgaatatccgatatttgctgcaaggggagacttatcccggggaacgggtaaaggcccctcttttttgcagcatcaacagaacaccaccaagcagatatggctacattgcaaacttatgcgttatcaaatcagctaggcgacagggaattgcaagtaacatgatgtcttttgctattgaagctgcaaaatctaatgcaggtttgacacaggtgtatgtgcatgtagacagaaataataggcctgcacagatattgtaccaaaagatgggctttgagatggttgaaatggcaaactcccggttggtagaagaaacatacttactacgtttacagacataaaatacgaaagattacttacgcttcaattggatagctttggaacaattgcgaatttcaaaatttgaatacgttcctgtaatcttagaggtataagcttttagtttatgtacatgcatgtaggtgtcca

SEQ ID NO: 31150 - DNA, 256 bp, Glycine max
ttgaatgttctggacaaggcatgattgttctacttgctatcttgctagtggtctgtccctttgtatctataggacttgaaaacactttaacccctgggagtgagaatctgcatcatcgaattttacaagcacaagccacaatcctcgctcggtacagaaccgataaattctcatcaacatgttcgtagtagttttcccgaactggcgcttccccatggacatctcaatcttcgctcaaatcgacaccttccacaca

SEQ ID NO: 31151 - DNA, 441 bp, Glycine max
acggctgcggacgacagaagggggtagataaaaaattatcttttttgtaggttttatatgtaggatggttttacgcgacactggaaagtacttctgtcttcttgctaggtctacttgaaggcatattgaatgataatgattaatgagcttgtttactaatttgttgtgtcaaggacatgctttatgatttgttaaattgcatttgggattaataccttgtatgttttttgtaagaggaattctcagccaattttaacaaaagatgcaggaatccccagagccaagacatgaattttgggttggccaacgagtacatgcatctggtgactcacagagaattggtactgttaagtatgtggggcctgtagaaggctattcagatacatgggttggagttgattgggacaacggagaaggacaacatgatgcctccatcaatgg

SEQ ID NO: 31152 - DNA, 540 bp, Glycine max
agcctgcattgaaagataaagttgatgacaaagtttttctgagaaagcatgaagaaaagattgagcaaccacaggaagagacaaaagaatatcgcagaactggggtgccagagaaatcagaaacatgcactaccgcagacaaaacggttgaagtggaaggagtgaataaagaagtcagaagtactcgtcaatttgaagttgggataatagaaggaacaaaagtgaacagtgatcagataaacaagaaggctgaggcagagttgactgtgaatggcaatcttgggagctgaactggtgaggtcaaatgcctggagcagggaatagattaataagctctcagcatctctcttctcattctggcccctttaaatctgtttgaaaatgactagtttttgttaatgttatttatctgattgtttattaaaacaacaatatacaattatagagcatagccctatcgtgtaccatccgtgggtgtattggacagacgtgtagcttgttgatatcataatattatgttgtaagatatgtgaaaaaaaa

SEQ ID NO: 31153 - DNA, 248 bp, Glycine max
cagtgttgatgatcatcagaagaactgcctaaagtggtttccatctgttcatcgaattttagtccttgatgggattcaggatcctggtaatcttggtacattgctcagatcagccgtggccttcagatgggatggagttttccttctccccggctgctgtgatccattcaatgagaaagctcttcgggctagccggggtgcctcgtttcagctccctgttgtttctggcagttggaatcacctggagt

SEQ ID NO: 31154 - DNA, 474 bp, Glycine max
taatgccattggaggtgagatccgattccagactgaagttgagatgatcagcttagccgtccatcggaatcttcttcgcctgtatgggttctgcatgacagctacagagaggctcttggtttatccctacatgtcaaatggcagtgttgcttcccgtctaaaagccaagccagctttggactgggctacaaggaagagaatagctttaggagctggaagaggcttgctatatttgcatgaacagtgtgacccaaagattattcacagggatgtgaaggcagcaaatatcttgcttgatgattattgtgaggctgtggtgggagattttgggttggcaaagctgttggaccacagggattctcatgtgacaacagcagtgagaggcactgtggggcacatagcccctgagtatctctctacaggccaatcttctgagaaaacagatgtgtttgggtttggcattcttcttcttga

SEQ ID NO: 31155 - DNA, 274 bp, Glycine max
gaggaaaccaagaggctacgaactgagagggctggaggatggagtggagatattagtaggaaaagggcacttgaagaagcctttggcagcatctgggtttgctgagacaataataatcatgcaaggctggacatgcttattttaacatggtgtttagatactttctaaatcctaagggcatgcaaattccagtgtcacagaagctattttggcatggatattgcgatgtaaatggtgtagaatgtagatttgttgaattttgttctgtgaacca

SEQ ID NO: 31156 - DNA, 275 bp, Glycine max
tccctcatggatcatggttcctcttgctctcttgctgtttttttccagttattacaaactggttggatttatgttcttctcctctctcctcttcacatccctagcactgcttttgtctacttttcttctcttcatgtggaagcgcaaggctgaggcaattggtttcagttttgaggagaagaagacaccacaccatggaagggagagtgttgttgctattgcaccaacccctatgcacaagaatgttgaaactattgtgacacaagcaaagggaa

SEQ ID NO: 31157 - DNA, 424 bp, Glycine max
  unsure (1)..(424): unsure at all n locations
caggcggttcttcttggattcttatgaagtgggtgaactttgctatgctgctgagcaaatatttatgcatgaaccgaccgtacttcagctgaaagctcctgtcaaagtatttggtgatcttcatggtcagtttggtgatttgatgcggctatttgatgaatatggatttccttctactgcaggagacatcacctatattgactacctgtttttgggagattacgtcgatcgaggacagcacagcttggaaaccattaccttgctacttgctcttaagatcgaatatcccgagaatgttcacttgatacggggaaaccacgaagctgctgacataaatgcactatttggttttcgtattgagtgcattgaaagaatgggtgaaaatgatgggatatgggcatggacacgattcaatcaactttnt

SEQ ID NO: 31158 - DNA, 514 bp, Glycine max
attatttgataatatagattaaataataacgagacattgacggtctaacctaaaaatttatcacatcaccaataaatctaaagaaataatcacatgtaatttttggataaattatatttttaattcttgtatatttaaaatagtcactgatttgacatcagtgtctgagaaatctacacataatcatttaatctaaaatgtattagtaatcatcccatcaaatttcatactcgtgaatcaccattaaatcggataacgttgtgggtatgtcattaattaacattgttatttgataacatgaaattaaagtacaagtgaaaaaaaaagtttgaaaacgactaagagcatgaatctaaaaaagaaatcttatttaaaactagcaacagagaagagtacttgagtgtaaattgatggtcattgattcattcaattattaactgtggttatctttttacagaacttacttgtgggagctacaggtacaactgaagtcacaacactctgggccatgact

SEQ ID NO: 31159 - DNA, 279 bp, Glycine max
agaaaagagaacaaggtagttggtgttctttgggctaataagagggacagtggactatggtttgcgcctcctgagtggagagaatgtaggctcggcattcaactcttaccgatactgcctatctctgaggtcttgttttccaatgttgattttgtgaaggagcttgtggagtggacattgcctgctttgaatagggaaggtgttggagaaggatggaaggggtttgtctatgctctgcagggtatttatgacaatgaaggtgcaatgcagaagataaga

SEQ ID NO: 31160 - DNA, 454 bp, Glycine max
attattagttatatacttatattttgttccttttaagtttaattaatttgagatattttgggctaattatgggtggcaaggacatggcaaaggtgaagtgggggaggaggaggaggaggcaagagggtgtggagaggaggataaagaagctgcagcggctggtttcgggcggcacccgaatgaacccggaccggctcttcatcaagacggcggacacatcttgcaattgaggttgcaactcaatgtgttgcaagccctttccaagattttcaacgccagatatgattgattaatgtttactagttattcaacgcctgatatgattgattaatgtttactagttaactagtgaggcaatgatatatgaagatatgtatgattaattgttgttatatgtatttatctatatatttattcttatcatattaatgtctaaggtgtctttcctagtcct

SEQ ID NO: 31161 - DNA, 657 bp, Glycine max
  unsure (1)..(657): unsure at all n locations
attttaatcaatagtttattgagttctcctgggcaaggttatctttataactatcaaacaaaggaattctataaccttagttatgcacaagaagttccggaaggcccagctaggtttggagactaccttgtaacaaagtgtggcgtgctgatgatgtccttgtttgtattttttactaccacaatgtcagtatcatttacattaagagaaacacagactcgcatgctgaagttcacggtgcagcttcaacaccatgcacggcatcgcctgccaacatttcagctgatctttgtacatgtgattgaatcactagtttttgttcctattatgattggcattctgttttttctctttgagttttatgatgatcagctacttgctttcatggtcttgattcttgtctggttgtgtgaactttttactctcattagtgtccgaacaccaatatcaatgaagttctttcctcgcttctttttgctgtatttcctggtcttccacatatatttcttctcttatgcttatggtttttcatatttggccctttctacaactgcagctnttatgcaacaccttatcctgtactnttggaatcggnttgaggtaccggcactgcanaggtacatgcaaaatcgacggtcacaacttcaacaacaccca

SEQ ID NO: 31162 - DNA, 596 bp, Glycine max
gtatgatcctaactgtgaccctccagatgggccatgtaagggtgttgaagtgcttgagtgacactgatcctctttgttggcccctctgtatgatcctaactgtgaccctccagccgtcattccaattgatcttgacattgatgaggatctaggggaagagatgataagggacatgatgtggaaagaaatgcttcattaccatcctgaatctgctatggagagtgcagggttgtgctaatgatatttacttcctttcatagttatgttcccttttgttggtgccaggatagttctaatatcataacttgcttcaaataattaggagggctttgtcatcagtgagctccttatatgttcctgttttctatttattgaaagcagagagaaacagcaaaatattatcttaaaaaaaattgtgttattgctgatgatgcattatagtctttaactgccatgttgagagattgattttttactgaactctgtattgtagttgcctcgttttgctgtacataatcatgttcctgtgtctttcataaaccattttgtaaattaagtctaatgtttatcaatagtgtgttaatgtttgaactttg

SEQ ID NO: 31163 - DNA, 636 bp, Glycine max
  unsure (1)..(636): unsure at all n locations
ctgttctctccatcaatttcccaaatctcagaaacaaacagaaccaaaccaccaccaccattataatacactccctgcaaaccctagaaacccaataatttggggggaacctcaacccaatcccagaaaccaaaatcggcctcgcaattcgtcgaaaccgaggaagagaaatcgtgggcacccttcaaaatccgagatttccccgacaaaatgtcccaactgaagccaatgtcgcacatagacagtgcccctccgaccccagggaagttcaagatggataaagcttcgtacttcaaccgcgtgcggtggcacacctcgctggcgaactcgcagtgtggtccttcgtgttcctgggcgcgatcttgatctttttcctccgctcgccggcatcgtctccggtcccggcggacctctcccggcggtccctgcgaacctacaactggggcggacccgtttgggagaaacgggtccgggcatccgcccaggtccggtcccgaaacgggttcgccgtgttggtcaccggcgccgccggttttgtaggcacccacgtctccggggcgcttaagcgtcggntgacggggagcttggacttgacaatttcaatgactattatgacccttcacttaagcgtgcacg

SEQ ID NO: 31164 - DNA, 606 bp, Glycine max
catttgtgactgtggagattatagaggatgatgcagagtttgttatattagccagtgatggattatggaaggtaatgtcaaatcaagaagcagttaattgtatcagaaatataaaggatgcacggtcttcagcaaagcgccttaccgaagaagcagttaacaggaaaagcaccgatgatatctcctgcatcgttgtgaaatttcagtgatctcaaggctcgcatgatagacgttgatccagcaacttgcaagtgtaacataaacttcggtgtaatgaataaaatgataatgcttgacagccatcaggtggtgttgttatgttgagtcattcatgcaaattaacttggccaacgtgttatttaaagtaacaatgtgggaaagatgtagtagattctaattatgcagaccaaactttaatctgtaagtttgcaaggaagtttggtcaatgtcagtgatcttgaaagcttaatttcatatcactgcccaggcctatgagattttagattaagttattcgtttgtatcggcctacactcctatcgctgttggataactaaagtctctagagtgtgtgggaagctttctcacaatttcttgttattttttc

SEQ ID NO: 31165 - DNA, 446 bp, Glycine max
  unsure (1)..(446): unsure at all n locations
ggaagagaaccttcttgcatttccttcataggaagtacaaagagaaattgtcttgtagtctaatgtttatttgatcagagggcaaacacatgaactgtttggtaaatgatgaattaacaaaatattcgttacaaacagcaacaattcaatataacaacaagcaacctatctttaaatgcaatacaagatttataatgaaaatgaagcaacctctatattcacaacaataatgaaataactggtaacatggagtcctatgtttttatataaatactctccggctatatatgaatctacactccaacagcaacctcatatgatacaatctcaggtggggatgagttcaagaccagtgcaacattctgatcaagttcatttttggattctagctccatgtcattntggtattcagaattgttaactgatggatcatggcattcttcatt

SEQ ID NO: 31166 - DNA, 280 bp, Glycine max
cagaatatcaagaaatggatgaatttgggacaataacaaatgttgagtataaggacaccggagagacttctggttctgttgatgttacatttgatttctatgttccagacgaaaggtcttgattttgagttgaaagttcttgaattttgatttctttgtcaaaagttagtgtctgaaatgcctaccagtgaaagctaatctggatttctgtatatatttttaaattgaagcttacattagggtgacactagattttgatgagaagttttgtttttgtact

SEQ ID NO: 31167 - DNA, 526 bp, Glycine max
gttttctaaaagggttacagaagcttgcccttttaaatttggaagggtgccttgtcacagctgcatgcttggattctcttgcagagcttcctgcactgtcaaacttgaatcttaatagatgccttctctctgacaatgggtgcaaaaaaattttcacgactcgaaaatttgaaagcattaaacttgggatttaatgccataacagatgcatgtttagttcacttgtaaggattgacatagttggagagcttgaaccttgactcgtgtaagattggtgatgaaggattggtcaatttggctggccttgagcaattgaactgcttggaattgtccgatacagaagttggaagcaatgggctacaccatttatcaggtttgtctagtctgcagaaaataaatctgtcttttaccatgattagtgatagcagcttaaggaaattgagtggactctcgtctttgaagtcacttaatttggatgcttaccaaattactgatgctgggctggcaaaccttacaagtttaactg

SEQ ID NO: 31168 - DNA, 306 bp, Glycine max
ggtaggaaagagagtatgagtgagagtgtaggaaagagagtatgagtgagagtgtggctaacatttgtcttcatgttatgagggtatcctatattcctattttttatgatactggacacctagtatctatatacacctatagagagaaatgtaaatgtcacaggtctggtccatttggagatgaagtttccagagtgtttggtggtggtcttgtaccaggctcattgactttaattggtggtgatcctggtgttgggaagagtactttgttgttgcagatagctgcaattattgcaaaaggtgaca

SEQ ID NO: 31169 - DNA, 317 bp, Glycine max
agtagattcacatacttcagcagcaaaagcctcttcttcttcttcttcttcttcttcactctcttcacaaatgaaaatactttgctctcttcctccaactctctcatactttcacttttctttgttcatgcaagatccaaagaacgattcaaacacaaggaagccatggtaccaaagagcaattgaggtgactagcctatggaaaagtgtatcaaaatccacagaaattccaacacctaattcttcaactttatggaagagatcatcatcaatgccaaaatcccctcaagtccctactacaccaagtcctaacaaca

SEQ ID NO: 31170 - DNA, 477 bp, Glycine max
tgtcaacatctcaccattgataaccattcatgatatatctgggtctcagtcatcatctgcttgccccacttctcctccacattttcaagaagaccttcttcatcgccggcaacacttggtggaggaaattttgcagctttcagcagattccttttcagtggcatcttctgatagtaacacaagctgtagtgatgttgattgcagtgaatttgagtcgtcagtgcctaaagttgataatttcccgtgcaaatattatatgaatggaagtgttgatggtcatttatctcaaaatcagctcaaggaaaagttttacaacccaaggcaaggaattcttcatgcaagagaaaatggaaattctttatcgagttctacctgtgacccaacttgtaagcagcattcaattgattttgctgctggtgctgacaatgctgagagtgcattttgtgctaaccagaacactggtttgttggagaatag

SEQ ID NO: 31171 - DNA, 473 bp, Glycine max
gatatagcaagcaacttttttcatctgtgttgtgccgaactttcaatgtaaaatcgattcatctgtttgcccaaaagaaaaacgaacatattcttgttgagtggctcttgatagctgataaaggtgacttttctggtaaaaatctctcccagatgtcaaatgttgcgaactcgacaaatattatgtggcatgactgtccaattcagaaacaagatagacagcagctgcttcagcaaaaaggctgtgttatatggctaactggcctcagtggttcaggaaaaagcactattgcatgtgctttgagtcgaagcttgcactccaaaggaaaactgtcttacatccttgatggtgacaatattcggcatggtctaaaccaagatcttagtttcagagcagaagatcgttctgaaaacattagaaggattggcgaggtggctaaactctctgcagatgctggtgttatttgcatcact

SEQ ID NO: 31172 - DNA, 365 bp, Glycine max
ggattacttgggactactacttctcttcacgagaacataccttgaagtttgactcgtgggaagagcctgcagagttggaatatgtgaagcagcatggggtttctgtgtttctcatgccatccgggatgcttggaactctgctttctctgattgatgttttgcctttgttctcgaacactggttggggtcagaaagccaacctggattttctgaagaaacacatgggagctacatttgagaagcgcaccagccttggcgtgcatatatagatcctgcagatgttcattcagagacttcttagctgtgtcgaagatccggtgcacgctctgatgcgcctcagctctttccgacgttgtcactgttaa

SEQ ID NO: 31173 - DNA, 291 bp, Glycine max
cgcaaaaccaaaagagaaacaaatcaaggttcaaatcaaatgggttcaaggacacagccagcagcagctgatcgtgtctacgaagactttgtaccattgtatgaatgggatagaaatgaaaggcttgtcaatgttatgctaccaggttttagaagggatcaattgaagggtcaagtgacctcaaaggtccacctaaggctaatgggtgaacgactgatcactgacaacagatggcggtcgttcaatctagaattgcctcttctttctgattatgacagcgacaatgtgact

SEQ ID NO: 31174 - DNA, 405 bp, Glycine max
tggttaagtacagtgagcttgctattgtatgcactcttgtgtagatattaccctaagaagagtgattcggacaatgaatattgagggttttttttttccttcctctttagttttcaagtgttatcttcccaaacccactgggttggcctagtggtgggaaacttgggatagaatacatgagatcataggttccaaggcgtacacccaaaaaaaaatgttatcttcccacattccttttgggctaaagtttgttgaactacttgacatgatattcaataacagtaattgtatgatatgatgtgtgtttcatgtgaccaagtgaaaaactgaaaatgaaggagttaaaaactaaaagatgacaatacatttttgacaaagtataatatattaaatgttcttaatttt

SEQ ID NO: 31175 - DNA, 501 bp, Glycine max
atcataatgtaaataggaaagactaataccaaattcattaaaaaattcaggagaagcaaaaaaatgcaaggtcgtttgtcttcttggctagtcaaacatggactaattcatagatcattgggtttcgattaccaaggaatcgagactttacaaataaagcccgaggattggcattccattgctgtcattttatatgtatatggttacaattatctacgttcccaatgtgcctatgatgtagcaccaggaggactattagctagtgtatatcaccttacgagactagagtatggtatagatcaacccgaagaggtctgcataaaaatatttgtcgcaagaaaaaatcccagaattccttccattttctgggtttggaaaagtgcggattttcaagaaaaggaatcttatgatatgttgggaatctcttatgataatcatccgcgtctgagacgtattttaatgcccgaaagttggataggatggcctttgcgtaaagattat

SEQ ID NO: 31176 - DNA, 255 bp, Glycine max
catttccccctttccaaagcagttgttcagttcatttcgctcacaagtgctcctccgaaaaccgaaataaaaccgttcccatcgtgcgaacaagttcaatcgattccaaagtctaaaactgtgaacgttctttattgtgaactctctgataaccgaagaaaaggacatggcctcaagaacagttgcaaaagacataatcactcttcgcggttccgctgcaattgttagcgagttcttcggatatgctgctaacag

SEQ ID NO: 31177 - DNA, 284 bp, Glycine max
gcggctgtctttgttgaagcattcaaaagtgcgaggtgcgtattgtctaggggtttttctcaaatggcaatgatccaactactcttttaggaggcattgttgttcgtaacactcttgtaatgtatgatcgtgagcattcaaaaattggtttctggaaaactaattgttctgagttatgggaaagactacatgtctcaaatgccccaccacccttgatgcctcctaaatctgaaggaacaaatttaaccaaagcatttaagccctctgttgctccatctccatca

SEQ ID NO: 31178 - DNA, 453 bp, Glycine max
gcaaatgtcaaccagcagcatgaaatcaccgttgccatttcaaattcatttggattcggtggacacaactctgtggtggcattttctgctttcaacccttgattgcccagcttagcttgtctgccctttatgtagaacccgggtttaagttaattgaaattttgttccctctacatcattgaggttatttactctagctgagtccatcatcatatataaaaagctgtaggcatgtagttgttcattttgtgcctaattgtgacttgacaattagctataagactattttgtagtagaacattttgaatatagctcgaagattttattagtttggaggtatacagcagcggatagaatgtcaaagagcttatattcttaagcattcttccttattgttaagtattatttgagtctcacggcttcttgaataaaaaaaaaaaaaaaaggggggcc

SEQ ID NO: 31179 - DNA, 321 bp, Glycine max
acgaggcgctgcagcagagcacgctcaaggcgtggggtggaaaggacgagaacatccccaaggcgcaaagcgcgttgctggtgaggtgcaaggcgaattctgaggctactcttggaacttacaagggggatgccacgcttggggaaggggcttctgagtctcttcatgttaaggattataagtactaagagagaggtgtgagattggttcttttggaatggaattgtttgtttctttgggcctgttttggatattcaagagtgtttttcaaaaaatttctactgaaaaggaaagaaattctccagaacacttctagcattg

SEQ ID NO: 31180 - DNA, 268 bp, Glycine max
cttatgaatcttgtgttgaagagaatgggatcagctataactgaaagtagtttgtcaccgatatctgataaatgcactcaacatacaaggaactgtttggatagagtgaatgctgtcacttctgtactttttttgatgcacaaggatgctaaattgcaaccgattatgtctttattcaaggcagatattgataacgtcatacataaagttttttctttaaagacatcagggcggatcagtacgacaattgaagaaaggcatgacatac

SEQ ID NO: 31181 - DNA, 313 bp, Glycine max
  unsure (1)..(313): unsure at all n locations
ggacgcttccgtctcgacgttgtcttcgtcgtcgacgtcgttgcattgcacgggcgtggatggatctctacgaccgcacgagcttccgaattgagggcgtggagggcgagttcgaccggatttgccgcagcctcggcctctccggtcccgaggccttctccattccggccgccgtctgggaggccatgaagctccgttgctcctcggactacttcctcgncgcccgaagcacggcggcgcaggagaggaattcgacgaagagccgacggagaaggagaaagaggaagtggaaattgcagtataagcgagcgag

SEQ ID NO: 31182 - DNA, 510 bp, Glycine max
aagaagcattcctaaggaattggagggccttcatgagaaatactcatccacttgcagattgttcaagtaccaagaacttgtattggcaacatcaaattttttgccagaaaatttgattgggaaaggaggaagtagtcaggtttatagaggttgccttcctgatggcaaggaacttgctgttaagatcttaaagccatctgatgatgttttgaaggagtttgttctagaaatagaaattatcactaccttaaatcacaaaaacattatttccctccttggattctgctttgaagatggcaatcttcttttggtctatgatttcttatcaagaggaagccttgaagagaatctccatggtaataagaaaaatccacttgtgtttggttggactgagagatacatcgtggcaatgggtgttgctgaggctttggagtatctgcataataatgaaggccaatctgtgatccatcgcgatgtaaaatcatcaaatgtgttgctatctgaggattt

SEQ ID NO: 31183 - DNA, 461 bp, Glycine max
ttcgtcttctgacgcatgggcggacgcgtgggcgggggcgttttcagacgcgtgggttcacacaaactgatttttcttttctcttcacattcttctaaattttggccccttcttcctcaatgataccagggccactcggaaacacaacaacaacaacagcaacaagtgtgcataatggagggccaagatctctcgccacctcgcatggacacatctcgaccgtccctcggcttccccttgggcactgccctcctcttgatcatcatcttcagcctcagcggcatcttctcttgttgctaccactgggacaagttacgctccttccgtcaatctctctctcatccccaccctgctccctgccacacccaatcccaaccctacacggaggtgaagcaaagcaagggtgagagtctgccggtgttgatgcctggggatgaagagcctaagttgatagccatgcc

SEQ ID NO: 31184 - DNA, 281 bp, Glycine max
cggctttctgccgcagaagctgaaatagaggacttgaggtccaagctggatgcatctgagagggatattttggagctgactgaggctgttaaagttaaagatgctgaggcagaggcatatatatccgaaattgagactattggtcaagcatatgaagatatgcagacacagaaccaaaatctgttggaccaggtgatcgagagggctgactataatattaagcttgtatcagatagtgtgaagacaaaacaggcgcacaacactttaatgtcccagaagca

SEQ ID NO: 31185 - DNA, 487 bp, Glycine max
aaacagcgaaaattaaacaacaacaaaaaaaaagctcttccatccgaaaccgtaactcactgccggcgacgaggatctcgccggggaaatgaacattccggcgaaactcttttctctttctttgagcaatgcacgtctctcataccatcgtcgccatgtttttcacgaaagccttgacctcgaaacgtttttcacctcctctttctcctctactcgcgtagtagtctagaagttattcgatccttcttccctcaaaatggaacttacatgatagagtagttgtagttgaagtcgttagaaagagacacaggttttgagcggattttttttctcttgcgatttccccccctctttttttgtcagtcatgcctccgatgaagatccaaccaatcgacgtcgattcacagaagctcgcggtgatccgaaacgacgccgttaagccggtgctgaagtcgcgcctgaagaggctcttcgtgttcgaccgtca

SEQ ID NO: 31186 - DNA, 264 bp, Glycine max
atctagagcaaaagaagaggcttctagcaggaaggctatcatggagaaagtggagaagtggatgctagcatgtgatgaggagcgctggctagaagaatatagcagggatgagaatcgatactcagtcagtagaggagctcacaaaaacttgagacgtgccgaacgtgcccgtataatggtcagcagaatgccagctctggtagatttgctaataaaaatgactaggagttgggaagaagacagaaataaagttttcttgtatga

SEQ ID NO: 31187 - DNA, 969 bp, Glycine max
tgttacacccactgttccaaccttacagataccctctctttcacaatctactcctctaatacccccgcttgatgctgttgagtccatctgcagcagtagccgaaccgcaaaacttgtgaagccttcttttttcgtccctcccccttcttcagcaatgatgataccccccgtatcttcatctactccgacggcccctccacttcatcctgctgttaatgtacatcgcccatatggtgctccactgctacagccatttccaccgccaaatccaccaccgtcacttgctcctgctgcttctccctctccctctccaagctatggtccagttatttccagagaaaaggttcgagatgcgcttctggtgcttgttcaggacaatcaattcattgacatggtctatagagcgctgctgaatgctcatcaatcatgactttcacgaggtgtttaattatcatctcgctggatgaattgttttttgggctgaattacatttgctatactttttaggccaggctatattatgtcctaaactttgaaatgtttcagtcgtattcaatttgtaaaattggttgtgctttgtggtgaccattttgatctagctagtttcctgtgtctgttttttagacaagtcattgcaatttaactgccatatcaactgtattagttaggtgacatggcaggaaatggtgaggtccagatgaatggttagcaattcggaactgatttcacaaattatgttgatcgactgaaacaaatctccaagttataagggggggtgcaaaggttgttactgagccttgtttattgtgtattttattaaattgttttgtcaaagacgactttgtatagccccattggtcagtgtttcagagaaattgtactgtgcccctgctgcataatgtaagtatataatcagcccgatctttttgatggattacgaatagttgacaatatcattcttctgatgcc

SEQ ID NO: 31188 - DNA, 736 bp, Glycine max
gctggatgaagcaggagggtccgatgaaagcagccagaagttcagagagtcaatgaacaagttcatgagaatggccgaggaggagattctaaaagtccaagcacaagaaagtgttgcactatcccttgggaaggaagatcacagagtatttccatggaaacttgtcaaaggaagaagctcatccatttagaatcttcatggtagtaagagacttcttaacagttcttgatagggtgtgcaaagaagttggtatgataaatgagagaaccatggttagttcagcacatagattccctgtcccagtgaaccctatgcttccacaaccccttccaggacttgttggaaagagacaatacaattcctcagatgatgatgatcatagtccatctccttagctgtgtatcactcatgtcagtctgacatcttttggctgcatcttctgttaggaaacaacctggaaccaggcgattctgacgggtctgggggtgcatgtattgtctggcccatttttttttttctttctcttgttaaattgtaaaaatccttgtaaaagatttgagttataagcatattatagattatatatagagtagaagattttctttgggggaaaataagctttgccttgtatggaatagaatgtgtattttaaggttgttgtgtacaaagctattcaattgtagatgacacctagttgcagatgctctatagactataatttggggaaccaattaag

SEQ ID NO: 31189 - DNA, 511 bp, Glycine max
  unsure (1)..(511): unsure at all n locations
tcgtgaagccaaaacagaggccttcactgttaaggatcaccgtggagaattatacaagaagcactacccacctgccttgaatgatgaggtctggagactggagaagattggcaaggatggttcctttcacaaaaggctaaataaagcaggaatatataccgttgaagatgtcgtacaacttgtggtcagagatccacagagattgcggaatattcttgggagtggcatgtcaaacaaaatgtgggatgttctagttgagcatgcaaagacttgtgttcttagtggaaaactctatgtatactatcccgatgatgcaaggaatgttggcgttgttttcaataacatctatgagttgagtggtttaattaccaatgaccaatattactctgctgattctctctccgacggtcaanaaggttatgttgacacatttgtgaagaaagcatatgagaattggatgcatgttaatgagtatgatggcgagtctctgctaaataccatcagaaataga

SEQ ID NO: 31190 - DNA, 452 bp, Glycine max
ggtaaaccgtggtgtttgatgtgaccgatttctcttttcaccagtcacagtgaaaatttagcaaaatgatgagaatctctgggagtatattaaccattttggaggacttgctgtgtacatatttttgctgctgagactgtgtgaagaggccaaggcaagtatcagacatggtgtacttttttcccttgtcaagtttcttgtgacatagtaggcataagttagtttctccccaatctgttgtgctctttctttgatcaagatctttgctctacatgcatgcatgttctactaaactattcagaagtctagtctttcttatattggcataatgtttatattgattatgtagtttgaaccctagatagcattatgaggggattatttaaatcgaatgtataatccctgctcttctatataggcggccctaatagttaaacaaaaaattgagcttt

SEQ ID NO: 31191 - DNA, 296 bp, Glycine max
cggctcgagggtatggtgaaaacttgaagaaagtgagtgcgaagttcttgaccatctcacaaaagagaaatatcaggagacaagcttacctcaatgaagtgtctcaaaggaatgattcagttttctttgcaaccataggagcatttgtgattcttccaccttttataatactaggaatagctatattaactggctatgtacagctttttccttgaaatactatagttagcgatacttaagtgatatatcaatgtgatattaatagaaatttcttacctaaaaaaaaaaaaaaaaaa

SEQ ID NO: 31192 - DNA, 413 bp, Glycine max
ttgaacgggaatttttaatttgttatcctattcatcatttgtagcttgttatttcgaaattttgagaacaatggatcacttcgtctgtacgattgattgattagccactagcaactcatcatcctaaccatgcttttgcagttttgcgttcccaattttctttgaatctagtaatttagggattagaatgaagtgaactgaaaacattctgtctgagactgacctttgattttcttgctcctatctttttagtttgtacaaatggaagagtaatttgtttgagaaggtgaaactgaaacctaataatattgttgctctctgcatcatctatgtaatgtattgtccaggtagatatttaggctgttgttccatgtgtgagtgaataaaattgagctacatttcatgcgtttctt

SEQ ID NO: 31193 - DNA, 444 bp, Glycine max
gcatagggttgaaagtccaattgcgttcagctggacatgacgtgacattatgggctatggaaaatgtctggcccaaattaaaaggcccacttaagtgtcgtcagctcttcatggtttgcctttgttctaacccaatagagcttgctgttattatgtatctcacttataacattcgatttctgcattctcaccattatattttgcaaagttgattctaaaatataaatttatattttaaaatgaactttacgaaatatattaaaggatgcaacatttgagagtgcaggattcaatagtcctcacttattcaggagaacacttcgatatatcgatatatggggaataataattgtacatagaaaaaggtaatggtgcatctgtatgtatgtatgtatgataatggctttcaatatgaatgattcgcaggcaacataaaaggggccc

SEQ ID NO: 31194 - DNA, 413 bp, Glycine max
tcccccgcattgtcaccggcaacatctccgtcactgtcaccatcactgtcaccattattgtcatcaacatcattatcatcacccccatcatcttcttctcctacaaatactaatgcatcttcggcctcacaatgcttcacctcttttatgttcattgttgcattatcggtcaccataatggtgtcattgttttaatcgataatgtgaaagatggatttataaatgttaaaagtacgtatataaacttgtgggccatggtggcatggaattttaatttatctcggttgtattcacctaattcgaagcaagtttgtccctgattgagctggttacgaggcagaggaggggcatgcatatgcttttcgtgtaatattaaatgtacgtgtatatcaatgatatttttttttccttgt

SEQ ID NO: 31195 - DNA, 429 bp, Glycine max
agtataagctgaaattgttgaacagaattgctactgtaaaagatgatggaactgtagaatttgaagttcctgtagatgttgaacctgaggctatttttgctcgatccaaacaagtaaatcatgttgttgatgattcgcttgatgcaacagactttcattacatcccgccattgaatatagtcatgcttattgttggtacacgaggagatgtgcaaccctttattgcaataggcaaacgcatgcaggactatgggcatcgtgttagattagcaacccattcaaattttaaggagtttgttttgacagctgggttggagttttatccattaggcggtgatccaaaagttcttgctggttatatggttaaaaataagggctttctgccatcgggaccttctgagatacctattcagcgaaatcaaatgaaag

SEQ ID NO: 31196 - DNA, 528 bp, Glycine max
gtgaatatgaaagccctagagtgtagagtagataagcgtatccagcaaaacagaaatggaagcaacgaacatagaattacaaattaaacggctccaattcctttctctctgcctctgaacaaatttcatttttcatttctcttacttacactacacagagacagggatacgcaatgataggatcttttattaccagggcacttgtgatggtttttggttatgccttcccagcctatgaatgctataaagcagttgaaaagaataggccagaaattgaacaacttcgcttttggtgccagtactggattttggtagctgttttgtcagtatgtgagcggattgctgatgctttcatatcatgggtcccaatgtatagtgaagctaagttggcatttgtcatatacttgtggtacccaaaaacaaagggaacaacatatgtgtatgattccttctttagaccatatgttgcaaaacatgagacagaaattgatcgcaacttgttggaactaaggacaagagcaggagata

SEQ ID NO: 31197 - DNA, 320 bp, Glycine max
agcaatgctccgcattaagttgtttcccaagagttaaagtgattcacacatcatccaaaattcatggacaaatatatatccccgagatcaattggctattgatgatattgtgtttggtagtaactatttgtttcagagacacaaagcatctgggtaatgcctcaggtttggcagttatcacagtgatgctggtgaccacttgtttgatgtcactggttattgtactttgctggcaccagaatgttctccttgcacttgggtttgttttcatatttggctacattgaggttctcttcttctctgcttctcttatcaagttc

SEQ ID NO: 31198 - DNA, 734 bp, Glycine max
  unsure (1)..(734): unsure at all n locations
tcattttgatagacgaagtgccaaggcagatgaaaatttgagattgataagatcatncccttcctgaggctgttgaagcatgtgttgatgctgcaggtcatgaatttgatctttcacgccagcaaactctcctaagggcagccagttatgggcaagccttttgtagttgactttggcagcaattttcaacgtgatcgtatccaagagatgtgtaaaattctgcgggtcttgaatgcagtgcgcagccctgagattggcgttcctcttagtattcagcaatacaagttgcttacaccatctgttctgattggtcgcctgattaatgctcaccaacatctgcttgcactgaaaatatcagaatatcttggaatgaatcaagaggtggtgataatgcactgggcatgttcaaagataactgcttcactggcaattcctgatgcgactcttctggagattctgctggataagttaaaactgtgcaaaggcatttcctatgcagcagttgctgctcatgcagacaaaaatggccgacgaaagttagctgccttgcttgttgaacacgtgcctcgttcatcgaaacacgttcctctcctgttaagcattggagaagaagatatagccttgataaaggcgaccgaatgtggtgatacagatcttgtttaccttgtactttttcatatttggcaaaagaggcaaccattggagttctttggcactatacaggcgagaccatt

SEQ ID NO: 31199 - DNA, 769 bp, Glycine max
tgagacgccaaatggaaagccaaagaataagcgtcctcttcctcaggaggatcctgtaattgatcctgttgctgctctagacaaaagcaggctgaggaaggtcactgaacgtgttatgccccccagagcaccaaaggaagatggaagagaatcactgttagaaatgataagatcgaagtcattcaacttgaggcctgctgcggttcaacgaccacccaggattcagggtccaaaaacgaacttgagggtcgctgccatcctggaaaaagcaaatgcaatccgccaggcattcgctggaagcgatgaagatgatgatgcagatagttggagtgattcttgatctgactatggaatgaaaagtactggagcgagtcattcttccctgtaatgaataggaaaactacgtgatacagtcatacaaaagattctttgtcctacactatgttcatagtatatgatggtatacttcagacagcatatgtttttttgctagtcctcccaattcacacatagatgcacgaacattggagcaggcatacagcgtagcatccattcagagcctttttcggaggtcaaactcacttcattcagactcaggctggctcaatatcaaacaagaccaacgaacaacctatcaacaatttttttttcctcttcatataagaacatgtatattcgtgttgtggttgtcaagtttttttgagttatcaattttgtaattcagtgatgtagtggttttttcataattgcctcatatatcatgtagctc

SEQ ID NO: 31200 - DNA, 272 bp, Glycine max
aaaagatgtagtatcatctgtagctactgttcgttctgatctctgtggtcctggagagtggatgcctatggagaaacttcatacggagctcttggagcaatatagcagtggttggcaccacaacagagtgaggaggtatcttacatcagaagattggtcctggtcctgaatccaaagggaagccttggtatggcttgcttatgctgttaaggaagtaccctgagcattttggcatcaacacaaggtccaagggccgtgtcaccctcgagttt

SEQ ID NO: 31201 - DNA, 383 bp, Glycine max
ttttaaccttcaacagaaagaactgtatgatcaggcagtgtctccaattgtgtatgaagtgcttgagggctataactgcactatttttgcgtatggacagaccgggacagggaagacatacaccatggaaggaggtgcaagaaagaagaatggcgaatttccgagtgatgctggtgtcatcccaagagctgtgaagcagatttttgatatattggaagctcagaatgctgagtataacatgaaagtaacgtttctagagctttacaatgaggaaataacagatcttttggcccctgaggagacttcgaaatttatagatgataagtctaggaaacctattgctctaatggaggacgggaagggggtgttttttgtcaggggct

SEQ ID NO: 31202 - DNA, 501 bp, Glycine max
tgattgcattaggagcgcaacctaccacttttggaattcacggagtctatgagcatgcaatttttcttcgtgaagtttaccatgcacaggaaattcgtcggaagttgctcctgaacttgatgatgtctgatgttccagggattgaagaagaggaaaaacaaaggctgttacactgtgtggttgtcggaggtggtcccactggagtggaattcagcggtgaacttagtgattttattgtcagagatgtccgtcagagatatgctcatgtgaaggactacatccacgttactttaattgaggccaatgagatattgtcttcctttgatgtccgactcaggcagtatgccaccaatcaattgacaaagtcaggagttcgacttgtccctggcattgtgaaagatgttgaagagaagaagattatcctaaatgatggtactgaggttccgtatgggttgctggtatggtctactggagttggtccatctgctattattcaatctt

SEQ ID NO: 31203 - DNA, 330 bp, Glycine max
gtttcagggtgagtttttaaaattttacagtgaagagaatgaaaattcagaatgggtagagttgacccctgatgccatcccatccacatttacatggtacaagacatattttgatgtccctggtggcatagatccggttgctctagacttcaaaagcatgggaaaaggtcaggcttgggtgaatggtcaacatataggaagatactggactcgggtttccccaaaaagtggatgtcaacaagtctgtgattatcgtggagcatataattccgacaagtgttcaacaaattgtggaaaaccaacccaaaccttgtacaatgtcccacgatc

SEQ ID NO: 31204 - DNA, 328 bp, Glycine max
gtgaattcccccaaaccgaaggcagtttgaatgtgtgatgagtatatattcttaaaaaataaagttcaccaaagaatgtgctaaagttggttttgtctgctatggagcaaaataatggcagatgcaagaagtcagtgttgctggcaatttagattttgtttctgaagaaggaatttaaaaaatgaaaattcagatcaatggaggcttgcctcatctaataggcttttctttcataagaccttagccttgaagtataattgttaacccatttctctgctttctgttatcagttagcaccaccatgttatgcacctccaattgtacttgt

SEQ ID NO: 31205 - DNA, 383 bp, Glycine max
gtgatagacaggccaggccatctaacatggttagttagctagccctctatatatgaatatagtatatgatttggttcacactccttctgtcccttttaactcctccatcaagcttctcaaatcttctgcatcaaactccagttcagtccttggagttggagaaggcatcaggaaacatggcaagcgaacaccgagttgggctgatcaatggggtgctggtggtattggtgccatggaagatgatgacacaatctctcaaaaggaaaccggaaagaaaaagaattcaggttctaagggtggtttcggcaaagtcaaagcaagtgcctcaaattgtgtcaaatggttaaaaagcctgtgcaagagaaagagtacatctaagtaaa

SEQ ID NO: 31206 - DNA, 481 bp, Glycine max
aaaacatctcgtcttattaatcatcatcatcaacatcaaagttcaattcattctactcattatttcttgttagtgactagacagtgtattaagaatgaatcatattccattatagaacatcagtcctattcattataatcttaaggaattgttaattatattggaccacttagactctagttaacatcgcagaatgtgtatcttttgatccttaaaattcccattttgaacagttattttgtttctgatcctcgaaaagctccaggatttgatttgtaataagaaatctagcaacttgttcatgggttaatgtgcattttaaatggagtttgtgccacatttatcttctgctatctcgattcgatgagtcttacctcttttttcttttggttgctcacatatttgatctctcctttctgggtggcttctgcttgcaggcaagttctactgacatcagaaatcatggtttgcattggactac

SEQ ID NO: 31207 - DNA, 276 bp, Glycine max
gggtactgttttcgattcgatcaactcactcacgcgcacgcctttcattccattccattccgatgcgatgacgacgacgaattccctcttcttctcccttgactggcacaatgaattctatcctacctatcatgatttctaccttctcccccttttcgctctcttcttcccttcccttcgcttctttctcgaccgattcatattcgagaaagtggcgagacggttgattttcggaaaggggcatgcgccgctggactaccattcagacgagagaag

SEQ ID NO: 31208 - DNA, 293 bp, Glycine max
tcgagtttttcattgggaaacacaacccatgaaatgggctatgcgactaagagttgttctacatcttgcacaagctctagagtactgcacaagcaaagggcgtgctctctatcatgacctcaatgcatatagagttctttttgatgaggatggtaatcctaggctttcgagttttggtcttatgaaaaatagcagggatgggaaaagttatagcacaaatttggcatttacccctccagagtatctcagaactgggagagtaacaccagaaagtgtaatatatagttttggca

SEQ ID NO: 31209 - DNA, 270 bp, Glycine max
tgctagttgtagccaagatgcaaagccatgttcttctcttatccggattcgtgacactgtggataaagaaagtagtggtgatagagtgctaaaccgtactgaaagacaaaatgagggtcatcgagttcttatggatttgggtggaactacttttctcataaagacacagttcaatttggccagaggcgtgttcttattagtgacaaaacgcccttgtactttcaacatgatgggcattcaagaacaatagttggaattcaagtccaatat

SEQ ID NO: 31210 - DNA, 374 bp, Glycine max
cttcactccgacattgctcgccttcacacccccacaaacacaaaccgttctgagacgtatttatagttatccccattgtcgttattttctttcttactccctctcaattaaacggtgttagggttagaagtaggattagggttagggttcctctttacccgcgtaattctaccttccttccaacaataacaacaataatgttcggctccatcaaccagatcgtctccgccgaagacaccgacggccccgtctccgaccaccacatccattacagttcccacaccatcgaagacgacggcgccgcctccgatcaccacatccattacagttcccacaccatcgaagaagacggcgccgcctccgaccaccacatc

SEQ ID NO: 31211 - DNA, 487 bp, Glycine max
tttttcgcgtccgcgcatggagatcaaccgccccttcccggcctcccccgccgacatccgccgcttctcactccgacgactacgtcgacttcctctcctccgtctcccccgagaccctcgccgattccgccttctctcgtcacctcaagcgcttcaacgtcggcgaggactgccccgtcttcgacggcctcttccccttctgccaggcctccgccggtggctcccttggcgccgccgtcaaactcaaccgcgctgacgccgacatcgccatcaattgggccggcggcctccatcatgccaagaagtctgaggcctctggattctgctacgtcaacgacattgtcctcggcatcctcgaacttctcaaggctcacaggcgtgtgctgtatgttgacattgatgttcaccatggtgatggtgttgaggaggccttttacaccactgatagagtgatgacagtgtctttccacaagtttggggacttttt

SEQ ID NO: 31212 - DNA, 523 bp, Glycine max
ggaacacgtcaaaagtactcatgaatttgaagttggggaaatggaaggaacaaaagtgattggtgaagaacatcacaagcttgatgagataaacaagaaggctgaaacagagttgactgtgaatggaaatcatgggagctgaactggtgaggtcaaaagcctggagcagggaatagattaataagttctcggcatctctcctctcattctgacccctttagatctgtgtttgaagatgactttagtttttcttactgttatttatctgattgtttcttgaaacaatatacaattgtagaacatagccctataaggtaccattcatgggtgtattggacatacgtgtagcttctagttgctattgtaacattatgttgtgagatatgtaatatggacatgtaatcatatgtaaggcagtgatgccaagtagtttggtcctgtgcgtgctactgtagatatgaatgtctcatcactgttatggttattgcaagttacctgaatggaaataatttgggttctccac

SEQ ID NO: 31213 - DNA, 418 bp, Glycine max
ccgcaaggtcgttccgctcgcgtcgttgctcgtatgtgcatttactcactccgatcacactccactccgcataacgcaattttcaattttcacaaccaccatttaacacttcacaaacttcaccttgatctaactcctcactcattattattcgcgttttcaattttcaattctctttctccccctgcctcaacatgaagctgctcattgctctgcttctggtgttgtgcgcgccgttttcatcttcttccaaacccaaagacccgttcctcggaatctcccccgaagatgacaagtattacaaggcttccgatgtaataaggtgtaaagatggatccggaaaattcaccaaggcgcagctcaacgacgatttctgtgattgcgctgatggcaccgatgaacctggcacatcggcatg

SEQ ID NO: 31214 - DNA, 631 bp, Glycine max
caaaaataatggtaatttatatgattcttcacttttagctaataataacatggagcttttctctgagcctgggcatgctaaggtgtttggtcatgttcgtaagctttcaaatgagagtgttgaaagcgatggaagctcaatacgaggtagtgacatgtctaattttgggattccaagttcatctggtgatggctctcatgaccttcctggatctgctttggtttcaagagagacagatattatgggccacacaaagtcgaagtctactggtgatactcaattagtccttccactagatcaacgcaataaattgaacaggattctttcaaccatgcagcgaacgctaggcactgcaaaaactgatatggaggaccttatagttagattaaatcaagaaatagctgcaaaggattttctcgcaacaaagctcaaggatttggaagtagaacttgaaactaccaaacagaaaaataaggagaacttgcagcaggctattctaattgagagagaaaggtttacccaaatgcagtgggatatggaggaacttagaagaaaatcattggaaatggagatgaaattaaagtctgaatcggggagaaattcttatcaggatttgactaaggaatcaatt

SEQ ID NO: 31215 - DNA, 564 bp, Glycine max
gaaagggaaacttcccaaagatgctaggcaaaagctacttaactggtgggaattacattacaaatggccatatccttcggaatcagagaaggtggcattggctgaatcaactggtttggaccaaaagcaaataaataactggttcataaaccagaggaagaggcattggaaaccatctgaagacatgcaatttatggtgatggatggcctgcatccgcagagtgcaactctctatatggatggtcactacatggcagatggtcactaccgtctaggaccatgacaaaagacaaggccaccttataaattattattatatatatttttaattggaatttaaatgcaaggtatgtgtttcttattaacaaagagattgtgcccaaactggataacagtcaacgctctagctactagtttcaatattatcaagcatataccgtgaacattaattggttgtgcttgtgcagtgtgagtacttgagtagtttgccacagtgatgttgtacgttttattaaacaatgacggttgcttattatattttcataattagtagtattggtagag

SEQ ID NO: 31216 - DNA, 378 bp, Glycine max
cttacttacacgagttgaattgactcactaggcaccccgagtcgagagttataactcgttcgctctttccttacactcacactctgtctctctttcttcttcaaacttccctcgtcatgattgccaattctctttactggtaaccagatcctccaaaaatgatgaatcacgattccaacaacgaacaacatcagattctccatgtctcgcaggacgacgagataatggaatcgctaatcctcgatgacgacggctcttccgttcagcagcaccaccgtcctacgtcgccgcagagccctaattcccctttcaactcgttcctcgaccctccctcctacgccgacgcgatcttcacctccttcgattccaacggtcacg

SEQ ID NO: 31217 - DNA, 690 bp, Glycine max
gcagaggagaccttaatcatttggtgttcacttgcttcaagattgggtctgtgggcattgaaagctgaactggaagatttatgctttgctgttctgcagcctcaaatatttcaaaagatgcgagctgatcttgcttccatgtggagtcctactagcagaacaggaaacccgagaagattatcaataaaaggcaacttgatacatttggacgagaacagttcaactgctttctgcaatggatccttgacattcaatgaggatgtaaataggaaggatcttttggaagctgtagtcccatttgatatattgttggatcggagaaaacgggctaactatctcagtagtattgggaataatctagagacatgcaaaaaaccaaaggttgttcaagacgctgggctagctttggcaacaatggtaatttgcgaggaagcacttgagcgagaaatgattatatcatcttcttatgttccaggaatggaaattacattatcaagccccttaaaaagcctttatagtttatacagcaagatgaaacgaaaggatgtaagcattgataaagtatatgatgcacgtgcattaagagtagttgtgggagacaagaatggaactttacacggtcctgcagttcggtgttgatatagtcttctcgacattgtacacaggctttggactcccatagatggtgaa

SEQ ID NO: 31218 - DNA, 490 bp, Glycine max
cagagagagagagagagagagagccaccctttcttacaacaaacaacaactcattcttcaaggcttcaacaacagaacctttcatagtttttcactccttctccctgtgtcggtgtactcttcttctgggggcattcgttttttgcttcttcagctccaacttcaaacgcgcttttggtagaagaagcttcaccgggatcactggggtgtgtgtgagagagagggattacggattagtgagttttttgtcactaagttagagctacgtcgtttcatgattgtgggctggtagcagtttggtattgagattgaaagtggtggggctttatttggattctgtgcttgttgaaggagctgggaattgtagtagctgttgcctcagaatgcagcaagatcaaagaaaaaagggttcaatggagatggaatttttctccgattatggtgatgtcagcaggtacaaaattcaagaggtcattggaaaaggaagcta

SEQ ID NO: 31219 - DNA, 899 bp, Glycine max
atgaggcttttcccctaacaaagaaatggtggccctcatgggatattaggaccaagcttaattgtttgcaaacatgtattggcagtgcaaaactaacagaaagaattaggaaagctgtagaaatctatgatgaagatccacctgaaagtgtacagaagtatgttcttcatcagtgtaggaaaatgaaatttgtttcgagtgggaagatataaggttgctccattagagcctgatgaagtagaaacgctgttgggcttcccaaggaaccacaccagaggaggtgggataagtaggactgacagatacaagtcacttggtaattcattccaggttgacactgtggcataccacttgtcagttctgaaggagatgtatcctaatggtatcaatcttctttctctcttttctggaattggtggggcggaggtagctcttcatcggctcggcatccctctcaagaatgttgtgtctgttgaaaaatcggaagtgaataggaatattgttagaagttggtgggagcaaacaaaccagaaaggtaatctatatgatatggatgatgtaagggagctagacggtgatcgcttggaacagctgatgagcacatttggtggttttgatctaattgttggtggcagtccatgtaataacctggctggtagcaacagggtcagccgggatggactggagggaaaagaatcttctctcttctttgattattttaggattctagacttggtaaaaaatatgtcggccaaatatcgatgatttttgtcccaagaagcctctttctccggttttgtatttaatccaaacaattaggatcttcgtatataaacctgaaccattagagccagatacttctcattccatttttgttgccaaagaaaggcaacgttttc

SEQ ID NO: 31220 - DNA, 520 bp, Glycine max
ttgacgcgtgggaaaaaagaaaaacaatctctagaggaaaacactatgaagaagatttctgagatggaaaatgccttgtctaaagcgagtgcacaggtagaaagaaccaatgctgatgtccggaaacttgaggtggaaaatgctgcactgaggaaagagatggaggttgctaagttacaagcggctgagtcagccacaagctgtcaagaggtctcaaggagggaaaagaagacccaaatgaagtttcaatcatgggagaagcagaaatccttgtttcaggaagagctaatgaatgaaaaacacaaattagctcagttgcagcaagaattagagcaagctaaagtgcaacagcagcaagtcgaggctaggtggcagcaagcagcaaaggcaaaagaaggactcctcctgcaggccagttctataagaaaagaaagggaacaaattgaggagtcagcaaaatcaaaggaggatatgatcaaactgaaagcagaggaaaatctacacaggtacagagatgaca

SEQ ID NO: 31221 - DNA, 630 bp, Glycine max
  unsure (1)..(630): unsure at all n locations
gaacaagacaagtgaaggagcggtttatcgtactgggctgggcagcattcgtttctactcctcattgaaaagataacatggctttcacaggttctggttccgggcagccacaattcatttccagcactggcaaccgaagcttttccaatgcgccactcattgagaactccgatactaatcaaattgttgtgcctgataggagaagctggaaaaatttatttgcatacatggggcctgggtttcttgtttccattgcatatatagatccaggaaacttcgagacggatcttcagtctggggcacaatataaatatgagttactttggatcatattgttggcatcatgtgctgctcttgtaattcaatcaatggcagccaatcttggggtggtcactggaaaacacttagcagagcactgtagagctgaatatccccgggtgcccaacttcatcctttggattattgctgaaattgccatagtgncctgtgacattcctgaagtaattgggacagcctttgcattgaacatgctcttcaacatacctgtttggattggtgttcttctgacaggactcagcacattgatgctcttagcattgcagcaatatggggttaggaaactcgaattct

SEQ ID NO: 31222 - DNA, 482 bp, Glycine max
ttcgtctcgagggggatcttaatgttccagctggtcatagacattccgtgctaaaattggaagaggggggggcaacaccaaccgagggatgtatcctgcccatttaggagtggttgctagttataaaggccagggaagaatagctgactatggttatcgaaatccaaagtgggtcgagggagaactgctccaacttaatggcaagggcatgggaccatacatgaaaggtgcagatcttggtttcctttcatgtcgtgcctgagcaaagttttctcgtcttgttccaccggttgaaactacccgagtgagccatggttgatggtaccctaatcctgtctaatttacttatcatctgatgcgaggaagaacatgaaggattctgatactagcgtgttgagattactgttaccttttttttttgagtggtagttttacccaacaggcaggcacttgatatattattagcccttctatgagttcat

SEQ ID NO: 31223 - DNA, 451 bp, Glycine max
gtataggtactgtctttcataaggacgctcatttatggaccaatattaaggaagtgagcgcacgtgaaatggcagttgcagcacgtgagggttctagacggcttcagatcctcaaatctgaagataggaggaaaactttgctggcaattgctgatgcattggagaaaaatgaaagtatgataaggcatgagaatgaggctgatgttgctgatgctgtggtagctggatatgaaaaatccttgatatcacgtttaaccctgaagcaagagaagatctctagtcttgcaaagtctgtgcgcttgctggcagatatgcaagaaccaattggtcaaattttaaaaaggaccgagctagtagataaactcatcctggagaagacatcatgtcctttgggtgtccttctggttatatttgagtctcgacctgatgcccttgttcagatagctgcatt

SEQ ID NO: 31224 - DNA, 244 bp, Glycine max
ccttgtctccttgagctgcaaaaaaaatttcaccatattttcatattcacatactttgttgatgatcaccatgctagctatgcttcttgtcggatgattttcataaggccttttgttttgcatggctggtgatacagcatcttccttctccacttgcatggccattttcttctctttgctcctactttctcacttcactatggccatgctagaacacaataacttttctccttcaacatctaac

SEQ ID NO: 31225 - DNA, 388 bp, Glycine max
gcagatcgtcgaagttttaggttgtaattgcgctttatgacggctattgctgctgtattcttttacttaattggaaagccacttcgatgattggtagctgcaagaaaggaaagccataacttggagtgccccgagtcgatttatgtttttcaactcaatctgcctgtgcggtgtgttggctcatgtctatgaagcatggatacagatatggaccctggacacccatggacatgtacacgcacagatctcctgtcactcaggcagcaatcaccttggaccttagaaagttggatcttcaatattagcttttgctgggatagaagcagaccgtggattcaaggccacaagtgccttagacatgcaaccttcattatgctcattgtattct

SEQ ID NO: 31226 - DNA, 301 bp, Glycine max
cacaccattaaccaccacctcttaaatatattttccataaatcaccaaaatttcccatttttttcacctccatcgtttcacccactgaatcacagtttctcttttcttttctttctaacaaaaatcgcttctgcccacacaaggattcagggattggtgaattacgatattttaattattgattggtagcatgttttggctagaatttggataattgcttttgattatcagaggcagaaggaaacaataccttgaaagtagatagatgtcgtcggcttcttctttgatggctgcttccagt

SEQ ID NO: 31227 - DNA, 264 bp, Glycine max
ggcacacagtgcattcatcaacttactttcacagatggtccagatttccaaaatacatttctctatagactgtgtaagcagaagaccttggaacattttaggaatattattctgctatcttccccccaggatggttatgtgccttaccattctgctagaattgaatcatgccacgctgcttcacgtggacacttcaaagaagggtaaactgttcctagggatgttgaatgactgtttggagcacatccgtgccaactcaatgca

SEQ ID NO: 31228 - DNA, 245 bp, Glycine max
ggagtatgagaaagcgtactccagcactaacttgctttgctcctcccagcagaaatggttctaataatccatcaccttgtattacggaaccttctatcaagcctgtgcaagacaagcaagaatataaacaccttgaagctccgagcccttctaacaataattcttcgttggatactaatgaaatcgaacagtcacacaaaaacaataatgttcccgctggagatgctaaaagtgagacaagattc

SEQ ID NO: 31229 - DNA, 293 bp, Glycine max
ggcccagttccattagttctgtcttgcggatcacgatcctcagttactagaaaatcagacatctctttccattggacctaatgacctatagggctacattgggattgtacaaatttaaatcttatcatccttcattcttccaatatgtactaccacaaacatgaaatgatcatcaacatagacacatgtattccaatcaatcaattacaatacaaaagataaaagtaaaaccgtgtctgtggccgcaaagtaaaaaaaaaataataataatggaaaaactgtctgcaaagcca

SEQ ID NO: 31230 - DNA, 349 bp, Glycine max
gttcatttctttctctatatttcctcccctttctcccccctccttgcacagcatcgaactaaagccttttgttatccattcttttctttctctcttccatgcagcctcctcgccgcaagaacaatgatcttcccaactcagaaacctcaacaacaatgaaaggctaaaggaacagcagcatcagcatctccattgttgtggtggtgttctccatattcctctttggggtcttcatgtacaacgaggacgttaagtcaatggccgagttcactttcttgaggcctaaggctcaagaaatccaagaagaaacggtttccaacaacaattcaagatctcaaccagagagaaa

SEQ ID NO: 31231 - DNA, 594 bp, Glycine max
cgacctctgctccttcgaccccacccaacgcgcctccacccgcgactccatcgcacgcgcctgccgccactggggcgccttccacgtcaccaaccacggcgtccccccttccctcctcgcctccctccgccgcgccggcctgtccttcttctccgacacccccatgccggacaagctccgctactcctgctccgccgccgccgcctccgagggctacggcagcaaaatgctcgcaacaacaacaacaacaacaacctccgatcaaaacggcgccgttcaggtcctcgattggagggattacttcgaccaccacacgctccccctctctcgccggaaccctacccggtggccggagtctccctccgattaccgtgagctggtggcgaggtacagcgacgagatgaatgttctggcgcaaaagttgctggctttgattacggagagtcttgggctgcgagcttcgtgcattgaagatgctgttggggagttttatcagaacattacgattagttattaccctccgtgccccgaaccggatcttactctcgggttgcaatcgcattctgatatgggagcaatcacgcttctgattca

SEQ ID NO: 31232 - DNA, 637 bp, Glycine max
ccaagctgaagttcaaaccagcttacaatccatatactgaacctagcatagagatttttagttatcatgaaggctttaaaaaatgggtagagataggaaactctggcatgttcagacctgaaatgttgcagacgatgggacttcctgaagatgtccaagttatagcttggggtctttcccttgaaaggccaacgatgatactatacgggatagataacatcagagatctctttggacacaaggtatttttaggggataactatgaagacggactcatctcgattttgaactgaataccaccatctggttattttggtcctttattgatgtgtttttttctctgtttttaaaacatacctttgatatttttcttgttttccgcaggtggatcttgggcttataaagaaaaatccagtatgtcgtcttggaattgactaaaatgattcatgtttgtttcttgtatttcttctcatttataaattataatttatttttgtctctaagatcaaacactacctgtagattgtaagttcagtttctatatgaagaattttgatacgggagaaaaaagctacgcccttgttattttggatatgttctgaaaaaaatattaatgggaagttaccaaatttcaatt

SEQ ID NO: 31233 - DNA, 464 bp, Glycine max
ccgaggcagaaccttctctttcacttgaatcaaacaaatggctaaggttgacctatgacatccaatctgatcaaagtggaaaacttgaatgcctatctgttattgcaaaaattggatcacacttggcaatctgctgcagagctgaaagccctgcttcactggatagtttacctctttggacattggaggatcatgtacaaactgttccaataaacgatccaatactcgtgttatctggtcagatagtccacccaagttgtcgacccaggcccacaggtggatctgcatcttggtgccgctggccctgcgctactgggagatgttttcttggtacctgtcacattggtctccaaaggacatgatgtctactcaggtgaattgaagatcaatcttgtggatctgaaggggggtggcttgttcagtccaagagactctgagccatatgctctggatagtcatcatgt

SEQ ID NO: 31234 - DNA, 249 bp, Glycine max
gaaaagcaaaaccgtctgttttggcatcagaggacgcaacaacaagagcaaggacaacaaagtcgaagatttagagaaactctcccatgtcaagcctaatcacaagggaaaaactaaaaggtgtgcttcaacaactcctgttggctgatgatgatggtggcatcaatgttcatggagccaacatagttgctagcaatgatgcaggagtagctgctgcggtgatcactgcagctcatatgtctttgatgt

SEQ ID NO: 31235 - DNA, 517 bp, Glycine max
ctgatacttggaatgaactcctatatgcagctctatcaatgtgaaggtaagtgtttcaaggagtgtggcaagacaccaatcgaccaagttctgaagttaccagggagtgaacgcttcttgccaccaaaatctgcacagactatttgattcttaagtcaaaaaacaacatttcggccgttgtaaatgctcattgctgtttccctgcaacttgaactttggttcttcaatttgaagccaccttagtcattcatattagctgacaacagctctttctgaagttccaggaggaccatcgagaatttttatacgagccttagtgtcttcggtaattttcctaataaactcacctttccggccaataatactgccaaccttttgcacaggaaccaacatcctaaaaacattctctccaggccaccctggccacttctttacttcacctcctttcaaatcctcctcaggtccccgcttttcctcagagccaaaattctcagtcacatctcctccaatattttgt

SEQ ID NO: 31236 - DNA, 731 bp, Glycine max
ggtaattggtccgaaggcattctgggggcgtcgaggaatcgccgtagggttcccatcagaagattcaatagatttcatccacctgatgatgataatgtatacagtatgcagcttagagtacttctgagctggagaagtgtttctaaccttcttcgtagtggtttccgtgaaagtctggaccaactaatacagtcatatgtggaaaggcaaggtcgtgcaccaattgactgggatttgcatcaaaagttaccaacaccaactcctgcatcgaaacttgattggttgagtttttggatgcactagacatcaattatgcaattgaatttgagccagaatatttggtggagtttgataatccagatattgatgagaaggaaccaattccactacgggatgcacttgagaaggcgaaaccattcttgatgtcatatgaggggattcaaagtcaggaagtgtgggagaaaacaatggaagagacaatggcgcgagttccattgttgaaaaagattgttgatcactacagtggacctgatagggtaactacaaagaagcgacaagaagaattagacagagttgctaaaactcttcctgaaagtgcaccatcttcagtagaacaatttactaatcgttctgttatttctcttcaggtttggaactgtaaatattgatattgtgttgggcataaaatgtcttttacttgggcagttgtttcaaacaaaaaaaaataaagc

SEQ ID NO: 31237 - DNA, 308 bp, Glycine max
gcattctaaaggattcctacacagggatataaaacctgacaactttctcatgggacttggtcggaaggcaaaccaggtttatataattgattttgggcttgcaaaacgatatagggactcctcaactaatcgccacatcccttacagggagaacaaaaacttaacagggactgcacgctatgctagttgcaatactcatcttgggattgagcaaagtcgacgggatgatttggagtcacttgggtatgtgcttttgtacttccttagaggaagccttccttggcaaaacctaaaggctgcaacaaaga

SEQ ID NO: 31238 - DNA, 226 bp, Glycine max
ctcacaacctcttcttctgcccagatgcaaccatgaatcctttaataacatgcatgaagaaacaagaggcaactcaatacaattagttatctaaataataatttctgctgttattgcctccattttcatgtaatcttactcgccaaacccatcattgtatacatatcacgaataaaacgtgggtggatttctcaataaaaaacaaaaaacagggcggcccccgatt

SEQ ID NO: 31239 - DNA, 507 bp, Glycine max
agtgcattagaaaatcattcctctcagtcaaagagtatcacccaggcagatgatttttttttcattactgcaagtgcaataactttagctgtgcggccattttatctgacaaactatgatgtagaagtgcctggcgcactggatgtcaaccatgctgctaagcagttttttgtttatcttctgactataccttggctagtgcaacatctcccacctgttcttctacctgctttaaagcacaaatctattttgtttccatgcttccggactctattgattttgaaagagaaagttttgatggagatgttggagttcgtcaaatcagaaatacttgtctctttcaaggctattccaccagttggttgggccctcactaacagtatatgcctagcaacagggaatgagaatgaatccttcaatcaaggtttagagtatgcattgtatgtccgtgttgttattactctagcagaggccctactggcttgtcttgataatattggatgggtc

SEQ ID NO: 31240 - DNA, 436 bp, Glycine max
ggcgcactccaagtcacaatggagcatttcaacaaagccaaagccgtgaagctccgcagccacctcggcaagtacctcatcgccgacgaggacaaactccgtcaaagcaaacgaggctcaacaagaaaggcaatatgggaaattgaactaataaacggaaagaaccaccacgtgcggctgaaaagctccaacggccgttacctaacggcgacggacgcgccgtttctcttaggcatgacggggaacaaggtggtgctagcgaatttcgacaagggcacggattggaagttcgagtgggaacccataacggaggggttccacgtgaagctgagaagctggtgcgggaagtacctcagaggtaacggcggcacggtgccatggagaaactctcgttacgcacgatgaccctgctagctccgttactcacacttggatc

SEQ ID NO: 31241 - DNA, 408 bp, Glycine max
tcgcccacgcgtccgcggacgcgtgggttcgtgttttagcaacggctgatccgggaagcttcaacaacagtgtagcagaacaacaggctgttctggaaactgtggccagagtcacaccaaacaagaatgacacgaaagatgaaaaatcatttcaactacatcatgtattcaatagagctgaggaaaccccgatgttgatagatcgaaaggacaatgtcttcatcatttctaactttaaatccaagtacccggtgctccagctagatttacggtcgtttccggatatcttttagctggctccatagttggacctggtggctttaacttcatcagcgaaatggtgcaagtggaaacagttgcacaatttggtgtaatattccttttgtttgcattgggcttggagttctc

SEQ ID NO: 31242 - DNA, 459 bp, Glycine max
cgttgaaatgtttgccattttggttcttatggctctattcaccaccttcattacaaccccaatagtgttgtccatctataaaaacactaatgacatatcctttcatcaaaccctgagaaaactaggtgaccttgacactaatgataaagccactaacgagtttcgcgtcttggcgtgtgtgcatggccccaacaacgctccttccatcattaacttgattgagtcaattcgtagcatccaaaaatcctccatcaaactcttcatcatgcaccttgttgagctcacagaacgctcttcatcaatcatcttggctcagaacactgataataagagtggctctagccatgttgagtggctagagcaactttatagggccttccaagcccatagtcaattgggccaagtttcagttcagtccaagaccactatctcttcgttggccactatgcatgatgacat

SEQ ID NO: 31243 - DNA, 318 bp, Glycine max
tttccttcgcgtccgcccacgcgtccgcccacgcgtccgctcagccgtcactctctctctccctcgtttgttccttcctcctcagtcttggtattgtgtctgcaacttacgagacagccctttttgtgattcgaatctcttttaagctttaacctcttcaattgttaccgttccatcacaaccccgtgcttaataagccatttcacccaaatccggatcttattagatcaataaattcagatctgtttcttttaatgtgaaaaaagccccaatccttttcattatttttggatatatttcttttttacttttctatta

SEQ ID NO: 31244 - DNA, 1241 bp, Glycine max
cggccatccaagctgaatacatctggattgacggcgatggtggtctccgatgtaagaccatgaccatcgagaagggcaagccctcctccgtctccgagctcaaggagtggaactttgacggttcctccaccaaccaggccccgggagagaactctgacgtctacctccgccccgtcgccatgttcaaggacccgttccgtggcggtgacaacatcctcgtcctctgcgagtgctacgacaacgacggtaccgtcaacaagtccaactaccgagcgcacgccaagaaggtcatggactctgccaaggagcacgagccgtggttcggtctcgagcaggagtacaccctcttcgatgccgacggccaagtctacggatggcccaagatgggtttcccgggaccccagggcccgtactactgcggtgtcggtgccggcaaggtctttgcccgtgatttcatcgaggcccactaccgagcgtgcatgtacgccggcatcaagatctccggtatcaacgccgaggttatgcctttcccagtgggagttccaagtcggcccctgcgagggtatcgagatgggcgaccacctctggatggcccgattcctgctcctccgtatcggagaggagtggggaatcaagccgtccctccaccccaagcccctcaagggcgactggaacggtgccggatgccactccaacttctcgaccaaggccatgcgaacgccgggcaagggtatggctgcgatcgaggacgcgatcaagaagctcgagaagaagcacctcgagcacattgccgtctacggagaggacaacgaccagcgtcttaccggcaagcacgagacggcgagcatgacctcgttctcggctggtgttgccaaccgaggtgcctcgatccgaattccccgacacgttggcgagcagggctacggctacctcgaggaccgacgaccggcttccaacgtcgacccataccgagtcaccgccatcctcgtcgagaccaccctgctcaattaagcgggtgcggtgttgccgaggggagtttgtgaagcgtgagggtggtgggcgtcggagaaggcggaaggggagagaggagaggacggagagaatgtagggactggtctaatcaacacatgtgcaagacccacatattctacacccccgagatccatagttgattcctaacaatccatcatgttcatactttttcttatcgttgtccaggggatgaatgcctaccagagtgt

SEQ ID NO: 31245 - DNA, 285 bp, Glycine max
ctcgcacgttcatcctttaccgacaaacactttcccttttctcggaactttttattttgtaaagcccaattttcgcctttcctttcccatttcaaccacacgcactcaaatcccttgtaatgtgtctgtctgggtggtaattttggctgaaattgggatctctctctctctcgttggcgttgtcggatctctaatcaaatcctccaatccaaatgcatggttacagtcgcctgggcggacagcgcggtcgccaccgtcgtcgccgcggttccggcacggtcggag

SEQ ID NO: 31246 - DNA, 383 bp, Glycine max
gagaagagtatgacagtgaattgggtttgggaagcacagagatgagtactgttagtagtgatcatcatgagaggtggggaagtgtgagtgttagtagtgaacatgagagatgggaaagtaggtttcaggagcaagtgattgagttgaagacaaggtctcgtagacgtatgggacaaaagggtcagggtggatcatcgggtagtagcagaatgagggcaccaaacatgagagacaggaattgagtttcttcgagtcatgtatttttgttgaaatagatagattgattctttcatgtatttaactatatatgctctacaaagccaattcaattattctaccattctttatactatacaaagccaatcatttttatttcatgattt

SEQ ID NO: 31247 - DNA, 370 bp, Glycine max
gaggcctctctgttgggtgtgtctctgtttctctctcactgttgttgttgttgttgatccattgaagaggaacttgagaagcgagaagaaattgaatcctttggggtgaaatcggataacccaattggctgaaacctccaatgcggtgttgttggaggaggagaccctccttgaagaaggaacatcgcggatctgatgatggtggggacatgggtgatgaagatggtttcaggtggttgtacggttgttgtggggggcaacgatccggtggtggtgcggcagcagcatagacgacgatgcagcttcacttctcgcctagcatgagaagcatcacgatatcgagcaaaaatgggtttattgacttgatgaa

SEQ ID NO: 31248 - DNA, 510 bp, Glycine max
gagaacctaattttgattctggtccaccagaagatggatgggaatatcttaggcgtgtcaggtgggaggcacatcaaattccgaaagtgaaggtagcaaaacttgatagaggtaaacttaacaaggaacaaagtgcttacatgccccagattcctgatattgccaagtgtccagagcatctgctgccactgaaagagtgggaggatgcgtttcttgccgagttttctgcactgagaacgaatttctcatgccttgatggttcaagtgccatacattctggaaatcttcatgttcattcctcacaactagttgggaacaattgtggagaattttctagtgctatgagcagagatgtgttacttaataatcatttgagaattgggaagacaaatgatcaaccatctaactcgactgctgaaaataacgatagaacattgtctccagagaatcctgaagcaaaaagttcagccgatcaaacttgcagcagcagctcccccactctgccattgc

SEQ ID NO: 31249 - DNA, 273 bp, Glycine max
ttgattttgagaaggaacaagcagagtgaaggttggatctggtaaagggagaaaagtgtgcctgacggtgacaggtgttgtgattgcaattgtattgctaattgtgatactagcgttgacagtgttcaaagccaagcatcctgttaccatagtggactcaacgaagctagaggactttcacatgggcttggatacaccaaaactaagggtcgatttgaatgtgaccctgcacgtggatgtctcagtgaagaacccgaacaaggtgggattcaa

SEQ ID NO: 31250 - DNA, 255 bp, Glycine max
gcaatgcattgaaaatggttatgcccacttgtgccgttctctggcttccgttggcattggtagatcataatgttgagggaataagtaaatgttaggttcaagcgttgatgtgttcatctccaattcttcattcttcttgatcttgcatcaaagtagacaaccgtggatgatacaaaaaaaaggtgtgaccaagttgatttttaatttattcttacagtatgtacttaataagagaaaataacaaagttcagaggt

SEQ ID NO: 31251 - DNA, 546 bp, Glycine max
atggagtctgggatgtactgtgttggagatgttaacgggccaaattccatactctcacttagaatgtatgcaggcattgtttagaattggaagaggtgagcctcctcatgtgcctgagtctcttgcaagagaggcacgggagtttagtctgcagtgtctaaaagttgatccagatgaacgccccagtgctgctcaactcttaaaccatacctttgtccaaaggccactgcattcccagtcttctggttctgcatctccttatattagaaggggttaaacttgtcacctccaactgtgaaagataatgaagtcaaattggatgcacgtatcatacacaaggcttcagttgagtcgagggtggggttcaaatatagtgtcattcttatttaggggcgaatgttcatgcaaattctgaaataacagggggggaaagcagcaaaacctttcttaccggtctctggtggtggatcttttgttttttgttttttttttggttttacttttttttatatatatatcttttataatgagaagagcagccaaagc

SEQ ID NO: 31252 - DNA, 486 bp, Glycine max
ggtggaaagcttgaaggatgttatgtttgttttgcgaacggagacagtgaagatatggagagtagcactcccaatggctctgcttgcactgtttcagcttctcatggactcctcaacttccatctatgctggtcatattggagacattgaactctcttctatcggtgtttaccaaggtgtcatcgcgtgccatctatttttacttgctgtttggtatgtcatctgcactggcaacactttgtggccaagcttttggagcaggaaaaattcaatctacttgtatttatgttcaaagatcatggattatacttactgccacttgtataatcctcttgcctatttatgtatatgccactccaatcttaaagttgcttggccaagatgaaggaatagctgaagttgctggaagatattctgtacaagtaattccctacatgttttcttttgctgtagcttttcccatccagagatttcttcaggcccaga

SEQ ID NO: 31253 - DNA, 526 bp, Glycine max
gttgaaaatgcttacagattcaagcaaatcaatggtcgacgaagccctaacaataatgtcagttcttgccagccaccaagaggcaaaagttgccatagtaaaagccagcactataccagttttgatagatcttttgaggaccggattgcctcgcaataaagagaatgcagctgctattctacttgccttgtgcaagagggatgcagataatcttgcttgtataagtagacttggtgctctcatacctctctctgaacttgctcgaaatggcacagagagggccaaacggaaggctacttcattattggaacatattcataagttgcagcaactttgaatggtgtagttctgcaaagaactttaagtttcttctgttctctcattatttgatataattctccacactgcggtttgcaaactggtcatacgaggtgaaataagaaaatcagcctcattgattcagttattcttttcttggtttgttctttgttaaccccggtatgagcgtataaagaaatcaattgat

SEQ ID NO: 31254 - DNA, 334 bp, Glycine max
aattctcttcattgttgacttagtttggagacccttgcaacaagttcacaatttaaccacctgttacttgtgttgaaatttatttatgtagtaaatgtgggtcaagatgtctcaggtagtagaagagttttttgttgttcaataatgaaagtgacaagagaggttgggttttgtagtggtggagagatgggagtttatagaccccattactgtattttagtggtggtaggccacatattcaagatagtggtggtaggccacatattcaagatagtgttgcacgagcaattattgttgagcttactgaattacatggcttaattttatgaaagat

SEQ ID NO: 31255 - DNA, 252 bp, Glycine max
atgactctgaaaaggatggttttttgaagaggcttttaagagatagcaaaggtgatgatgagttcggtcagaagattcgtgatgcttttctcttccgtaagtcatctgagaaatatgacgaagattctgaaaaggacaatatcttaaaaaggctcttgagggatggtagaggggatgatctagaatctgaaaaggatggtttctttaggaggctcttgagagacagtaaagctgaggatgaggatttggcct

SEQ ID NO: 31256 - DNA, 342 bp, Glycine max
caacctctctatacgctaattaaggtttattacaatacaatagcatccattgtcggattctttttcctttcccaaaactaactcaaacttctatggaagcactctccttcatccccaaagactcttgctcacttctccttcgccctccttcttcttcctctgtcagaacagcgccgccacttgctttcttcaaaaccacccaacactctcactcgcaccttctccgtcttcgcgtttctgctctcccaaacaccgacgccgccgatgaacccaccaacgacttcaccttggcgtctcaacctctggaaaatttaagccattccgagaccgagagttccgaag

SEQ ID NO: 31257 - DNA, 361 bp, Glycine max
acgagcagtctcctacctccgccgccaacaaaggcgtcaagaagaaggtcccccgctccctccccaagctcaccgccacagcggaatcggcggtcaagtttgcggactgcgcgatctgcctcaccgagttcgccgccggagacgaaatccgagtgctgcctcagtgcggacatggcttccacgtcagctgcatcgacgcctggctcagatcgcattcctcctgtccgtcctgccgtcagattctggtggtttctcgctgcgacaaagtgcggcgggatcccggctccggcgagctccagctccgcgccgccgccgccggactccgaggccagaattaagggaagggagacgacgccaatag

SEQ ID NO: 31258 - DNA, 542 bp, Glycine max
ttaacgttctcctccaacggttccaccttctcctcctgcttgggacgacgttgagccaaggctggcacaaagcctctccatcaaggcacgccaagggtacatactcaaacccccgacaacctcggacagagtcatagtactcctcaacacgcagaacaacataagcgaatacaggcattggtctgtgaacaatgtctctttcacactccctcataccccttacctcatttccctcaaagagaacataaccggtgcgtttgaccccactccaccccctgatggctatgactttgcaaactatgacattttcagtgtggctagtaacgcgaatgcaacttctagcagtggcatttataggctcaagttcaacacaacggtggatattatacttcaaaacgccaacactatgaacaaaaacaatagcgagacacacccgtggcaccttcatgggcacgatttttgggttcttgggtatgggaagggaaagtttgacgtgaacaatgacaccaaaaagtataatttggagaaccccattatgaaga

SEQ ID NO: 31259 - DNA, 757 bp, Glycine max
atttcatgggggcaatttcttaatgggttaatttaacagaaagaatatcattttcttttgtcttgtgggctaagtctataatggaaaagctactttttcgtccttctttttacctcttttacgttgttttcctatcatttcttcttctctctatgttacagataagggctttcctcacattattcaactttagggaagtatcgagtgggatgtttcagtatgagagctaagagtttgataagtaagaagcagattagtacaagattaagaaaaatgataaagtgtatatgttcgagggagcagttaagagtggaggagttgagttactcatcagagtcactggcaacgagggactattcggcaagtggtggtttatcatctcgacctggtgaaatcgacccaaaggttgataataccaacattgaagaagcagagtcctctctccgtgaaagtggttatttgaactatgaggaagctagagccttgcttggaagacttgagtatcagaaaggcaatatcgaagctgcacttcatgtgtttgaaggaatagatattgctgctgtcattcccaagttgaaagtttctatatctagaagatgtgaacccaataaacgccgttcgcaaagtgatgcaatgcctcctatgtcaatgcacgctgttagtttacttcttagagctgtctttctcagggcaaaatcgtttcaggctcttggagggttttaagatgctgctcagtcatgcaaaactatattagaca

SEQ ID NO: 31260 - DNA, 429 bp, Glycine max
gataaactaagggatgagctttcctgtgctatttgtgtggagatatgctttgagccaagtaccactccttgtggtcacagcttctgtagaaaatgtctaagatctgctgcagacaagtgtggcaaaaagtgcccaaaatgcaggcagctaataagcaatggccgaccatgcactgtgaacacagttctctggaacacaatccagcttctgtttccacaagaagttgaagcaagaaaagaagccagtgccttgaatagtctccaacaagctcaaaatctgagtccagaatcagcattttttgctaatctaaggaatgacagacgacagccttttaggggggcatcaacaacaacatcatcaacacagcaggatgaggatgctgcattggctagaatgttgcagagacaaattgatgaacaaagaagcccg

SEQ ID NO: 31261 - DNA, 511 bp, Glycine max
agcaggagtccaagacgtagtcctagtccagaagacaggctgcctctgataagtgacagattaaaatccagacttggtccaagaagtgacgaaggactgcgagacagggggaggtcgaggtcgaggtcgaaatctaggagcaaaggctcttctcactccagatcccctgatgccacaccaccaaaccgatatgataaaagcacttctgtacctcgtagcaggtctagatccagctctgcatccggccaaaagggtttagtttcttatggagatgccagtcctgattctggctcaaggtagctaggtattatgctctcaagtcccagctggacctgaaattgctatccattatattacaagtctcaagaagagctaagtgttgcattagcttaacaacgcccgttctatcatgttacttttagtaagagccaaaacttgaatgatgcgtcgtaaattggatctgccgtttgtgtttaataaatatttgttaacagtaatttttttctttttg

SEQ ID NO: 31262 - DNA, 342 bp, Glycine max
ctcgagccgaatattccgcttgtgcaacctattaaacgacacatagatacaatactcaacatctcctcacaccttggcagtctttcatcacacccaaaactttctgaagaagaagaggctcctgtggtggtcaacatcccttgtgtgcgtgagcttcactcagttggggtctatttccaacccgtggaaggtggcaacatggccatcgatttcgacgaaaagaagggcatattttacctccctgtgctcaaattggatgtgaactcagaagtgataatgagaaaccttgtggctcatgaggccttgaccaaaccagattttctaatcttcacaaggtacact

SEQ ID NO: 31263 - DNA, 337 bp, Glycine max
atttgggtcaagctgcataccttatggaaaaccatgctgatgctggtaatgccttttattcttctgttccaagtggtgcattctggccaactttcctcattgctaacattgctgcattaattgcaagtcgggctatgacaacagccacattttcttgtatataacagtcagctgctcttggttgtttccctcgtcttaaaataattcatacctctcggaaattcatgggccagatctatatccctgtcataaactggtttctcttggctgtttctttggtgcttgtctgttctatatccagcattgatgagattggaaatgcatatggcattgctga

SEQ ID NO: 31264 - DNA, 323 bp, Glycine max
agttgctcccccattacaccaatggtccaccaaggaaatactccgacattaaatcgcaatgcggtcatggaagtatagttgctatggagcacgtctcagaagttcaaccacacagacgatgctgcagaggaacagtgattctgacgtcggcattctcatcggatttgtaggtggtcgtcgatggcgacattggaatctagaaggatcttctccgtcattggcaccagttgcaaaatgattgctccacgtgaccattgcctcgtcgtctcagacgagcaacgaagtgtggcgatagtgctctccagatccaaatcgtgttgcag

SEQ ID NO: 31265 - DNA, 617 bp, Glycine max
ccaatttcccactttctccgccgttctaccaccccgatccgttttccgatcaccggtactttgacggcgctggcgccggcgaagatttccaggatcaccggcgacccacctccagtggtatgagcagcaccgtagaatccttcagcggcccacgcgccgccgtgccggcgaaggcgccggtgattgtcaaccggagatatccccggacgccgcccgtcgttcccgaggactgccgcagcgactgcgactcgtcgtcatccgttgtggacgacggagacggcgacaacgtggcgtcgtctttccggcgagaaccgttgccgtttgatctaaacgtgttaccgttggacgatgctgacgtggcaaccgatgatctgttctgcaccgttctttgcctctgaagagaagaaattgaaaacggcgcgaaatgatgtatttggttcgttgaaggaaaggaattattaatttttttctatttttactctttattatccacttgaacagttttttatctttctctttttccccccttattttaactatgcggagaaaaatgaaaaagaaaaatatgattgatgatcagttatgaagattatggtaatatgatcttaatttctgtg

SEQ ID NO: 31266 - DNA, 419 bp, Glycine max
gaataatggtctatatgtggaaacataaaggggtcatcttctactttgaagtcaagtcatgtgcaccagattgttaaaagttgaagagattcacatggttcaaaatatgcatagaacacaggtgcatgcatgcttgccatatgaatcctgtcctgttatttacttaggagggtagatttttactgccacgtgtatttttgtagcttttgcattgtaaaattatttaagttgctcgaatcattactttttcttcttgttcttttttcctttttagaatagttaattgatatcttagcactgtgatgaatttaagcaaaaaaaactagttatcacccactactcctttcgggtggatggcttcagtgctttgccatttgtactttgatatgcctgtacttatcatcttgctatttctgctt

SEQ ID NO: 31267 - DNA, 540 bp, Glycine max
atctgcagatcagagaacaagattaatggtgtcaactgagaggttgaataagaccagtgatagagttaaggatagtaggagaacaatgttggaaacggaagagcttggtgtctcaattcttcaagatttgcattcacaacgacaatctctattgcatgcacataacacgctccatggagtggatgataacataggcaagagcaagaaaattttgaccaacatgtcaagaaggatgaacaagaacaaatgggttattggtggcattgttttggtcctggttatagctatcatcgtgatcctgtacttcaagttttctaaatagcctatgactgtcatttccttgtaatggccataaaggtcgctaagatacgaggatttactattgtttcccattgttccccccttctcttctgattatgatttgtgagtgttcggacaaagatggtgctgtgcagtgctgccagatgatttcatactgttgttggcttctttcaatgtatgtatctcatgatgggtttggcatgtaaaaaaaaaaataaa

SEQ ID NO: 31268 - DNA, 263 bp, Glycine max
tggttccttgcagaagaagatggagaacaacagcaggagtccgcgagagggttgcatggattttgcagttcacagccaagtgataaagattaaggaagaaattgagaaaataaagcacccttcacttcagctacacatggaggcgtgcccttctcagaagatgtcaaccgcctccgctctcgctcacccctcggatttgcagacagagagagagctatccttacttagatgttacaaacttacacacacatgtacatataaaa

SEQ ID NO: 31269 - DNA, 332 bp, Glycine max
gataaccctagcttaccttttcaactttcaaggtaccttctgctcctcttctgtttccgattaacatttcggttgttagggttttctgctatttttttttttatcgatcatcggacctgtcgagctatttgaattttgatctggattttttttttcgcgtctttgattttaccgtctatataattacgcaacctgggatccgttctgaaacttttgttgattatttggctttgtttcaaattatttgttgattgaaagcgatcctgatgttatgaggttatatatttaatttgtcagaacttggggcatgtattgtgtattgtacaggtaaa

SEQ ID NO: 31270 - DNA, 343 bp, Glycine max
ttaacttccaccttccattggaaatttgcaaaacttacagacacttgatttaaggtattgttgttttttgatgaaaataccaaacgtaatttggaagatggtgaacttgagacatctcctcctgtacactccatttgattctccagatagcagccatctacggttggatacattaaccaatctacaaaccctaccgcacattgaggctggaaactggataggagatggtggtttagcgaatatgatcaacctcaggcaattgggaatttgtgaattatcaggacaaatggtgaattctgtactttctactgtacaaggattacacaacctccagtcactgtca

SEQ ID NO: 31271 - DNA, 306 bp, Glycine max
ctcacgcgttcgtgttggcttacagacagcaggaccattttatgacttcgtaggggcaggactaactagtgtgaagatcaagggactgaacaatgggacaatagacttgtcttcttatgcctggacttacaagattggagtccaaggagaatatctaaggttataccagggaaatgggttgaataatgtgaactggacatctacttcagaaccaccaaaaatgcagccattgacatggtacaaggctattgtggatgctcctcctggggatgagccagatggatcggatatgttacatatgggaaa

SEQ ID NO: 31272 - DNA, 388 bp, Glycine max
  unsure (1)..(388): unsure at all n locations
cagaagcaaaggatggatctcagtaagaggcttggcttggagaataagcaagtcaagttctggtttcagaatcgacgaacccaaatgaagacccaactggaacgccatgagaacataatgcttaggcaggagaatgataagctcagagctgagaacagtttgatcaaggaagccatgtcaaatccagtgtgtaacaactgcggtggccctgcaattcctggccaaatttcatttgaggagcaccagattagaattgagaatgccagactaaaggatgaattgaaccgtatantgtgtcctagcaaacaagttccttggcaagccaatctcatcattgaccagtcccatggccctcacaacctcaaattctgggtcttgaacttggtat

SEQ ID NO: 31273 - DNA, 274 bp, Glycine max
ccaagggggaaaatgtcttccaaatacattttcatgtgcctcctagtaattctagggatggtactttttgcaaccacttccctagctgatcatcatttactttcaacagcagaatctcctatgtcagaagttgtccatcgttatagttacgatgatcatgattataattccaatcactattatgatcattatcataaccacaatcatcatcaccatcatcatcacaatcatcatcatgattttgatgatcacgatcataattgtggtgatgaca

SEQ ID NO: 31274 - DNA, 706 bp, Glycine max
tggatcgcttattgtatgggagatctgatgggccatcaattgattggaatacaagaatgaaaattgctatatgtgctgcacaaggtctaactttcttgcatgaagaagggccttttcaggcaatgtataatgagttctcaacagccaacatacagattgacaaagatttcagtgcaaagctttcaggatatggttgtgttggacatattcccgaggaagagatttcaagcagttcatctgctgttggaaacctatcaatggaaacactggagaaaggaatgctcacaccaaagagcaacgtatggagttttggaatttttcttctggagctactcactggaagaaagaatcttgatagccgtcaccccaaggaagagaggaatttagtcaagtggagccggcctttcttagccgataactaccgtctgtcgttgatcatggatcctcaactcaaaggccgctttccttctaaagcagcaagaacaatagctgatattgcacaaagatgccttcaaaaggagccatcagacagacctaccatgaggactgttgttgagcatctcaagataatacaggatttgaaatattcgtgccggttccctctgcaagaaccagcatcaaactctggaaaacatatgtcaagatcaccaagtctcaatggcatcatctgccctgcaccaagggtgagtttctcaccatcaccacc

SEQ ID NO: 31275 - DNA, 524 bp, Glycine max
atgagtaaccaacgcaccacaactctttctctctctatctatcaccattttctccctcctcatgaagaagctctaccataaagggacggttcacccgtcgccacccctcatctccgaccaactctccttcctcccggcggccatcctcacctctcgcggcggcgctctcacccgaggacagagaagtcctctcctacctcatctcctgctcctcctccgccacctccacctccaccttctccggcaacgcgcggcggaaaaccggcgcggaaaccgaacattccccttcattcagctgcagttgcttctgctgctacacgagttactgggttaggtgggacgagtcaccgaatcaccagctcatacacgagatcatcgacgcctacgaggattcgctttcgaaaaagggcaacaagggtaagaagaacggtaagggaaagaaagagaagaggaacaacaagaaagggtgtagtagcactactactagtagtaatcacacgcacgagcacgcgcattcgagcgag

SEQ ID NO: 31276 - DNA, 404 bp, Glycine max
ctagacttgggatcccagttgctggttatcaactgttacccaccatgtcctaaccctgagcttgttatgggccttcctgcacacacagaccatgggcttctgaccctcctaatgcaaaacgagcttggagggcttcaaattcaacacaatggcaagtggattcctgtccaccccttacccaactcctttctcatcaacactggggatcacatggagatactgaccaatgggaaatacaagagtgttgttcatcgagctgtagcgaacacgaaagccactaggatttccgttggtacagcacacggacccaagcttgacaccattgtggggcccgcaccagagcttgttggcgatgataatactgcttcataccgtgccatcaaatacagtgattacatcgagct

SEQ ID NO: 31277 - DNA, 328 bp, Glycine max
cctcgagccgattcggctcgagtctctcctttcctctcagactcatacgtagtacgaacaagaagtaaccatgtcccgtcatcgacgccaaccctcccaagcccttccgccggacctcttcgccgccgccgacctcactaagccctttgacttcacacaaatcatcaccgaagaaaccggaaccgccgctgccgcccaagcctcacgcattcagacccaccaagagatcaaagactctcctctcgccgccacttctccggcgaagaacaaggcgccgctggcaaccaaatcggcttgaactaccgtatgcatcatgagtctgctcctg

SEQ ID NO: 31278 - DNA, 459 bp, Glycine max
ttcctcgcgtccgcccacgcgtccgctcaatgtcctactggggctgtttttccatttctagctgctgttttacatctatgaacgtgactaaaaaagtaaaataagtttattgtgctctctcatgtttgagtacactgccctctctggtccagttgaaaatgaggatggggaagatattcctgaagaagaagccgtctgcagaatttgtttgattgaattgggagaaggttctgatacccttaaaatggagtgcagctgcaaaggtgaacttgcactggcacaccaagagtgtgcagttaaatggtttagcattaaaggcaacagaacatgcgatgtgtgcaagcaggaagttcagaaccttcccgtcactcttctacgagttctaaatggccagacactttacttgacaaggagtagaagccaacaatacagggtttggcaaaatgtccccattcttgt

SEQ ID NO: 31279 - DNA, 283 bp, Glycine max
aaaaaaaacacctaatctgatctgagttcctgacatgtccatcgagcttgattctgaatccattcccactcccacggcccaagcccaagcccaggagcgatccaactcccgctgcgccctgctattttcttcctacagctgcctcggcggccaacggcgtcgttcctcatggtgggagcgcgtccgctcccactcccactccgctccagcctcagccggtgaccggtggtggtcgcgtgggctcagggcgctgaagaagcttcgcgagtggtcggagatcgta

SEQ ID NO: 31280 - DNA, 512 bp, Glycine max
  unsure (1)..(512): unsure at all n locations
gtggtntcatatgcatttcagtttgctatcctactaccctctttttttttttagtagattaatatcatgatcaaattaagaacgttatataatataatgttgtgctttttggagtggcttgggttgctgttgtctgaatatctgattttgttgaattagacttgcttgtgttatgctactaagtgttgcagatccttttgtagcctgctgtgagtcaattactgagacttgtaactgtacaacatttgagagaattgaatagagcaccatggaatgccaattcatcattctcttatgtttagctgcaattagctgacacctaagttagttaatgttagctacctctttttagttagtcagttggccatttgggttgattgggatctgttctctcaaaacatgtgtataagtcaccgattgtaaaccacatgcaatcagactctgactattgaaactcttccctcttttattttaaaaaaaaaaaaaaaaaactcgagactagttctcctcgt

SEQ ID NO: 31281 - DNA, 418 bp, Glycine max
tttttgaggagttggtgagggagttgtttcctaaattggccaatcatctggattatctgggagtgcaggtggcatgggttactggaccatggttcctgtccatttttgtgaacatgcttccttgggaaaagtgttcttcgaggggggggatgtgcttctttttgaaggaaaccgagtcatgctctttagaactgcagttgctttaatggagctatatggtcctgcgttggtaacaacaaaggatgctggagatgcagttactttacttcagtcgttggctggctccacatttgatagcagtcagcttgtactgacagcttgcatgggttaccaaaatataaatgaaactcgtttgcagcagttgaggattaaacatcggccagctgtaatagcttccattgaagaaagatcaaaaggg

SEQ ID NO: 31282 - DNA, 442 bp, Glycine max
tcgtctctgcgtccggaagctcagcacacaaacctgaagagagtgacttaccttgtcttggatgaagctgatcgaatgctagacatgggttttgaacctcagatacggaaaattgtagcccagattcgaccagataggcaaacactattatggagtgctacatggccaagggaggttgagactctggcaaggcagtttctgcgcaacccatacaaggtaattattggctcaccatacctgaaggcaaatcaatccataaatcaagttgttgaagttttaacagacatggagaaatacaatagattaatcaggctgctgaaagaagtgatggacgggagccgaattctaatatttatggagacaaaaaagggatgtgatcaagttaccagacacatgagagtggatggatggccagcactattcatccatggtgataaaaacc

SEQ ID NO: 31283 - DNA, 271 bp, Glycine max
ttacgatgtgatcactcacttgaactccttccggcagtacaagaagagcagcagccccatgagcgctgttttcacggggcagcaagtgctgatgctcaacaatgaacaagtctcagagttgaaccaagacaagaatgctggggtttatgacatctatgtgaagctctacttcaggattaggttcaggcttggggacgtcatatccaatgactacaagcccaaggtcaaatgtcacctcaaggtcccttttagtaaaaatggcacctttact

SEQ ID NO: 31284 - DNA, 954 bp, Glycine max
  unsure (1)..(954): unsure at all n locations
acgagctgaggtgttcgacaatattatgaaaactgatggctggaagggattgtttaggggtaattttgttaatgtcattcgggttgcgcctagcaaggccattgagctatttgcttttgatacagtaaacaagaacctatccccaaagcctggggagcagtccaaaatcccaattcctgcctcattgattgcangtgcctgtgctggagtcagttccactatatgtacatatccacttgaattagtcaagactcgactaactgtccagagcgatgtttatcaatggtctgcgtcatgcattcgtgaaaataattcgaggagaggggtcctgctcaactttatagaggcctcgcagctagtcttattggagttgtcccatatgctgctaccaattactatgcctacgacactttaaggaaagcataccagaaattttctaaacaaaagaaggtcggcaacattgaaacccttttgattggttcagcagctggtgctttttcaagtagtgcaacttttccacttgaggtggctcgcaagcagatgcaacttggagctctcagtggaaggcaggtttacaaggatgtgtttcatgcccttgcatgcatatttgaacaagaagggatccatggtttatatagagggctggcacctagttgcatgaagttggtaccagctgctggaatctctttcatgtgatccaaggcatgcaagaggatattgctaaaaaacgatgaggaggattaggacgagtcaaagaagaaaatactttgtttcggtttagtcaagaaacagaactgcatactatgtttatgcataatcgaataacttattttggatttctcttatattacctcaaatcacatttataagcaattgagaatggaatattggttttgtcctttttatgttaagcattttggttttgtctnnnnnnnnnnnnnnnnnnnnnnnnnn

SEQ ID NO: 31285 - DNA, 361 bp, Glycine max
cggctcgagaagatgaagagggtgttgccacgcaactggaagcaacaattcgtagtgatgatgggaacacacaacaggggaaggtgcagtttcctacggtttttatagggggtaagtggtttggaggattggataggatcatggctactcatatctctggggaattggttcctatcctcaaaaaagctggggctttatggctatgatgacttgatcttgatacccctttgttattctttagttttgtgacattatattatattgctttttttttaatctaatttttcatttttattccttgatagctagttattagcttgaccgttatatgttgtctgattaatcttcttctttgtaattt

SEQ ID NO: 31286 - DNA, 410 bp, Glycine max
aaaaggtctatgtccgatcatgcctgaagaggttggcattctccttcgagtaatgggttatcctgccaaaacaatcatttatctggctggctctgaattatttggtggtcaacgtgctttaattcctttgcgatccatgttcatcaatactatggatcgcacttccttgtgcagtgagaaagagttttctgacttggttggacctgaaacacctcttcctgtaaatagttttcgaccacctcctgcaaaaagtgagaatgaactcaaagaagaatggaagaaggctggtcctcggcctcggccccttcccccacctccaggtagaccaatttaccagcatgaaaaagaaggttggtatgcttggatcactgagacccctacagaacctgatccttcccctatggatctga

SEQ ID NO: 31287 - DNA, 780 bp, Glycine max
ctgacgcgtggggaagatcaagcctgtccccaaaggtggcggtgtgttagatcttgaatctggagaagaaaaaggtttctctttttccccaatggtgctcgtgcagatccccatgtgcaatgagaaagaggtttatcagcaatcgattgcggcggtatgtaatttggattggccgaaggggaagttgttgattcaggttttggatgattcagatgacccagcgacgcagtcgttgataaaggaggaggtgcaaaaatggcagcaagagggtgccaatattttgtaccggcatcgcgtgattagagatgggtacaaggctgggaatttgaaatccgccatgaattgtagctacgttaaagactacgagtttgttgcaatttttgatgcagattttcagcctaccccggattttctcaagaaaaccgttcctcattttaaggataatgatgatttggggcttgttcaagcgagatggtcatttgtaaacagggatgagaacctgctaacgaggttgcagaacattaacctgtcttttcattttgaggtggagcagcaagtcaatgggattttcattaactttttcgggttcaatggaaccgccggtgtgtggaggatcaagactttggaggatgcccctggttggttggagaggactactgttgaggacatggacattgccgtccgagctcatcttcacggttggaagttcattttcctcaacgatgttgagtgccaatgcgagctaccagaatcttatgaagcttacaggaaacagcagca

SEQ ID NO: 31288 - DNA, 432 bp, Glycine max
ctcgggccgattcggctcgaggcatcgccatgttcctgaaattgaacagggacttgctgatgcttcaggttcaaaagtaactgttagttttacaccacacctaattccaatgagccgtggtatgcaatcaactatttatgtggaaatggctccaggagtgagaattgaggacctgtaccagcaactgaagctctcatatgaggacgaagaatttgttgttgtgttggaaaatggagccattcctcgaactcacagcgttaaagggactaattactgtttaatcaatgtttttccagaccgaattcctggcagagcaatcattatatgtgttattgataattcagtgaagggagcttgaggacaagctttacaaaaccttaatttgttaatgggatttccagaaaatttgggacttcattacctgcctctttt

SEQ ID NO: 31289 - DNA, 619 bp, Glycine max
gttggatctcatgtatcttacctggactgaagcctcagcgcatccagatgccccaatggactggaatgctgtttttgtgtcggataaaagcctgatttttggggtggagatgttcaaaataattggtcgggtattgggttttttcaccgtctgtgatgtgtctgatatggcaaactggaaccatatttcaagggatcatgttactcatgagctgcacgtttcttcgtgcttgaccaaatctgtggcagtgttacacctttgaaatcctttgtgcgtgtatgctaaacaacagaatcttaggtcttccctctatgttttgaggtacaacatgaccggtaagtcctgctgtatatttgctgcatataattgtaatgggcaaatcttctgaacacgattctcagtttctgtgcttctcatgtaccttttatttaattcatttctcaccaatcataaaagttgaattccacaccgactttgcacttatattaggtttttgtattataactagtagcactaatcagcctccttgtgtatttggcatatggctatacgtgtatgcaatacaagtgacattgtctcaattctgaagaagacactcccagaggcagggaattggctc

SEQ ID NO: 31290 - DNA, 429 bp, Glycine max
tttgttgcgtgggcggacgcgtgggcggacgcgtgggcaatatttgcaaattaattggcatgacttgaaatttgccatatctttgttacccattacaaaatagttccatttttcattttcaaattaatatatgaagcgaaactgctatttggatcttcgtcttcagtcttcgtctcctcatccctatcgttcaatgaataggacgttgaacatacacaataaacttgtagctattcttcataatggacgccaatgcatttttgacacggcagaacttcaggcaagagtgataatatggttagcaagtcgagaaatggagggaagcacaggcttgcattctgaaaccttattaatacatgtctcgcgaggcctttccataaagaaatcacttcaaaatttccttcagaggagaatcagaaagaaaaggtc

SEQ ID NO: 31291 - DNA, 291 bp, Glycine max
gcttcatggagtgggagttttaatgattcatttacccctcaaaaaatgggcaatattaagcctttaggggaagctttgggcatgcccccgtcaagattttcgcctgatgaatctttaatgcataaacctgtgaaaagtagcagttatggagaagatcttcacgaggttgaattttgagcagatgctcaagctgtaaatatcaaattttgtttttgatcatcataattgtttagacggtccctgcttctgcagcatttctctggatgtacggaacagtggtacacatcagat

SEQ ID NO: 31292 - DNA, 411 bp, Glycine max
catcaccacgttctataaaaagcttattcccgaatccagtttctgctccatttttgttttcttcaagtaacaaaaatcgttttcgcctgaaaaaaagtccctgcgatcaactccggcgaactctgccttcgccggtcagatcgtcgggattgtgaatgttttcttgcgtgaagtctcataattaaaccgcaatttgtactgagtgacacctcactgccaaaagaggccgaaagaatggttcccttttccaacatactggggcacgaaaagtgtgaaagctacttaatttttggcggagaaactacccttggagataattttcgggcatttttttacttcctttgccttgcttattgttttatcggattatcggctataactgctcgcttttttcaatcgatggaaaatgtg

SEQ ID NO: 31293 - DNA, 307 bp, Glycine max
atcggttgggaggctgaggcaggtggtggatgctatggccgttgagatgcacgctgggttggcatcagaaggtggttccaagctcaaaatgcttctcacatttgttcataatctccctaatgggactgagaaaggaacatattatgcactagatcttgggggtactaattttcgggttttgcgggttcatttgcatggtcaacaatcgtctgttttggaacatgaagtagagcgacagcccattcctcaacatctaatgaccagcacaagtgaggatctctttgatttccttgcttcttcattaaag

SEQ ID NO: 31294 - DNA, 363 bp, Glycine max
gccccattgtggtgagtcaaatagaaccgttatagagcctcgatcatgtccgttttggtcgatgcggcgcgtggcttgtgactttcttctttaagctgccacgactaatataaaaagacaacagtcaacacaaatattttgtattttcttctttccttctttttcatttttaacttaggattgtgtcttgttagagtgaaaaaggttggacttgtaatccgttgttgtacttttttttaataagttttttttttcttgggtttaatttagattcaccttttatttatagacagacttttaggggtctacgtctatctatacttataacattataggagaaataataatttgtgatatttattt

SEQ ID NO: 31295 - DNA, 569 bp, Glycine max
tgcattcagaaataaggttgaagaggagcctgctggaagatgataaatactgtctttcattttccggcgatcatttttgtgttccgggatggggtctgctgatatcttgtgtttacaggaggttgatagatttcatgagttggaagaggagttgaagcctaagggatatagcggcatctggaagatgcgtacaggtaatccagttgatggctgtgcaatcttttggcgtaactcaaggttcaaactgttatacgaagaatgcattgagtttaataagctgggactcagggataatgttgctcaactatgtgtactagaattcattaatcaaaatggatctctcccatccagcttgacagggtctagtaaagttgtggtttgcaacattcatgtgctttacaatcctaacaggggagaaattaagcttggccaggttcgagtgctgcttgataaggctaaagccgtttctaaactctggaatgatgcccctgtagctatctgtggggattttaattgtactcccaagagtccattatataactttatatcagaacagaagttagatctgt

SEQ ID NO: 31296 - DNA, 455 bp, Glycine max
ggttcctttctcacattttgtttcaagcttcccaaatggcttgaatacttctttgcctattgtggggtcctggctcttcaggggaatccgattgattgggtgagcacacataggtaccatcaccagttttgtgattctgagagagaccctcatagcccaactgaaggattctggttcagtcatatgagttggctatttgataccaattctgtcctagaaaggtgtggagaggcaaacaatgttggtgatttggagaaacaatccttctatagatttctccgaagcacttaccttgcccacccttttgctttgggagcccttttatatgccgcaggaggatttcctttccttgtttggggaatgggagtgaggatctgttggggtttatcacataacctggcttgtaaactcagcttgccatgtctgggggaatcaagcatggaacaccagggact

SEQ ID NO: 31297 - DNA, 708 bp, Glycine max
gaccacctcagttttgcttgtttggacaatgattttgttgagtatgtaccctgattggcaaacacgcgcaagggaggaagtcttacaggtttttggcaaccgaaaaccaaattttgatggactgagtcaccttaagattgttaccatgattttgtacgaggttcttcggttatacccaccggcagttggtcttgctcgaaaagttaacgaagatgtgaaacttggaaacctatcattacctgctggagtgcagatttccttgccaatagttttggttcaccatgattgtgagctttggggcgatgatgctaaagagttcaaaccggagagattttctgaaggacttctaaaggccacaaatggaagggtttcattttttgcctttggagggggtcctagaatatgcatcggacaaaacttttcctttttggaagcaaagactgctttgtcgatgatcctacaacgtttctcgtttggactttctccaacctatactcatgctccaacttccgttattactcttcagccccaacatggtgctcatctcattctacataaggtggaaatatgaaaaaataattattagctcatattgaaagtttataatgtaataacatttcaacaatagagattcaaaccttttcatatcactattatcagtttattttctttagtattaatgagaaatgcatatgatttcctttaagc

SEQ ID NO: 31298 - DNA, 412 bp, Glycine max
aggctgtcatccaagcagggatcattgcttacatccctttcacttctccttccttgacatcttttcccatttctcttatcccacatataaataaacacaatcactagtcacaaaaaccaaacattattcataattcaaattcaacactttgttctctctttggcatacatcattggattttacaatggctgggattggatttgaggacttgctacctgtgatggcgaacaagctgggaggggaggggctgatgaaggagctgtgcaacgggttcgagctgctggtggataaggagaaaggagtgatcacattggagagtttgcgacgcaacgccgcgcttctcgggctgcaggacttgaaggaggatgagcttgtgagtatgatgagggaaggggaccttgatggagatggt

SEQ ID NO: 31299 - DNA, 250 bp, Glycine max
actcgagccgattcggctcgagattttccatttcttcaagcgggtcaaagacccgattgggctacccttatgtgtgccattcgcttcagcgacccaccgagcctccccgagaccgcatcgccggagtttcacgattttgtcgagtgctgcctcaagaaggagtccggggagaggtggacggcggctcagctcttgacccacccgtttgtgtgcaaagacccggaaacctgttaagtggttgacccgtttt

SEQ ID NO: 31300 - DNA, 227 bp, Glycine max
cattttatgtttttatgtttttttaaatcattcctgtttatttatattgaacacggcccttttctgtagagaaaggggaaatcattatattgtcttgcttccgttgaatcttctgtgcgcaaatgcattcttctgccggaaaggttaccgttattagatatgcctaaaagaattctattattcaaaaatttgacacaaaaacaaagtaaagtcgcagtccggataat

SEQ ID NO: 31301 - DNA, 423 bp, Glycine max
aaaggggtaccaatcatgggtagttgaggataaaggttcagttgatacaggcagccgagaagcagcaccgagttttggtggatggaatgacttggagaggtcaagaccagcgacaaagtcttcccgtggcatggatggatcacgaaggacgccgatggaaggtggtaggttgagtaggagacaaagaaaaagtgacacaccactgctgttgcgagtgctttttgctattttcccatttttgggcacatggacaaagatgctgtaatagtctttaccaaataacttgagcttggatgagttggaagtgattctttacatcttcctctgatgaaaagaaaccaagcagttattttatgttgtttgtcaacatacatgagtagtattgataaaattagatgatgaattaagttcatcaacatcagc

SEQ ID NO: 31302 - DNA, 390 bp, Glycine max
cacccctcccaagaagacgccgctaccacactcctcaacctctccatcaccctaaaggagcccctcatgtccacacgtggcgtcctcgacgccatcgcccacgtcatctctcaccaccacaccacctcctctccccctgcggttcagtccgccgccgccaccatccacagcctcctctcctcggtcgactcctaccgccccgttgtcggctccaagcgcgagattgtctactccctcatcgacatcctccgctgccacctctcgtctcctccccgcactatcaaggattcgttaaaggcgttattcgccatcgcgcttcatccgattaacagatctacgatgattaaccttggtgcggttcccgcgcttttttcgctggtgttgaaggac

SEQ ID NO: 31303 - DNA, 260 bp, Glycine max
gaaatatcaaaactttgaaacaaaaacctctcatgctaagaggtctcctgctcatgctcaagatcacatcatggctgagagaaagcgaagagagaaactcagccagagcttcattgctcttgcagcccttgttcctggcctaaagaagatggacaaggcttctgtgttaggggacgctatcgaatatgtgaaagagcttaaagagcggttgacagttcttgaagagcagagcaagaaaacaagggcagaatcgatagtgg

SEQ ID NO: 31304 - DNA, 544 bp, Glycine max
gttatctaattttgcccaaatttctctcctcttgtcaccatttaacaacataacacaacttcttcccagttcccacattttaccaacttaatatggcttcctttgttcttgggactactttccttccactcttttattctcatgataagtacagctgctccccaagtattttaaatataaccaccaatccacaaaggatgaaccaagtgatagctgctggaggagacaatttttgtgaggagatgaatagcacaatgatgaagaaaagctacgaacctaatcaacagttgcggagatctctaaacttctcaggagagaagccatccacaccagttttggacaccattaactacccaatacacatgaaaaatctatccattcaggaacttgaggagctagctgatgaactccgtgaagagattgtttatacattgtcaaagactggggggcatttaagttcaagtttaggtgtggcagagttaactgtggcacttcaccatgtattcaacactcctcaagacaagatcgtttgggacgttggtca

SEQ ID NO: 31305 - DNA, 354 bp, Glycine max
cggtttcatcactcatcaaaccctcaatctccggagccaactcctccacgtgttgaatccatgcccgctcccaccgttccagaaccaccgcttttccaagtaaaagccgttctcgaagtggagaagaaagtaatcgaagaagatgttgtggcactaaagagaaaagactcgacggagattccatcgccggaggagaagccactggtgtctgctaggttcactcaccggaaattccttaaatccagttcagaaggtgggagagcgttgagagtggtggctaaggcaaaacgggacgagacgttggagagcacgtggaaggccataacggagggtcgatcaatgccatgagcagca

SEQ ID NO: 31306 - DNA, 613 bp, Glycine max
tttcactttctcacgatcccatagtaaccttctctctcttctttctgccactttttctcagtctttaatggctgcccgcataaaaattccgcgttaaacaatcgtgggtcggtgcaagttagcatttttcttatcttttgggttgtcaaaaagaaacccaataggaaaagtcttgttctttttcttttagggtggtctttttttcttttggtaaaatttgatgccagtttcaccccccccaaaaaacattgttctgtgagaatatagtgttcacaaggcattttttctatctacctatatgtgtcttggtgaaactgaggctgagggagagtttggtgatacagattggttttttttttggtgtggtgagaggttcagtgagaatggtgtgcaagagttcacagttgagtgggaatgtcttgggaaacacctctatgatgatgtgttgttgttgttgctaaattattggggaactaattggatgtttcttctgtggtgaaagaagataaatgcactgttgatttcattcatggttctgttatgcagaaattatggagttctgtttcaattggtgattgtgacatttggatttgacagtgctgggaccaagctt

SEQ ID NO: 31307 - DNA, 273 bp, Glycine max
gtcgttataatctgactcggaattcaactccgagtcaacccggtcgagaacgcaccgaggcgacgattcaacaagggcgtagtagggaagcaaatatggatgctgaagcaactgatcgcaactccaccgttcactcggttctcttctaagacacttctcgagaaaatccttccctagctccgacaactggattggaaattccggcaactcgtccgagtaaccgattcgactcagcgtgtcgacgccgcggtcctcccacgccggtttcccgat

SEQ ID NO: 31308 - DNA, 508 bp, Glycine max
gttccttgatgttgcaagagaggctgaatgcactctctgctgcagtcaatgcactgcatcttgttcatcctgcatatgcctggattgattcattagctgagggaagttctattgtgaatgaacattatccaagtaagaaagctaaaaagaaccccagatgaacattcagcagctgataatgatgctgagcctcaaggttggcagtcctctattgatattgaaaaacttgagaatgagtttgtgctaacttcagcagagtatatgctgtcactggtaaatatcaagtggacattttctggaaaacacggagctctatcagacttggctgatcttcttgtccaaaacagtttatatgatatggcttttacaatccttctcagatttttcaagggttcaggactgaagaggcgaactaggaatagagctgttgatcgtgctaatctacattagatgaattgctagtacttcgcacaaagatggaatcctcttgggttgaggaacacagtca

SEQ ID NO: 31309 - DNA, 470 bp, Glycine max
ctaattcggaatgtaaattacattccagaaagactaattcgaaatgtaattttacattccaggttaggtggaagcaattgcctcaagttctttaagatctctgggcctttagcctcacttttctcaacagaaattatctggccgcacttgaagtccgaatcagaaaagtaggtttcatcctacagcacccatttagattttaggcttaccaaccagaccagaaaaataaggatacctaccaaccaagggcagagggatgcctacttttgtggtaacaaaggacatataggtcagagtttggtgagttttggatactgttatatgaaggggtaatgagatgctagtggacataagtacatgattgggctgtactgtacttaaatttagttatggcttaattagattttggactttggagtgtagcatattaattagtggatttcaaggcataactcatgcctacttttgtt

SEQ ID NO: 31310 - DNA, 421 bp, Glycine max
gcaaaggttgtagaacctaccccaggagtaccagtggaaatttcagcaaattaaagctgaagttatttttatcccctttgcccccccacttcttaatttttctttgggggtcaaatggcacatcagtgttttcaggcaaagtatacactctctatgatgcaagacaaacactttttctcacatcatgattacttcttcccctatataatatatgtgtggtagtttataagctatatgtgtgatatatcaaagttgtttgttagtatatctttgaactgcacttctattttatgtatataaaaaagaaacactgagtagtaaaaatctacaaagttgggtatgatatgtcttcttcaaaaaaccttgttctgagagaacaaatccacacacaaaaagatagggacaacttgaatgttaatct

SEQ ID NO: 31311 - DNA, 313 bp, Glycine max
gtatgagtgcgcctgcgggcatcgatagattcctagttaggaatgtttctagggttctaccctttgactcaagatgggccattctgttccaagagagaaagacgttgaatttgaccttgaatgtggtgggaactctagcgatgacgatgtaggcaacgatctttatgttagtgatagagaatcaaagggtgcttttggttgggcgtggaatgggattctgaatgctgatggatcatataagggtaaaagtgggactgagtcatgtagcaattcagcaaaatctggtgatgttgtggatatggatgaaaataat

SEQ ID NO: 31312 - DNA, 569 bp, Glycine max
cccatgctttcgcccacgcgtccgcccacgcgtccgcccacgcgtccgcccacgcgtccggaaacaggaacagaaaggtttgggaaggaagcagaaatcgggggtggtgtgagagacaagcatggcgacgtgtcttcgccttgggagatttacgactattgattcgctctctctcttcgtttccaccgctagattctccttttcttcatcatcttcgtcgtcgtcctcgtcgtcatcttccggtaagtccaagacggggaagaagctgatggatcgtctttccaccgttatcgacgccgtcaatgatcgcaaactacctcctgagctacgtggccagcgcagcaatgtcaggtcagaaactgacattatcaacgttgttgagcaaagaatatggcataccatggaagaagggaagtttgagaatttgccaggcaaaggcaagccgcttaagctcgacacaaatcctcatgcagatccagctgaagacaccctgtaccgtatcctgtcaaaaaacggatatgcaccggagtgggttgaacttaacaaagagattagatctaaaatatctg

SEQ ID NO: 31313 - DNA, 481 bp, Glycine max
cacgatcattcaatgccaaacacttgctatcatggtatagccgtagtcagagaaagccaaatgctcctttgagaagcttctgattgatttcgagttggaacccagccttaggtcggttctatgaaaaattattaggtggtctgacaccattactaagtatctatagtctcgatactccatcaatctctatgtaacatatgtctaagttttttcaatttaccagaaagaattaataaaactcaaatatatgttatacagagataagtgaagattatgatggtcatggaccatcctaataatttctctgattcttgctaactagagtgtcttttgaactctcaacaaaggtgagggtttgaagggtttatgtgtgaattgatgtaataggtcatgtgatgatcaagtgtatataaagtatgatagcaaaacaaaaaggttatgaatgaattgaagactgatatccttgccattttggctgatc

SEQ ID NO: 31314 - DNA, 281 bp, Glycine max
caacgaggtttctccaccaccatagccattcttcctctgcgtcaaaaatcttaatcttcttctgtctctctgcttttctcgccctcgccctcatcgccaacctcttccgcgcctccctctccactcactatctcgccatcgccaccaactgggtcgacaccaacgcaccccttcttattccgaatctcaccgccatacctcacaacaacagcaacaacaagggaaaagatgggaagattgcaaaaaggaggggtaccgagagattcctctcggctacattt

SEQ ID NO: 31315 - DNA, 381 bp, Glycine max
cttttgttactttgaagctggagaaaacaaacaagccctagttcaattggtaacatgtgagaggtgtgcattcaaactcaactacaagaggcaaaaagaaaaggagctgttagaaaaaagacaagaagaacaggatagacgaaagaggaatcgttcaaagagtgatgatcatctagatgacttccaagaaagcaaagagagaaggcggaaagggaaaagggctttgacttcagccagtgatcataaaattgatgatgatgatgataacttggatgagtttcttgaggggatgtttccatgaccttggctgtttgattgtcatacctgaaaagtgcttctcagcaccaaagctgggcaaatagaaaaggttaggcagtggtg

SEQ ID NO: 31316 - DNA, 265 bp, Glycine max
gtcttccaatattcttcttgatgccagttggacggctagagtatttgattatgaattgtcgttcatatgtccagaacctgacgatgaatacgatgagattataatgggaaccatgggatacatgtgccctgagtacatgactcgaggtgtgttgacagcaaagtgtgatgtgtacgggcctggagttgtattgcttgagcttctaacgggtaagagagctatactactcgagtctgaggaagatggacctccattttatttggtg

SEQ ID NO: 31317 - DNA, 412 bp, Glycine max
gaaaaggaaagaatgtttacaaagcttggtggattgagtttagagccaaaatccgtgcctcctccaaagcgaacagggtggattggaagaggaaattgtcacatggaaaaggccaccatagatctgaagcgcgatggaaagattgaggatctgagcggtcgcgttcatcaactcccctgctgcgtcaagcacgacggtcccgcctccgtttcccactatttcaaacccaaacacatagctctcgtcgacgacgagggtttacctttacaagaggtgcattttagaggctactccaaggaacaacactccctcttcctcacggttactctggttttgtcgtgtgtaagaaaagttcgcctcctacctccgacgaaaactctcactcttgggacatgatagcagaccaaagaca

SEQ ID NO: 31318 - DNA, 363 bp, Glycine max
cgaagattcactcaaggagctactgtcttggttggcaagaggcttgatttccatccatatttctcattcttaccccttgtcagaggccaaccttgccttttctgccatcaaagataggaaagttattgggaaggtgatgattgtttttgatgagaaacctacaagatctaagctctgatcctgccaaaattatgctatatggttgaataatttgttatattagcaaccaagagatgttagtttacggaaacaaaataaaaggagcaataattgccaagttatgagaaaaaaatgttacccttgaagccctcacattgttatgtggaatctttacgttggtgctaagattgattttcttttttc

SEQ ID NO: 31319 - DNA, 272 bp, Glycine max
gacgaactcggaatcggctcgagccgaccgtgccggcctccacccagcccaaccgcccattcgtgcactctgccacctccggtggcgccacgagcaacgtggcggccaagctcacggcgggctacccgcaacaaaccatcttcgacagcctccacgacgccggccacgacttcggcatctactaccagaacatcccggccaccctcttctaccgcaacctcagaccactaaagtacgtgctcaagttccacatctacgacgtgtcgttcaag

SEQ ID NO: 31320 - DNA, 269 bp, Glycine max
ctcgagccgctcgaaaagaagcttgaagatttgcaacagttagtgtcgaacccaaagtcaattcttgctgagatcctaggaatagcagctgccaaggcaggcaatgtgaaggaatcatcttcagcaatggtgagttcctcacagttggctactgccaacggcagtgcgaggttttgattctccaaccatttcaactgcccacaccaagggatctggtggagtcacacaccttggtgtggtgggaagaggagttaagcgagcatcaaatg

SEQ ID NO: 31321 - DNA, 672 bp, Glycine max
accagaggagtcaccatgttgctgctgacattgatcacgatttaagtcggggagaaaagctcttgggaagccttggtggcctcttctccaaaacttggaaaccaaagaagacacgtgcaataaccggccctgttattgttggagatgatccagtcaggagaaagggtaatcacttggagcaaagagagaagttggggctgacttctgcacccaaagggcagtccaagctacggtccccacctcaagaaccaacaaatgcatttgaaaaagttgaggttgagaaaaataagcaagatgatgcactatcagatttaagtgatctgttgggagagcttaaaggcatggctgttgacatgggatccgagattgagaggcataacaaagccctgaatcatctctacgatgatgtggatgagttgaatttccgagtgataggtgctaaccaacgtggacgtcgtttgctcggaaaataagattgattgatttcatcgttgtgtttttctctttgtacccatcatccggtttaatgaagacaatcttttcatttagtttacacttgtgttgcattatatataaaatatgcaacagattaaacttgtcttggtgtcatactacataattcaatttgttcatttagaaaaaaggaaagtccttcctgctttgaatggaaaa

SEQ ID NO: 31322 - DNA, 450 bp, Glycine max
gtggggagaagtggtttcgtcattgccggaaaatccagccgcggcggaggcgagggaggtgttcgagagcttcaaccgcaaattcgaggaagggtatcggaaacagaactcattcgtcgtagctgaccgcgaattacgagacgaaataaaaggttcgatcgcgagaagcatagtgccaagatatcgcgagtggtataatgttgttcttgctacggtgggaacagtgagggatttgacggcgacggagtacgtgacctttacccctgaggatattgaaaattacctggttaacctcttcttttttggaacctcatccagtgctgtatcgtcctcgcctctccggcgttggagctaagtgcccagtttgaacggcgagttttctacgccgttatttttcttggttgtagtaatagttttgacatagccaacaaaagcgataacgtctttttc

SEQ ID NO: 31323 - DNA, 317 bp, Glycine max
ctgacagcctgagagaaagaatcagacgacatgagcagtacaaatggcaagaaaccagaggtgttgatgaagacagtttgattcgagatcttcccaaggatttaagaagggatattaagcggcatctttgcttggctttgctgatgagggtgccaatgtttgagaacatggacgagcaacttttggatgctatgtgtgaccgactcaagccagtgctgtacacagaagaaagctgcattgtccgggaaggagatcctgttggtgagatgctatttatcatgcgcggcaagttattgactgtgaccactaatggtgga

SEQ ID NO: 31324 - DNA, 256 bp, Glycine max
gtcactgaatacaaagcaaagagaggtggaagaattttgttcataccaaagttacatgacagagctcaagtatttatttcatgcccctctgaagaaagtggtgcaaggccaacttacattggaactattgaaaggtggttaaataacaaagtaactcttccggatattaaatgccattctaagatcaacttatttattctggttgaaaacatgggtcgtgtaaattacgggtctttcatctttgataggaagggca

SEQ ID NO: 31325 - DNA, 429 bp, Glycine max
cttcgttggctactgtgatgatgataacaagatggcactcatttacgagtacatggccaatggcagcctgaaagattttctcttgctctcagatggaaattcacattgcttgagttgggaaaggagaatacagatagcaatcgatgctgcagaggggttggattacctacaccatggatgcaagccaccaataatacacagggatgtaaagtcagccaacattcttttaagtgaagacttagaagccaagatagcagattttggcctctccagggagtttaggacagataaccaagatcaacaatctcaagtgattcacagtgatgctacaaatgaaaaatcaccagtaatgggcacaacagggtaccttgacccagagtactacaagttagggacactgaatgagaaaagtgacatctacagttttgg

SEQ ID NO: 31326 - DNA, 551 bp, Glycine max
atcaattacgaaggaatatatgataatgactaccatggtagtagccctccaccctcccggttgaagaggttcaatgataaagaccaaatggagtacactgaaatattgaagatgcgcggccttcctttccaagtgacaaaatctcaaattgttgaattctttaaagatttcaagctgatagaagatagggtacacattgcgtgtcgccctgatgggaaagctactggagaggcatatgtggagtttgtttctgcggaggaggctaagagggcaatgtccaaggataaaatgaccataggatcaaggtatgtagagctgtttccttctacaccagatgaagctagacgggcagagtcaagatcaaggcagtaatcgtggcatttttccttgtttgttttaggtcttcaccttgttccttctggtgcctactataatgtttttgaattttagattatgtactttacttttactagttcgacttgctgttatatttgcatgtctgaaatggatgcattaattgattaatagaaagggcctttgaatatatggct

SEQ ID NO: 31327 - DNA, 564 bp, Glycine max
cacttctataaggtgaaggagacggagagtaagatggggttatcggcgtcaaagagagtggagaagagtctgtcgatctcgggcgattttgactcagcatgcgactcagccttcgcccactgcctcgctctcacacagcacgccttcgaaggagtgttcccttaccaactcaaaaccgcctccgattacatccacggccaacaccacacaccctgtcattcgaaattggctccccacacctcccgatcggacccaaatcgacgcagccctccggcgtctccctcccaatttcgatgacacacttccactttccctcttcaaaaactgggcccaccacctctacaccgacgccgtcgtgtccgccgccgccaaatcgcttaaggtgcgcgttcccgtcggcatcgccgggatcgtcggagtcagcgccctcactcgggctcctctccgaatggttggcaccttcattggagcctactccctcgctgttgcgctctccattttagatggcttatccacataaatcgtatttctaatattccgcttttttatgcttcggcaatgata

SEQ ID NO: 31328 - DNA, 364 bp, Glycine max
gttcctcgatcttcatttcatcaacaaacctgagttcttcctcaatgcattccagccgccggcaaagtttaacaatgatggtgacttgattgatgaagatgccaagaataggttgaaggatgtccttctgtccttgaaggaatttacccttagacttcaaggaaaaaattgaaacatttctgattcccaaaaattgttaaaataagctttggattttggtccattccttttaggaataatagtgtgatctggactgtctctgactgcatgacaacagcattatgcagaaacaagagaacgggtatttgtttttacatttgaaattttttggtatgtattggcgcgtcttggtttggtttgtttt

SEQ ID NO: 31329 - DNA, 272 bp, Glycine max
ccaattcccttggtgaagcctatttcaaagccaattccaattataaagtcaatttctaatgaagaagaaaaatttaaaggacttccaaaacctattccagtaattaagccgattccaaaactaattcctgttgtaaaacctattcctgttccaatatataaacctacaccaaaattaattcccatcattaaaccaattccaattgttaaacctgtaccaaaaccttttacagtgcaaaaacccatccccgctattgacccagagtcttttct

SEQ ID NO: 31330 - DNA, 405 bp, Glycine max
gtggagcttttgaaagggataagaagccctatgaaagatgggttggtgcaggcgctaaaactggcaatggggtgctgtgcaccagtggcatctgttaggccaagcatggatgaagttgtgaggcagttggaggagaatagaccaaggaacaggtctgcattatacagccctacagaaacaagaagtggaagtgttaccccattttgagccttccctttcaacatgcttaagcgaactagtgatttttacttaatatttgtgtttcctttttctcagctgaatctgaatataaggctagtttttgatgatctagagagaatgttgtaatttttggtttactccataactctttgcatcaggtagtccctattgtttttgaaatcaaatatagtcacacaattatgc

SEQ ID NO: 31331 - DNA, 265 bp, Glycine max
ccacgggccccgaaagatcgaagccactgcacaacttctccttgccctgtttgaaatggggcacccaacggttacttcgctgcgtcaacgccgacctcgatcatcgccgatcctccagattccacgcgcctcagaacgacgccgttcgaatcaccaacaagcgtaaaatcgacgaggtggggggtctcagagaagaagaagctgctgctgccggtggtgctgctggtggcgcgaataatgcgatgatgccttggaatttgaggac

SEQ ID NO: 31332 - DNA, 638 bp, Glycine max
cggtcgcgtgggatctcaattcctttgggaacagtaattgagttcaaacgaacagttgatggacgtctgatcactaaaattagtgggaatcagataggaagtgttcacagcaaagatttgtgtcgggctttctttgacatgtacattggagatgtccctgtgtgtgaacaaactaaaaaggagattggcatgaatgctgcaaatattattaacaagtgctaaaacgattcattttctatccacttgtcctacttttagaatggacaattggacatggatagcatggcaaattggcgtatacccttaacttataatagaagcagtggtttcttgaaattgatttcaacctgcttttaaaatcattcgctggcattacttccccaggtgtgtcctttgaatcatagaagtctttaggatagcttaaattggattttcattggaaaattctttctgttcctattgactatatcattatattcatcgccttgatgcccccctatccctcatgttagatgtactcatattttagagaatgaaaaggtcaaaaaatgcagataagaatgtttgtgcccgtttgctcaagcaaataagtatttgctaccttttaaaaaaaaagaaaaagggcggacactgatcat

SEQ ID NO: 31333 - DNA, 348 bp, Glycine max
ttctgctcgagctggaagcagcataaataggccaccaatgcacatttttcttcctccatgactgctaccatgtctggccctattcctaatgatcactggctccatttctatcaacaaaaccaattcccctcttccgtttccgacgccacaaccgtgacaaccaccgccgcgccggccaagctaagcccagaaggcggagtctcaaagcccattagacggcgttcacgggcctcaaggagaactcccaccactctgctgaacacggacaccagcaatttccgggccatggtgcaacagttcactggagctccttctgcgcctgatatgtttgggagcccagtccctgtc

SEQ ID NO: 31334 - DNA, 330 bp, Glycine max
actcgagccgaatcggctcgagtgggagggggcacggggcttaacacttttcaaaaacgcttacccgaacgatgttttgatgctgggatagcagaacaacatgctgtaacttttgctgcaggcctagctgctgagggcctcaaacccttttgcgcaatttactcttcctttctacaaagaggttatgatcaggtagcacatgatgtggatcttcaaaagcttccagttagatttgcgttagacagagctggcttagttggtgctgatggtccaactcactgtggagcatttgacacaacattcatggcttgtttgccaaacatggtggtc

SEQ ID NO: 31335 - DNA, 530 bp, Glycine max
tttgttcatttgattattgacttcattgtgaaaaggctagaagtcattatgatgcagaaaagatttagtcagctaggtggtcttcagcttgaccgagatgctagagctttggtaagccgtttcagtgtcatgacacagagaactgttagagacaagtttgcacgtcttactcaaatggcaacaattctaaatttagaaaaggtttctgagattctagatttctggggtgagaactctggacctatgacctggagattaactccagcagaggttaggcgtgtattgggtctgcgagttgattttaaatcagaagcaatagctgctctgaagttgtaatatccgtttatatcgtctcttcacattcttttttttttttgttctactttttttttaattttgtctgataagtattacatcttcattcttactatttttgcctttttggtgctcgggaagttaacatacagttccattgtgcgatttgcataaacaaaagaataagcaagtgtattattcagatttgccacccc

SEQ ID NO: 31336 - DNA, 1228 bp, Glycine max
cgcactgttggacccaaagatgtttgcgtattgggccaagtaccctgtggtgcgggccgcgatggtggcccacccggaggcggagtggatctggtgggttgactcggacgcgttgttcaccgacatggagttcaagctcccccttgagcgttacagggagcacaatctcgtggttcacggctgggcccacctcatacacgagaagcgaagctggacgggactcaacgccggcgtcttcctcatcagaaactgccagtggtcgttggacttcatggaggcgtgggccagcatgggcccacagacccccaattacgaaaagtggggccagacgctgcggtcaactttcaaggacaagttcttcccggagtcagacgatcagacgggcctggcttacttaatcgccatagagaaggataaatgggcggacaggatttacctggagagcgagtactacttcgaagggtactgggaagagatctcagggaacgttccagaacattaccgagaaatacaaggagatggaaaaaggggtgcagtaggttaaggaggcgtcacgcggagaaggtgagtgagacttacggtgagatgagggaagagtatttgaaggatgctgggaatggaaaagggagttggaggagaccattcataactcacttcacagggtgtcaaccctgtagtggaaagtataatgccatgtattccgctgatgattgctggaacggaatgcagaaggctttgaattttgccgacaatcaagtcatgcgtaaatttggttacatgcgcccggatctactggataacgccatttcccctgtcccttttgattatccccgttcacttcgtcattgatcatcagtgtgaagcacccgctgagcttggatagattttactgcggccctctatttaacatggatagatgaaccatgtgcatgcgtacagaactttcatggacctgtattatcgtcggggttgtggggtcatgctcacatagtagcatatcccaccatgttaataccctacttgctacagtaaaaagataccctgcggccattctagttacatctaccctttgtttttttccctcccttttcctctcatggcttgaaatcttacatatatagaagcataacaaaatagcagtgctaaggtttatgacgttgttatgaccaatgttctagtgtacccaccatcaagatggcccaataaacttgtagacatgtgagttgtg

SEQ ID NO: 31337 - DNA, 354 bp, Glycine max
cggctcgatcgaaagaaatacacgccagaatgggactcctctcgttcgtgtttggaggcttagggttcattctcatcggcgctcacgaagcccttcttcactcttctccttcttcccaaaacaagaaaaccaaaaccctcttctcgatctctctggtcctcttctcctctttcttcatcctcaactccacgctatccctcttcgacgcgcacagctcaaacgacgccgttggcgccgcgctccagctgcaagtcctatccatcgcgttcgtcttcctcttctactccctcctccccctcctcagcctcagattcactctccgctctccgctcctaaacctcgtcggcgcgttcg

SEQ ID NO: 31338 - DNA, 469 bp, Glycine max
cgagctcgagctcgagatactcgcgatgctagccctagagctacccaatctccattcatgttcaccccacaagttccggtggttccgctacaaaaacctgatgagatgcatgctccaagcccttcctggatgcagactacgtcagtttatgaggatatgtactgtgaactgggaattccaacgatgattacttggagctatgatgggaaggaagttgccgtggagggttcgtgggataattggaaaacaagaatgcctttacagagatcagggaaggacttcacaataatgaaggtgctgccatctggtgtataccaatttagatttattgtggatgggcagtggaggtacgcacctgacttgccttgggctcaagatgatgctgggaatgcatacaacattttggacttgcaggattatgttcctgaagacattggaagcatttctagttttgaacctcctaaatcac

SEQ ID NO: 31339 - DNA, 282 bp, Glycine max
aaggtcatctttgtcacgtgtgaagatgatgaaaaggttgctgatatacaaaggctgattgggtcatatgtgagattggaagcatcaactgctggggttaatctgaagttgtcctcttcagttgacatagaagacaattcttccattagaagttcttctgatgactgtgtctctggagttgaggttccttctttttcttctggtagaatctccaattttgatcagggtgcttcttctggaagagttatcttgcttcctgatgcagagctacagacttcaggt

SEQ ID NO: 31340 - DNA, 242 bp, Glycine max
gggatggcagtggatgtgagcttgatgtctatcttgaaaagatcaaggagcaatatgggttatcttttctgccttctgattttcttatgagccctcgtgtgcctagatttcaggtgctcgatgcattagtgagtctcttttgccgttctaatatatctgcagagacactgtgggatggtggtgggcttttacgccagttgcttccttacagcgaggcagaattcaatagtcatcacctggaa

SEQ ID NO: 31341 - DNA, 293 bp, Glycine max
ctcatcaaagagacgcccaggcggcggtgccacaatcgctaactgcggcgaccctgggcgactgtgagggtgcgaacaagaagagctcttaggttttcaaaaccattaatcgttgctgcttatttgatttgtttgagcaattatgaacaatgttgctgaaagaccgcttaacggagacgtagaggatgatgatgaggatgatggtggaggccttgaagcctgggagagaacttatgctgaggatagatctgggtcgctttgcaataggatgaatctggacttcttcgccccat

SEQ ID NO: 31342 - DNA, 524 bp, Glycine max
ggtggagccgcggacacgaatttctcgtggttttgcttttattacaatggatactgttgaggatgcgaaccgttgcatcaaatatctcaatcaatcagttttagagggtcgctatattactgttgagcggtcacgaagaaagcggccaagaactcctacacctggacacttatcttgcctttaaaaggactagagactatgggcatcgtggtgaccatggaaggtatcgaggaggtggatctggtcatgatgattatggatatcgtggtgaccgtggaaggtctccaaggcactcaccaccatatcgaggtggtagagattattcaccgaggcactcacccccaccttatggtggaagatctaggagggacaggtccaggtcacttccttattctccatatggtagcccagataggaggtatgctcgtggatctaggtgatgtcttttaagtttgaagatggtaatgaaaaaattatctatatggtatcgtgactaaagtttgtatccatgttttggaaatagt

SEQ ID NO: 31343 - DNA, 429 bp, Glycine max
ttggaactcaaaaaatcacaagccaaagacaattacagcaaaaaaaaataaaaatcatttgtgtacaagcagaaagagactaaaagtctcgtgaataatcctaagttatggagtctgtggtgtgtgagctagaaggcacgcttgtgaaggacaaggatgcgttctcatacttcatgttggttgcgtttgaagcttcaggtttggttcgtttcgccttgttgctaacactattgcccgtgattcggttccttgacatggttggcatgaacgatgcatctctcaagctaatgatcttcgtggctgtggctggtgttccaaagtccgagattgaatcagtggctagggcagttttgccgaagttctacatggatgatcttgacatggacacgtggaggctgttcagcaactacgacagagggttgtgctgac

SEQ ID NO: 31344 - DNA, 334 bp, Glycine max
caaatgcttttgatacaacatatggagtctttggtgaactgatatatgcaagggtctttgggaaccagatgactaacacatatacatacccgaattcttatgatctttcaaggaacagtaatccgaggatcagaaggcatttagtgcaagttgatagatcactcaatagaatcacttttttcctcctttgttgcattgttttgtgccttctcttattctgactgctattgcatattttttgtgcaatacatccctgtatagaatacaagcagtatgcagattctgccagatgcatcatatactcagagttgtttgatgatgagagagatatctg

SEQ ID NO: 31345 - DNA, 442 bp, Glycine max
actccttcaaaacaatttcatggcctttgtttggccggccatatgccttcgttattttaccatgctttatgtgttttatgataactaaaagtgttacacaagtactattccaaaatttgagatcaagccttgaatcttttgcaacaagaatgttcccccttgctgaaagcttggcagaagtactagcctacaaattgaatacgaaatccaactatttccgtgaaaattgcttgccaaagagttcgtacattcgactgaatagatatcctccatgccctatatcgtcaaaggtgcatggcctgttgcctcacagtgatacaagttttcttaccatcgtacatcaggaccaggttgggggattgcaattgatgaaagatggaaaatgggtttggtgtcaaacctaacccacaagctctagttgttaatattggtgacttctttc

SEQ ID NO: 31346 - DNA, 422 bp, Glycine max
cagaaactccattgtgattggagggtatcaattggaggatgtcatagtgcagtttgatttagccacttccatggtgggatttagttcctcccttgtcgccaaaaataccaagtgttccgattttaaatatgccagttccataactgcagactcgatttgaatattttaaccccccgctttgaggatgggctttctagtactaagtactaagttttcttgcttgattttatgtttttgaagcttctcagatctcaattactaagttttcttgtttaattatgtttctgaagcttctcaattttgtaacaacttgattttgggtagtttttttttttctttttcctgcactattggttgtatatttaaaatatcgtgatgagatattatgatcttatgatttgatggcacttttgcgccactgt

SEQ ID NO: 31347 - DNA, 341 bp, Glycine max
gttgcaacgaggattcccaagttcagaagccggaattggcctgtgattgttgccttgactgcaagcacagatgatttgtgggaaagatgtatgcaaattggcatgaatggagtcataagaaagccagttttgttgcatggaatcgctagtgaactcagaagaataatattgcagggaaatagtgtcatgtgaggattcatgctgcaagttaaagcacttgcaacatatcaagaaattaagttataaaaaaaattccagtcacatattccatagaatttggtagctcacagctctctttggctcctattttgcagcattttagcttagagatgttgtattat

SEQ ID NO: 31348 - DNA, 537 bp, Glycine max
tctcgagccgaatcggctcgagtgcaaatctaggggggtcataacttgaaatttccaagcaagatggctttggggacgaagaggaaactaaaaagcacctacatgtctccattcgcatttgaaagggccttttttctcctccgggtatacatttttttggtgctctttacatttcttggttcagattcatcttggatgacttgtttggcttccattccgttctctttcctcaaaaccttccaggtttatagaatgagcaaacatggtagagggaagaaaattttgatgtagcaattcaacgacattgagcatagaagttagtatactttctcctagttatgtttttgtacagtacagaagtatatgtatattttgctgctgtcatttttctcggggatgttaatattaccaacgcttgtgtaaatattattgctttggtttttttaacaagtccctgtggttaaatcagttctttattttctgaagcaactattaactgtagagaaatgctatcttggaaccccctactatgtcacg

SEQ ID NO: 31349 - DNA, 287 bp, Glycine max
gcttttacgaggtagattaacttgggttgagcagagggtggcagttagagcattgggacacttagctacatatgccagcacttttcctgccatagcaagtcatggtgaaattcttgagctctccatccaattggcaatgagttccctggaaatagtttattcacacttttaccaatatgttgatagaaggctcagttatcattgtgatcttcttacacgtggcatgggtggcgttgaaatggagtccaggaaggctgaggaatgggctagtcagttgcagtgttggt

SEQ ID NO: 31350 - DNA, 274 bp, Glycine max
ctcgagccgcgaaacgaacgcaattacattcaaggtttctatggttgacttgccaacactaaactatcacaaatatgctaattatattggttgaaatcctttattagggtttgcaagactgaacaagttcagaagtgaaatccgtcaattggttgattcatgggttggcgatggtgaagatgatgtttctggtcagggagacgctcattgaataattctgttcatcaagggagtgaacgtggcttttgtagcagcttcaactttatgtttttca

SEQ ID NO: 31351 - DNA, 258 bp, Glycine max
aaaacattacctcactcagttcggcagtgtccttattccataagctcccaaaaaatgagttcaaagccattcaccaatttcttggtaatttttactcttgtattgctttgcctggtcggttcaagtcacaccaagtgtgatttcaaggcaattttcaactttggagactcaaattcagatactggtggcttctgggcagcttttcctgcacaatccagtccctttggaatgacttacttcaagaaaccaacaggccga

SEQ ID NO: 31352 - DNA, 485 bp, Glycine max
gatcaatgcagggtctgctcatgacataatccctgattcagctacatttggaggtacctatagagcattcagtaaaaagagcttctatggactgaggaaaaggatagaagaggttattaaagggcaggcagaagtacataggtgctctggagaggttgagttctgtggcaatgaacatcccacaatccctccaaccacaaatgatgtgagaatataccaactagcacggcaagtgtctagcaagactgttggagaagataacatagatttagcacccctcttcacagggagtgaagattttgcattttacttggaaaaggtacccgggtcatttgattcttgtgggcacacgaaacgagaagagtggatccatacatgaccgctcatagtccttactttttaattgacgaatatcgccttcccattggggctgcattggatgcaggatttgctctttcataccattcatattcaacaaattcata

SEQ ID NO: 31353 - DNA, 461 bp, Glycine max
gtttacccattttattgccgagtccattgcatagtttataaagactttcatagacttctctctctgtgtctctttctctttctctttctctctcttggaattcatggttagaggtggtggactccaatccatggattcagatccaattgggagcttcttcctccacaagccaattgttctcaactctttcccagctgaagacacaaacaacaagtggaaaaaacttagtctccaccacaacatggatgccacagctagcaataccaaagataacaccatcccctttcaagtcagccttagatgttctccaaacaatcatgatgatgcctcttcaccaccatctctccacaacaacagaaccgagatggacttattctccgacaagaatagtaccaaagatgatgacgacaacaacaacaacaaggttgatgcttctgcctctctccccgacaatgatcatc

SEQ ID NO: 31354 - DNA, 601 bp, Glycine max
cggtcgcgtgggcggacgcgtgggctctgtgtctctttctctttctctttctctctcttggaattcatggttagaggtggtggactccaatccatggattcagatccaattgggagcttcttcctccacaagccaattgttctcaactctttcccagctgaagacacaaacaacaagtggaaaaaacttagtctccaccacaacatggatgccacagctagcaataccaaagataacaccatcccctttcaagtcagccttagatgttctccaaacaatcatggtgatgggatattagttccaaggcagtttatggatcttgggttggctgctaataatggtactagcactggtattgaaccctcttcttcatcaggaggaagaagccaagatcgatcaagatcacccaacgtagaagtggcttccaaggaattagggacaaatgatgaagaagagaagaaagagtatggtagacggatagagagagaggatgatagtccctcagggcatgctcataaagttccaaggttcagtcctccaaaggataataatagtgttgacgctgaggctactatgaggaaggcaagagtttctgttagag

SEQ ID NO: 31355 - DNA, 337 bp, Glycine max
tgggggctttaaagccgaaaaaaaaatgaagaagcctttttctctttttccttttcacattccagaaaattcccatgaacttggaagtgtttgagaatagatcagttgaataaaggttcatacatttgttgttgtcgaaggcttctccaaacccccaaaccccagagagagagagagaaaatgagcagtgcttttctaatgaaccctgccaagattcctcatgccatgatgcagaggcagttcatgttggtgaaccgtgccattcatcccatcaaaaccccttcgtttcatttcctcaagaaaccaagacaatatggaatctcttcatctttttgtt

SEQ ID NO: 31356 - DNA, 581 bp, Glycine max
ggaacaatagggtatgtagctccagaagtatggaatagaaattttggcggagtttcacacaaatcttgtgtgtacagctacggaatgatgctactagaaatggtgggagggagaaagaatattaatgcggaagcaagtcacacaagtgagatatacttcccacattggatctacaacaggctagagcagggtggagatttgagacctaatgaggtgatggcaacggaagaaaatgagatagtaaagagaatgactgtagtgggcttatggtgcgttcaaacctttccaaaggatagacctactatgactagagtagtagatatgctagaaggcaaaatgaattccctggaaatccccccaaaacctgttctttcttctcccactaggtcagtgtcagaatctcccacaagatgaactatttttttttttttgtaatttgggtagataatagatatttcaggttatatactttgtaaaatgaattgtttaacataattagactgtacttttaaaatcaagtggatttcataattctgtcaaaaaggaggtgaagaccgaaaaatcaggagaaggagagaacg

SEQ ID NO: 31357 - DNA, 917 bp, Glycine max
attttgtaccaagaagtacctttagcaaggatcaatcatcttttctcattccaacttgtgtgaagaaattgaaaatagtttcaatatgtcaaatagaggctcatcatggataactctgaaattcagaggtgttgttgatgtaattcgtgccagcagatatcaatcaaactatgttgcactacagagaaacagaccaattgtgtcagctgctagaactgaaagaggttattggatgcaccctggtcagcaattctatagcaccaatagcatcaacccaagcactaatccaaaaggaataaaggatgtgaaggctcaaccagaagctcctgcacctgcttctaaaatcttcaccttcttccctcattggttaagatgggttttgggcatggtactttctctcttgctacctttctggaaatcttactggcgaaaactacagataatacaagcggaggcagagtttgtggttgaagaggctgaagcagtggcaaaagtggtagaaaaagtggcaacggtagcagaaaaggtatctgaagatgtagcagagatgcttcctgagaatggtaaactaagaaaagcagctttggttgtagaacgtgcatcaaaagaggcagcacatgatgctcagttaactgaagaattcatacacaaggttgaagaactcaagaatgacctggatgatttagaagccttcgttgaaccagtaattgacaagattgtgaagatataatgattcatgccgaagtaaaaattactttctctgtatgtattgtgtgactgcacatccctgtatatatttttcttttgggtttaattaagtttttcatatttaaaatatagatcgcttttagattattatctaatatctatttttttcaattaagtatctaaaaaaatcttcagttttattttactat

SEQ ID NO: 31358 - DNA, 434 bp, Glycine max
cacaaaaacaacattcgacgcaacagcaatggtgtttgcaaacccaaagaacgaactaaagcggataaggaaacaaaaacggctcctcctaagatcaccaaccacgcaaatgcagacatttcagttcaatcatgaccgaaatagccttcacatcacttgattttcatggggactgacttttgtgacttgcggtgtatatgttttgtaacttataatattgctacacggtatctcttactgttatataatgaaagttattgatgtaatatgtgaggatgtttccccagactagtccctggattttaaatttaaattaaatgctttcagcaggactagtagcattaggggtcttattatacggttttatctattgtgctaaaatgggtgtgttttgcgtgtccttatcatgtgatgatgcacctttgcttttccac

SEQ ID NO: 31359 - DNA, 299 bp, Glycine max
gtctcacacaagaatattaatcttcaaatatggaaccaacatgcggggatacttcactcgatcttaacgttgatccttctactatgcacatggatggggctttggtagaagagttgcgtcgtctaagttgtgagaacaagaggttgacccacttgtgtgagaactacatggctctgcacaagcaactgcgccaattgatcaacacgtattttgatcagccattagcctacccaattgaatcttcacgcaagagtcaagctgccgagagtgatcaatgttgtaccaacagatttgttggt

SEQ ID NO: 31360 - DNA, 521 bp, Glycine max
tttaagttttgcataatcttgctccttgttattgcttcgtaagccatggcaaccgattgcaattgcaacaagggcttcgctgatagttacatgttgttgaagcccgaagatgcgagtttctttgatctctttcgtgtcttatttaagggaaacttatcacagaggaactttgtggaaagccatgcagatgatgatgctttggacgaaagtttgggccatcgatggcttatagttatttctattttggcccagaagcttttgcagcttgttgccaagccactctcactctttgggagttgcgttgagtttttgctcaaccttgtagcccttaatggaggtgtattcagcatcgtccttaattttctcggaggtaaattggtcttgcccaatcctgaatcggaaatttatttatcctttattggaaatttggacattcgagcaaagttggaagacgccgtccagcgcgaagattccaagtactatccagcactttcgatgatggcttccaaagcatgctacaa

SEQ ID NO: 31361 - DNA, 297 bp, Glycine max
cgcccacgcgtccggtttgcataggctcttccgtcttcaaacattttaaattttaaattaaccatttgggttgtgaatacggttttgctttttgtcttggttgttcatgagtatgaacacccattgtttagggggggtgtgatgtaattaacaactatagaggaacatagtactcttcttctcacatttatgcaaccaacccatctaacgtttttttttcgatccttaaacatgggtttttggctagcgtagcatctacttgtgctcatgttagatgctaatccttcacggtggtga

SEQ ID NO: 31362 - DNA, 537 bp, Glycine max
tcgccctctcgtccgtgaagattatgtcaaagcaacgattgtttttggaagagaagatgtcgaggggctgagaagatgggtgctaaatcagtggaagagaagtaaggaattcaacacaccacaatatatatcaaaatttgtggtgacgtgtgcttttgtgtgggctagtttggttaaaacaagatgcagaaatgatgaagaagaagatgtcaaagaggagttctttcgtttcgctgcagattgcagagatcgccttgagcatcctgtgccaaaaacttactttggaaactgcttaactctctgttatgcaatgcttaagagagaagacctcaagggagagagtggttttgtgaatgcggtcaaggtcattgaaagggcagtggctgatatgaaaagtgaactcttcaaagatgcagaaaattggagggaatcttttacgaagatgtttgtgttgggaagcactttgatagttacagggtcaccaaaattcactgtttatgagactgattttggatttggaaggcctaccaaagtgga

SEQ ID NO: 31363 - DNA, 357 bp, Glycine max
cacaatctttagttgttgccaacctcctctagggttcctctgtttcttaactttcttcacatcaatggcaaagaagagaaccacgcctcagaagaagaagacccagacgataattcccatgccaaaacattctcaacagccaagaagctcacctcccaaacgccgcactgatttctctttcttcacgcgctccccctcctccttctccaaccctacttctggttcctcaccaggttcatcttctggtgaagtgaggttgtccaatgttgcttcaagcagtttgcaggggaggaaaatggtaatgaaacaattttctgaagatataatggttcaatgcagcatttaccaagagggtag

SEQ ID NO: 31364 - DNA, 374 bp, Glycine max
cggacgcgtgggtctgagcctgacagtaaacacaaaagctacagtgcccctccttctccagtgttaagaacctcttctgctgctgatcttctagcagacacaatagatgctgataatccaattccaatagatatgacgattgaggagtatgtagcaacagttgataataatgaggtggagcagcaggaagtgaaaagcataattgacatagagaataacttacagttgaggagagtatttggcattgatattgactggcctgaacgttccttagatgcaatcccccaaattgttgattccaattcaaagttgcggagagtactaagcagctcagccagaattggctttagcaggactgagagtagtttggtata

SEQ ID NO: 31365 - DNA, 538 bp, Glycine max
aatatctctaagtggaagcatgggccagcttccaacatttatcttatttgagaatgcagctgaagttgcccgctttcctgagttggattttgaagctgcatattttcaccctaaaattacaaaggggcttctttctcgacattttgagcttgatcggcaccttctcgaatatgttagtggtaaataggatgttagtggagcaagttgtccgaaatttagtcatcactgagaatggcaattttggatttccggatatctgaggaggacattttcgtaaatgaactttgaaagttaacgtttgtttaacaccatcacacaagggtcaaagtaatgtcttcagacaacgggggtgtatgtgtaattagattaaatctcaataggtgttattataatttgttccattattttataatctatcatcggttctaagtgaaagtcaaaaaatttggcgagagaattcaaattttagttgaaattatgttgtcataaacctcttttaaattgtctgaatataatgtctgaagaatctttttatggt

SEQ ID NO: 31366 - DNA, 362 bp, Glycine max
ttttattattttatcccaacccaaccacacatacgctatattctctctctctctcccccccatttcccgcatacacagagcgatagcaaacctactttagtttctttcgcttttcttccactaacgcaaaaagactcaccagtcctcaccacaccaccccttttgcttttgctttgcgtgtttttggattgttgtagatctaaaagataaagatgattcaagaaatgttgggtggtgctagtgctagccacataccaggagaaagaaaaatctccattaataacggaggaggaggaagagcacttctactaacaccacccacattatcatcttctccttcttgcacaacaagcataactact

SEQ ID NO: 31367 - DNA, 455 bp, Glycine max
caattttcctctctcttcactttaccaatccaaatggcctctagactcgccctccgcttcagatcccatctcctccgcaccgcctccctccttcaaaccttgccgccgccgcccctctccctccaccgcctcctctccacttcccgccgcgcgcctccgcgctccaaaaaatcagtcgacatcggcgcgcgcgcgcgtcagctccagacgcggcgcctctggacctacgcgctcaccttcggcggcctcgcgggcttcgtcgtgatcgtcctcaacaacttccaagaccagctcgtcttctacgtcaccccaaccgaagccctcgaaaaatacgccaccaaccccacaaaagcgcggttccggttgggaggccttgttctcgaaggcagcgtggtttacccggcgtcgtcgcctgaggtggagttcgtcgtcaccgatctcatctccgacatggt

SEQ ID NO: 31368 - DNA, 277 bp, Glycine max
ggcggtcgcgagagaggagtggcggaatctttctgaaaaatcgccgcaaagcgaagcgcaatctcatattaactgcaactgcaactacgaactacgaacatcagggtagtgattaagaaaaaccctagcaatggggaagaagcagcacagcaaagacagaatgttcatcaccacaacggagtgtgcaacggagtggggaggcgctaaatccaaagaaaatcgcactcccttcaaacgtcttcccttctattgctgctcgcttacgtttacgccgttt

SEQ ID NO: 31369 - DNA, 276 bp, Glycine max
ctcttctcttaccgagtttataaacttaacctaaacccaacgtcgtcgtttcgtccccctaattatcatcgtctcgcgaaccaccgcgtcaatgtcggccagtggtggcgccgccatcgccggcggacgccccaaccgccatcggcatctcggtgagaaccgcttctacagcccgccgccgctgaggaaacacaaagagaagcaggagcagcagcggtcgtcgctgtcgacaacttcctccggagaacaggcctggttcctcttccgattgttcga

SEQ ID NO: 31370 - DNA, 452 bp, Glycine max
tatctttttggtggactttgtcgatttcatcctcatcaagaggtcaaatttaccatggttatagaaggcttcaagagaagcttgtctcggacattttggatatcagtgagttttcgcgcggtcctttgaggttgaaggagtctgaattctgttctgaggagtttgaacactttgttccttgctacaatatttctgaggatgtggaattgggagtttctgataacaatgaagtggaccggctatgcagccacgagcttaggcagaatctgtttggttctgccaccggtgacttacaaaattcccttaaggtggcctactggaaaagatgttatctgggttgctaatgcgaagatctcagctcaggaggttctttcttctggaagcttgacaaagaagatgatgatgctggatgaagaacaaatttcatttcgttcagcttctcatatgtttga

SEQ ID NO: 31371 - DNA, 380 bp, Glycine max
tcattagctcttatttgacggcaatgctcttaatctataaaagatatatggtgtctaaatgttcagcatgaatatatagctaggcaaagaagagcaaaagaaaatcacattacctgtctctgaaatcagattcactttgttcttcatcaatggaaagagaacaactatcccttcacatgaatggtggcaagggacaaaggagttatgcaaacaactcctcactacaaagaacaataatacgtaaaaccagatccatacttgaagaaactataacgaggttgtactgtgatacttttcctaataattgcttaaaagtggcagacttgggttgctctgtaggatcaaacacacttcttgtgacatcaaatattatcgacatt

SEQ ID NO: 31372 - DNA, 278 bp, Glycine max
gacttatcaacctcttcctccgaccaccggtcttcggagtgaccttagtccatgggcacctgcaccggcggcggccgaagcggcagcaccacctactccgacgaccatccccgccgcaacggcatcaccgtcctccctccgaactcgaacctttcagccccaccagcgacctccttgctgggccggcccatggaggacatgcgatccatttacatattcgggcgggagctggggcgcgggcagttcggcgtgacgtacctggttacccacaaggccac

SEQ ID NO: 31373 - DNA, 436 bp, Glycine max
cctacgcgtccgcacccctctcctgagtctcataatattagttgtataagctagcaattcatttgataatttctgtatcgatcaaaatatatatagatatatttcttcgatatatatatagcaatggttgcgccttgtccaacatccatgatggtaagaaccaagaaaacaaaggccatgggagttccgacaatagacctttcaatggaaaggtccaagttgtcggaactggtggtgaaagcatgtgaggaatatggtttcttcaaggtggtgaaccacagtgtgcaaaaagaggtcattgcaagattggaagaggagggaaaggagtttttctccaaaacctcctcggagaagcgccaagctggccctgccaatccttttggctatggttgcagaaatattggccccaatggcgatatgggtcacctcgagtatc

SEQ ID NO: 31374 - DNA, 416 bp, Glycine max
ctcgagccgctcgagccgctcgagccgattcggctcgaggaagctttttctgttttctttccatataatcatgaaaatctctgctgggagttgtgattttcaaccataattttagattattaagttttgggcttggggaaattattttgattatattcttagttctaaggtggggtgttaattaatcatccccaactttttctgatgttcagctcagccccccacttaaattcaattttttttgctgtctttttaaagatctttccctcatttattttttttgggctactgaaagtagtactgctcctttccttttcccatttttttcctttccaccatctgataaaggataatggacccgaagtaaaagttaacatatttgtttgtatcataccactgctgttgtaatccttctc

SEQ ID NO: 31375 - DNA, 229 bp, Glycine max
ccattcttaggaaaggaagaagattatcaaaggattgaaggggcacatagacaaaacagcttatcatcaatatgggtgcatggtgctggtttgcatcctttcagttgttgacgacaccaaactgataacaaaggttatcattcgtgagcttcagtcaattttaaaggagcttgttctagataagaatggaggcgtcccttactccaattactacatcctaatagttcac

SEQ ID NO: 31376 - DNA, 593 bp, Glycine max
ttcttccgaattggtggttaggaagaacaacaagggttggttacagttaccgtagtgagtttctgatccgatggatgacgagcagcaagagggtccaagacaggagcaagaagaagagggttcacgacctcgaagtcacaaccgagaaatggaaaatagcctccaaaatcatctacttaatggagcttctcaagcaagagcccgaaatggtcattgccgttcgctccctggagcaccaccgcagacaaatcaacctccccaagccccaccgtgtctccgatttcctccgcaaaacgcccaacctcttcgaactctacaaggaccaaaagggggtgctatggtgcggcatgacctcaaaagccgagaacttgatggaacaacaacaaagggtcatcgaagaacatgccgacaaagccgccgaacacgtcacgaggtttctcatgatgtcgctggataaaaggcttcccttggagaagattgctcatttcagaagagattttgggttgccgttggattttagagtccattgggtgcatatgtatcctcagcattttagggtggtgaaagcacttgatggggttgagtttttggag

SEQ ID NO: 31377 - DNA, 437 bp, Glycine max
cggctcgatggcaattaacgagtatatatggacatatgctgctcttgagtttgcccttgtggctttaaccgtgcatctattttatactatgttgcatttgacggccatatatgccatactactttcatcagttttgggttttggagttgctatgggcatcaactacgcgtatatccagtctgtcacttggaggcttcaggtttctcatgttgataacccagtatgaatctcctcacaagggaaacaacttcatcgtatctactgatatgatgacctgccacgatgtttatcatgaaccttgtgtttgtcaatcaataccactaccatgtagtatatttttttttttgcgaaataaatatcatgaagtgtatatgcaagagagcaagagaagcagaatcttttaacattttttttctatgaaattctaaatttatttc

SEQ ID NO: 31378 - DNA, 465 bp, Glycine max
gatgcatgcatgctccttcttttcttcttatgacatccaagtgcatgattagaaatcaggtgaaaaatcttttttgagacaaaagtacttttataaaagtatcagaacttttatttttgtttttattcgttggattgcattggaatgcgtatcataataatttcaagtgtaaattaaacgtatatttatttgattactagggttacatattattatacacatatttatgtctatatgttttataaagtttggttataaaattgcattgtaaggttatatattatggacaagctaagccagtataaacgtgtgttcaaccaatttgatgagaatggagacagcaagatatcgccgtcagagctccggcaatgcgtggaggccattggcggtgagttgtcagagaaggacgctgaggtggcagtgacattgctcgacagggactgcgatggactggtggtgtttgag

SEQ ID NO: 31379 - DNA, 295 bp, Glycine max
gtgggttcttcaagacttcaagtgtttgggtgcttatcaaacaactcctgttttattcacttggatggagcatttttagcttctgttcctgtttagtcactgtaatttcgtctttaaaagttctgtggtttataattgcttaatcaattttccttgttcgcggacgaataatttggtttggtgatctgaattatcgtatcaacttatcaaatgtggaaacgaaagctcttatctcaaaaaaacagtggtcaaaattggttgagaaagaccagctcatgctagaactcaagatcgg

SEQ ID NO: 31380 - DNA, 148 bp, Glycine max
gttgatgtgagattccccagaccagatagatcaatgagacttgataaccaccacattgaaattgagagacaattgaaggatgtcaaatggaagaaagaatagattatggaggaattaaaaagggaacaaatattgttggacacgacga

SEQ ID NO: 31381 - DNA, 430 bp, Glycine max
ctctcagaagcccttgttgtcaacattggggacattatagagattatgagcaatggggcatacaaaagtgttgagcacagggcaacagtgaattcagaaaaggaaaggatatccgttgctatgttctttctccccaagtttcaatctgagattggacctgcagttagcctcacaaacccagaacatcccccgttgttcaaaaggattgtagtagaggcgtatatcaaagattacttcactcataataagttgaatggaaagtcctacttggagcatatgaggatcacagacgatgaaaaatttaccaacgcctctatctagcacctgcaacacacacacatatatatatatagtgaagggttgctaacttgttatataggtatatatgtgtgtgttgcacaatgtcagtgaaagtaaaatgtgttgggga

SEQ ID NO: 31382 - DNA, 362 bp, Glycine max
cctaccttcgcttctgtatttacattttctccttaaactcattcttcgcactcttgcattgcctccacctccttttctccatttatagtataatggctgctgaagtatattaccaggctattggtactttgcagtcccattcttatctgaataatttaaatcatcaccaaaagcatcaaaacaatttagtaacattggtgtctagggattttatcagcagtactggcttgtcaacgagaagaagtaactgcactggccagaggaattgtagtgtaattcgatctctagcttcgcaaacatcagtcgttgatccagtgttgtccccttcaagaagcaatgctggtgacacttacaagaaatca

SEQ ID NO: 31383 - DNA, 632 bp, Glycine max
tttttatcaaggaaatcttccctctggggagctgggtgccatcaaacgggctgcgggagagcctatgcagggtgctgttgaatttaaaactgagatcgaacttctatcaagggtccatcataagaatctcgtcggtcttgtgggtttctgttttgagaagggtgaacaaatgctggtgtatgagcacattccaaatggcactttaatggatagtctctcaggaaagtctggcatctggatggatcggataaggaggcttaaagtagcattaggtgcagccaggggtctggcctatcttcatgaacttgctgatccacctatcatacacagggacataaaatcaagcaatatcctacttgatcatcacctcaatgcaaaagttgcagattttggtctctctaaacttcttgttgatagtgaaaggggccatgtcactactcaagtgcaagggacaatgggttacttggatcctgaatattacatgactcagcagttgactgaactgagggatgtatatagcattggagtgttaatgctataactatcaacagcaagaaggccaatatagcaatgccattatattgtaatagcggcatgagggtaatggacatatcataagatttatacaacct

SEQ ID NO: 31384 - DNA, 524 bp, Glycine max
agatctcagctccataaatcaaggattttctttgaatcatggattttagctaaataaatcataaatcttcataaatggatcaagttgctcctcctccgattctcatgcaccgcaagcgcgatctctcctacgccgtcgtttcgcctgctcccaacccgagctggagctgggactgggacagcgtgcgtttcgccggcaaaccaccgccaccactctcctccccaaacgacgacgtcgtttttgaggagagtgttgcgccgcctctgcagttaaacctcgggggaaggacgaacaacagcaacagcaacaagagagttaggtcagggtcccccggaacgtcgtcgtatccgatgtgccaggtggacaactgcagagaggatctgtcgaaggcgaaggactatcaccggagacacaaggtgtgtgaggctcatagcaaggcctccaaagcgcttctcgcgaatcaaatgcaaagattctgccagcagtgtagcaggtttcatcctctctcggagtttgatgagggg

SEQ ID NO: 31385 - DNA, 633 bp, Glycine max
  unsure (1)..(633): unsure at all n locations
aaaaaaaaggaaaagaaaagaaaaaaaacctgaatcctcttggactctctcagctctcagatctgagttccagaaattaaggattccctttactttcccttctcctcatggatctttttctttcaattttagataaataaatcacaaaaaaaaatcaaagatccttttttcctatttttttttgccgttgaaaaaaatggaaaaggtggctccgcctccgattctgatgcaccggaagcgcgatctatcgtacgacatcgtttcggcgggtccgaacgagagctggaggtgggaagtgggacagcggtgcgtttcgcaggaaaaccaccgccgccgccaccactgtccccaaacaacgacgtcgttttcgaggcggaaagtgtcgttcctcctctacagttaaagctcggaggaacaacaagagtgaataacaataacatcaatatcaacgttagcaacaagagagttaggtcggggtcccccggaacggngtcgtatccgatgtgccaggtggacaactgcagggaggatctgtcgaaggcgaaggactatcaccggaggccaaggtgtgcgaggctcatagcanagcctcgaaagcgcttctcgcgaatcaaatgcaaagattctgcagca

SEQ ID NO: 31386 - DNA, 466 bp, Glycine max
caggactccagaattgatgttttcttatgcctcatctgctcatgaacgaggcatacaagtcattattgctggtgctggtggtgcagctcacttgcctggtatggttgctgctcttactcccttgcctgttattggcgttcctgtgcgtgcttctaccttggatgggattgattcactcttgtcaattgtccagatgccgagaggtgtccccgttgccactgttgcagttaataatgcaactaatgctggattgctggcggtgaggatgttgggtgttgccaatgatgatcttctgtcaaggatgagtcgatatcaagaggcccaaaaggaaagcgtattgggcaaaggagataagttagaaaaacatggctggaaatcctacttaaacaatagttaattatccccattaatttggtgattatctcttaggctcatttctcatttttggtcaactacaaaattttga

SEQ ID NO: 31387 - DNA, 550 bp, Glycine max
attgagttcaagccaggctgaaagtgtatcaagcccagctgatctaagatatcgagaagatttgctatttcctcggagactcatagaagatgctggaaatgtaagagttggtagggctttgcacaaggttattaagccttcaaggcttcttgaatcaaaacaagtattccctggggagaagtttattttaaatggtgataataggtgcatcgacatggtattggagcaggatgctatcggcaaagatgcattgagagggtggctagttgcttcatatgctgtacaaattggcaagtcctctcacgagctcagtaccagtaccctgctacaggcctatgagaaaatgcatgaggtcttccctgcctttataaaagaattacagtgcaaagggtggcatacagatcggtttcttgatggaagtggttgccgctttgcattgtagtgtacaaattaatcctatattggctttagtaggccttttacctattgcgagagatttgatgcattacatgtgatggttcaggttacttcttccccttattcttaatat

SEQ ID NO: 31388 - DNA, 282 bp, Glycine max
gttcccacctctctaacaactctgcttccaacttcccaagtttcacctataattcctttcaactttcaataacatcacataccacagtctctcatatcgctttctctcatgaatataatgctatcatcatccaagcaagaataagcaacaaaatgagtcaaagtggctacatcagtgagaaaccaggcttgtccttgagacagaattccaataggaaatcaaccagaaatgggcaagtgaagagctgcatgttcagaattccttggcagtctgagacctctc

SEQ ID NO: 31389 - DNA, 285 bp, Glycine max
caaagttttaattacagcatatttttttcattttcttcgatcccttcagtttgcaatttcatgtctaggctcatggaaccacttgttgtgggaagagtgataggagaagtggtcgacattttcagcccaagtggaaaaatgaatgtgacatattccaccaagcaagttgccaatggtcatgtggtaatgccttctactattatgggcaagccacgcggtgagatttgtggtgatgacatgaggactgcttataccttgatcatgactgacccagatgctccaagt

SEQ ID NO: 31390 - DNA, 397 bp, Glycine max
ctagctaacaccacttctctctctctctctattattctctcctattcaaatgggaaacgcattgaagactccatgctttcaactcaacaccaattcatcatcatcatcaaaatccgtgaagctcatattttgggaacgaacatcgagatcccttaaagggaaacacatagctggtgagatcatgtttgagttccctgaaatgatggtttgtcatgcagactctttcttcattggacaaccaattcctgttctctccatagatgataaactcatgcccggccaaacctactttgttctccccattgatctctttgcatgcaacaacctcaccgtggcttccatttctgcccttggatcttgccctaacaagtcccctatcaagtttggtgcatgccct

SEQ ID NO: 31391 - DNA, 320 bp, Glycine max
ccctcgagccgattcggctcgtagcacaagtgcaaattgaactaattgacctagcaaacttctcattaatcgctatagtgctagtgattaattgcaattttgaataataatgactttctattcactacgttataacgtgtttcgcttctctattttgttttctctacttattgccatagcctctgctgatctatcttcagatttctatgcatcaacatgccccaatgccctctctaccataaaatctgcagtgaaaagtgcagttgctatagagcgtcgcatgggggcatcattgttccgtcttcatctccatgattgct

SEQ ID NO: 31392 - DNA, 292 bp, Glycine max
ccaagacactcgccggccccggggtaattcagtgagccaccggcgagtttgggtgaaggagcgttccggcgcgtggtgggaggagtgtaacacacccgaatttccggaacaagggctcacaaaggcgttcagaatgggaaggctcacttttgaagcgatatgccaggagcgcaattcggtgatagcgaaggaagacacgacgctgagaaccgccattccggtgaaacaaagggtggcggtttgtctgtggcggtttgccaccggggaccctctgagcgtggtttccagaaga

SEQ ID NO: 31393 - DNA, 391 bp, Glycine max
ctgatggacaagttcaatgaggaaattcagctgaggggattgaaggatcagatatctgttttggcctgttctcatatcggtggccataagtatgctgggaatgtaatcatattctctccaggatcagatggaaaaatcatgggtcattggtatggctatgttactccggatgacgtggcagccttgttggaccgacaaattgccaagggagaggtcataaaaaaactttggaggggtcaaatggggccacccggtgccgaaatcaaggtagcagatgaccataaacttgctaacggagtttataataacaaggccaatctaagcaacaatgaaaatgttacaggatgctgtcagggtgttaatggggtttcttgctgcaggactgcaagtt

SEQ ID NO: 31394 - DNA, 435 bp, Glycine max
gaaaatgtgtgtgatagattgcttcttcctttccagcatgaggagaagtggtcagaaaatctgagatctaaattacccaagacaaaggaatcacttgagggtgctgatggccccaccttacggtggaggcgtaatgtactacttgttgaagcttcacataatccagattctggaagagtgatccaccatgcccggtgaacttgagtcattttgtgctcgtaatggcatacgtttatccctaatgcagggtttgtctgggattgtaaaaacagtgccatcaacaacattcccaactccatttcaatcacctctgtttacaggaagcttcccttcgagtccccgcatgtttagtcctgatcttggtcagaggattggacgaattgatctggtcccacctttaagtttagatggtcaattagggaaaacaattgcatc

SEQ ID NO: 31395 - DNA, 300 bp, Glycine max
gttttgttggtgagaatgaagagaacgaacggatccgaaaggcgctgagagaattttttgacctgacgggggcgttcaatgtgtctgatgctcttccttatttgagatggttggatttggatggtgcagagaagaaaatgaaaaagacggcgaaagagttagatgggtttgttcaagtttggctggaagaacacaaaagtaaaaggaatagtgaagctgaacccaaaagtaaccaggacttgatggacgtgcttcttagccttgttgaggagggtcaagagtttgacggccaggatgctg

SEQ ID NO: 31396 - DNA, 267 bp, Glycine max
atccctctctgttctcttctctgccttctctgtgtataaccccgtgacccttctcctcatttctcattctcttttccttctcacaagacttattatcatcatcgtcataactattgtcactattactaaacttggtgtagaatgacgaaccgtaatgtgaataacacccttgtggagttggcaatgtcgatttcaaacacaagtgctctacctagagctacggtgcctgggctaatggccttgcttggtggggttttgggcctaccc

SEQ ID NO: 31397 - DNA, 262 bp, Glycine max
caagcattctccattacatggcatggagaaacattgcaatgtagaaatcgctgcacatgtttcacgcctgtcatcatcaaaacatgaaggggagcaccattctttccagctagaagggttaatggagagtccgtccgtggatgacgatgggggctgcttctcgcctttacagttaaacgcaacatccatcaacattgaagtctactataatacagcattgaactataccttgatggttacttttatctcatttttgcaagtt

SEQ ID NO: 31398 - DNA, 397 bp, Glycine max
gcaatttggacctccaaaccaacctgaagtcagtattcttgactaccagtctcaacagcataagcttatgccaatgctggcttcaacttatgcttttcattttgccacgacaaatctagtggagaatactctcaaatgaaaaaaactcatgatgacgaattagttgcagatgtccatgccctttcggcaggtctaaaggcttatgtaacatcatacactgcaaagtcactcagcatctgtagggacgcctgtggaggccatggttatgtgctgttaatcggtttggtattttgagaaacgatcatgacatttttcaaacatttgaaggagacaacacagttctgcttcaacaggttgcaggtgatcttttgaaacaatacacgggaaagttcaaagg

SEQ ID NO: 31399 - DNA, 763 bp, Glycine max
gtggattctgagtctccaaggataatggaagacttgaagccatggaaaattgatgaaaaattacagcatgggagcaccacaaatgaacttccaaaattctacaggagttaccgagaacgaatgcgaaaattcgatatcttgaattaccaaaagatgtatgctttaggtgttttacagtcaaaggacccactccaatcattttcaacccgtaagaacccttcaccagcattcacatccattcttacacgcggctttcgcctttctagacgtaaaaacactgaagttgacccaatgaggaagatcatagagagttgtacagtgatttggaaatggtttatgtggggcagttgtgcctttcttgggaatttcttcagtgggaatatgagaaggccttgaagctatgggaatctgaccaatacgggttgctaaggttcaatgaagtagctggggagtttcaacaattccatgtccttctccaaaggtttatagagaatgaacctttcctccaaggtccacgggttgaaaactatgctaggcatcgttgtgcaatgcgcaatcttcttcaagttccggtaataagagaagacaatgccaaggatagaaggaaattcagagaaagagaggctgataaagatgcaatcacaagtgacatgctagtggagattttggaagaatccatcagaacaatttggcgtttcataagagcttgataagatgcatccagcttggcacttaaagggtcaagagaaaaccaagtagagct

SEQ ID NO: 31400 - DNA, 356 bp, Glycine max
aaagaacaagctcttacctatttgcctgcattgacaccattttgaagctttttgggctctcagaatcaacttttacaatcacaactaaggttactgaagaagatgcttctaaacgccatgagacagaaataatggagtttggaacctcctctccaatgctcactgtattagccactcttgcattgctcaatttattttgttttcttagtgtattgaaggatgcaatcctaggtgaaggtgacattggagcttatgagacaatggggttgcaagttctattgtgtggttttcttgttttcatcaatttgcctatataccaaggacttttcttaaggaaggacaatggaagattgcct

SEQ ID NO: 31401 - DNA, 462 bp, Glycine max
  unsure (1)..(462): unsure at all n locations
ctcatacttgaagcagaaaaccaggcctaaaccttctcctcctatctccttctctgcaaacccaatcagagtgacaacaacctagtgcggttccaatcaaacaaagatggttaatgcaaaaaccgaggtaccccataagagtgtccttagtatcaagcaagatgacaagttcttctgcaggcttctttcaaaggaaagctccatggccaacccttctttcagaatagcccttgctgtgccatttgtgtgggaatctgagccaggcaccccaaaacacaggttctctgaggacacactccctcctttaactcctccaccttcttaccattttagcaatatcaatagctacaagaagaaagagaagaagcactcatcaaagtccagtctcttgctcacaatgctaccaaagatgaacctcatcaagaaaatgattctctcatccncatcatcatacccttcttc

SEQ ID NO: 31402 - DNA, 279 bp, Glycine max
ccttaattcgctatggcaccaacattcaaggccttcgctcttttcctcctcctcgctctcttctccgccgcctccgctcaagaattatcccccgcctcgtctccggcaccgtcgcctgaagcaggagccgcagactccgtgccttgctccgccatcatgatcggtgcctcgctcgttttgtctctcatggcggtcttcaagttctaggatttcttattctgcatttcatgaatgaattaatattccaaaataccatatatactaaacttgagactttcc

SEQ ID NO: 31403 - DNA, 431 bp, Glycine max
  unsure (1)..(431): unsure at all n locations
gaaaattggttcttctgaggagagtagctacccgaatggatcaactctactgctctgttgcccccttgaaaacgagttctggggcttggattttcatttttccttaaagcactgcactgtggtatttgctccaatatgtagttaatgtgtgaactggttcatatttcatactatatattttcaaggtggggtgcagaaacagcgtgcggccaatctgctgtgttaatgtgtttttttgttttttatcgtttccgatttgtttttgaagtacttatcccatttctggtcatcaaatggggggccaaggattctttttgtagggtagtggccctgttaaagagattctttctctttttaggttccctattaacagctcccgatttcggatttttgnnnnnnnnnnnnnnnnnnnnnnnnnnnnnnnnnnnnnn

SEQ ID NO: 31404 - DNA, 467 bp, Glycine max
atgcccttagtatgggtattgtgaataagctacttcatggtcccatgcagcacctaaggtgtgatgggaacaatgatagtagtctgagtgaggtacttgagaatatgcgcgcccttaacagaatgtacgatcttgagacagaaacttccttgatcgaagaaaagatcagagtcaagatggaacgggttcagaagtagattcttcttcaattggtttagttttacttgattcctgtgggggctgcaaccctcgccattttgtacactacaatagtagattgaggccctatgaaggctaattttttcaattatttttaacattatgcagaagtaattggacatcgatagtccaattgaattcaacatgtatttttctcaatgagcctgatatagatcagttgtaaattcatgatcctcatgacaacagatgattcttgttttttaataacattaatgttagagcggagt

SEQ ID NO: 31405 - DNA, 459 bp, Glycine max
gaaaatatgagaggtaaacatggaaaaacaatgatcgttgtaatacatagaagcataacatttatgttgctcgccgttgtcagaagtttgctacatttcaagagaactgaagtcatatgatatgattccggatctgacaaaagcagtctggaatgtattggaacttagacttctggttttaatcagtttcttcttgcaagtattcctaatagtttttggcaaccgaagaaaatgcatagccgatgcaaggctacaagtcagtgtctggttgacctatctctcagctgattggattgccactgttgcactgggaatgctttccaaagacagcaaaaatcctgaagatgaccccgacttcataattatggccatttgggcacccttccttcatgtacatcttggtggccctgacacaatcactgcctactccctagaggataatgagctatatctacgaca

SEQ ID NO: 31406 - DNA, 329 bp, Glycine max
ccatacccccaacacaatcttcccctacatcttggtgtttgaacgttgcatagcttctcatttaccatggccaatgcactacataacgctgccatctccagagtcatgtttggagaccaatattccatctctcgttgcgtggttccatccctatccactcttcctctcagagccatgcacaaaggaaaacacgttgagctgaacagaacggttatggtggtaaaggcaaagactaatagtgattttcatgactcagacgttgacatttctttgagccacagagttaatgctgtgaaactttccaaaactctatccatatgtgatcatgc

SEQ ID NO: 31407 - DNA, 495 bp, Glycine max
gcttagattgatttgtgaatttcgcaaagtgtagaatagcaccagctcgataagctagagattgagctagcccaccgagcaaaccttcagagttataactagctagctaattaagccagtagcacccctaccaagcgacacattcatagcttctctttaggtttgtattcaacaaaatccatggctaagttagaggctattataaataaactcaggcgagtaaccagaatttattttagagactagctatagcaaggcttgtggctaagccagttaccttcctgagagtgaacttgagaaagtacagaggctagctaagcggattgggatggcaagcacagacacagctccacccaaggttgattttgactcccacaaagctcagatgtgcgcaaatctgatttcaacgaagtgaagagttttgttgtgctttattcgagaattagaatacaacacttggtggcacaaaagggaaaagagaatgaaagatgtatg

SEQ ID NO: 31408 - DNA, 490 bp, Glycine max
cgttacgcgtgggcttttagcttgttctctacactagagactttgtccagcactttagtttagaccctctttggctctattttttcctgcattacactaatcaccatgaaaagatttcatagtaaaagaaaactcttgatcttcctggtggtaatcccaagcctagtcgctgccgagtgcacgtgcgatgaagaagaccaagagcgtgacaaatcaaaagctttaaggtgcgatattggcgaccggttttattcatatcctacccgatgctttcgagaaccttacttcgccgtgtgtgaataagtatccatgggatgctttccccttcactggctttgtggcaatgtgcactgccatggggactctcatggttgagacttacgccacggcttattttaaaaaacatcatcactcacaagtccagacaacatacgtggaaaaggaggaatcaggggatgtgcatcttcacacacatgcaacacatggtcat

SEQ ID NO: 31409 - DNA, 407 bp, Glycine max
  unsure (1)..(407): unsure at all n locations
ttttagcttgttctctacactagagactttgtccagcactttagtttagaccctctttggctctattttttcctgcattacactaatcaccatgaacagatttcatagtaaaaagacaactcttgatcttcctggtggtaatcccaagcctagtcgctgccgagtgcacgtgcgatgaagaagaccaagagcgagacaaatcaaaagctttaaggtacaaaatagcagctttaatatcaatactagttgctagtgcaatcggggtgtgtattccacttcttggcaaagttatacccgccttgagccctgagaagaacatattcttcatcattaaggcctttgccgcaggtgtgatattggcgaccgngtttattcatatcctacccgatgctttcgagaaccttact

SEQ ID NO: 31410 - DNA, 789 bp, Glycine max
gatgccaccgatgtggtcgctctctccggcgcacacacctacggtcgtgcccactgtccctccctagtgaacagaaccatcgaaacggacccaccaatcgacccaaacttcaacaacaatttgatagctacgtgtcccaatgccgagtcccccaacaccgttaatttggacgtgagaacccccgtgaagttcgacaacatgtattacatcaacctcttgaaccgccaaggagtgttcacttctgaccaggacatcgcgggcagccccaaaaccaaggaaatcgtgaaccagttcgcttcagaccagaaactgttttttaagaaattttccgatgcttttgtgaaggtgagccagctagatgtgataacggatcgtattgggaaaggggagattcgtgataagtgctttgttgcaaataagagaagatcttctatggcgtctgtggtggaagaagtagtggaattggctcaggagatataattgtattgggtccttttgctcagggtgttcttttttgtttttctgaatggattgtgtaataaacgttgatatgtgttttcttttcttgttgtcttctcatagatcattgctttggattggttcaaagtttaaccagtataacataaacaaggcaaaagtagtacgagaataattgatataaatattgctgctgtgttccatcgatcgagcttattccctgttattatggacagcggtgataaaattagatttagtgacaaaacttggtccccatttgcgagatatagcaacataaaaatagttatactt

SEQ ID NO: 31411 - DNA, 285 bp, Glycine max
cagagggagtagcggcattaaaaatgcagatcttcgtgaaaactctgacagggaagactataaccctcgaggtcgagagcagcgacaccatcgacaatgtcaaggccaagattcaagacaaggaaggtactacacataaattccaaactccattcaacgaatcgcgttttcaattttccataacctaaaaaatctctcgtctgaatttgtcaggcattcctccggatcagcagcgtttgatttccgccggaaagcagcttgaagatggaaggaccctggccgatt

SEQ ID NO: 31412 - DNA, 706 bp, Glycine max
ccagggttacctagacccagaatatttgttgactcataagctgactgacaaatgtgatgtctatagcctgggaattgtgtatctggagcttttgacaggcatgcaaccaatatcacatgggaaaaacattgtccgcgaggttaatacggctcgtcaatctggcacaatatattccatcatagacagcagaatggggttatatccatccgattgcttggacaagtttttaactctggccctcagatgttgccaagacaatccagaggagagaccatcaatgctagatgtggtgagagaactggaagatatcattacaatgttgcctgaacctgaaactcttttctcagatgttagcttactcaattctggtaacatagcacccccatcatctgcaacaacatcaacatcaaatgtgacaagggaggagcaacacatgtcctcatatgtttcaggaagtgatcttgtcagtgatgtcattcccaccgttgttcctcgctgatgctgtactatgctatagtctccttcatatattgcaaaaaatttaattataatttttttatactaagattttgataaatggtaaaggcaggaagtttattagagacatagctattatctgcagatgaggtgtaaagaaaaagagaatgatacatacaactactacattttaagaaaataataatatgtttatcatgtgtggtttgtc

SEQ ID NO: 31413 - DNA, 272 bp, Glycine max
gcaaattaagcaatttacaaaccctagttctcgtatatattcttcttctttgcatcaatcctttgtctcaaattaaaatcatgggaattgtcactactgaatgcgagcaagtttgtgccgtggctcctgcaaggctatacaaagccatggccttcgattttaacaacgttatgccaaaagctatcccaaattttgttaagagtgctgaaatcattggagacggagggccgggatctattaagaagctcgttcttgttaacggatatgtgaat

SEQ ID NO: 31414 - DNA, 257 bp, Glycine max
ctgagggcaaggtcctggagcaaggaacctatgctcaacttaggcacaagagaggtgccttcttcaaccttgccagccattaaaatccaaacttaggtaatgtaaattattattttcatgtacaaatttgagttcatggaggaatgtagcattgtgagcttgcttgggacaattgcttcctgcacctctggactttcttcctgaaccctactttggaacgtaaaacttacattccagattagtcattctggaaagac

SEQ ID NO: 31415 - DNA, 251 bp, Glycine max
ctcaaattgatttttcttgggcgcagaggttaggacaatgttgtaacgttgttagtgttttggttgtaaccaaattttgggaatgtaaacattactttatcgttttatatgcttatgctccaaaatgaaaattgtagctttattttccaaaaaaaaaaaaaaaaaaaaaaaaaaattaaaaataaaaagctttcggggggccccccatttgggcgccccccgccccggaaattttttgggggggggcactc

SEQ ID NO: 31416 - DNA, 283 bp, Glycine max
ccaagatgaagaggcagagaggtgtgcatgtgaatgctgttaggcccatcatgaataataatcctcccaatgttgaagatgtagctgcagctgcaatggggaagaagaaagtgaagaaagagggtgagcagaaggtggggaatattatggtggaggaagaggagataaaggaaagtagtactagtagagacagcatggtgggtgggtatttgcagcaacatcaacaaggtggcatgctgatgggttggaattgggaggagaatatgaatatgccattggtggg

SEQ ID NO: 31417 - DNA, 504 bp, Glycine max
cacttcttgaaccgtgccttaactaaactagagctagaattagagttagctaccttgcctaattcacaaacgcgtccctctacggctctacctattagctatcttttttgtgctgtgattgaacattaatttgtgatagctcaccatggccattgctacttgtgatcatgataagaacgcaaaggctttgcagttcattgaggatatgacccaaaacactgaaagtgtccaagagagggtccttgctgagattctcagccaaaactcccagaccgaatacctgaaacggtttgagctgaatggagccacagaccgcgacactttcaagtcaaaggttcctgtcgtttcctatgatgatttgaagcatgatatccatcgcattgctaatggtgaccgctctcctattttatgcgctcacccaatctccgagtttctcaccagttctggaacatctgctggggagagaaaattgatgccaaccattcgtcaagagatggaccgtcg

SEQ ID NO: 31418 - DNA, 504 bp, Glycine max
ttcacccacagataaggaccgtatcgtacgcaactggatctgctcttctggcgcttgctgcaacctcgtccgaaacgttcgttttggcaaaatctgaatcattggaattttgaagcgactcgattcgatgcgaggccacgattggatcaacacgctgctccccgacgagttactcattgagatcttccgccgcctggactctaagtccaaccgcgacgccagctccctcgtctgcacgcggtggctccgcctcgagcgcctcacacgcgccgccatccgcatcggcgcctccggctcccccgacctcttgatccacctcctcgccgcgcgattctccaacatcaccaccgttcacatcgatgagcgcctctctgtttcaatccccgctcacctcgggagaagacgctcgagcggcaattcctcggtgaagctgcacgacgtgaatgataagcacggctctgcctctgatcagagcgatttggattcactctgtttatctgattc

SEQ ID NO: 31419 - DNA, 381 bp, Glycine max
gaaccggcgaaatgtcacccacagataaggaaaggcggtaacatatcaaaccgtaccttacgcaattggatctgcttttcttttctgctcttctgccgcttgatgcaacctcgacctggaaacgctcgttttggcaaaatctgaatctgaagcattggaatttggaagcgcttcgattcaattcgatgcgaggccacgattggatcaacacgctgatccccgacgagctactcatcgagatcttccgccgcctggactcgaagtcgagccgcgacgccggctccctcgtctgcacgcggtggctccgcctcgagcgcttcacacgcgccgccatctcctcgccgcgcgtttctccaacgtcaccaccgttcacatcgatga

SEQ ID NO: 31420 - DNA, 456 bp, Glycine max
atctcttgcaacactacaattttgcttacatgggagccaagttaacaaaaaggataagacttggcatgctggagaatatcttgacctttgaaactgcttggtttgatgaggaacaaaactccagtggagcattatgctcaaggttaagcaatgaggcttccatggttaagtcccttgtagcagacagactctctttactagttcaaacaacttctgctgtcacaattgcaatgatcataggccttgccgtggcttggaagctagctcttgttatgatagcagtgcagccactcacaatcctttgtttttatacaagaaaagtgttgctctccacactctcaacaaaatttgtcaaggcacagaatcgaagtacacaaattgcagtggaggcagtttataaccacagaattgtgacttcatttgggagcatcacgaaagtgctatggctattcgatg

SEQ ID NO: 31421 - DNA, 515 bp, Glycine max
tcgtttattgtaagaattttgctgacttgtaagcttcagagacgaagacacacggttagagtgagaaagagatggcaattgggttcatggaggtgcagcttgtgaaagcaaaggagttgtgtgacactgatttctttggtagtatggacccgtatgttgtgatacaatacaacggccaagagcaaaggagtagtgttgctaagggacagggcaataatccggtatggaatgagaaatttgtgttcaaggtagaatatcctacactgagtaattcatacaagattatcttaaaaatcatggacaaggatcttttatctgcagatgactttgttggtcaagccatagtctatgtggaagatttattagccataggggtagaggatggtgcggctgagctacaacctctaaagtacagagtaattcgtgcagatcaatcttattgtggagaaattgatcttggtataacttttaaggtggaagaagagttcaatggagaagctaaacgaggatcgaag

SEQ ID NO: 31422 - DNA, 366 bp, Glycine max
ctcgaggttaaacaaggtatttcaattatcgtgtcttcttggctctctgtttagggtacgaacctacccatgtctccttttcctccatactctctttttcccttaattgcttttgtttgaactttatatcataattgtgctcatacgttgacttttcatactttttcatcaagtttgtatacatagtttgtttggttgaaagggaatctccgtttatgttctcgtaataatgaattttgttgtgcaaactatgtctggcttaattatagtgtcagagttgttggattcttagaggactatgagcagtttttctctacatctgattttttatttagataattttttattgcataattatactgtctt

SEQ ID NO: 31423 - DNA, 468 bp, Glycine max
  unsure (1)..(468): unsure at all n locations
cccacgcgttcgcccacgcgtccgcccacgcgtccgcccacgcgtccgtttccttttctctctttcttccgatccgttaccgcaggaacaaccataactcggatcccgactcgttcttcgagcccgagtcaccaactcatggcgcgggaactcactcaccacctttcactaatcctattcctcatcgccaccgtcgctggcgacaccgcgctcctccgcaaccgccaccacggttctcgcccttccatgctccttcccctgtacctctccgcaccgaattcctccacgtcagcgctcgatccccgtcgccagctcaccggatccgagtccaaacgccaccctaacgcacgcatgagactccacgacgatctcctcctcaacgggtattacacgacgcggctttggatcggtactcctccgcagatgtttgctctcattgttgatacggngagcactgttacgtatgtt

SEQ ID NO: 31424 - DNA, 439 bp, Glycine max
gttagaaacaaacttagcctcgtggcagttcggggcattattaatgcactatccattctcttcacatcccatttaacgcttggttgcacaaacctcacctcaattccaaaaccaccaccccttttggtcatgtaaaacacaccacaacattatactcagtctcacaaacatacaatacaatacaaccttaatcatgccaaagcctgtgtttcatttcatccacgcagctcgtgcgaggaaattaaaacaacagagacattcctccgaactcagacattaatggatccgttccgtggattgtgtctgaattcagaagagacagcagaacagcatcatgtgcagatgaagtaaagtgaagttcaatttacaatcgagcacctggatcaactagtacaagattgttccggttctagcttaactagtagtctcaaattcaagt

SEQ ID NO: 31425 - DNA, 369 bp, Glycine max
aaatcttggagcactgcattctttggtagctggaggcacagctcatcagacagtgttgttgccacaaacaaagagggttcaaatgacactaaaaaatcaggaaaagtaggttctcaaagtagtggaaatgatcactcttcttccaataaaagatcgtccaatgaaattttccctgaaccattggaaatacaagatgtggagacaggagtgacaagataaccacttgtgaaatgggtttggttattctttagtctgtgagatttttttaccactttctcggataattggtggtgccatagcaattgcttgttattagcacgtcagactccacccagcatccattatggtccatattgaagcaacggagta

SEQ ID NO: 31426 - DNA, 494 bp, Glycine max
acgagtgaacttctttaagcatgcctctgcgctggaagagttttgtggaggcacctacaacgaggaaccagaaagatactctgctatatcattaccagcaaagttatgtcgattgggtttaacatatcttggaaagaatgagttgcccattgtgttcatgtttgcagccgtactaaaaaaattggatctcctctatgcaatgctagacacggaggatcattgcatgttaatccaaaagtgtccaaatctggaagtccttgagacaaggaatgtaattggagacagagggttagaggttcttggtcgttgttgtaagaggctaaaaaggcttaggattgaaaggggcgatgatgatcaaggaatggaggatgaagaaggtactgtgtcccatagagggctaatcgccttgtcacagggctgttcagagcttgaatacatggctgtttatgtgtccgataattacaaatgcatctctggaacatattggaactcac

SEQ ID NO: 31427 - DNA, 268 bp, Glycine max
cctcgagccgctcgagccgaatcggctcgaggaaggaacacgtcgtcttctttcaccccgacctgcgcattcccggggcggacgcctggtcatcgatgccgcagtcggcctccagaatcgcgggcacaaggtcaccatcttcacatcgcactgcgacccgcaacactgcttcgatgaggcgcgcgacggtaagcctctactacaacacctcggaccacccgccgcctatgcctggccacgcagctgagacctgacgcgcgcacaaagg

SEQ ID NO: 31428 - DNA, 340 bp, Glycine max
ctggaatccaacctgtcgatattcctgggatccaaaatctcgatgcgacagaacacatcgaaggccattcgtcttatctgtgggctacacaaaagatcttagaccaacttcaattggatacatactatcctgtatataactacatttcttgcatacccatacagtgacctttaatggaggtgttctgtttctctgcttacgttcttctgccagccgttgaagtgggatgaccctattcagaaattatgtatggaatatatttgtttattacactttttgtttcaaatataaaaataatcaatatttgtcagcagtactatttgtcaagatagaaaatagg

SEQ ID NO: 31429 - DNA, 314 bp, Glycine max
caagcgccaatggccaagggtcgcaaattccccaccacgaccggaaccgagcgcttcttgggattgggaatgggaacaacaacaacaacctactcctcccagggctccgccgccgccgaccggtcggagttctgggaagaggacgtgtggtccacggcggaacaccgtgacggagatgtgaatgcctgccccggcgagtgggaggcatgcgcgccgccgcggcgtcggaacaacagggagaactgcaacgtggggggtttgtcgctggcgttcgaggatgggtccggtggtggtacgaggatagtgcaccacca

SEQ ID NO: 31430 - DNA, 747 bp, Glycine max
cccacgcgtccggttttttttgaagttttaatctttttggattcaaccaaaatcaagataaaatataacgcaattggttttattctccgaacctttttttttgtgtgtgttcaggtatttgtacgtgatagaattagagagaaagagacaaactgagttttgtgtttgattctttgatttgaaaataccatgcatgccgctttccattttaaaaattaaaaacaaggtctaattttcaattgggtgtccatgcctgtacatggctgtgtctcttaaatagtctgagctataaatgtacacagattgcattttgcttatgttagaatgttaacttgtccagattgcagagtatagcggcaacataccaggatcattatgacttgtggctgctttggagccaaatcgataaaggcaaaacgcccttcttatgttcctggtgaaattgatggctatccgctagataatgtcaggcaattttctgataaagaactgagattggcaactgataattataatccaaacaataagataggacgaggaggttttggaactgtttaccagggaacattaagagatggaaggcatatagcagtgaagactctctcagtttggtcaaagcagggagttcgcgaatttttgactgaaattaaaactttgtcaaatgttgaacatccaaaccttgttgaattgattggattctgcattcaaggacctagccgtacattagtctatgagtatgtggaaaat

SEQ ID NO: 31431 - DNA, 430 bp, Glycine max
cgtgtatgtatgtagtccatactctggactctctcttcttctctttgcttctcttctttctctctcacgcaacaatggctcatctcttcagagacctctcattgggccactccaagagagactccacgccgccgctgccgccaccgccgataatgcctcccaagcccgccgccgtcaccgccgccgacgaccttccctctccgctcggccaactctccgccagtctctccgattccgacctcgcgctaacggcgtacgagatcttcgtcgccgcgtgccgcacctcctccggcaagcctctcagttccgctgccaaccactcctccaccaattcgcccagtcagaactcgccgaactcgcccgcgctccagcgatccataacctccacagccgccagcaaggtcaagaaggccttcggtctgaaatctcc

SEQ ID NO: 31432 - DNA, 385 bp, Glycine max
ctcaacccttgtacatgcctatgcctgctgccacactcaccatgtgcccttcttgcgagaggctcggtggcgttagcgataacggttcgaataaaagccccttctccatggctcccaagcctcacttctataaccccttcgccaatccttctgcagcatgttgattattgtggttaggttttcactcttctttaaaaatgacaagagttatttcccacaaccattgtatttttttggttgagggcgatgcgtctagctagctagggaaaattaagctgtaattagctaatactgttgagagtagtaactgctgattgaaattaccttttgcttttttcttcatctattgtatgtttatataaaccgttatagaaggtgttcatct

SEQ ID NO: 31433 - DNA, 336 bp, Glycine max
aaaccataaagtaaagaggcctttaaaagctcttattggtgatgtattgagcttactttgaggacaactcattggtacttttcatatatttgtggtgctccctcttcagtttttggtaaactaaacttcctcaattcaagggggtatcaaaatctgctggttggtttcatcaatctgatggaggaaaatctgcctcccggatttaggttccaccctacagatgaaagactcatcacatgttatcttacaaggtaggtttctgattctagcttcacatccaaagctatagcagttgttgatctcaacaagtgtgaacttggggacctcccaggtaag

SEQ ID NO: 31434 - DNA, 422 bp, Glycine max
gtttgcgtgaagcaatggaagggaatttgccacagggaggtataattcaaggtgggacttcttttggtggctttgatttgccgggatcaattcgggttcagcatcaagcacaacatccccattccatgcatcaacatcaacctcatccgcgacaagggtcttctgtacattccgccgttcatgatggttttccacttacaatgggaaccatgcagaactgtgaccaaaccatttcattggctgactttagtaaaggagacagaagtaaaaacctcggcgagtgaggaagacgagccgagctataccgaggatggtgttgattgtcaccatgaaacaactagagggaagaaaggatcaccttggcagcgtgtgaagtggactgataagatggtaaagcttctgataacagctgtttcttatat

SEQ ID NO: 31435 - DNA, 647 bp, Glycine max
cttggttagttattcttcagttagaggtgtgacttgtgaaaggtttgtggaattgggtttggttgatgcggtgttggaggttcttgttgatgcggagagaggggtgtgtgagaaggctttgggggtgttggattgcgtttgtgattgcaagcaaggggtgcagatggcaaaggctaatgctttgactttgcctcttgtgattaagaagcttttgagggtgtctgagttgagttcaagctttgcggtttcggttctttggaaacttttttgtgacaagaatgaagaaggggtgttgattgaggcgcttcaaatgggagtgtttcataaactacttgttttgttgcaagtgggttgtggtgagggaaccaaagagaaggctacggagttgttgaagttgttgaatggttgtaggagcaaagccgagtgtgttgattcgtccttggatttcaagcatttgaagaagcccttctaatttgatctggctaggatatgagatttcattccactttttttttgtataggtcatattggtagaaacagaatatactcttgtacaaagacacacacacagagtctcatatacggaggataccaattggtatctccaacactcaattgaagttttgcaattcattttttttaatggc

SEQ ID NO: 31436 - DNA, 580 bp, Glycine max
cactcgagccgattcggctcgagcatcaaccccatcacaacttccatcaccagcacgaagctgaccaatgtctcacaccagaaacgcactctccttttctgttcccccatgttgattccactgttgtccctgacccctccaatttcttctccccaaaccttctctcaaatccactccccacaaactccttcttccaaaactttgtcctcaaaaacggtgaccaacctgaatacattcacccttacctcatcaaatcctcaaactcttgtctttccctctcatacccatctcgcttcatgaacccctccttcatctaccaagtcttcaaccctgatcttaccatctcttcctctcaaaaatcccacccttcccatttgaaccacaccatctcttcccacaatgatctcagtgttacattggatatcccttcttccaatttgaggctcttccttgttcggggaagcccctttttgaccctctctgcgactcaaccaacccctctttccatcaccacaatccacgcaattctctgctttacctcaagtgagtcactcaccaaacacactttccatcttaacaa

SEQ ID NO: 31437 - DNA, 506 bp, Glycine max
ctcattgaagatgtggaggctgtgcagatcagtgggggccctgctggtctggaagcagagttgcagcaacttaaggacctaaggagggtgaatcaagagttgctggtccagactgaggaattgtggcagaacgcagcaagggaagattctcacacttagaagccaatttggcactaaatggaccaggcctcaatcaagcaccttgaccaagaacttgcaggctaggctagacaggtttgcaggtaacttgaagcaagctgccgaaagtgatggtaggattgagcgttctgttagagaacattcagctctcatgtcgatccttgatgcccgtccgattgaatctgcacttccaagcttggcaaggccgattatgtcttttgatcaaaatgaagatgctattgtgggatctctcaagcaaagcttgaggcaactagaaactctaggagctcaaagggctggtcttgaagatatgcttaaagagatgaaaagaaaggatgatatattac

SEQ ID NO: 31438 - DNA, 458 bp, Glycine max
ttccagttcctttcgatgatcctgccggtgattacactgtcctcattggagactggtactagctcgaccacacggatttgaagtctcagcttgatagcggtaggaagctgcctttacctgatggaatcctaatcaatggtcgtggctctaatggagcatatttaaatgtggaacaaggaaagacttacaggcttagaatatcaaatgtggggttggcaaattcgctgaacttgcgcatacaaaaccacaaattaaagctggtggaagtggaagggacacacacccttcaaactacgtactcatcccttgacgtccacgtgggccaatcttactcagttctggtaactgcggatcaacctgctcaggactactacattgtggtctcctctcgatttacctacacagttctcaccaccaccggaattctgcgctatagcaactctgcaggcccagtttca

SEQ ID NO: 31439 - DNA, 289 bp, Glycine max
cagacatattggcattcgcagcacgagacagtgtttccaaagtgggtggcataagctacgacgttccatcgggacgaagagatgggcgtgtctcgatcggcgatgaagtgctagacaatcttcctagaccatccttgagcgctgatgatcttattagtaactttgagcgaaagggtttgtcagcagatgaaatggtgacactctcaggagcgcattcaatcggtgtgtcccattgtggtgccttctcgaatcgcttatactctttcagtgacacagtcacacaagatcc

SEQ ID NO: 31440 - DNA, 267 bp, Glycine max
cggctcgaggaaaatgtgtggaatatttgcgtatctgaattacgacgtgaacagagacagacgatacatcttgcaggttctcttcaatggcctcagcagattggagtaccgtggatacgattccgcaggcatcgcgatccacgattccaatttctctccccttgttttccgtcaagaaggaaacattgaatcgctcgtcaaatcggtttatcaagaagtgggagacactgaactgaacttgggggaatgcttcggcactcacgcggg

SEQ ID NO: 31441 - DNA, 284 bp, Glycine max
cagacatgaaacctctcagccaactgctggtattatttcaaatgtcaccggccctggatcttcaagaacactgattccttctcagaaacctggtttgcttggacctcctgtcaagcatgatggcaactctgttgatcgtgattatgacatgagaaaggacttttaggcatgaggcatggtccagtcataagaggtcaaatttcagctgaacctcctctgatattgaggccacctaatcaagcatcaccatctttgatgcagccatttggaggtgggttggtaga

SEQ ID NO: 31442 - DNA, 395 bp, Glycine max
cacaactcattctcaaatattcattttgtcaccaatcacatctcatttttctaaattcttgtttacacactctcattaatttattacattccatattgtaattaattcttcgtacgttagccatgaagagacagagagatttcgaggggtttgagagcatagatttggcaaattgtctaatgatgctctctcatccccaacaaaatgagaaactacttcaaacaaaaattgaggctgtggaatttgagtgcaagacatgcaaccgcaaattctcttcctttcaagcattgggtggccatagggctagccacataaggtcgaaacttgagggagatcatgaactcaaagcacatgctatatctctaagtttggcaaacatacccaaaatgcacgag

SEQ ID NO: 31443 - DNA, 578 bp, Glycine max
ggaagacaaagtttacctaagagccaactttatcactatattgtatgtattacgaagatatggcgggaaacgtggggtggggtgtgatagaagaggagggatggaggaagggaccttggacttctgaggaggacagattgctcattctgtatgtcaagttcccatggtgagggcagatggaactctgctgctaggcttgcaggactgaaaagaaatggcaagagctgcaaattgagatgggtgaattacctgaggccacacctcaagaagggtcaaattacacctcaagaagaaagcataattcaagagctgcatgctaggtggggaaacaggtggtcaacaattgcaagaagcttgccaggaagaactgacaatgagataaagaattattggaggactcacttcaagaaaaagatgaaaactccatctgatgctgctgagaaggcgagatccactcctcgaggagacagcattttcagcagcaacaacagcagttgaagcagcagcagcaacaattccaattcaacttggacatgaaagggatcataaacttgcttgaggaaaatgaccatagagtg

SEQ ID NO: 31444 - DNA, 394 bp, Glycine max
caatagttgatgataatgactcattattggatatatactgtcggagtgacataacagctttggcaaagaacagagcatatacacatattaatcttgacgaaatgactgttcatcaggctttgcagttgggccaggacgcatatagtccctatgagcttagaagtcaaagatgtcagatgtgtttgcgttctgatcctctgcataaagtgatggaacgcttggcaaatccaggtgtcaggcggcttgtcatcgtggaagctggcagcaagcgtgtagaaggcattgtttcattgagggacatattcaagttcttcattggtgattagttttggattggtgaatggaaaagtacaatggtatgtgctgtggttatgatactagagcatccatacaa

SEQ ID NO: 31445 - DNA, 284 bp, Glycine max
ctacgattcatcgcaattcacaaaatgggcaattgcttgaggcgccaatcgcggatcggatactccaccgacgacgatgaggactgggaggattttcgggcggcggcggcggcaagcggtggtgttaagacatcgacgagagaggtgaaaattaagataacgaagaagcagttggtggagttggttggtaaagttgaggtaaaggagttgagaatggaacaggttttggcacacttgatgaatcactctcttcaacgtccatggaggcctgctcttcaaagcat

SEQ ID NO: 31446 - DNA, 280 bp, Glycine max
gaccaatctcatctcttcttctttatgttctctttccttcttttgttctctgccatggaagacgagccatttctcactaccacttcccaacccatcgccgattgccttcttccatcttccaagtccttcaacgacgtcaccaccacacgcgcgcgtgacgtcgccgccgccgccgccgaggagattcaatccgaacaacaacaacctcccaagaagaaaaaactgagccgctgcaagacggcacctgcgatggtcaccatgcgagacctcaaacctaaga

SEQ ID NO: 31447 - DNA, 551 bp, Glycine max
ttttcttatgaaacttctcgtagtagtgcaaatgaaacttcaggacctggtggacctgccatcatcacagacataacagtgaacaaatcagtggaattttcatatgaggaactggcaaccgccacggataacttcagtttggctaataaaataggtcaaggtggttttgggtcagtctattatgcagaactgaggggagagaaagccgcaatcaagaagatggatatgcaagcatcaaaagaatttcttgctgaattgaacgtcttgacacgtgttcaccatcttaatctggtgcggttgattggatatagtattgagggctctcttttccttgtctatgaatacattgagaatggaaacttaagtcaacatctgcgtggttcaggtagtagagaacctctgccatgggctactcgggtgcagattgctttggattctgccagaggtcttgaatatattcacgagcacacagtgcctgtatatattcatcgtgatataaagtcagcaaatatattaatagacaaaaactttcggggcaaggttgctgattt

SEQ ID NO: 31448 - DNA, 473 bp, Glycine max
cggaacgggttttgaaagaagaatctgtatttgtggttgtttccaaaagatcaacattggacaaatgccgtttgcctgtgggaattagattgtttgtttctgctgggcattcagagtctgatctgctcaaggcatctgaatcattgaaaaaggttgtagcatcagtcctgggtggtcagaattgaacgctctacatctttctttttcatctaatgtaccaaaacataagttcgattccatgtgtttaggtgagcaattttgaaatccaggcgatagagaaagtcccgtagttcttaatttgtgtagtattttatgttccagtttagggtaacagtattttgtgcgtgttgctcattggttgtctaaagtagtagaataaggatttattgtttcttgtcatgagttggggaatatacctatgaattacattccgatatcaaaagtatcaatgttacatttttcattcattagcc

SEQ ID NO: 31449 - DNA, 494 bp, Glycine max
ctcgagccgtttgaaaagaagtgcacaaccttagagcttgagcttatgaatgctcaaaaaggccgggatgaaaccatggagaaactgagagagtctgaacagaagtgctctcaacttgagcaaaatgtgaaacggcttgaggaaaagctattgagtttagaggatgaaaatcatgttcttcgtcagaaagccttaagtacccctcttcttaagagtaaccgtccaagttttgccaagtcaatatcagaaaaatactcaagtgcaatcgcctcccgtactgaacgaaagaccatatttgagtcacccacacccacaaaacttattgccccttttacactaggcttgtcagactctcggcgatctaagttaacagcagagaggcagcagagcggtatatttatgctcaatctggaagaaatgaagagaaatgaaaatatcttcctcatgatagaaaaataggaggataactatgaatttctctctaaatgcataaa

SEQ ID NO: 31450 - DNA, 288 bp, Glycine max
cgttggtattgatattgatggttctttatgtggatgcacaattagaactacacatggtctaccttgtgcgtgtgaacttgctaagtatagtaggacgtggcacccaattcccttgcaagcaattcatgttcattggaggacattaaacttcagtgaccaagaaatgaacaatgaggggctcgagttagcgttgcaacgtgaagtggatgctttgcacaatcaatttcaggaacttgattatgctggaaaaattactttgaaggccaaattgcgtgaactagcatttcc

SEQ ID NO: 31451 - DNA, 432 bp, Glycine max
acctaacccatgatctgaactcgcgcagccatcatcaccgccgacaacctccgcatcgcgcgaccgtcataccccgtctcctccacgacgcgcaccaccaccactcaccaaataccagaaccacggcgcacagccccactccggccagatccacgtgggacctcctcaacgcgcacaccccaccccggtccgatctgaccccaacgccactctcggctccagccccgcgactaccgcaaaaccacccttgcacctccgtcctctccgccgcgcgtcctcactaccaccatgtccaaacaccactgtggcgcttctccttctaatgagttcggtgcagcgacattcgtctttttgcaaaaaaaaaaaaaaaaaaacattacataacagtagtacgattctggtgtacaatatgcaataaaatcatacttatgc

SEQ ID NO: 31452 - DNA, 471 bp, Glycine max
agcagaacctcacttggacgcagcatgctttcaatgagaagattggagaggttcggagggttgctaagggtgcgtttgggaggttgaaaggaaggtgggggtgcttgcagaagaggactgaggtgaagctccaagatttgccttttgtgcttggggcttgttgtgcgttgcataatatatgtgagttgaagaatgaggaaatggatcctgagttgttggagaatattgatgatgatggtgattatgctgaggtgatggagccagaggttgccttcagatctgttagctccttgaaggctagggatgcaattgcgcataacctcttgcaccatggactagctggcacttcttttgtttgattggaatatggaattgaaaattgaaggttgggattatgtataattaattcttttgcttgtttttatttctagacatatggtgatagtattcagtcaaggcattcatcattgt

SEQ ID NO: 31453 - DNA, 580 bp, Glycine max
cggctcgagaaaaaatccatttggaaaaaggaaagataatcttcctgttgctgttcctagtgcaaatggagctccaccaacaatgacttatcagtagcttgaaggggatgtactctgttctttatgctccgacaaatattactacataataggatgcatcttgctgctgtcacatgcatccattgatcatcaagtcatcgccattagcatccttgctcatgtgaatgaatgcagtggcatcatatacatacatttggctatgttatactagtcggacatgcatatcttggcagcatgtgttggttcctggattactttcataggcgtttagatttgatgcatgggtctaaattttgttacaattgtgtgctttatgtcatatactttctgtttacattggcattaggaatgttattcaaacaggttttggcctatattttacaacttttaggttcatttggtgctttatttgacatgacatatttatggtgatgcttactttgaattcatgtcacgacttggttagggtctggagaaataaggatgtcatacctatggtcatgctgcactttccactatc

SEQ ID NO: 31454 - DNA, 446 bp, Glycine max
ctatacccatgatatgtatataggtatatcttttctaattgattacgtatctgctgaatactagctagtcctgattcctagctctataaaaggagaataccataggaattcatcacagacaaacaaacaatttaccagctatacttgttccttttgaaggttagaagtgctacaatacaaacaatggcagctactcaggaagatgtgaagcttttgggtattgtgggaagcccatttgtgtgcagggtccagattgcccttaagttgaagggagttgaatacaaatttttggcagacaatttgggcaacaagagtgatttgcttctcaaatacaaccctgttcacaagaaggttccagtgtttgttcacaatgagcagcccatagcagagtctcttgtgattgttgaatacattgatgagacatggaagaacaaccccatcttacc

SEQ ID NO: 31455 - DNA, 274 bp, Glycine max
attagttgtcatatatagaagtgagtgatcagtgtcgatcagcagatttttcaaagaatggtgagggacgtgaagaatggtagagctctccttgttgcatttctgatgtttctgttggcatcagaagtgttgattttggaggctgagggtgcaggagaatgtggaaagacccctatagggtctgcagctgctagcctgagcccatgtttcggtgcagttagcaatgtgagggcaaaggttccattggcttgttgtgccagagttggggctttgc

SEQ ID NO: 31456 - DNA, 344 bp, Glycine max
ttcacgcgtttttagccatcgatgaccgtgttcaaggacatggttcatgaattacgtaatgggagagaaaatcctgatggtgcagaccagggtttcatagctagctatttcccagagttacttgataagccaatgtttcacccaccacctaatggcaccaagcttgatggaacatataggcttcctttgggttatcagatggatgcttcttactattatcttaaacttcgctggagcataccctgtggaccaaatagtgtgatcacattcccaggggcaccatggttgaagccatggtattggtggtcctggcctgttctgccattaggcctccagtggcatga

SEQ ID NO: 31457 - DNA, 439 bp, Glycine max
attggcaattaaagaaacatgtccctattgaagaagagtctgtttctcagaaccaaaattcatccatactgaaaagtgaggattatttttcttcttgtgctatgttatctcttaatgtcaaggatcctcgagaattgccatggaagaagactgttgttccactggagtccctttcaactaagactccgactgatgcacaagaaacgaaatacaaagagcttgctgaattgggaggaatattggaagagaatagagatttatcttcattatcaaggtctaaacttgtagacagccagtttgatattgacgatctatggtatgctaccaccagagggttgaggcccccagtggaagacaatgtcctttccaaggagaaataccatgaacgtatggttaatttcttccttgatgatatagattctggagagatcaactcttc

SEQ ID NO: 31458 - DNA, 328 bp, Glycine max
ctcgagccgcaaagagacacaaagaaaattcttgcacatcagtgaaagattgcaacaactgcacgaaaatggcgaccatttggaagaccaacgcatcgagaaacgcagtgcgttgtttgacgcagtccttggcatccactagccgtaccccttcgctcccctctcatttctcctccgtccgctacctccgcaccggtcgcgatcccagctcaaggacttatgagataattccgccggtgaattgggggattcggattgtgccggagaagaaggcgtttgtgattgagcgattcgggaagtacgtcaagactcttccctccggaatcca

SEQ ID NO: 31459 - DNA, 241 bp, Glycine max
ctactaacccgacctcccgaacagcagcacaaatctccgcgaggcatctcagcccagaggtttggtcccacgacgctgaacgttcgcccttttccattccttcgtcgacactccggttccggcacgaagaaatcaccatgtcctccttcgagcaggtggtcgtcatcgacggcaagggccatctccttggccgtctggcctccatcgtggccaagcagctcctcaacggccagaagatcgt

SEQ ID NO: 31460 - DNA, 441 bp, Glycine max
tcgcggacgcgtggggttaatttcttcaaaggttgtataaatacacacgaatacgtgaggaacaacatggtgttctctcaatcagcaatattacgtgaggaagttgaagaagcgatgagtattcaggagctcattaagaaaccactcacttcagttcctcaacgttacattcaactacacaataatgaaccttcacttctcgcaggtgaaacctttagtcacgcactcccaaccatcaacctgaaaaaattgatccatggagaagatatagaacttgagttagaaaaattgacctcagcttgtagggattggggtttctttcagttggtggagcatggaataagctcagtagtgatgaaaacacttgaagatgaagttgagggattcttcatgctccccatggaagaaaagatgaaatacaaggtaagcccaggtgatgtt

SEQ ID NO: 31461 - DNA, 266 bp, Glycine max
tggtggtggacgcgattctggcatgagttctgagactatcaattcctccactcaaagtactccactgagcaacgagcgcgtttgcagcaccagcttcagccgtctctccttcgatctccctcctccttcttcttcccctgagacccgcttcgtcaaaccccaccgctcctccgacttcgcctactccgccatcctccgccgcaagtccgccctcaccttccgcgacttccacctcctccgccgcattggcgccggcgacatcggca

SEQ ID NO: 31462 - DNA, 476 bp, Glycine max
caaaacaatgacaatcttcgcagtccccttatatctcaggcttaatgccaaggcacaatgtcattcaataataaaccagttgtgttggttcttcccagtatatgatgcaaatattcatatgtcaagggcaatgaagtgcaaaaggggcttgtatatgcttgtttgtatagatggaaaagtcttgaattccgaaagagtggccaattttttccagcttcttaaatgaagagcctaaaacttgcatatagcactgaagttatcttttgccttggctcttaaaccactttcctccttatttgcgtatatttcttacttttcttaattatttgcagagtaaaatattaaatgatatttagacttccaagatattgaacccttgtatttttattgaacattgtttttaacatgcattctctaaggatgcatcatgcacgttaacaaaaatttaagaaatgttaaatacttgctttattatt

SEQ ID NO: 31463 - DNA, 384 bp, Glycine max
ccctcgcgtccgggggtggcctacgtaaggttttcttccctcaaatagttaaagagatgaaaatcttggagttaggagaatggtggctttgcaacaccacttgtgatcttgagcctggagcacttgccatatctccaaggttcctcccaattggcccattgatggaaagtgacaccaacaaaaattcattctgggaagaggacataacttgcctagattggttggatcagcagccacctcaatctgttgtgtatgtctcttttggtagtttagcaatagttgaacctaaccaattcaaagaactagctctaggacttgatctccttaacatgccttttctttgggttgtacgttccgacaataataacaaggtaatagtgcata

SEQ ID NO: 31464 - DNA, 208 bp, Glycine max
  unsure (1)..(208): unsure at all n locations
cgcaaaacgctgctttggttcttaaggagatgcatgttgaggctttggtgaaatgtgtaggagtttttgaggctttgattaacatgattaaggagcctgttgggagtggttccaccaaggcctgtttgtcaacgattttcaacttggttaataataaaagaggcgtgacgacttgtcnnnnnnnnnnnnnnnnnnnnnnnnnnnnnnn

SEQ ID NO: 31465 - DNA, 285 bp, Glycine max
ctgagtctgaagaagctgaagcttctggtgcgaaggtggacgctgatgaattaccacagaatactaaggaggctgagaataatgatgatattcatcacaaaaagtaatggcgatgttgagatggctgtggaggctaagcctgaagactgtggaatggctgatagtaaagcatgtgataatggtgaccctgtgcttgcaagtcataatgagcctgctacgccacagcctgctcctgcagatacaaacactgaaattatgaatgtattagaagttgagaataaagtt

SEQ ID NO: 31466 - DNA, 539 bp, Glycine max
accaggtgaagcagaggttggcttctgatcggtcccatattgtatcaacacgtcttggaaatggtggaaccactccgccaatgaatgttgcaggtgctggtccatccatggttaacaacaacagcaatggtaggcaacaaatgatttctgcttcttcctcacaacctagcatctcaggatatggcaatagccaaccagttcatccacatatgtccttcgtcccacggccttcaatgtttgggttggggcaaaggctgccactttctatgattcaacaacaacattcagcttcttcagatccgatgttcaatggccccggtaatttgccgcctactcccactcattcagtgtcgaggccggtgtgaaggactaactctggtttaggttaattaggaactccatggtagatttgaaatatctagtttacaattttagttgaaaaatcatgatctggtctcagttactttttgtctccactgtcttttgctgttgtaaaatctaattccatgttcattggatatgcctctattatatcgttt

SEQ ID NO: 31467 - DNA, 592 bp, Glycine max
ctcgagccgattcggctcgaggaagaggggaattgattgattgtctctcagttggatcggtcttgcgggttcaatttactttcaaacatagcagatctgggttcttcaaggagtattgttgttctgacacttggtgtccagaagaagggctattttcctttctatccgtgttttgcattgtgtactagagtttgagaactaacttctgatagacagagccatcggattttttttctgctgcatgtggtgtctccttggtggtgccacatcatttcattaatgggggagtggattgttggagctttcatcaacctctttggtagtattgcaataaactttgggaccaatcttctcaaactagggcataatgagagagaaagacatttacttggaagtgatggggtaaatggcaagatgaatctgaagcctattatatatttccagagttggagaattggcattgtatttttctttcttggaaattgccttaatttcatttcctttgggtacgctgctcagtcacttcttgcagcgctgggatctgttcagtttgtatctaacattgccttcgcttactttgtcttgaacaaaa

SEQ ID NO: 31468 - DNA, 589 bp, Glycine max
tgctgtttcaataggggaatacatgctggcttcctggttaggaatgatgccaataacactggcacttgtatatgttggaacaactcttaaagatctttctgatgttacacatggttggggcgagttatgaaagactcgttgggcgtttatcattcttggtcttgtgatatcggttgttctgatgatatgtgttactagagttgccaaggctgctttagataaagccttggccgaaaatgaagatattgatgggattacttcctcgccagatttacctattgttgctgaaccatcagcagatcttaaccaacctctcataattaagatagattcttctgaagacagtcatgaaaagtgaattctattttgtgtaaattctttcttcactctaccttttataaaggctatggttttaattttaagctttagcggtagctggttgcttctatttattcgcgatttgtacagtttcaacattagaaatatagtttgtgacaggagtgtttaatcctaattcctacaaccaacatgacattatggactttgtgttttatttcttttgacagcagaaaagttcatgctatgaacc

SEQ ID NO: 31469 - DNA, 365 bp, Glycine max
cagattcttttttattgagcaacattgtggaacccgcactgctatctcaagctggctctgatttggataagcccgtttctcaagagacatttttggaggaatttaagatagtcgcaatgagtgtggctaatcgtcttaaggagcaacctgtcatagccgctcacagtgagaacacctttcatggaagtggtgttaagagactattatccaacaagtttgaattggacaagactttgagctcagccatggagactttgcccaatgatcgaaatggaaagctttcaaaggagtatctaagggtgacattagacacggtggctccatctgctggttcacctcctgttggtgcaattgaagagatggac

SEQ ID NO: 31470 - DNA, 408 bp, Glycine max
gttggcacttgtggctgcaattccgtgccaggaccgtggattacatgtccattttaccattcccaggaattactcctgggctgctgcaatcctctcacttcacgaaaggatcgtggaggagtcgaagaaacgggagcggaagaattcttgtggcttgcttaaggagattcatcagattgagaaatgtgctagagtgatgaatgatttggctgattctgtccacttcccattgacggaggggaaagaacgagaggttagacagatagtgcaggaggtttcacaagtctgtgatgctttgaaaggtggactagaccctttggagcgccaagtgagggatgtcttccatagaattgtgcgcaccgaacagaagggcttgactcacttggcaggccaagcaatgctgagtaa

SEQ ID NO: 31471 - DNA, 408 bp, Glycine max
agattattaatttgctttataagaatgggtactatgttaaaatagaagaagtggctcaatttctccttaaaagaggaaagctgtcagaagcatgcaaatcgttgctttttagtttggaaaatcaccacaatgttgatattgatttgtgttatgcaactattgtgaatctttgtaaaattaacaaggtttcacaagcatctagtttatgctatgaatcagtggagaacggtttacatcacaaattgacatgtctagatgatctgatagctgctttagaggaagggggacaaagagaggaagctgcatttatatcaaagagattgccaagactggataactcgaatggatctatgccgaatcatagcactaagaagttcatgcctatcaaagcattaggaagctagaatg

SEQ ID NO: 31472 - DNA, 468 bp, Glycine max
agataaacacttttaacactaaaaagatgaaatcctctcttatcttgttatttatgatctgtggtggagtgattgcaactcctccagaggatccaattccgtgttcttcaaagaacacagactgcaccatcacaaacacctatggcgtctttccggaccgaagcatttgccacgccggtgaggttatgtacccaaacacagaggaggagctcatatccgcggtggcctcagcttcgaagaacaaaagaaaagtgaaagccgccacgcgcttctcccacagcatcccgaagctggtttgccctgatggcgaaaacgggttgctaataagcactaaaaatctgaacaagatattgaagattgacaaggaggcaaggacgatgacagtgcagagtggcgtgtcgctgagagagataatcagcaagggtgcagaggctggattggccttgccatatacaccatattggtggg

SEQ ID NO: 31473 - DNA, 394 bp, Glycine max
aaacactttttttattgccacgtcacttatgataattattcacttcgttttgggaattaaaacgatggagtgagccaattggtctcaaaatctctcggcttttgcttcaattcagaccacacgtaaatgacacagaggggacaataatttattttttgttatttcttttttaattttaggttaatattagactcttaaagtctcataactgaacagttcaatgcagaaaacttctggaaatattataggccattttcttggaggtttatattattatctaagaagatgcatctttgccattttatctgtgggtcctgtgccaagtcatattgctttccatcatggatgggaatcgaaggtatgcaaagaagagaaacatggagaaggtgatggc

SEQ ID NO: 31474 - DNA, 264 bp, Glycine max
attctaacagaaaaatgagaagaagcatgttgatgttactactatgcttcctattgggcaaatttacgtaagggggctcattttacaaagtatttacgggatggggtctgtttcaaaagaaataacggagggggtttgttttgtggaggaaaccgccattgccactggcggcctggctcaacccgccattgccagtggcggcaaaggtggagagaagggtgtattgtcactagcagcggcgatatggccacgtaggatggagag

SEQ ID NO: 31475 - DNA, 528 bp, Glycine max
gcattcggctcgaggcagcactgtccccagaagatctcacagatgctgagtggtattacttggtttgcatgtccttcatattcaacattggccaagggttaccaggcagaactctagcaaagggtcaacccatttagctgaacaatgcccatcttctgattgtaaaatttttagccgctcccctctggctcagagtgcatccattgagacggttgtgtgctttccgtttagggaaggggttattgagttaggtactactgaacaggtcccagaagatttgagtgtcattgaactgatcaaaacttctttcttgaatagtctgcatgccaatgttcccaataagtcagtagctacattgaaatcaaggaaccaggaaggtctttcttatgcagcatttgatcataatgactataatgttaaatcaattccagaagttgggtatgaaatagccaacacaacctctcctgatggtagttcaaatgcattccaagccaatcaaccgctagatgaaacatttatgattgaaag

SEQ ID NO: 31476 - DNA, 594 bp, Glycine max
cttttctttcaatcgctcattatatccctctctttctatagatatctacactgatatcatggataagaatgccctctttaggtttcttcttgttcttctgactctttcctgcgttgtatttgttgctgctgttcctgcaatcagaagctccatgattgggaaaattgatcctttagtgcaagatcttctggctaaggaggatccagttatgcggttaaggaatagcgaggaagaaatgaaagaagggattgtagagagcagaatgttgatggatattgtggactaccccggaacaagaccaaatccagcccatgatccaaaatctcctggaaagccttaacttcttgtatgatcttggaaagggttttgattagttatttagtttgactggaagtgtctagatgatgtgtggtttcggtttgtaatgttgaaaatgtgtttgtatgataaatctctaatctctaagtcctattgttaagttgttggtttagcttaagtgctttggtgttctacatatatgggtcataaaagacttgctgtaagatatatgaaaaggtgtatgaattaaagttgaggcttgtactggttgatgat

SEQ ID NO: 31477 - DNA, 472 bp, Glycine max
attcgcttcctctctttcctcatccactatttctctccgttttctggccccaccggaaaacctcttccgttcgccggaaaaccgcttgcgttttcggcgttttttttccgcgtctccagaggaagctgatttcggtcttcttattcgtgcgtttgcattctctcgctatttgccgcggtagcttctgcgaggcgttggatctctctgtggctcggtttcagcgttctattcggcgttcctcgagaatgtggcgagcctggttgtccttcgaggcttgcgcttaatctacaacgttcaggatcgtggtttagggtttggatttcgatttggtattgtgattgcttttttttttttttggcgattccttgttctagttaacgaagacggagacctacagggagcgagttcgtaatgaaatggtggaaagaagagtgactttatcaaaggaagttagaaatgggttagaattttt

SEQ ID NO: 31478 - DNA, 636 bp, Glycine max
tctcgagccgaatcggctcgagagttcttgcactgttggctgttgccctctgttttcccttgcttgctttacttcagtctctctctgtctcactttacgttcgagcttcttgctacgatgaacgcacccatcattgaccccttacagggagattttccagaagtgatagaggagtatttggaacatgggtgtatgaaatgtattgcctttaatcgtcgtggtacacttcttgctgctgggtgcaacaacggaagttgcgttatctgggattttgaaacccggggcattgctaaagagctacgagataatgaatgttcatctccaataaccagtgtctgttggtcaaagtgtggtcatcgaattcttgtatctgctgctgacaagtcattgttgctgtgggatgttatgagtggtaagaggataacaagaatagttttacaacaaacccctctacaagctcgtcttcatccgggttcctctaaaccatctctttgcttggcatgccctctctcatgtcctccaatgattgttgacttgaacacaggaaacacaacttcgcttaaagtttctatcttggagatatccaataatggaccaacccctacctcacgtaacaagtgtgccgatggaattacc

SEQ ID NO: 31479 - DNA, 384 bp, Glycine max
cctagcttgatcaagtctagtggaccgttaaatgagcatgttgcaccaacagttggttctggtccttttctgcttccttctggaactgctaatggctttttaggtgaggaaactgatggtaggccaggttgttctctagacacccgccgtgtatcttgtaaaagaaaggctgttgaacgaaatgttggacaatcttcagatggtggaagttctagctatagtcagcatacagatggtagtacttggaacactcttcctactcaggcttatggggggatcagttttaacagatctgccccaacggatcaggtaaatgcgagacttggcctgagtacaggggatggatcctctgaaagcattcctgtgtcaaatgtagcaagaagc

SEQ ID NO: 31480 - DNA, 415 bp, Glycine max
gtttgagaagaactatgttggacaaagcttttgatctcttggatacgcataaagttagtagtctcaacaaaaatcaatgcattaggctctttgaggagctgaacaagtacaggactttgccaaaaatctctcgggaagactttgaattaatatttgatgagctcgatgatagtcatgatataaagattaacaaggatgaatttgcagatatttgcaatgccattgctttaaaatttcagaaggaagatgttatgtcttactttgagtatttagcattctaccattcacccagctcaaagagattaaaagaatttgtgaggagtcctatgtttggatacctagtgtcctttgttctcgtaataaatctggttgctgttattattgagacaacgcttgatatagaaaacaattctgc

SEQ ID NO: 31481 - DNA, 250 bp, Glycine max
ctcgagccgctcgagccgattcggctccaggggggttataactcctttgtcagagcagctaccaaagccactacccaatgccatggttctagtaaaccttaaggaaatatcttccggagcttataagcttttgccacaaggcacacgcttggttgtgtctgtccgaggtgatgagccttatgaagaactggacattcttaagggtgttgatgctactatgcttctcccatgacttcccttatacagaaga

SEQ ID NO: 31482 - DNA, 259 bp, Glycine max
atccaactctctttctccctatcccaacaatctcactcatacctcttcaatctaacaaacttaatttcttttgttttgagtttcttagagaatggatgcaaaaggagcaagaagtagcaacacccttttaagttgtgaggacgagatggaccttcgaagaggcccttggaccgtcgatgaagacctcactcttatcaattacattgccactcatggcgaaggtcgctggaacacgctcgccctctctgctgggctgaaa

SEQ ID NO: 31483 - DNA, 366 bp, Glycine max
cagctacaaaaatttcgtgaagaacttaagaatcgctcacgagtcttaaagaaacttggtcatattgatgctgatggtgtagttcagttgaagggacgagcagcctgcttgattgacacaggcgatgaactccttgtcgctgaattaatgtttaatggtacttttaatgaccttgaccatcatcaagttgctgcccttgcaagttgtttcataccaggagataagtcaactgagcagatacaattgagaacagagcttgctaggcctctgcaacagcttcaagatagtgcaagaaggatagctgagatacaacatgaatgcaaattggatataaatgtgaatgagtatgtggattcaaccgtaaga

SEQ ID NO: 31484 - DNA, 427 bp, Glycine max
ggacagctgagtggtatgaggcattggatcaacatttcaaatggcttcttcaatatagaatcagcccttatttttgtaaatgggctgatggtatgcgtgttttgacatacacatctccatggccagcggaccatccaaagtcagatgaatattgttcagatccacggttggcagcatatgctgtaccatacaaacaagtagtttccggtaatgatgcggcgaaggattacttgcagaaacaagttgcgctattgagaaccaagactcactggaggaaagcttacttttacttgtgggatgagccactgaatttggaacaatatgattctgttcgaaatatggccagtgagattcatgcttatgctccagatgctcgtattttaactacttactattgtggaccaaatgatgcacctcttgcacctac

SEQ ID NO: 31485 - DNA, 297 bp, Glycine max
aaagaacccagccccataatggaacctggttctgtttggaatgatatagttatgtcaccttcaaggccaagtgatcagacaaaattgaaggaatctattcagaaaatagagaaatccatccgaaaaatgtaaccaatattgttgcctgcatatattatgtaacatactcttgagttttgagcatttttttttaatcattctctttcttgattttgcagttttcaacaagttattaaattcattgaaaaaatgtttgaaggatgtgttagatagtatattcctagcaatattacatgc

SEQ ID NO: 31486 - DNA, 285 bp, Glycine max
gcatatatataattaacaccctcgcatttttttcttcctaaaagaaaaaaaagaagaagatggagtttgtgaagagagtattgggaagcagcaagagattgtatcctgaaaacagtggtggaagtggcagctacggcacgaagattgagcacctcaaagaagaagaagaagaaggctccacagggttgcatttgcgtctacgttggagccgagagagagagattcgtgatcaaggtaaagatcgcaaaccaccctttgttcaaggcgcttttggacgctgctgag

SEQ ID NO: 31487 - DNA, 283 bp, Glycine max
attccatgtgaggagagccagtgttctgatagcttgaccactactgatactgaaaatcttagttctgaagcaggtgttcagattgtggagagcttctcagcatgcagtgttgaatctgtccaacctcctaaggctgattctccacccagcagtgtgtcaacaaatggggtctcatctccttcagcggctgcaagctcagactcatctgatgttgctgcttccaagtctcccagtcaggaacaagtttcagccaccaaagagaaaaatggggatgtcaaagatc

SEQ ID NO: 31488 - DNA, 361 bp, Glycine max
ctcagcagaataatggatcctagacttgaaggccaatattctgaaatggggacaaaaaaagcagcagcattggcttaccaatgcctcagccacagaccaaggagcagaccctcaatgagcacagtggtccagacccttgagccactccaagattttgatgacattccaattggaacatttgtttacacagctccaccggataatactgaaatgcatagtgcaaaggctcaatgtgagacacctaagaggagggaaaataataataacaatggtcaccttcataggaatggccacaggcatcatcctcttaaatcccccaagacccctaggccacaatcacaatcacagtcacagtcacgtt

SEQ ID NO: 31489 - DNA, 286 bp, Glycine max
ttgtaattggtcatagtgccacatcagggggtatcttagacagagctattgaagcagaagataggaagcatggagatttcctgagactggatcatgttgagggataccttgaattgtcagcaaagacaaagacatactttgccactgctgttaacttatgggatgctgacttctatatcaaagtcgacgacgatgttcatgtaaatatagcgacactgggacaaactctactgagacaccgatcaaaaccgcgtgcctacattgcatgcatgaaatctgggcctgt

SEQ ID NO: 31490 - DNA, 385 bp, Glycine max
aagaagcgatcgatttgaaggctttgttaattttctgacttaccctcttcacatttgtgtgcaatgttagaggacattgaatcatctactactcggctttgtaaaatgggattcggtcgaaattcgacctcaagaagcggagattacttggaaggaatgcttaacgactatgttggaggaaggagcaaactgaaggctcagaagagcgccgccacaacaacgaagtttgtggcagtgctcacgtgccttcagtttttctttgcagtctatgcaacattcctattgtattacatgggcccttccattgatttaagaaccaagccagagttcacatgggcaacaaaaattgcccaacaatggaagcaactcatcatcacgccccatg

SEQ ID NO: 31491 - DNA, 403 bp, Glycine max
gctggtgcgctccgtgaacgtgcggtttgcgttccgcggcgtggcggcgtggcggctggaggacgtgaagccgtggatgttacaggtgagttcgaacgaagcagtagcggtgaactcgatcatgcagctgcaccggctgacggcggtgaagtccgccgttgaagaggttctgggatggatccggattctgaaccctaaaatcgtgacggttgtggaacaagaagccaaccacaacggggaagggtttttggagcggttcacggaggctttgcattactattccagcgttttcgactcgctcgacgcgtgtccggtcgaaccggacaaggctgctttggcggagatgtatctgcagagggagatatgcaacgtggtgtgctgcgagggaccggcgcggctggag

SEQ ID NO: 31492 - DNA, 467 bp, Glycine max
ggaaaacctgacttgggcctggtccaggctagttggtcctttgtgaacaaggatgagaatctactcacgaggctccagaacatcaacttgtgctttcactttgaggtggaacaacaagttaatggctacttcctaaatttctttggattcaatggaacagctggtgtttggaggataaaggctttggaggaatcaggagggtggttggagaggaccacggttgaggacatggacatagcagttcgagctcacttgaatggatggaagttcatcttccttaatgatgtcaaagttctatgtgagttaccagagtcttatgaagcttataagaaacaacaacatcgttggcactctggcccaatgcagcttttcaggctatgtcttcctgctatactaacttccaagatatcagtatggaagaaggctaatttaatatttttgttcttcctgttgaggaaacttatact

SEQ ID NO: 31493 - DNA, 268 bp, Glycine max
gcgacgacgtcgaagtctacgtcgaggcggtcgttttgatgcactgcgacgatctcaagccgaggctgcgctccatggctgaaggagttcccaagattttgagcttgctcaaggtttcatcagctatcatgtttgacctagggggtgtctcatgcctggaatatttggaatctattccgtggaccgaggatgaacaggaggaagtcatgtctcagctagaacatctgcagattgatgactctgcaactgaagttcttcttagagtatc

SEQ ID NO: 31494 - DNA, 542 bp, Glycine max
ttaccattcgtccgggatccttgattgagggcattgagggcacttccttccaagttcaaagttcgaagccatgcgaatgaagccaatccagctcccggagccgccaagccccacggcggcgcgtggcactccggacatcttcgaatccggcgtccacaccctcgtccgccgcgccgtcgtcatcggcaacggcttcccctcctccgagaatcacagcatcggtttgctccgcgcccttggcctctcccacaaccacctcctctaccgcgttacgaggccgagaggtggaatcaacgattggctccattggcttcccctctctgtccatcgaaaatttcattacctaatttccatgttccgcgccttctcctccaaatctcactacctgcccctcacttcccaccctaacggcttgtcctctattctcgaagctgatgccaatcacatagtcaatttggctcgcgaaacttgtgaaaaggagggaccgttattggtggttgcatctggaagagacaccatttctgttgcgagttccataaaac

SEQ ID NO: 31495 - DNA, 564 bp, Glycine max
ctcgagccgctcgttccttcgcaaactctctccgactcgatggcgacgtagacgacgaaaacgacatcgtactggatccacctaccacctcatcgagagaccccgcgcaacagcaacacgaggcacgagaaaatgcattcggatcagaagctgaagaagacgaagaaacgcaagatcgtgctggagtcaaagaggacctcgacgaaatcaagcaaaccctaactcgtcaattttggggaatggcctccttcctcgctccaccgccatctgattctcattctcattctcaatccgatccctcttcgttcgtttccgatcaatccaatcatcgcgctgtttctccgaacgaagtaccgcaattggatgacgctgcgatttccaatcactctaattcggtttcggtgggatccgattcggatggggattgtggtctcgcgcaacgcgcggttggaattaccgaagaggtgctggtcttcgcgatgaacattgctatgcatcccgagacgtggttggattttcctattgatgaggaagacgacaccgatgattttgacatgtctggtg

SEQ ID NO: 31496 - DNA, 388 bp, Glycine max
cggggaggaagaaagaaagaaagaaagaaatggaacatggcttccccaaaggcaagttcaagagcctctgtgtcttttgcggcagcaactctggcaaccgtcaagttttcagtgacgccaccattgaattggccaatgaactggttaagaggaacattgacttggtgtatggtgggggaagtgttgggctgatgggcctaatatcccagagaatgtatgatggaggctgccatgttctaggggttattccaaaagctctcatgcctcttgagatatctggtgaaccagttggtgaagtaagaattgtttcagatatgcatgagcgtaaagctgcaatggctcaagaagctgatgcatttatcgccctccctggaggatatggaactat

SEQ ID NO: 31497 - DNA, 445 bp, Glycine max
ttatcccatatttcgtatttatctcgaaacaatctttcttattttctttttgctaacaatttttttcattcattgcaagttcttttcaacaattcgagttcacagctgtatattctcgcttttgttgtttcagtagtgcatacatatcgaagaaaagctcttgttggttgttgagatagcgaagaagaattggacgatcaaagatcgtatatgaacaggcattcttgagattaattgcttgagtctgagataagtccaggtactgcatttctttgggttaattatacaagatatttttagttctgggtacctgttcctacaaaagactatacttataaatatcttcaaaaactgggaattgaagtaaagatggtggccacgtcatgcttgaatttgttggatttggtatcaggggatatgctaaatttccctcagacccccagat

SEQ ID NO: 31498 - DNA, 356 bp, Glycine max
gcagaattcaatgcaaactatcaatcattctcctggttctaggatcataagcccaacaacaggcaatcatttacctggattagcttcaattttgcaaccacaagtatctaacgctgtaaaggctgctgctattggcaatgacttgggaaggagcagtcaaggagagcacatattttccggtatgaattcatcacacggagctacttttcagtcgcattcacttccagagcctatattcagccaatatcgtggagcattgtcctcaattggtccatcaacatcaaatggatcctcagtggaaactttgtctgggccacagtttctatggggaagcccaactctctactcagagcata

SEQ ID NO: 31499 - DNA, 268 bp, Glycine max
ctcgagccgctcgagccgctcgtctccgattccaccctccgagttgacccagtgcgccatggacgacccaagaccaacaccgccaacctcaacccaacagccacaacggttccaacgccgacccttttctcctcaactacagcacctccgatctccgaaccgcttcagagtttctcgccacgtggctccctttcctctcacgagatctctgcactcgcatgcaccctgtccctctccgatcgcatccgctccatcgacccaggtgaag

SEQ ID NO: 31500 - DNA, 350 bp, Glycine max
ggattatcttataggataataccaaattagaatgaaaattatcctgtgagaagtgaaattgtgattgtgaattgaatgaaggatgctcgaatttgagttattgatatggcttttgagtcgcactatgttttgttgctctgttccttcaaagaacaattgcagcagcatgtccgggtccatgcaatggaagcagtaatggcttgttgggagttagagcaatcattgcagagtctaacaggagtttcacctggagaaggtacaggggcaacaatgtctgatgatgagaatgaccaagtagatagtgatgccaatctcttcgattgtagtttagatggggcagatagcatggg

SEQ ID NO: 31501 - DNA, 283 bp, Glycine max
ctcgagccgcacaaacttcctctgaagcattccacttccatggccgatccaaactccttatcctaaccactctaacgctcacgtgaaccgttccagacactacaccactcgcgtgaccttccgtctcctctgtcacgcgtcgcgcgtgggcgccatcatcggcaagtccggcgtgctcatcaagtcgctccaggaggccaccggcggccaagatacggatcgtggacgcgccgccggactcccctgaccgagtcatcctcgttagcgccccctccgtcaccga

SEQ ID NO: 31502 - DNA, 491 bp, Glycine max
gtgcatttccctattctggacttcttatatcaagagctcttagtttctcaaacttcagtaatgcaagttactatagggagcttgagcagtctctgatggatacttttcgaaaccaaagcattccagtggattcagtttctcttagtaaccccttcaggaatactattgataattttgaattgactctggacgtcttcccttcgcaaaccgatcgcttcaacacaactggagttttaactattgcttttctgctaagcaaccaaatttacaaacccccagagttcttctccccttacttcttcaagggtgccagttatgaatactatggaggagaaccaaaaggatcaaagtcatcatcacatgtaggggttatagttggtgctgtagttgctgttgtggtctttgttgttctggcattctttgcagggaggtatgcccttcgccagaaaacaagagcaagaagatcttcagagttgaacccttttgcaaat

SEQ ID NO: 31503 - DNA, 286 bp, Glycine max
caaattttcggatctcttctgtttcttcgaatcaaaaccctaattcccccaatttcatttttcaaccttgaaaaaccttctctctctctctcagttcccaacggtcatcaccacagctcgatcaacagggacatatttgctactgaagagatgtctcctgcttccaaatctaagtctaaagacaaaaaggctggcaaggaagctcaaaagtcttctgccaagtcttcaggatctggtaatgccgtggctggtgtaccagctagtgcatacaatcctttatcgggaa

SEQ ID NO: 31504 - DNA, 288 bp, Glycine max
agattttggagattgaagagatatcacaagatgctgcatattggattcgaagaattccacctcgcctctgggccactgcttattttgaggggcatacgtttggtcatttgacagccaacatagttgaatcttgaaacacttggatattggaggcatctggacttccaataattcacatgatggtatgcattagaaggcagctaatgacttggtctaatgagcgccgggaggccagtatgcagtggacatcaatacttgtaccatctgccgagagacgtgtagccgagg

SEQ ID NO: 31505 - DNA, 314 bp, Glycine max
tgtgtcttgtttttcttttctctctctctaattttccgggaaaatttctctcactcttgctctctggttttccggcgtcagacgaggaagcagaagagtagaaggaagacatttctctgcttctacggaccctcttcccttcacttccttccctttcttttctcaatttccgtgatcatcacaattttcttcactcctcaatttcaataatcctccatgaaccccctctagcccctcctctccttccttctcttcaacaagaaactgactgaatatggagaaacattctgggaattcttcatcagctcatgctg

SEQ ID NO: 31506 - DNA, 451 bp, Glycine max
gaaaatcactgaattttccgtgctggtttctccccactgacacaagttgtagttttttaagagtatattatgtacctaaaggatttcagattttgagttcatgagagcaatgtaaaagtgaagttctgaactgttaacaagtttggaaaactttgtgcagtgcagtgtgttaagatggaagctatgttcatcttcagaagcagtcatggaaaccagaaattgaagatttgaagtgatttcttcttagaaatcagaatactagaaaatactagcacagaaataatgtgggatttcctcctttttttacatgagttttgtctcatttaggagaaaaaaatgcaagttctgcatatttcatgcagcaatttttgaacttgtcctcgtattctagattctgcacgtttagacaatcagaaatcctgagccaatccatggcttttcattggttatt

SEQ ID NO: 31507 - DNA, 550 bp, Glycine max
cggaattcccctcgagctgcgtcttaatggaggagagacagaagcacccttcttttccctccaactatctcactctcgctcaactccaagaacgatggctcaagcagcaaaaccaaatcaaccaaccacaaccacaaccacaaccacagccacaagaacaacacaaccaccaccaccgccaacaaccacaccaagagctggtactcgttcccagaaacggaaacgcttataggtctcgtcctcagcttcagtatgttgcgaagaatcggaacgattccgaaactcgccgccgcgctaccaaggttgcggtggcctccgatgacaactgcaaatcggaggccgtcgccggaatcggtgacgaaaccgccgatctgaatggaaaatccagcgaatcgaagaagaatcagaataataggaggaatgggaaaggaaaatggaaaactaagacggagaagagaggagcgcgtggagatggctctggaacaggagcacaggggaaagaagaggcagagaagaaagccacaatcgagaagaagatgagttggagaag

SEQ ID NO: 31508 - DNA, 488 bp, Glycine max
cattcaatcaattttcaatggagatgaaaagtattgagatggagatcaagagaagaaatgccgatccaaaacttagaaccagatgtggcgttaacgttttaccatatgaactgcttatcccaagttctgaacgtggggcaacaggacgaggagtgccaaatagtgttacagcctagtccaatatgtgtacaaaccagcaactgaatcaatgttctattattcttccccttagctggactaaaatggatttaatatttgatctcctaaaaccaagaaagaaaataaaatccaaaagggaataatgcaggtttgaaatcatctgtaagtatcgtgtactgagtagcattaagaatccttcttggtcaaaaagaatgttgtgtatgttttatcacagtttactctagtctggtgcatgttttaacttgtacacgtttatgccctgatccagagtataatgtaaaaaaaaaaaagttcaaaatgtgtgaact

SEQ ID NO: 31509 - DNA, 356 bp, Glycine max
gtgacaccaatctctatgaggtgatggtagaaggtgagaatggagggagagttcaagctgcagctatttgccacatggacacctctaagtgggaccgggaccacgtgtcctttcgtgtgctcaaagttcagccgggaacctcacctgtgtgtcacttcttccctcctgataatctagtctgggtgcctttgcctctgcctccataactatagtctatagtttcatgttcttcttcatcaaagtttcttatatatgttcctgtgtatcaaactgtgtcaggtacaacataagttctagtatagacctggtgtactagctaggaagcttgatgaaaaactatatatgtatctatgtta

SEQ ID NO: 31510 - DNA, 341 bp, Glycine max
  unsure (1)..(341): unsure at all n locations
ggaaacaactgtcagattcaaggcagcagaagaatgtactccattctaataggaagtcaggactgagtggtcaaagctccaatgatgtcaaattgggaaacaagaaacatctttctatcaagaagcaggctcctgtcagcagccagccccaggacacttctgttgaacgccttatacgggaggtgaccagtgaaaagttttggcatcacccaggtatcaagtaattgtattattaccattagtgtagatgtataatgttattgataagctttatggtctctttgcattttgaattnnnnnnnnnnnnnnnnnnnnnnnnnnnnnnnnnnnnnnnnnnnnnn

SEQ ID NO: 31511 - DNA, 454 bp, Glycine max
gcatccccatttttgtctttttcacttttatctcatcatctgaaacagttttcgattgttgtgcctcattagtttttgtataataatgtcttgggtctaattactaaatatcctgagaaaatacccaccaaggtaccatctaacattaggttttcaacaattgagattcaagcacgttggaatttttgttcattaggcactttgctgctctttgatgggtagttttgtatgaagagctttgtatagacagtcattcaaataccaacatttggatgaataaatattcttttcatgtgctgcatatctgtcatccgatttaagcgacggcatgatctggcacaatggtacttttggttcaatgttcatctataagcctggtctggctctttctccccagcattttatctttaacttttgtactaggatttggcctagtggttggattaataatggg

SEQ ID NO: 31512 - DNA, 612 bp, Glycine max
  unsure (1)..(612): unsure at all n locations
gcccagaacacctggtaccgagtcccacaggtagggagggtcctgtttttataactatggatagaaccttcttaaggctaatcaatgatataattttggaaactgacaagacaattgaagttagaggctgttccctttgacttgtgccattccttctctcaataaacttctattgatgccccgctccacgttccattcttcagtatcctttgtagtttgaaccttcctcacactcccacttcagaaaccaatcaaagagagagagagagagagatgggtagagctccttgttgtgacaaggcaaatgtaaagaaaggaccatggtcaccagaagaagatgaaacgctaaaggattacatagagcaacatggcactggagggaattggattgcgcttcctcaaaaagttggtttaaaaagatgtggtaagagctgtagactaaggtggcttaattatcttagacccaacatcaagcatggtcaattctctgatgcagaagataaaataatctgcagcctcttcgctagcattggaaggcaggggccataatagcaatctagttgccagggaggactgacaatgatatanaaaactactggaacaccaagctca

SEQ ID NO: 31513 - DNA, 405 bp, Glycine max
ctaaaatttcccaattcattgcgcaccttgccctaatcacgcgtcctattcttccggcgaatcgccaccgtcgccggcagtaaaaccagccgctccactccctccccggcggcggcactagcaactctccctcgccggcaactaaccaagactaaggacggtgagcgagaacccgcgaagactcttagcttcactttcttcagctcacaggttctatcacttgccgaatccaatccaacagagtcctggaaacagtggcatcagctttcgccccatgggcgttacggagatatcattgataaaaaagatcgtaaaaggaatgatctcattttcgcatttatcttttgctggaaacatgaactctgaacctgtctcaaagtattaccagaaggcagaggagacaca

SEQ ID NO: 31514 - DNA, 580 bp, Glycine max
cggctcgagctcgagccgaatcggctcgaggttcctcatatttctataagacacagaatatttaagaatggagttcaccaaaacaagttccctcctaatattcttgctagtgtttgtctcaagcttgatccatgctaaggcataccaaaatctatactgtggcagaggaaccagatgctatggaaagtacatcacatgtcctgctgaatgccctaacagtgaaacaaacaatcctaagactaaggtttgccaaatcgagtgcaacaaacctacttgcaaggcagtctgcagaagtcgcaagccaaactgcaatgcaccaggatcaggatgctacgatccccgtttcattggtggggatggtacgagtcttctacttccacggaaagaccaacgaacacttctccttagtctccgattccaaccttcaaatcaatgcacgcttcattggacacaggcctgaaggaagaagccgtgactacacatggatccaagcccttggaatcctcttcaactccaaaagcttctcacttgaggccaccaagacaccccaatggaatgatgaacttgaccacttcaaatt

SEQ ID NO: 31515 - DNA, 419 bp, Glycine max
gatttaacttgaacctacaagcttgagagatcttcttcaacaatggaataccaaatcacagccccaagtgaccaccaatattccacaggctatgtgaccaaaaagtcccctcctccacctgtggagtttcctacctcaccacaactcatatttggggaggagattcttcacttcagccaccctcagcaccctctctcaatggtggatctccctgacctgttcaattgtgtggggtgcaaagagtatggctctggaaagaggtttgtttgccagcaatgtgattttcagctgcatgacttctgtgccttggctcctcctgctctcaaggcacacccctttcactcacaacactctgtcttgttccattccaaaccagccaagactgggatggcaaaatcaaaatgtgatgtgtgtggcaa

SEQ ID NO: 31516 - DNA, 290 bp, Glycine max
aaaggataatagcttttgacctagctaatagcacacaataatgggaagatccccatgctgcgatgagaatggccttaagaaaggtccctggactcccgaagaagatcagaaactagtccaacacattcagaaacatggccatggaagttggagagccctccctaagttagctggtctcaatagatgtggaaaaagttgtaggctaaggtggactaactatttaaggcctgatatcaagagggggaagttttctcaagaagaggagcaaacaattctgcatctccattcca

SEQ ID NO: 31517 - DNA, 380 bp, Glycine max
gggagaaggaccccattgacaatgagggctactggggaagtggctcagatttgcccacaatgagcactgtggagaagatcctaagcaatttgagctcaaaagtttctgtcatcaacattactcaactatcagagtatagaaaggatggccatccttccatttttcgctaattttgggagccccttcgcccggaacaattgtcaaatcccccatcttactctgattgcatacattggtgcttgcctggggtacctgatgtgtggaatgagttactattccattttttgtagaagttgtttattcaattttcttgattgaatatagcatccaatgtctgcattttttaaagagtggcaaaagctgcttacattagttgtttg

SEQ ID NO: 31518 - DNA, 491 bp, Glycine max
tagtcagagcgcactggctgaagatgccaggttcagtggagaaaatttggaaaagaacaagcttttctataatcgaattgctgatttggcttctaaacattcatgcactccttctcagttagccttagcatggtttctccatcagggaaatgacatagtccctatccctgggactactaaaatcaagaaccttgaaaacaacgttggatctgtggctgtgaaacttacaaatgcagagttgagtgaaatttctgatgcagttcctgtttatgaagttgctggggaagcaccaggccttggttctttatcgcaatatacttggaagtttgctaccaccccatcaaagtaattgtgttagagaagataaacacgactttttcttccctcacaatccattcacgaaaatgagtgagtagatttttcagtgtattgttgataattggtgaaaggaatcgtgctactctgttgtgaataagaattgtgtttgtatt

SEQ ID NO: 31519 - DNA, 369 bp, Glycine max
cgaagggttacctcttccgtcttctccagtccgaagtctgcgcctttaccgagggtcgcattgaattggaagaaatcaaagaagaacgaatcaataacacgaatacctcaagtgagagggagaaatggaatcgcctccgcagctgggttcaagaggggcagaaacacttaaacatatagctcctggatcatcaatttctgttgcatatcacccatcttttggaccttatgatgacctcctctttctagagcttgatgagaaacttctcccagatgttctgaatgaaagggtggtcttgagaggacagcctgatgaagatgccgttctttgtactctatccaaaacctatgctatgaagtttgttggaac

SEQ ID NO: 31520 - DNA, 722 bp, Glycine max
tttcgtccgtttattgttgaagaagtagtggaagataacaagccaccacttccctcgtttcgaaggttgctcgcactgaacattcccgagtggaagcaagcatgtttagggtgtttgaatgcggtgttgtttggtgcaattcagcctgtgtatgcatttgcaatggggtcagtgatatctgtttacttcctcccagaccataatgagataaagaagaaaactatgatctattcactttgtttcctagggttggctgtgttctccttagtggttaatatcctccagcattacaactttgcttacataggagagtacttgactaaaaggatcagagaaagaatgttttccaagatactcacttttgaagttggatggtttgatcaagatgaaaattccacaggtgctgtttgttctagacttgccaaagaagccaatgtggtaaggtctttagtgggagatagaatggctctagtggtacaaaccatttcagcagtggtaatagcttttacaatgggcctaatcattgcatggaggttggccattgttatgatagcagttcaacccattatcatagcatgtttctacacaaggcgtgtccttctaagagcatgtctagtaaggccatcaaggcccaagatgaaagtagcaagatagctgttgaagctgtttccaacctcagaacaatcacagcattttcttcccagataggatccttaaaatgc

SEQ ID NO: 31521 - DNA, 375 bp, Glycine max
cccacgcgtccgtccaaatttcgtttgtgagacaagctaggcacaatttttgttattcctatcttatcttaacattgtttcttggagttgattgaaatggcagtgcaacctgaaattgagcatcccaggaaggcctatggatgggcagctagggatacatctggtgttctctcccctttttggttctctagaaggaaaacaggggagaaagacgtgacatttaaagtgttgtattgtggagtatgccactcggaccttcacaagttgaaaaatgaatggagtgattccatctatccccttgtccctggccgtgagattgttggagaagtgacagaggtgggaagcaaagtagacaagttcaaggttggagacaaa

SEQ ID NO: 31522 - DNA, 903 bp, Glycine max
gttttgaacatgctcattctctgctggcaaatctatccttgttttgggaggagctggtggagttggaaactatgttattcagctagctaaacaagtttataaggcgtctaagatagcagcaactgctagcaccggcaaacttgaacttttaagggagttgggcgttgacttgcctattgattacacaaaggagaacgtcgaagaccttccagaaaaatacgatctagtgtatgatgtagtagggcaaggtgatagagcatttaaggccgttaaggaagatgggaaagttgtgacaatagtaccacctggacatccaccagctatgttttttgtgctcacctcaaagggatctatcttagagaatttaagaccttactttgagagtggtaagttgaagcctatactcgatgccaagactccagtgccattttctcaggttattgaagccatttcctacttagaaacttcaagagccacaggaaaagtggtcgtttatcccataccctaaccccaatatattattaactcatcatataattataattaataatgaacattttaaagtgtgtactaagataattgatcaattaattaaggtttgtgtcaaacaaagtcccttgtactactatgctttatgtttatgtatacaaagcaaccttgctgctgaaaaataaagattgatatatggttgcaatgtgatcaaatatatcttattggtagacgatatgtaaatattcgtgtaagcattctatgagttttgatgcatgttctagtttgagtgaattccggcaactgatcaactggtggatttttatttttttttatcaattagacactaacagtgaataaataaataaaaagaataggtaaaagatgtatttaaaaaaaaaaaaaaagggcggc

SEQ ID NO: 31523 - DNA, 390 bp, Glycine max
gttcttccaagaaaaggagattcagaaagcaattaagatgattaagttgaggtcaatgaggtttagccgaagcagctccaagcttggaaatggtgggcacaaagcaacaacacccactgaaaaggattgcagaagcattggtgaaatccaatgggaacttaggcctggtggcatgcttgttcagaaaagggagagcaaccaaagcgcaggggagggaatgatcacaattatagtgtcaactgtttcacaatcgcatgaaatttctatcgaggccacatcaacttttggagaattgaaaatgattctgtcactggcaacaagttttgagccccgagagcaaaggcttctcttcaagggtaaagagagagaggatgatgaatatctacatat

SEQ ID NO: 31524 - DNA, 438 bp, Glycine max
aaaaaatagtagtactattgtaacgttgtgacttgtagggagggaaatggagggaggtgacgttgggcattgggtgttggagttccttctccgggctcggtacccagtcgtttccagtaacctactcaagaaagtccttcgaatagtcccactttcagactttgattccaggcttcagaagacgcttcttctccgaacccttcaagaccacttgttcgctgtctctgtccccgaatccgttctcgaaaccctcgagctcctcgaggaacttcaccgtcgcgacgactgcgctctgatcaccgtcgccgccatgagcgccgtctactgcgccattgcggcggactgcactctcaagcacctgctggtggaactccacatcaaccctgcctacctcggcgccgtgaacaggatatggcgtggtagggttcggcacatgag

SEQ ID NO: 31525 - DNA, 384 bp, Glycine max
ctcgtctccgcacacacgacacgagggagaactcaacctcgtgagacgcatctcgcatgcttcactcgctcgcacgctcgcacgccggacactttccggtgccgcacttccgtttcctgatctcgatcttgccggattcctccccatcgcggccgatctcgccggacctccgcgccggtcgccggtaattgcggtgcctgacggagctctgaagattccggtgaggagaagacggatctgccggagaattcgtcatttgcaacgtcatttcgatctggatgcttgtggagttcctgaggacatggtttttttggttagagatggaggctgtttataaattttgatggcactggcaatcaacggaatcagtagaatattttttaa

SEQ ID NO: 31526 - DNA, 447 bp, Glycine max
  unsure (1)..(447): unsure at all n locations
ggacgtcataggtttctccccttccggtataggcatttggggcaatttgctccactgggtggggagcaggcagctgcagaacttcctggagactgggtttccatgggtcacagcactcaatggctttggtattctgtatatgcaagcaagcaagtgagctggcgcaccagggtcttggtcatgtctgattggacaagaagattcatatttggcagggattcaagtagagtttaatttgaccccttgtttctctcttgttaatttttgtacctaatgttagtgatatatgttgatggaacagcattttgctccattctcgattgggaacagtttgagaactgatattggattgtcattgagtgcttatgttgtttacagcttccattttgcatcaatatatgtggatttgaatcctttcaagcctnnnnnnnnnnnnnnnnnnnnnnn

SEQ ID NO: 31527 - DNA, 271 bp, Glycine max
ctgacgtggggtggtatagctttttttttaatctgttattagtatggttataaatattagttggaagattaattagaatctgtaattttctctttctttctttttttctcaaataatataataaactcgaaagcaacggctgagattggctttgagggttgacacgtcccttttatcttccacactcagttcccacctttccttctcagtcacacaaactcacaccatgttgtgtcaagtgtgaactcaaaacatatttctctctttcttt

SEQ ID NO: 31528 - DNA, 375 bp, Glycine max
ataaaacttctctcttcactttcttccacttcatcacaattctgccaaccaaagacacacaaaatcaatcaaggctttgaactatggccactcttcagagttggagaaaagcctacggtgccatcaaagacactaccaaagtcggtctcgctcatgtcaacagcgacttcgcggtatctcaattctcaatcttattcgtattctcggtttcgttttcatttgtgttccgaaatatttctcgtgcgagtgatcggtttctcgcttttattataatattattaggagttggacgttgctgttgtcaaagccaccaaccacgtcgagcgtcctcccaaagacagacaccttcgaaaaatcttgttcgcaacttctgtt

SEQ ID NO: 31529 - DNA, 554 bp, Glycine max
atttgcccaaaatgcaagcaacaattctgcctcgattgtgacatctacgttcatgagagcttacataactgcccaggctgtgagagttccaggcactctaagtctgtaactgcttcccaatgattgccaatcttctgcctgtgacttaaaatttccataaaaatggcgttctacattgtctccttcatattgctatactgcatccacccactggacccatgaataagttccggtgccaagtgactgactaacattatcatctgctcattgatcacaatattttggtgcttgatcagtaaatgctttgcaggacagacaacagaagtgatattacttatacaagggtgagattaaaccaacaacttctgatcattttccttcttttgtttttttgctggaaattaaggcacatgtaaaatgtctccattgtgtttttttcaatcagtgggctgacaccattcttgctggcgataaatattgatcattaaattatttgtatgagatatttacgcgtgttttgcttttaacaatcgcagttgtgaacttctgacttc

SEQ ID NO: 31530 - DNA, 324 bp, Glycine max
gattgaagaacctttcaaatcccttcttctttctctcccaaatctcaatcttcataacattcacccatttcttcacattgggggcttccggttctatttgttgattttgatgctcgagttctgtggtttctaaagcattgaaatggggaaaggaagaagtcctgggaaatggttcaagaatttactcttggggaagaaatcgtcttcaaagtctacttcatcaaagaagaatgacatttttaaaccttcaattgacaaggatttgctggtgtcgtctgaggtacccgtgcctgattcaaccatggattcgttgcagatatccac

SEQ ID NO: 31531 - DNA, 768 bp, Glycine max
ggatgtcacatatttgtactcatcaacatcgaaaaagaacattcacttttggaatacgaccagttcaccattgaacagatgcctatgagcaggaagatttgcctctctgaggattacggcaaaacttacaggaaatggggttttgaaaagcttgtgtatagagactcaattacaggaattcgtagagatcgaaaatatgcagtgcaaccacggagtttgtatgcaacaggggtgcacatgtcaatggatctatcaggaaagacaacacacaaaactgaaggtaggatcaaatacttccactatcatggaaccatatcagaaaggagagaaacatgtaaaatactcgtcaacacaacacaagtcacccagaacaaaattccttatgtgatggacaccacaatgagggacactgctggggtaatcaagaaatttgagctcaagatgattggaacaaggttgcagaagacaaggcaataatgacatacctcaaatctctcattccttttctcttgaacaggaaatgggctttcctataaagaaatatataatttaacttgtggcaggataaaaaaaatctctgagagtttttatataatatctgtattatatataattttttttatttatctggcacagatgggggtatatgatcttgtttcatatttaataaattttttttgggggggtggggggttctgttctgttatttgagttttctatgctgtatttttgtaaaaaataatgaataaaaatatatggtttaatttt

SEQ ID NO: 31532 - DNA, 413 bp, Glycine max
ggccacaaggtgtgttcataataacgaacaactacatagcatttatttttcgctcttctctcttctattcagccactgctcacaccatgagtgccgagaagaagaaactgattggcagattacgcctatttttcactaatgcaaaaccatacctcttaatgattggcttgcaatttggcatggctggaaattacatcttcggcaaggatgttcttaaccatggcatgagtcgttttgtgttcattgtttaccgaaatgctatggccaccattgctcttgccccttttgcattctttattgaaaggaaaagtacgcctaagatgacactttcagtctttctacagataatagtccttggattcctggagccagtttttaatcaaagcttcaattacttggggatgaagtatact

SEQ ID NO: 31533 - DNA, 297 bp, Glycine max
ctctgacatcatagtaaaatactccccactgaagttcaagttcttgtgtgtaaaatggccaacattttcctacacaatgggggcaacacttgcaaggctaccctctatctcttattcataaccacagccttttttatcgcaaactctgcacaggattctagatgaagtggaatcccaaccccaagccataggcaatctaccagcacctggagctaccaatccttcactcacaacagctccagtcaccaccacaccacagatagatcctgccaccactttgccaagtggccaaacatc

SEQ ID NO: 31534 - DNA, 476 bp, Glycine max
atctaaattagcaagagaattgaagaagttgtgcaccaaattttccaccaaaaccacaactagatttgttttccacaaggaaaattactaaacttgtttctgatggaacatatctgttgaagcaattccttaattaggaaagcagttcagaatcttggacagtttccttctattttgccagagaatttgtaaatatatttgctgctctggtgtctccgacataccaacttcgaagaggattcggcaattgaaaaatgaaagaaaatacgtcagtcttcattgttcgttgcaagttgagtatgtgtatccatgctatttcggtatttgctatacacctcaggtagcaaatcatacttttaggagaagtataaacaaaataaattttacaaaagtacgagagtgactattctattacaaacatactccgtaattatctggtctttactttaaatattaatctaggtccatcttttttt

SEQ ID NO: 31535 - DNA, 328 bp, Glycine max
tctacgcgttattaaactattaatgagctggacacctttcaagatgtacttgatatttatgagggaagtattaagctgccaagtggacctttagcgagtaaactcagagaacttgttccctatgagctgctgagagaacttattaggaatgatggtgagagattcctcaaattcccggtgcctgatgtgatcaaagtgagtaagactgcatggaggacagatgaggaatttgcaagggaaatgcttgcaggggttaaccctgttattatccgccgtcttcaggaatttcccccggccagcaagctagattcaagagtctatggagacc

SEQ ID NO: 31536 - DNA, 312 bp, Glycine max
acttactatatatatatatatagggaattcaagtgagagtgaagtaaaagggttgaaaattttgaatatgaagatcagtattttgctatgtgtggtgcttttgggtttccttggggtttgtcaaggaggcagcctaaggaaaaagttctaccgggattcctgccctcaagccgaggacattattaagaccaaaacccagcagcatgtgtctgctaatcccgatttgccagccaagttgcttagaatgcattttcatgattgttttgtcaggggttgtgatgcctcagttttgttgaactctactgccagtaa

SEQ ID NO: 31537 - DNA, 456 bp, Glycine max
cctactggaatttcttcaacacatggtctcagatctttcaatctcaagctcaaggccatgaatacaatgttcccatttcacacccacccattctcaaccgttggtttcccagtgattgtgatccgtctgttaatcttcctttcaaacatcatgacgagctcatttgcaactttgaagcaccttttctgagggagagagtcttccacttttctgcagagtccatagcaaaactgaaagcaaaagccaactcagagtccaataccacaaaaatctcttcattccagtcattatcagcacttgtctggagatccataactctcgcgcgctccgtgccgtacgagcaaaaaacaagttgcaagatggctataaacaatagatcaagaatggaaccgcctatgccagaagaatactttggaaacttagttcaagtagtgagtgcagaaacgacaacaaggg

SEQ ID NO: 31538 - DNA, 653 bp, Glycine max
aagcccttctaaaacgccttactctgtatcttctttcatcatccaaaaaaaaccattcacacaaagaaaacctctgggtttcccaagatgtcatcatcggaactctcttctttctttctcctgcccctatcagccatactcagtttcgatgctttgctcggagttatgtttctagtggccgtgttcggctactggctggttcccggtggtcttgcttgggctttgtccaaattcaagcctgcgattcccgggccttgcggttacccggtggtgggcctggtttgggctttcatagggcctcttactcacagggtccttgcaaagttggctgaaaccttcgatgcaaagcccctgatggcattctcggtagggtttactcgctttatcatctcttctcaccccgacactgccaaagagatcttgaacagttctgcttttgcggatcgtcctgttaaggaatccgcttatgagcttctctttcaccgcgcaatggggttcgcaccctacggtgagtactggaggaatctgaggaggatttcagcgactcacatgttctctccgaagagaattgcggcccaaggagtgttccgggcccgggttggggcccaaatggtgagagaaatcgtgggcctgatggggaagaatgatgtcgt

SEQ ID NO: 31539 - DNA, 601 bp, Glycine max
acttactcctccgaccacaaccatccctggccaccttctagaaaccacgccaggcccaccaaaaaacctgaaccggttccggacccggtcgaaccggaggagaagttcgcggccgagtccatgataacaaccgcggaagaattggggtggctgggggagatggaagcgacgtcgtccacggttctcgaaagcccgtttatggctacgacgtaccatgctgacgtggcgctgattccgatgagggaggaggacgagtcgctcttcgccgacctcggagagctgccggagtgctcggtagtgttccggcaggggctgctggcggagcggcggcggtacacggcgccgtggtgtgggaccacaagttgagggcaaaaaagtcaacacgaaaagaaaaaaagtagaaaaactagaggtgcctgttagacgcgttcttcgtgcgccacaagagaaaaagataccagcatttttttcctttttagtattgagatattttttattttttttgttttaccgttgttaagacattaattaaaaattaaaagttattgtaaaaattataaaaatattcaaaagaagttataaacaatattattttatgtat

SEQ ID NO: 31540 - DNA, 341 bp, Glycine max
ctcgagccgcttgtttctgctgattgtggggtgtgtttgtttgatgcaagagaaggttcagagaagaagatgaactctgagagtgaatatggtgtgctggattgcactggtgctgccaacagtggaaatggtattgtttgcagaagatgatttctttttttatgtcactaatgtgctcctattaagattgattcggagtttctaattctgatttagtttgatgattgttttctgtttaattgtgtcctaaaccaaagtgtcctgttgaataaaaagtgaaatattttaatttgttcgattcataaacgaacaaatgggtgagattatataccaggttctct

SEQ ID NO: 31541 - DNA, 467 bp, Glycine max
cttatctaactattgtacctttgcaaaataacattctttagttatttcgaattcgtgtagcacagagagaagagaagagaacttgtattttctgccagtttcccagtatggtggccacaagcacaaatcaatccgagttagaaacaagtaagaaggattccacttatgacagaatagctgaagtcaaagcctttgatgaaacaaaacttggtgtgaaaggcctcttcgattctgggatcacaaagataccacgcatgttccatcatgccaaggtggaggaccacactgaaaccatgccaaatgactcaaacttcagtgtccccatcatagatctccaagatatagacacaaactcatcccttcgtgtgaaagcacttgacaagattcgaagtgcatgcaaggagtgggggtttttccaggtggtgaatcatggtattgctgttgatcttttggatgagatgatatgt

SEQ ID NO: 31542 - DNA, 277 bp, Glycine max
cagatacgaaattccaccgagtgcttcgaggtctaccaagttagaccatcagcattgcacctaaaccctggctttctccgctttaatttctcgttctctcgccatcaagtccatatacatcgttccagcatggagaagataaaaataaaactactcatgaaggatgaaacatttctccaacacccttttgttcttgctgttgttctggttttaggccttgttatgatggacccttttcatctgggtccagtgtctgagcatgaattcagacccgtga

SEQ ID NO: 31543 - DNA, 182 bp, Glycine max
ctcgagccgatcacattggtctttcctgtgtatcagaggaaagccatggggatctcaattaggaatagcttagtgtatgtactgctgttgtttgcattctgtgaaatgcaaatcattgccggaaaagacaatctaacctgacttttggtaagtccatgtttggagaagtaaatgcctctagt

SEQ ID NO: 31544 - DNA, 439 bp, Glycine max
ctcgagccgaatcggctcgaggtgtgcatggccttgagttggcattggatgagatctcttatgatttggctatatcaagtggaaggatgactaaacctgatcctcatggtaacacatgttgcatgctacctggagcagaatttttgagctccaaattctggaggaaaacacatggccgggattcaatcacccgattctctagatcaggtggcaccccatcacttgctgccatgaactaccaagccaacatggatgctgaaaccaagttggcaaaccacagattcaggcctgagggaggcttcatcactaatccgctggcagagattcatacaaactcgaggaattttgcaacatcggagatagcttaaaagaagcagatgtgctgcacaatctataatgcaaatttgatcatttgattctcatatcagctgtgatggaa

SEQ ID NO: 31545 - DNA, 370 bp, Glycine max
ataattacacatatatactccacctactctcctctccaagcttctattcaaatcccatttgagaatcaaccaacaccacctcaacacaaaaacataattaacatgtcttcaagttccggtactagtgccacgccttaccccatcaaaacgattgtcgttttggttcaagaaaaccgttcctttgaccacatgttgggttggatgaagtccctcaacccggaaattgacggggtcaccggtttggagtcaaaccaggtttccacattcgatccaaactcgaaccgggtttacttcggcgaccagtccgggtttgaagaaccggatccaggtcacacggttgaggatgtctacgagcaagtttttggcgagc

SEQ ID NO: 31546 - DNA, 555 bp, Glycine max
gccgccctttttttttttttttttagaaacataaactcgttgcaatttattgatcaattaaacatataccgttgctatgtgaggggcaactacacaagaattcttggataaaataaaaaaagtctgtacgttatgattcccattcccatgagcaatattttgcatgggaaagtcaaagtatcaactacggataacgttaggtagatgatgctcatgagggtcaaattccactttgagaaggactactactagcgcgggaagaagaattgatgatctcccgacccagttcatttattttgctgagtagaagcatttgctctgtctccaactgtgttatatacccttcctgtgtatcctctagactttctaactcactcaaagttgttgttaatccttcaagattttcatcctctattaatgatcgaaactttttcatcatctctctcatctgggtaggaatttggtgtgatttacttaacgaagagggttgagagtctagagtatgtcttgtttgcatttctggaacttttcttgtaatttggatgtggatctcac

SEQ ID NO: 31547 - DNA, 523 bp, Glycine max
cttttataaaaaactggagcgttatttattttcttcttaaccccttcttcctcttgcgcatcgtctcaactcaactggcatttctgaacactctaaaaaaccagagccaaaccccaaacaaaattgtcttctcttctatttctccaattacaactcgtttccctaactcggccgagtcatcatggcgaatcacccttccgaagctcccaccgacgacttcctggagcaaatcctgggcctctcgaccttcgcctccgccgaccccgccgccgacgcctctccgatgatgcttcagctcaactccggcgacgccgccacccacctcgccgccttccacgcgccgccctaccagctcggcctcagcttggaccaaggtaagggaccattcctcacgcccgaggacgcttctggaagcggcaagcgcttccgcgacgacgtcgttgataccagacctaaaaacttttttcatggacaacccatgcctactactgttcctactgctccacatccaccagcagtgcga

SEQ ID NO: 31548 - DNA, 494 bp, Glycine max
ttggaattaagcaaggaaatcaaggtgatgcatctggtgaaaatgtaaatggggaagatgctattgatgttgatgacaatgatgggatacttgctaaatcaattagtgcttctactcaagagcctgaaattaaggagcaacaactagccacagaaacttctagcactatacaccacaaaggttctgaattgtctgaaaccaatcagcagaatgatcgaataccatctgatgcccgggtgaagcagatacaagatcagcttatccaagctaaggtctatctttcccttccagttgtaaaatccaatccacatctcactcgggagcttcgattacgggtaaaagaagtttcacgaacacttggggaagcaatcaaagattctgatttacctaggaatgcaaatgagagaatgagggctatggagcagacactgatgaatacggagcaagctcaagatgattgtgctgctgttgtgaagaagcttagggctatgctc

SEQ ID NO: 31549 - DNA, 550 bp, Glycine max
cgtatgtattctagaatcgccagcacccgattcccccctccgttaacaaacggcactaccagaattccaccaacaaacaaaccaaacagccgccgttagcgcgttgcagcagatcagaagcggccgttgcacgccactcctaacgcttttgataacgacgtttgttcctacttcctacgttcccttctctctctgcgtgtctctgtctctgtctgcggctccgtacgggtttcgaggcaatctaggtgcaaattgcttgtcttgaatagaatgccaggagaagaagtattagctcaagaagatgagaggggtagatgttttgagcctgaaacctctgaggatgagtggcggaagtctcgagctagatctcttaggagaaaagcaatgactgcttcaaccagactcgcttatagtctcaggaagcgtaatacacgtgtagcagatagtgactttgcttcaattttcatagaagatgtccgtgatgctaacgaggaaaaagctgtgaattcatttcgtcaggtgctacttacaagagatctgcttccagatt

SEQ ID NO: 31550 - DNA, 948 bp, Glycine max
ttaataataagataaatgctactagttaaatttcatagtattgtgcttctattgaaaaaaataagtagtattgtgcttctattgaaaaaaataaatagtattgtgcttctatgaggaagcatttctgataatgataaaagccttgcatctttttcaatgacatttcaggttcaaaagcaattacaaatgagaattgaagcacagggtaaatacttgcaaaagatcatagaggaacagcagaaattaggtagtaccttgacaacctcggaaaccctccctttgtcccatgataagcaaaatcatcctcagtcagaggcttctggatctagtgatgcccttgcaagcactgtgtctccacttaaaaaacagagaatcgatgatggttccaaggaaggcttcactgcttcccaagtaagaaagaatgacaatgttggtcagttggatccaaacttatatgatgatgctgggtttggatttgatttggagacaaaaaaggatgaagataatgagagtggacagtaagaactaggttccatttgtaggtcaatgtgtctcactgtaatgtgtagtgtatttttctggaagaaaatacaaatcatgctttgtaaattaaatttcacgcaatccatttgtacatattaatgtagatatagatgcattcttctctcccggtctgagagtcataaacactgcactccacccaacagaaatgctttgacatgcattacacgtgtggtcatggatgaatgttgggtgcaagattcttgtcgatgttcaggttgctatggtcttggccaatatcaaaggtatcaattagctgatgaccacattgtttgatccttgtagacaacctaatcatgggatactggcttggttctttttgttggagatagtaatgaccagcttcccttgatattaatcatttaatttaattatgtattttcttcg

SEQ ID NO: 31551 - DNA, 442 bp, Glycine max
ctttgtataatttgcatcctagctttggtcttatagttattagttagaccttgcacagtaaataacaatgaagcggccatttagttcgagcggttatcacttttgtctaatgaatatgttcctgttgcttttggcagtaaggtcccaactgacaacagacttttataaatcatcatgtcctaacgtttccaaaatagtaaggagagaagttcaaaaagctctaatgaatgagattcgaatggctgcttctttgcttcgccttcactttcatgattgctttgtgaatggttgtgatggatcgatactactagatggtggtgatgatggagagaaatctgctgctcctaacctgaactctgctagaggatatgaggtggtagatacaatcaaaagttcagtggagagtgcatgcagtgggggttgtctcctgtgctgatatatt

SEQ ID NO: 31552 - DNA, 523 bp, Glycine max
ggggaaatggttgtactgacaacctcagtagaatggggagcgctggtcaccaagctgactgtacctaaagattggaaagagtggcagatctatttggtgctattgggactatttttagcatcagctgttgcattttacatattctttgagaactctgattcattctggaactttcccatgggcaaagaccaaccagcaagaccaaggtttaaacctgtgttaaaagatccccagtcttatgatgatcaaaatatttgggggccagtagatatgtgatcacacagacgttcttgattttagtcttcagtgctgttttggaagctgtaactggtatcaacatttatttttattttttttattactggtatcaacatttatttaagcccttatagagttaggcactattacaagcatttacttctatttttgtggggtgaaaattatgaacctaaaggccttattgatatgtaattttaatagaaactttaggaataatcaaatagcttccttaaatttacaagtt

SEQ ID NO: 31553 - DNA, 842 bp, Glycine max
actaaaaagaaaaaatacatgcctgctactcctgcagcaccaccagaagccacaactttttttttctctcacttctaagaagagttcttcttcaataaatgcaccccctttgaggacttcttctttttcaataccaacccagataagaaaaagttataaagttattatctttgtctgtttcagaacaacccagttaataatataaataatccttgtttttgcaatatttttctgagaacccatttttcattttctctctcatcttgtagtgctagttgttcttttgagaatagtgggtgtttttgtgcttaaaactataatgtctgtcttaaagtacagaaatctttttctttgtctggcttcatggttgtgctgttgctgtgtggctgtggcttcgagtgagagtagtattggttccaaagaccttgatcagacaccaacatgggctgtggctggtgtctgcactgttttcatcttgatatccataactctggagaaaagccttcacaatgtgggaacgtggctaagggaaaaacacaagaaagctttgcttgatgctttggaaaaggtcaaagctgatttgatggttcttggtttcctttcactgcttttgactttcgtgcagagatacattgttagaatatgcattcctatggatgtggcagacaaattgttgccatgtacttatgttggtaacgacaagggatcaagtagtgaagaggaacaccgtaagaaacttctttcttatgaacgcagatatttgtcagatgatgctaccccttaccaatgtaaggagagacatcagccacttatatctggcaatggattgcaccagttacaca

SEQ ID NO: 31554 - DNA, 550 bp, Glycine max
gatggagaagcagaggatgaaattcgcaaaggatttggagttgcagagaatgcagtttttcatgaagacccaggtagagatttcgcagctcaaacttggaagaaaaggtggtaaccctagcaacaaccaccatggcaccaccaacaatagcaacagcaatcataacaataatagtggcagtgaatgaccgagggagggataactaggttaaggtagattcgaattgcattagctttgtggtgtatgagtttagttgtttattattattattattatcccttaattgttgcagttaacttaagagggattgctatgctgaaccctcaacaaaaatgaagtgtgctgaatagtgaataatctaatctctttgcagcaaatgtatcagttgtcatgtgtgacaccattctaagttatatcagtatgagggggatcatattgtcattcatagctctagttggatttagataaattgtacatagcttggagatgaattcctgacctgtttctattcttctttgctacacccaattagagatactgttgattgacc

SEQ ID NO: 31555 - DNA, 316 bp, Glycine max
cttccgacggacgctgaaagtgaaacgcaaaatcccgtgacggagtgcttccactgcactgtcatacaatggcttcctccaacactcccaaacccgaaaataagaagagtaccaaaaaatccgaaatctccaaagccgaaaagaagaaaaccaaaaacgctgaaatccccaaaaccgatggcaaaacgaagaagaacaaagaaatctcacaagaggagaacaagaagaagattaagaaggccaagctcagcaacggcacttcaaaacagcgagacgagggatccaaaaagggagtagcagcagaaggacacggaga

SEQ ID NO: 31556 - DNA, 443 bp, Glycine max
atggagctgtatatttcctggaagcaagaaagtgagcaacaagacaaaggaagtggtgaactctactatatcaagcaatgcaggggagaagttgaggttcaaaacctttaacagcatcaaaataagtgcaattggcaacattttgcacattttattggctgcatatctccctactttgttgttagtccttttatgaggtgctaataattcaattttttgttctttttggaattttgaatttcatagagttaaggatgaggtcataagagaaaaggaatcgagcatgatatgtaggtctaaacttagggcttatgtagatgcttccttttgttttaagaaagtagtgttaataatttttcgtggggctcttgtaattaacgtatgtagtacttgaaattgtatttgttagttaatttgtttagaatgtgtatcaacatgtcacc

SEQ ID NO: 31557 - DNA, 262 bp, Glycine max
gaaagacattaaaatctacttttgtcagcagagcctctgaattcttgagaaattattttgctagtttggtggacttcatgataagtgataaaagttactcttctcagcggggacagttaaagaggcctgatcatgctgacctgcggtactcctgcaggacatatgcacgtcttctgcaacatttgaagagtcttgacaagaattgtctgggtccattgagcaaagcttattgcagttctctaaacttgcttcttcgcagaga

SEQ ID NO: 31558 - DNA, 519 bp, Glycine max
  unsure (1)..(519): unsure at all n locations
ctggatacaggtgtttggcctgaatcaaagagctttagtgagcaaggcttgggaccaattccatcaaagtggagaggaatctgtcataacggaattgatcatacttttcactgcaacaggaagctaataggggcaaggtacttcaacaagggctacgcctcagtgcccggccccctgaactcctcctttgactcgccacgtgacaacgagggccacgggacccacaccctatccacagctggcgggaacatggtcgcacgtgtcagcgtcttcggccagggccacggcacagccaagggtggctcaccaatggcacgtgtggcagcctacaaggtctgctggccccccgtcgccggcgacgagtgcttcgacgccgatatcttggcagccttcgacctcgccatccacgacggcgtcgatgtcctctccctctcgctcggtggctcggcctccacgttnttcaaggatagtgttgccatcggatccttccatgccgccaaacatggcattgtggtggtt

SEQ ID NO: 31559 - DNA, 453 bp, Glycine max
tttttcgcgtgggcggacgcgtgggcggacgcgtgggccaagacatggttgaacccaaagatcacgtgatagtgtttgacaaagcagactactatgcacatcctgagcattacaatcccactttccatgaaaaaatagcaccatatgcatctgttattgtcaattgcatgtattgggagaaaagatttcctcaattgctgagctataagcagatgcaagacttaatgggccgggggtgcccccttgttggaatagctgacataacgtgtgatatagggggttcaattgagtttgttaaccgcgctacttcaattgattcaccctttttcagatatgatcccttaacaaattcctaccatgatgatatggaggggaatggtgtgatatgcttagctgttgacattcttccaacagaatttgcaaaggaggcttcccaacattttggaaacatac

SEQ ID NO: 31560 - DNA, 593 bp, Glycine max
atcaaactgctgattcagatcatgtattgaagagaacaagaccttttggattatcagatgaagtcagtaatctaccagtaaatttgcttcccgttgcttactctggccagagccatggtcagagctcctattcctctgatgacttgcccaagactgttgtgatgactctcaaccaaggttcaattgtcaaaagcatggatttccatgccactgcagcaaattctacttcttgttggaacaaacatgggcgatgtcatggtgtgggatataggcagccgtgaaaggattgcacaaagaaattttaaagtctgggaacttggagcatgctctgtggcgttacaagcatctctttccaatgattactcagcatcaatcaatcgggtggtgtggagtcctgatggaacactttgcagtgttgcttattctaaacatattgttcacatatattcctatcatggtggggatgatcttagaaaccacctagagattgaagctcatgctgggagtgtcaatgatcttgccttttcatatccaaacaaacagctttgtgttgtgacctgtgcagaggatagggtcatcaaggtatgggatgc

SEQ ID NO: 31561 - DNA, 518 bp, Glycine max
tgcgaaaatgctaaggaaagaaagcaagcaatacaaaaaaacccgggttctgcgggtcaaatcactctctttctctcatataaaccacgactagtgtttagtgtcattccgcttcttcactctctttctccctttaactctacattctctcgacacatgctttgctagatcacaggttgttggttaatagtgttctgtgtcagaaaatgttgtgaatgagagatgtgtattgctagcagtttgactgcacagttgaattagtatgctactaaggggattctgctggatgtcaaatgatgtttaagatttgatatacagtaaaaagaaattggagactatggaagaaatacagtctcaatcagataattatagatcttcgtcatcgtcggcaagcagcccggcaagtagggtgccatcaagtaactttttctacctgcgtaaacctggttcacttaggcagcccatctcttttgaggattcacctgagtgggaggatactgatattgatgttagagttg

SEQ ID NO: 31562 - DNA, 272 bp, Glycine max
cttgattttctttccgctgaattaacattaacatgattgaaatttgaatattttgttttgattcattggagatcttgatttttgaatttctgtggctcgttaatttattaacggcaataaatattattactactaccttatcgtaaaatgaattgtgtgtatattttgtctttaataccatatttaccctccaatttttccaactattatccttctcttccacgccgcacgccaatcgtcactcattcagcgcgattccgccggagaacgcg

SEQ ID NO: 31563 - DNA, 449 bp, Glycine max
  unsure (1)..(449): unsure at all n locations
tggtgccgcatgttttcgccgaatgtggagtccctgcaggaggcactggaagcagttgtaaaggaaggaccacagaggctagcaaggcggggcaaggcatgccgggaatatgctgccaaaatgtttacagcaagaaagatggcattagcatacgagaggttattcctatgtataaaagatcgctcattctgcacctatccttgaagcttaggttagaatagaaactctttaatacaactttctttcttccatttatttttctgttatttcagtatgataaaatcatatttaaatttttaaacaattatcagatttaggtttaaaatgattataatttcttgaatcacttccacacattatggcttctgcattggtctcgaatctggagtatctaatattggaggagccaataaataaaagaaatttcctnnnnnnnnnnnnnnnnnnnn

SEQ ID NO: 31564 - DNA, 347 bp, Glycine max
tagcctgatggtggttaattgaattaaacacatctacaccatattctttgcagctgatggattgtggacttgaagagcttattgcactagtggcctaggggggttgagcttgtatagtataacatacacatatatgaaaaggatcagggttgagcctgtgacatttggctttatgtgcaccccaaagctaggagaaagagacttcaaactaggtcgtccccaggcattgataagcaagcaggtgctccttgttcatctctccttttccattaattcttccacttaactgatctcggagtttgtattgtatcaatctatgagtgtttaatagttattcttaatgtaat

SEQ ID NO: 31565 - DNA, 278 bp, Glycine max
ggagcggaggagataccagtgggcactccgaggcaacttcacactccttttaatctttcatcctatctttgtattgttgaaccctccattctctgcaacattcttcgattcaattgctcttgtgaaattcctcctttattagcggctaaaccctaaatcagaactttggtgtggtgtgttgacttaattgagtgtagaaatagaataatggtgaaagcatatacacaggaacacgtctacaagcacccttgggaacgtgtaacttgtgcatcttggcg

SEQ ID NO: 31566 - DNA, 459 bp, Glycine max
ggctttgaatctaatctgcgccgctgaggataagcattacgtcaaggccaccggcctccctcacggatgggatgttctcttctacatcttccagtttatccgcgtcgttttgctctttactgtcatcgttttgataagggccaggatggtcttttctcaaaccgtttttgcaggacagggagaagaaggtgttgatgattgtcatcccgcttcaggttctcgccaatttggcttccgttgtgatcggggaaacaggtcctttcatctaagactgggttacttggaatcaggttttcttgcttgtggatattatctgctgctgtgccattattttccctattgtgtggtccataaggtcgttgagggaaacttcgaaaactgatgggaaggcttcgaggaatttggccaagttgactctgtttagacaattctacattgttgtcattggatacttgtatt

SEQ ID NO: 31567 - DNA, 367 bp, Glycine max
gagaaatgctcgtgaaaagagaaagctgggatcagatataactgcagaacagtctccatcaaagcgatttagagatgttggaaatccaaagaaagcacctgaggagaataactatcatgtgcagaacatttctcaggtgacaaaagtggaaggggtcaattggaagaatactaaaattgatgataatcccagtgagcaacagtttagccacgaaaagaacaggggatactctgaccagtgcaccgcatttttatcaaatcttcatcctacggcaaactatgaacatattcgtaatttcttcagtgatgttggtggaattgttgccatccgcatcctacatgataaattcactggaaaatcaagggga

SEQ ID NO: 31568 - DNA, 281 bp, Glycine max
tctggctcccgtggttggtactgtggaaacattccttgggaggccatggaaggagtactcaaggactgtttatatgcagtctttcatggatagtttgatagctccggctggttggcatgaatggactgggaatttttcactggcaccttgtactacgcagactatgataacacaggtcctggttcaaacactgccaaccgagtcaactggcctggctatcatgttattgatgctactgatgcagctaattttactgtctctaacttcttggttgggaatga

SEQ ID NO: 31569 - DNA, 343 bp, Glycine max
tcagcctttccctactgttctgcctcacgcactgtttctttttctttgcttcgctatttcaaacattcactccagttctctctctctctcttgtttgtttcttctggaacagaatggcggtggtacttaaagacatgtgtttcttcaacaacaaggacattctggttataaagcctcagaagaaatcaccactgttgttaaggatgtcggtgttgatcttctcaatggtgtgtggtgttttcatttgttccgtgtgtctaaagcagataagcactcatgcacggactatgcttatggagttgcaaattgagaagccttctcggagtagtagtagtagattgaa

SEQ ID NO: 31570 - DNA, 317 bp, Glycine max
cttgtattgtacgtggtacaatggtaatacttttcttaagcgacacacaggatacacattcttgttattagaactgatgtatttacttgtaaaagatgaagcagggtaaacaattcctttggctttaactatcatgcaaatgagccattaggagtggcatagttgagtttgggtggtttgcttgaggtcataaaatcaaacctcagctttgccattgtacacgcacaaaaaaaaaggtactatattgaaatagaaagtgtgtatgttgtattgtattttgctgaatatttttacagaatggaattgaaacacttatt

SEQ ID NO: 31571 - DNA, 289 bp, Glycine max
acgtgttctcctacacgttgccattgttcaggcagctctcccccaaggaattgtcccatttgtccttgcgaaggactatgatgtacatcctgatattctcagcacagctgttatttttgggatgctgattgctttgcccataactctagtgtactacatcttgttggggttgtgaatgaaagacatgatggatgatacagaagattcacgtgtggcatccatgcaaagcttggttgaggttgttgagaatgagagaaaaaaaaggtcataaagcaacaatagaaaagaa

SEQ ID NO: 31572 - DNA, 438 bp, Glycine max
ggctcaacaactggctgtgactgtggtgcaaaaggctgatttcaaacttctgaacattaatgggaacttcatttctgatgaaggcattgatgagttgaaggatatatttaaaaaatctccagacatgctcggtccattagacgaaaatgaccctgatggaatagacaatgatgacgaatctgatgaagaaggtggtgcagatgaactcgaatccaaaatgaagaaccttgtagttgatgattgactgaagcagttgcagtcttctttcatgttctgctgcgcaagtaactctcgtgacagtagagggtttttagaccattcttattcgtagtagtttatgtaactattaagacgcatcaatttgacagcagtcaattattgaggggacataaaatgtctgcaatatttatcgaaatgttgttttcgatgtttcctttc

SEQ ID NO: 31573 - DNA, 317 bp, Glycine max
agctatgcttccactgatcggttaaatattcaagctacaagcccagagcgagatttaactggatcagactaccatttacattcaaatggatcaagcactgtcagtagccgtagcgcagggcacactaaacagagccagccagattcaacaaatagaaatgggagcagaactaaggacagtgaatcccgtaatgaaactgaatgggctgaacaagatgcacctggtgtatatatcacactcacctcccttccgggaggtataatagatcttaagagagttcgcttcagtcggaagcggttcagtgagaagcaagcaga

SEQ ID NO: 31574 - DNA, 393 bp, Glycine max
ctcaatgtcattgtaaccatgctttcattgaaccaccttattttctatataaacagttttcagttttcaatttttcatcctatcctgtctgaattttctctcttaatatatataacttacatatgaaggtagagtgatatcatgaagaagcaagtctgagtacaagtttcataaaaagaggagttacctttgtatcactagttcaaagttcaccttctcagaagctacatagatacactgatggagaagcttgtaaggtcctgtgacaaagaatatatgaggatggccatgttaaaacacgaagaaactttcaaagagcaggtatatgagcttcatcgtttgtaccaaattcagaagatactgatgcaaaacatggatgccagaagaggaatt

SEQ ID NO: 31575 - DNA, 809 bp, Glycine max
ctctcattctctttccctcttcaactcaaccacacacttcttagatcaaaagctatctttgttgctttgagtttgaaccttgaatctatcaatcaatcaaagtgggtggtgactcatggaagtgaaaggactaagggcaagcaactccaccaccaccaccaccacaatccaaagtgaggatgagatggaccttcgaagaggtccttggaccgtcgatgaggaccttgctctcatcaattacattgccaatcacggtgaaggtcgatggaactctccgccccgttctgctggactcaaacgaactggcaagagctgcagattgagatggttgaattatttgcgtcctgatgttcgacgtggaaacatcacacttgaagaacagcttcttattcttgaactccacggtcgctggggaaaccgttggtctaaaattgctcaatatttgccgggaagaaccgataatgagattaaaaactattggagaacccgggtccaaatgcatgccaagcagctcacatgtgacgtgaatagcaggcaattcaaggatgccatgcgctatctttggatgccgaggctggtggagcgcattcaagccgccgcggctgccaccaccaccgtggcggctgcgggttctccaacggcatctgccggtgctaccacaaccatcaccaccaacaacaacaccaccacatacaactactacgacaacaacaaccttaacaacagttttgaggtgcacagtgggaacatgatggtgagaaatccaacaatcatgaacaacaataacttttgtggctcacatagttaca

SEQ ID NO: 31576 - DNA, 446 bp, Glycine max
gctgattttgcattgtggaaggctgctaaaccaggtgagcctagctgggacagcccttggggtcctggaagacctgggtggcacattgagtgcagtgcaatgagtgcttgttatttaactcataaatttgatatccatggtggtggaattgatttaatctttcctcatcatgaaaatgagattgcacagagctgggctgcagaccatgatagccatgtcagttattggatgcataatgggcatgtcactaataacaatgaaaagatgtcaaaatccttaggcaactttttcactattcgccagatcactgagcgttaccattcacttgctttgaggcactttttgatcagtgcccattacagatctccactaaattactcaatttcacagctggagaactcatcagatgctatttactatatatttcagactcttcaagattgtaa

SEQ ID NO: 31577 - DNA, 371 bp, Glycine max
gaactagagaagacatacatacctccagaaggctttcttacaacactgaaagggttggattataaacttcaagtagggattggacacttttatcatatattctacgagggatgtttagcaaattttgaaattggagaggaaggagaagaagcatccaagctttaccctgaagtgaattacacacgcatggacgagtacctaaaaatttatgtgtaaaaggaactcattcagtaggagttcagtgattcaaacaggaacacggtttttagctacaataaccttaatttaaggagatgattttgtgcttataattcgatggggaaactggatttttcggatcttgaaatgtgaacgagtttaactttatcatt

SEQ ID NO: 31578 - DNA, 561 bp, Glycine max
aataaagattgagacatatatcacaaatgtccatctgaggtttgcatctctttatcccatatttcattgcacataaaaccgatgaattataacattctttccacaaccacttctgaaaatcttgataccttctcaatgcagctttcttctcactctcagttttcccaagctcaattttgaaggatgatgaagtttcagatggatcagcattcaagtcatgaagggtactgctaggactgtcagatccagcattgtgctcagggatagaacatgcttcattagcttcaattttaatagaaaattcgcccctgcttccatttttggcacaacatgcattcctctttcgaacattttctttaaaggaattctcaatctttagcaacattaagcgcaaatgagattccctaatcccacgtgaatccaatgatgtcaaaagagcatcaaaggcctcttcagaatcaataagcctccacttgccatcatgatattcaacaaagatcctgcctgaaccaggatcattgctagaagcagaagcaacaaactgccaatatcggttacgtc

SEQ ID NO: 31579 - DNA, 397 bp, Glycine max
gttggagaaggcgaaaggcaaagaaggagatttcaaaactcgtgaaaaaccagagagagggcttttcatcgttctctctctctttgctcgtttgttcccactgaaaccccagcgccgtttatttcatgccgttgttcttgtctcgcacgcaatcgtgccggcgacactgcacttccggcgccgggaatgggctttgagccgccgccggataacactgtgttgaatttagctaagctagggtttcggttggatttcggattcgcaggtctctctcaactaattaattaaccgattattttttttcttaaaaagaagaagaagaaaacgacgtgacataaccgtccggcgtaaccgggaaccgttaccgttaccggctgacggatctctattttttgtc

SEQ ID NO: 31580 - DNA, 272 bp, Glycine max
cacctttcttccctatcttctacatttaagccgattcatcaaccttttcaacttgagatgccccttttctccactcactttgtttcacattgctgctaaagcaaaattcttttttttttggttcacctcagcatacatacaatagcatatgatgaagaagaacaacctcagttgctgtgtgttgttgcacttcctttgctgttgtctccttttgccagctcttgttctctcccaccacatccatggaaaccctgcaagtaacatttttgaca

SEQ ID NO: 31581 - DNA, 565 bp, Glycine max
gttttcttttcctccaactgtttcctccaacactacacctatcttctctttacttctcttctctccaactcaaacatttatttcttccttctccgacaagttctatatcttccttcctttcattcatctctcgttaatcaatctttacccttccctctttggtttggtatcaaccgtttctttcgtgttttctctagtgctacggaacccaaccaagttagtttgaaggttattgtgattggttgagtatgacttctcagctgaggaatggaagtgggagttcgagctcaagtttgaacagcatatttctggaaacagaggatgaccaaacaattgcaagcatattagcagaggacgaaaacctcagggcagagaacaagcttggaaagagactttcacatttagattccattccgcacactccccgcgttaatggacaaattcctgatgtaaacgatgcaacagcagatcacgagaggctgtctgaaaggttagttacatatggtttggcagaactacagatggagggtgatgggaattgccagtttcgagctttagctgatca

SEQ ID NO: 31582 - DNA, 385 bp, Glycine max
gcaaagttatagatataacatactcaaagggccgtggcaagaaagggttggaggaagccttggataggatatgtgcggaagcaatgctgcaattagtgatggctacactacccttgtgttgtctgatagagccttctcaaggaaacgtgttgctgtgagctccctgctggctgttggtgctgtccatcaacatctagtgaaaacacttgagcgtactagagttgccttagtaatagaatctgctgagccacgtgaagtgcaccatttcttcacacttgttggcttttggctgatgctatatgtccatatttggctgtagaggcaatttggcgactacaggttgatggaaagatcccaccaaaaacaaatggtgaattccacacaa

SEQ ID NO: 31583 - DNA, 576 bp, Glycine max
cagagagggaaacatttgagaagcaacatggttgggttataaagacaatggaaagagagccttcactggttagagatgagtatgcaccggtgatatttgtgcaagacactctctcttacctcgaatctattgatatgatgtccggggaggaggaccgagaaaatattttgacggctagggccactgggaaagctgttctcactagtccttttaggctgttggggtctcatcatcttggtgtgggttttaacatttttcctgtttataaatctaagctccctccaaagccaacaatggaagagcgcattaaagcaactgcaggatatgttggaggatcctttgacgttgagtccctcgtggagaatttacttggtcaacttgctggtcaccaagcaattttggtgaacgtatatgatatcacaaactctactgaccccttaatcatgtatggcaaccaaaacgaagagggtgatatgtctcttgtccatgaaagtaagcttgattttggagattcatacaggaaacatacaatgatatgtaggtatcaccagaaggcaccaacaaattggattgcac

SEQ ID NO: 31584 - DNA, 413 bp, Glycine max
gctcctctctctctctcttgctctctctagttcttcattctctccaccaagccataatgaatagtaataaagtgctatagcaatacctattgaaattgaaagtcgcaacaagcaacgagacaacaaacctcaaagcttgtcatatatactttctctttgtttggtggtggtttttgtgttccgatgggaaacggcatagggaagctaacggtgtgcttcaccggaaacggtggagggggtcgtcggaagcaggatatatcctttttaataacggagccgttagacgagggcttgggtcactctttctgttacgttcgacccgacccgacccggatttcgtcgtcgaaggtgcactcggaggaaacgacgacgttcagaacaatctcgggcgcgtcggtgagtgcgaacacgtc

SEQ ID NO: 31585 - DNA, 516 bp, Glycine max
actcgagccgaatcggctcgaggcctaaagtacctgaattgtctaaacccgagttgcctaaagacacctgagttgcctaaggtacgtgaattgcctaagcccgagttttctaaagtccccgaattacctaaggttcatgtattgcctaagcccgaaatacctaaaatacttgagtttcccaaggttcctcaatttcctaaagcattttcaaccagcaatccttgagtttgaattatgccttatgttgtcctgttctcaggtcgtaactggctgcattccagtgccttgttcatcttgtttgatggatgtgatactatttatgcattttttcactagtgtataatatgttgtagctacttgagagtgattgtgtcggtgtgctagtattttgtgccatactataaattatgtttagtttgaagttgtttaaatcgattagttatatcattgtatactgatatacatctccttcatgtgttatattttgtgaatttaattagattgtaatttctgagt

SEQ ID NO: 31586 - DNA, 264 bp, Glycine max
taatcaaccacaccaagagaaacaaccaacaagggaaaaaatactacatatcatacatgtctccaattccaaagcagtttataggtgatctcagaagcaagccacttttttcacttgatcttgaaacttgagagaggaccaaacatatagaatttcttcaatggatcttattctgatggtggattgttgcacttatttggctaattagcttgaaaacttagcacagctaaatcatgaaacaacactttgatcttgaagtggtgg

SEQ ID NO: 31587 - DNA, 552 bp, Glycine max
cttagttattccaaagtttctttacagcaacgtatggaaggatccaagccagtttggagatatataccaggaggagtatttcatgaatatcttgaaggatgacatcaagattgagaaggaacttccacctcatatgaaatctctggatgtagaagcaattggcagccagattacagatgcagatcttgccaaggaggccacacctgcagactatattaaagttgtgcttcctcttcttttgagaaatggagttgttcacttcctgggatatggaaatcgactaggttttgatccaatgccttctgaaattcagaggttaagatgcaaatgtaatttccatgctttgaagttcgcgcctacaattcaacaaattggctcgctattgatccaaaggattagaaaatatggtgctcgacgcagcatgttagacactcaattgctggggaagttcatccgcaacaatgaatatcatgaagctaaaaggggctcagcaaaatatcttgctttgcacctgaggtttgaaatagatatggtggcctattccttatgtga

SEQ ID NO: 31588 - DNA, 522 bp, Glycine max
gtagctcaacttgaatccgaattaaatcaatcatctttaaggagttcacaattagaggaggagctgaagacaatcaacggcaagtgtgctgagcatgaagaccgagccagtatgaaccatcagcgtagccgagaactggaagatttaatccagagttctcactccaaattggaagatactgataaaaaggtgagtgagttggagttgttactagaagcagagaaatacagaattcaggaacttgaacaacaaataagcacattagatgagaagcgtaacgcttcagaagcgcaggccaataaataccttgatgatgtatctaatctgacatcagaacttgaggcaattcaagcacgagcctcaaccctcgaaactactctgcaagcggctaatgaaagaggaaaggagttggaagattctttgaatgcagtgacagaagacaagaaaaatttagaagatgcttctatcagtttgaatgagaagcttgctgagaacgacaacccattggaaattttgagggat

SEQ ID NO: 31589 - DNA, 289 bp, Glycine max
attcccgccttccctcacactgtgctgtagctctgatgatgtgggaaatggtgctgaaggcagcagtcttagaaaagccacacccagtaatgctaacaggtctgcaaatggttcagaacaaaatattaaaaggaatgaggaaaatgattatgatcctgtgcttagtgagcttaaagctatgacttctaatgggaatgatgcagacaggcttgcaatacggattccagaagctaagggttctgggccttctggcagtaatggtcaaatggatgctacatcagggggggtt

SEQ ID NO: 31590 - DNA, 407 bp, Glycine max
ttgtttattgttccgatatatttattatatatagttacggatccgaaatattagattcatataatgatggcaaatacaatctttactcaaacgattacttgcttagccgtagggaaatatccagcttcaaatgttgatcatcccaatattcatccccttcgattcaactccaaactcaaagaaaataatcgcttttcagttcctgaaaagaacctagccttgagatttcaaaatggttccacaagaaagatgaatatggctgtctacgctagcataataccaggagaccctattgatccttctcctggttctcctggttcttggtaattttggtcctctccaatctctcatcatatatgtgacattatttacttgtgtttttctttatatagtttaatttgacttgg

SEQ ID NO: 31591 - DNA, 331 bp, Glycine max
gagtgtgaattaaaaacactttcttgctacattatagagtttaccttttcttctccacaacctctccatttttaaaaccacaaataaataccaccattcttcccctgcctaacccataatctaacatcaacagcatctcttcaccaacatgacgcggtcaacgcttccaccctcatctccgatctccctcttcgtgtcgctcatgtgcgttgctttcgcgtgcgccacatcgttgaacaaaattgagcactgcgagttggattgtgcaagttccacggtggaggggctgaacgtggttggtgactgcgaacccaagtgttctcaggggttg

SEQ ID NO: 31592 - DNA, 782 bp, Glycine max
tctgcgaagcaactgatttcagatcttctcactgttgatcctagtagaagacctagtgctcaagatcttctgagtcattcatgggtggtaggtgacaaagccaaagatgatgcaatggaccctgagattgtctcaagattgcagagctttaacgctaggcgcaaactccgtgcagctgcaattgctagtgtttggagcaccgcaatctttctcagaactaaaaagctgaaatccttggtaggaacacatgatctcacagaagaggaaattgaaaatctcaggatgagttttaagaagatatgtgtgagtggggacaatgccactctatctgagtttgaggaggtgctgagagccatgaaattgtcatcactgatccctctagcaccacgtatatttgacttgtttgacaacaaccgtgatggaacagttgacatgagagagatactatgtggtttttccagcttcaaaaactccaaaggagatgatgctctccgtttgtgcttccagatgtatgacacagatcgatccgggtgcatcaccaaggaagaagtagcatccatgctgagagctttaccagaagactgtcttccagctgatatcactgaacctggcaaattggatgaaatatttgacctaatggatgccaacagtgatggaaaagttacatttgatgaattcaaagctgctatgcagagagatagctcactccaagacgtagttctctcttctcttcgtccacaatagttctcctaattttcattaattttatggtattattaatt

SEQ ID NO: 31593 - DNA, 475 bp, Glycine max
gcagaatttttggagtcaaacacggcgttaagtgtgcaacaagagaatcggttaaagccaaatgggggcaacagttaggaatggagggtcatacgttgagagactgaagctgaatgaagtaagggaaaatatgcccaataatgtaatgggaaagatgtcagtggagcaattgtctgatctgctctctttctaccgcaccatggaccagatttgctctcaagtattggaaagaaagttacatgacgttgtcaatgacttcacttcatgacttggacttatattttgtttttaatttggtgtcttttaccatgccactcacatgaatcttgtgtgctgtgcctccttgattccctctgtacatgtttaatatcaaccttttccctcttcatgaaagtgatgttaatctctcttgcttgggctaggattaatattatatattgagaaaaaaaaatatgcgttcacattgaagtgcaat

SEQ ID NO: 31594 - DNA, 216 bp, Glycine max
ctcgaggtttacaattattggagagtcatggcaacaagggtgcttttgttgatggccctcaccctctatatcttccccattgctacagcaacattccatgtcaagggttccgtttattgtgatacctgccgtgctggattcgaaaccaatgccaccttttatattcgaggtgcaagggtcggaattcagtgcaaagagaggaagaccatgaaggta

SEQ ID NO: 31595 - DNA, 561 bp, Glycine max
tcggctcgagacttttatagtatatggaatgagtataggtacttgattttatgaaataaatatcagtacgtgagaggtattaattcataaccttttacatataaaagtgttgcaacaactccttggtaaaaatccattccattaatgtcaattttcttagcctagtcagtaccctgccttacatctgcgcaaatcgaacttgtaaacctttgcttcactattttcaacccatctcttaagtttcactgccagcaatctctccggttctttaccttcacgaattcaaccactaatttcgatgactgaactcgtaaagaacaccgaacagtttcaaaccatgggcgaggacgccaacttgaagagatggagggaaacaacgaaatcactgttagatgctgtagacaatttatactgtcaaccctacagcatttgcgtggttccggaggaactccggaaacagaacgagagtgcttacgagccaaaggtggtgtcaattggaccccggttcaagggcaaaagggagctacaacaaatggaagagatcaagtggcgttgcatgtt

SEQ ID NO: 31596 - DNA, 263 bp, Glycine max
gacatgacaaaagcggtgttaaattttctttaaaattttaaagaaacatagcactgtccctgtctttatgtctttttttcttcctttgctttccttccccttgtttttttgcaggatttgttttctttttttgtttgaagttccttccatttagatctaagaccagcacagtttcctcaaccttagaactagttgcgccagaacggcatcactcaaagctcaactttgccatagttctacttttttaatgccccacttgtttg

SEQ ID NO: 31597 - DNA, 503 bp, Glycine max
actatacgaaatccaatcccaccactctctttttcttcttcctttttctgctctctctctctctctctctcagttctcaaattccacacgagacgaggacagaagaaaacattctagggaagcgtaacccaaaattccattcccagcatttttagagaccaaaacaaaacaaaagaaagcaacaagcttccttgttttccgctcttggtgtcatatcccctaaatgtaattttacacactcgctggttataggaaaaagttgagatagatggcaggtaatagcagctcggaggggttggtcgatgatttcttcgaacagatcttagcagtgcctgaagctgctgctttcagaggagctgctgggttaatgcctctgggcttgaatttggagcaagctggctttctaagacaccaacaccaaattaacgttgacgacgttgttcatgttaatgttgatgatgccaccattcaccaccatcacctcactctccacaataacacca

SEQ ID NO: 31598 - DNA, 287 bp, Glycine max
ttcggctcgagaggctcgaggcagagacaaagcctcacgctgtgttcactccatatccacttcaaggccatattaacccattgttcaaactcgcaaagctgcttcatctgaaaggctttcacataacctttgcccacactgagttcaactacagacgcttcctcaattcaaagggtcccgacgcccttgatgagcttccttgattttcgcttcgaaaccatcccagatggccttcctccctcggatggtgatgtcagtcaagacataccctctctttgtgactctct

SEQ ID NO: 31599 - DNA, 380 bp, Glycine max
caaggatacaaaaaataagtcacaagaagtaaatgaggagccagtggcaattgcttcttgcaaaagtgaaaagctaagcttgtttacaatgacaaacagacaaagcaacagttttattcagtgtgactcacttcacccagtgaaggccaaaggtgtttgattgtagagtttgtaaagtttgatttgctgatcccattagatggtgtgttgtaattttgtttgtatcatcctttgtatatttgctttttggttaacctattgacttcacaaagtttggaaataatgtacactcggctatctgtggtttcggagtgaagaactgagcagaaatatgaatgacaagttgacaataaagaaactaggaagctgcagcatgcttt

SEQ ID NO: 31600 - DNA, 312 bp, Glycine max
attcggctcgaggcgggattagaaacattatggcttcctatttctgggaaagaaagtgaataagaacatcatgaaattggtattgctgagagatccaacagatgaaaatgtgatccctgttgttgaggaactgcaaaggcggttgcctcaattgagtgccaccggtcttcaacagcaaggagatggtaaagagtatcttggtggcaaaatgatgctgaagccgctgaagaagatgagtcaccctttgaattccgggccctggaggttgctttagaagccatttgtagttttcttgctgcacgtacaacagaa

SEQ ID NO: 31601 - DNA, 508 bp, Glycine max
gtggtgagataagtttcataagccaaccgcaggtgtgcagcacattttcatttactgcagattttggaacaattaagaaaaatgcaataactgacatgaagaaacataatttggaagatctgccttccaattttagacggcttaaagccatagtggttgatggaaaacctgttagagcagcagtgactagataccatctgaagagactagggatacaggctaaagttgcaaatagcatcaataaggctgtttctttatgtgggaaaaatggttctttgacctcgggattatttcagcccgatattatttttgttgagaaagattcatgggtttgtggagaggacgagatcttcaatgtgtggcaactggactggaaacaaaatgggcatatgtttaagatacctcaaatgatccttcttgcgaccaacatcggtaatgctgaatttgataaagctaaagctgcaggtttcagtgatactggtgatcatgaagcctctaagagctagca

SEQ ID NO: 31602 - DNA, 249 bp, Glycine max
gaaagaagcaagcttgttcaactgtgctggttccgaccagagtggcacaggccctaaatctgaatcttgatgacatgatggctggccagccgcaacacttacaacgatttaatgctagttccaacatggaaaatggtgcagctgtttccaggcagaggagtaattatgtcctttctcaacaacagaagcgcaacctcaaatctcagccagcagtgtaccatgagattaggctgccacaggagtggacat

SEQ ID NO: 31603 - DNA, 523 bp, Glycine max
ccctcgcgtccgcccacgcgtccgcccacgcgtccgcccacgcgtccgcataaagtatctattaatcccccaaaagggtgaaaacaaatcaaaagaaaaaaaaatatatgtttatcactgtctctcactctttcaagctccaacctcccttttctttttcttcctttaacaccgttttttctcttcaatcattctgctaaaaggaggcgacttgagcacagaacataagcatagaataaagtgtgcaagggcaactgcttttccaagctgagaaacaaacaacacaacaagggtgttgttcagtattattattcattgtctgttgtcatgagcttccacaagctcataatgtcgaatgtgccactactcttggtggtggtggtgtctgcatgctcactgattggtcatgcttcagcttcttgtcctatgaccataaggctatcaccatcaatggattcagaaggatactcctttctggctccattcactatcccagaagcacccctgagatgtggccagatct

SEQ ID NO: 31604 - DNA, 271 bp, Glycine max
attactttcattattggtggagatcaattatcagtgcatgtctgcctgtcttcgtgtggaagattatattatgcgatgattacgaaattaaggtagaacagcgtactaagctgcaacgataataagagtgctataagacaggacgaggtgcagactttcggttgtccgtcattcttcttcctcttggcgtggcatatcgctgtcagatgcaaacgccaagagcattatgacactgcaaaacttattttgcaagattatggtctatggattt

SEQ ID NO: 31605 - DNA, 397 bp, Glycine max
ggagcactttatgttgatcgaatagatttcagtgatcatcacatattccatgccagggatattgagatgatcagagccaaacttggagaactagatgggaagtttgttcccaaaccaattgttgtaatgactgaaaaggattatgatagggacccagaaattcttaagcaattgcacccatttaaagtttttgttctctgttctgcattgaaggttctgccctatagaggaagcacagaggatagctttaagaaatttctgaaggaccatttaaaattagaattgcctccagcacgttagtcttatgtaactagtcctgattatttttatatttgttgatggtattgttttcctgattacataaggggccttacaaagttgatacatattgtttttt

SEQ ID NO: 31606 - DNA, 805 bp, Glycine max
ttcacgcgtccgctccttcatgtcctccgccatcaccggcgacgccagtgtctcttacggcaaactaggatcctccctcttcctcactcctccgccagtctcagccggaaaacctcctctctcctccgctccgatcaagaagaggtgtcacgaccaccgcgaacactccgacgagatctccgggaaactctccggctccagcaagtgccactgcactaagagaaggaagaatcgagtgaagaaaacggtaagagttccggtgatcagttcgaagatcgccgatattccgccggacgagtactcgtggaggaagtacgggcagaagccgatcaagggatcgccggacccgagggggtattacaagtgcagtagcgttagagggtgtccggcgaggaaacacgtggagcgtgctccggacgatccgacgatgttgattgtgacatatgaaggggagcaccggcactcgatgcaggagaacatttccgggggagtgggtttgggattcgagtcaacgtgagggtggttgcaatgtaaatctgacattattaaaagaaaagattatattacaggggaatcttaatcttctcccaccaaagtcttcttattcaactttttgaaagtagtttggagccaagtgtgaattagaagggtagtttgtttagtgggaatggtaaaaggtcccaatccaagttgatgcctcggaatgggaaaaatggaatgacgtttaaactccattctcttcccttctttgcgatccacttaattgcgcacacaagcgtttcatttcgtcaagttaatatcttgc

SEQ ID NO: 31607 - DNA, 455 bp, Glycine max
gctatttcgatcactagctagaatggcaaacaacggtgatgttgttaagatcaatattgaggagatgctggagatgctggagggggcaaaggcacccctaattactgagtgttgcatttacaaagtgccgtttagtatccgaagacacaacgaaaaagcctacaccccagaggttgtttctattggcccttttcaccacggccatcctcgcctccaagacatggagaaacacaaactcttttactccaaggcttttctcaaacgaactcaaacaactttggacactttgatcggcaacattcaagagatggagcccgagtttcgtcgctcttattcacacactcttgagttcagcatggagcaactggtcaaaataatctttatggattgtgcttttatactagagctcttttgcagataccactatcgagaatggaaagaggacgacatgtgtc

SEQ ID NO: 31608 - DNA, 307 bp, Glycine max
gaagcagtggcccctgtggtgaaggtgcgtcaacatcctcctagtgctagtcgtgtgctacttccagatggtagatacatggcttatcatgagcaaggtgttttggccgacacagctagattttcacttgttgctccgcactcttttctttcatccagactagcaggtttacctggagtcaaagcatcattgcttgaagagtacggcattcgtttggtcacatatgatcttcctggttttggggagagtgatcctcatcccaacagaaatctcaactcatcagctatggatgtgctgcatctagtca

SEQ ID NO: 31609 - DNA, 499 bp, Glycine max
gagcgtcaagtatcctcttccttcttctgcatcaactcgtcttattagagtttttactaatcaattatggcttacgagataaccgagataaagaagattggtataggcctaattggtttcggcttatttttcacatttcttggcataattcttttctttgaccgtggtttgcttgctctgggaaatattttttccttggcaggggttggcattttgcttggttggcgttccacgtgggcacttttcactaatagagccaactttaagggttctgcatcatttcttctaggtctctttttcatctttgtgaggtggccaattgttggtataatacttgaaatatacggttgtgtttttctcttcagtggattttggtcatctatcaaagtgttcctctaccatatccctgttgttggatggattatacagtttatctctcctccttgattgtcacagaagggatttaacggatagcctcttagtatatggctaatcatgg

SEQ ID NO: 31610 - DNA, 320 bp, Glycine max
cagcaagcaacatcaatgttcctcccacaacactactccacacatggaccctcaccgccgccaccgccaccgccgccgcacgtggtgctgctcctttgccgtccctccctccagccccgacaaccttactaactcctccaaacctctccctcgcaactccgagcctcactccaaacctgcattctccctcccaaactcccccaaatcccgcatcccagtcaagatcgaccctcgccggatcctttccccgggaagagtctaccccatcgactccgatcccgtcgccggagaacctctttcctttccccctccctcgccgg

SEQ ID NO: 31611 - DNA, 268 bp, Glycine max
cgaccgcgtactttactttctggacgcagtttctgcggttcaaacgagcgttttgagtaagcgattcatttacctgtggacttccctcccagtcctcaagttccacgaccctctccttttccactctttcgtcgaccacttcctctccctcagagacgcttccaccaacgtccacgccctcaacttcacgtgccacgatgaactcgatgatgatgggcatgttgtagattccatcattgactatgttaccctcacacccaccatctcc

SEQ ID NO: 31612 - DNA, 287 bp, Glycine max
ttatttttgttgtgttttccccatttagttgacttttgcttctgctatgtttccatgaatgctagctttggcaagaaccaagaagtatcttccttctaatcctcttctattgtatcattattactgggatagtaggttgtttctcccctccctgggtggagatcgtaaatgtaggttgttgttgtaataaatatgcatggtgtgttgtaccaaaaacaaagtaagatgcttctgtacgttccgttgctttaaattcattgaaataaattaaagtggggtttagttcc

SEQ ID NO: 31613 - DNA, 545 bp, Glycine max
ggtacccccaccacctgccaccaccaccacaacaacaacaacacttctgatgttgtaggatcatacttctccttccagcacttgaactatggaacaacaacaaacatgtccctctctgcaaaccccaacgcctctctttgttttgttccagcctccacttcttcagaccttaataacaattccaccataacctcctccatgctcccttcaattttcccaacacaacacgtgaagctccaatctaataacaacaacccttcttccatttcatctgatggggttcaaaactgggaaacaagtaacttaaataacagcaacagcacaaacaaaaacaatgggagtatgcagttacaaagctgcacaaacttcattgacaacacgtggggggtgggagagtctatgaagggttgttaacatcaacaaagatgctgatcaaatgcctctacaagcagaacaagaagatctgaaatgggctgagtatcttaataccccgtttattctgggaaacaacacagcgcagaatcatcaaattcatacctctcaat

SEQ ID NO: 31614 - DNA, 456 bp, Glycine max
ggacaaagaagattgaggaatgaagagaaaggtgtccctttcctgtcccctacagcatcggcgttgtaagagatcccattccaaatttccaatctcaattctcatttctcagtttcacaaactcaaataaaaaaaccaaaagggcagttactaattttcacaactggattcaagctggtttctcttcctcttcttcatgttcatttattgaatcccaccccaaatttctaattctttctctttcactctcccacgtgcaccttcctcttccccgctctaaataattctccgttcccatcattctctctctctctctcccaatacattattattatatgtgtgtggaaaaaagaaccgttttttttttcagtgaaagcgaccacctttatattatccttttgatcagagtgtaaaatggtgatgtgattttacaagggtcttgcatgcccctttgag

SEQ ID NO: 31615 - DNA, 465 bp, Glycine max
ggagcatgaagaagaagaagaagatgatggtgatgatgatgatgaagaagaagaagacagagaagggttgattgagatagctctcgatggatgcaagaggaagaggaacttggaatttaactttgatgaagagaatttgattgagatcgatatttctccgtcgaggtacagagaactttccggcgacgacgaggtgttttccggtgagatcagctacaactaatgtgacattaattcgagattgacgtagtggattattgtgttttttgaggtcggtgaaaagggaaaccagatgataggaatctgtgtttttattatttcttattgtaaaaaaatttagtgggattttggtgcttgcctgttttggacgtggttaccgttttattaaatttatgatgcatgtacaataatttactaaacccaaactctcaaaggtttctgcttcattgataatgtactattctt

SEQ ID NO: 31616 - DNA, 307 bp, Glycine max
atcatggacagagtgcaattcagagaaaccaaatcccagacaccatacaacacaacacagcactttggtcgtgtttcgtttcatctttttctccgagaaagatccaccccacgtttcaaaatcactttttttctctgctttgggaaatgatgccattgttgtcccttgcgaagcaaaccccatcaccaccatcatcatgtaggagcgactcaacaactcgagtctcgcgttcctcttcctccccctctgggcacgtgagaattctccgattctgaaaccgaggcacgtgacgttagcgtgcgtgtgt

SEQ ID NO: 31617 - DNA, 285 bp, Glycine max
gttcgggtcctctcaatccgatcaacgacaccgtcgaattccgatcccctcgcgacgccgatggccacggcacccataccgcctccaccgccgccggccgctacgccttccaagccagcatgtccggttacgctgctggaatcgcgaaaggcgttgctccgaaagccagattggctgcttacaaagtttgctggaaaaattccggttgcttcgactctgacatcctcgccgcctttgacgccgccgtgaacgacggggtggatgtgatgtcgatctccatcggtg

SEQ ID NO: 31618 - DNA, 277 bp, Glycine max
gatcaacacaaaggtgggaatgtattgattctactctctgaagaatctggagatcagcttgtagcatccaactatgtcagcaaacagttctttgcatgtggaattatcgaggaagacttcgtttttgggattgagattatgggttttgattgggataggtgttggtgtttttatagttgtgattctttgtgtattatctgtatgggtgatgtttcggagaaagtctaaaagatctctggacaagtactctttgtcacaaatacacatgtctcagagg

SEQ ID NO: 31619 - DNA, 269 bp, Glycine max
gcaactgaagccagaaccaaagaggatgctgtctagttgggtgaagagtgcctttcgtagtgggaagaaggatatgcaagaatctgttaatcagaatcttgattttgtccttggctcagctccaatatgggatagggtggagcttaaaggcaacaagtatgtattgggggagttcctggaatttaagggcaaacaagaagatgttgaggctttaagacctattagaagatcaaaagttggtcgtatgataatccaaaagacaagcatgt

SEQ ID NO: 31620 - DNA, 277 bp, Glycine max
ctcgaggacgagttccgctcgctcatggagcgcggcggcgaggccttcgacctcactcggagccaccggaaaggcgactcagcggggaatttgccgttcgagtcagacgaagacgtcgacgaagaagaagaagaagcgcggaacgttggaataggaggaggagacgaggaggagcagattccggtggcgctgccggtcccggacttcgacatcgtcatcgacgcactgccgtcggggacgatcaacgacctgcacgagatcacgaagcgaatggtgg

SEQ ID NO: 31621 - DNA, 267 bp, Glycine max
gggcaataaaacagcaaaagtttcaattttgtttctgttgaattttctcgggttggtttgcagtagcaatggcggagacatagtggtttactggggccaagacgagagcgagggcacattgagcgaaacatgcaactctggactatacaaaatagtgaacataggctttctggcaaaatttggcggtgggcgggaaccagaaataaacctagcaggacactgcgaccctgcatcaaacggttgcaaaagtttgagcaaagacataaa

SEQ ID NO: 31622 - DNA, 266 bp, Glycine max
ttcaaaaattgcctatgatggttggcaaaatatcgggcacaccattccaccatggcagccattgcaatgtcattttacaacattggtcaaaatccgtaaaaaaataaagttctggaggtgtttggggttgggaaaggagaggaatgatacgatgttcttataattgcagctttgttagtttcctgttctctttaagcctcaataattgatagttttatttttagtaagctcttaggaagaacttttaaaagggaagtagaagttca

SEQ ID NO: 31623 - DNA, 272 bp, Glycine max
gttttctttgttctttttcaacccttacataattaatctgtgcaaaattagcatcagattgacccttggctaacttcgttttgatgtattttttcaaaacaaattaacctcagtttgttttgacaggctgcagaattactaaatcatccgcatcttcagccttacattcataaaattcacctaaaattaaatagccccataagaagtacttttccattccaatggccagagtcaaattacataaggagaactcagtttgtagagcagagtct

SEQ ID NO: 31624 - DNA, 429 bp, Glycine max
tcgcctatgcgtccgagaagttagaatgaatttgggctgtgtcccacatagttaacaatcaacgttatgctacttaaccctttaatttagagtgtcttatctctctcatcgtgttaaacttcaactaaaaagctttaaacaccgggacagcttttttccatgacagaacgagatcgtcttgatctacgaggactgcttcctccaaatgttatgtctcctgacctacagattgaacgattcatggttgatctgaagaggcttgaagttcaagctagagatggaccttctgatcctaatgcattggccaagtggcggatacttaaccgcttgcatgacagaaatgagactatgtactataaggttttgattgccaaaatagaggaatatgcaccaatagtgtatactccaacagtgggtcttgtatgtcag

SEQ ID NO: 31625 - DNA, 279 bp, Glycine max
cgaccacaccaccgttatggacgaggacgagcaactcgaacgattcgactcggagttcgcctccacgagttccatttcctccaccctcagcaccgacgatttccgcaacctcaccagctccggcgacatttcctccatcagcagcggctccggcgagattcctcccgtcgcggtcctcgcgcctccgtttctctaccgcgaggggtccaatgacgtcgagacggcgccggcgcccagggagaagtgcgtgggaaggagtaacaagggagtgagctgggg

SEQ ID NO: 31626 - DNA, 257 bp, Glycine max
ctcaggtggctaaactacctccgccctaacatcagacacggtggtttctccgaagaagaagacaacatcatttgcagcctctacgttagcattggaagcaggtggtcggtcattgcagcacaattgccgggaagaactgataatgacataaagaactattggaacacgaggctgaagaagaagcttctagggaaacaccgtaaggaactacaggcacgcaacaaaggaaacggtggtatccttaaacaggaggacag

SEQ ID NO: 31627 - DNA, 651 bp, Glycine max
accgtgttcctatacatgtttgtaatagggatgtggaaatggaggttccgcccgagataccctcctcacatggatgctagtctctcttgtgcacatgtaaccagccctgaggactttgatgaggaaatggacacttttccaaccacaaagagcttggatatcgttcgttggaggtatgataggttgagaagtctggcagggaaggttcagagtgttgttggacagatagcaactcagggagaaagattacatgctcttataaattggagggatccgagagccacttcgatattcatggtgttttgccttgtgactgctatagttttgtatgttacaccaccaaagatgttgtttattctatctggattttacctaatgaggcaccctatgcttcggggcaagaccccaggagcaccagtcaatttcttccgtaggttgccttctctcacagatagcatgctgtaaaatgtatatattgaaccttgcttgttttggaagctttttgtgctgccaatacttgaatctggtttaagcctctttggcagtgcttgtacaagtcttttgttcctttagtcatgattgttgatacacaagtgtacacatgcttttgaaaattcacaagtgtattttatttacattggtttttggttc

SEQ ID NO: 31628 - DNA, 443 bp, Glycine max
ctgctcgagctgctcgagcggctcgagcggctcgagctatcctccaactaacacacagcgcaactttcgtcttctatccccaaccctaaccagttagcgaacgatcgcttagagtttcgacgcaggatgcgttcgaaagagcgaagccagcagccgcattcgagggttcctcgtcgtcaggagtggattcgtagagatgttggtggttgctccaatccaagacagcccaagaagggatcatcttcgaattcgagggaggagtctaatttgcctcagctgctgcaagagattcaggacaagctcgtcaaaggagctgtcgaatgcatgatttgttatgacatggtgcgcaggtctgcgcctatctggtcttgctccggttgcttctctatctttcacctcacttgtatcaagaagtgggctcgtgcacccatttctgtggattt

SEQ ID NO: 31629 - DNA, 470 bp, Glycine max
cttattttttctggtgctctaactgatggaaaacatgagctaagttcttttcggttaagcagtcaccaagtgagttttttgctttcttcaatctgggttcaagcaacatctgtggagagtggccctgcaaattttgaggcaatggctcacacttatagcattgctttattgttcactcgttcaaagacatccagttacatggctttagtaagacgtttccaactggcattttccctcatgagcctctctctggaccaagaaggaggtttacaaccatctcgcaggaggtctctttttactttggcatcgtacatgcttatattctcagccagggcaggcaatttccctgagctaattcagaaagttaaaacttccctgactgagacaactgtagatccttttcttgagttgattgatgatgtcaggctgcaggctgtttctagagaatcagagaacataatttatggatc

SEQ ID NO: 31630 - DNA, 373 bp, Glycine max
gtgaaagaaagaaaaaaaaacactgcacaaaacaatggctttgaatttgattcatcgaccagccactaaaccaccatcttcctcctcctctttcgtcacccctcgccctttgcggaccacacagagcatccctgtgaggaactcgcggcgctccatcgccgtgcgcgccgccgccacggaggctcctgtggctactattacggcggcaagggagtgcagggtgaagtcggtgaaggcccggcagatcgtggacagccgcgggaacccgacggtggaggtggatctggtgacggacgggcttttccgagcggcggtgccgagcggcgcgtcgacggggatttacgaggcgttggagctgagggacggggacaag

SEQ ID NO: 31631 - DNA, 301 bp, Glycine max
ggatctgggacttgcacttgttcctgttttgtgggtttttgctgctttaaacttcccttcgggaacatcattgccacttccatggctgcctcacacatcctttataatcctcctcccctttccaaaacttttattaatcaccctttgaaccaaaacccttctcctcaaaacctaattctaccactcaaagctactattaaaccgcgggttcttagagcagttcacccccagaagatcactgctaactcctcgcttcataactccgatactaggactcgttttcagcactgtttcacaaaga

SEQ ID NO: 31632 - DNA, 558 bp, Glycine max
  unsure (1)..(558): unsure at all n locations
ggtttgataagcttcttcaggttacaggtccaggcatagtcaatgtgctgacacatcatgtgtataatttgggcccaggtagtgatgagcatcttgacaggaagattctagatcctgagtgcttgagcaaggttgaatcaatttttagcaatctttcagaaaccattcaaaaatatggcccttggtcttctgcatgggtaggtgaagctggcggggcattcaacagtggtggtcgttctgtttctaacacatttgtaaatagcttttggtacttggatcaacttggaatagcatccagatacaacactaaggtttattgcaggcagactttaattggaggaaactatggtcttctcaataccactactttcattccaaatcctgactattacaggcaagtgccaattgaaaaatgtaaaatgaagagaaaaagaagaaaatatatatttgtttttctaaagtgttataaacatattgcttaacatattgtataatctaggtcctggtgttgtttttgagcagtgcactgttgtggcatcagctaatgnggaagactgt

SEQ ID NO: 31633 - DNA, 520 bp, Glycine max
agcacgcatatgtcgaagttccagctgcatgcatcatattgataggcttgtttgcccttcaacattatggcacacacagagttggcttcttgtttgctcctgtaattatcacatggcttttctgccttagtaccattgggatatacaatatattttactggaatcctcatgtatacaaagcactctctccatattatgctttccaacttttaaggaaaactcagaaaggaggttggatggcccttggtggaattttgctgtgcattacaggatcagaagccatgtttgctgatcttgggcactttacacaattatcaatcaagattgcttttacttctgtggcttatccatctttaattcttgcatatatggggcaagctgcttatctatctaaacatcataacattgcgcaagattatcactttgggttttatgaatctgtaccagagaaattgagatggcctgttctcgttatagccatacttgctgcagttgtgggaagtcaagccattatcactgg

SEQ ID NO: 31634 - DNA, 352 bp, Glycine max
ggggtactcttgagagtgttggtgatcaatcagagtatgttaatgccataaatttgatcctgaccattagcattcctgcacttggaagtcttctttcacctgtctactttcagttctttctggataagcttgcatcatctcttggtccacgcttttattctaacattttcaaatgcaagcaaatatcagaaactggagctcaacagatgctattagatacccaagctgtaaagacgattcttcttgaagttccttcccttggtagacagacatcaggtgcccctagttattccaagtttgtaagccgcgagatgagcaaagccgaggcccttttaaaggttatactttctcc

SEQ ID NO: 31635 - DNA, 572 bp, Glycine max
  unsure (1)..(572): unsure at all n locations
ccgctctagnnaactagttgtgtatcccccccgggcctnngcaggcgagccactctccacnncttacntnnactacaanngtcacctccaccaccatccccatcaccaccacccccatattattacaagtcacctccaccatctccatcaccaccacccccctactactacaagtcacctcctccaccatccccatcaccaccacctccatactactacaagtcacccccaccaccatctccatcacccccacctccttactattacaagtcacccccaccaccatctccatcaccaccaccaccctattactacaaatcacctccacccccatcaccttctccaccacctccttactactacaagagtcctcctccaccatctcccgtttctcatcctccctactactacaaatctcctccacccccaacgtcgtctcccccacctccttatcactacgtgagccctccaccaccaaccaagtctccaccaccaccagtttacatttatgcttcccctccaccacccatctacaagtaagcttggaattaagaagcagcaacaataataag

SEQ ID NO: 31636 - DNA, 537 bp, Glycine max
gttcaccaagacacactcacgtacatgtttgattttgagctgtacgacttcgttgctgatccaaattttgatcagttcatcaatttgttccgaggggagaatgaagatgccaactgtgatcacttcggttctgaccttatcaatgattgctttgctaacaatcagcagcagcccctttcatctcctgcaaacccttttgatcagaacaacaacaataatgctgtggatgtctatgatccaagctccacatttagctccttctcttactatgatagggagctcaagggggaaggaggagaagaacttgatgaagaacattcttctgggacgatgacaacgacaactaacaatgctgttggcaaaccaaaagtaaaaactgatatgtccaagactctcatttctgagaggagaaggagaggccgaatgaaggagaagctttatgcattgcgttctttggttcccaacataactaagatggataaggcttctataattggagacgcagcatcatatgtgcatgaccttcaagctcgagct

SEQ ID NO: 31637 - DNA, 504 bp, Glycine max
attccactcggttcggttgatgtttggactatttttcttctctctctgtctctctgaggactctttgtgtttcgactctattttctccaaacacaacaacaacaccagaggcagaggcagagagaaacagagagagaaaggagtaacaaatagttgattatttcaaagacaatgaacaataaagatggaaaacccgtcatccaaccagacaagagcaggattgtccctatggcaatcatatttgtggtgctatgtggatcttctttctatatgggtataatcttttgttctgagaaggacagatttgtggcaatgtacaaccagaactccattgaatcccccaaggagtcatcaataagttctctgcaaattaaatacacgagttttcctgaatgcagcgctgactaccaagattacactccatgcacagatccaaggagatggaggaagtacggctcctatcgacttgtgttattggaacgccattgccctccaaaatttgag

SEQ ID NO: 31638 - DNA, 485 bp, Glycine max
actgactcggttgttgcatggactatttttcttcttactagttcctttcttcttcttcttctctctctctctctgagcactgtttgtgtttcagccaccccccatttttcattcttccaaacacaacaacagaggcagagagaatcagagaaaggagtattaaatagttgattatttcacagataatgaacaataaagatggaaaaccagtcacccagccagacaaaagcaggattgtctctatggcaatcatatttgtggtgctgtgtggattttctttctatatgggtataatcttttgttccgagaaggacagatttgtgacaatgtacaaccagaactccattgaatcccccaaggagtcatcaataagttctctgcaaattaaatacaccagttttcctgaatgcagcgctgactatcaagattacactccatgcacagatccaaggagatggaggaagtatggctcgtatcggcttaag

SEQ ID NO: 31639 - DNA, 357 bp, Glycine max
caagccataaaaacatgcattttttgttgttgtttgttgcaagttagttaaaactgtgtcacattgatggttaatgcaccacttgcatcgtaatcatcgaagccacacttgtaaaaatctaaactaaaagtctaaaaccaaaccactgtgttccaattcttctttgtattctccattcaccctcattgcgtttttttaccctttttcggtgtcttctcagattcctcacacgcacactctcttcgatctcaacgcctctttggcttatattctcaccgacccacattgccattctcaccattctttgcagatcaagcacccctttgggaagagaagaaggaaagtctagtttttttg

SEQ ID NO: 31640 - DNA, 465 bp, Glycine max
cgcaaaaggtgataactgatgatcgttgcccttcaacttctattgccttgaagagcaagcgcaaaaggtgataactgatgatcgttgcatgaaattcaactctttgtcctttggtcaatcatggaaagacaatgagaaagaaccacattttgtttctgatgggccagggttaaagcagatcaaggagctaatattggtttacttatgcttaaaggccagcaaatagttcatatagtacttgtgatgctacataattaggaagttcaattaagaatcatataccaacagagaattatgatttttgttcatgttttattgctttgtgaaatatagtatatggtagcgaagggggttatgggtgtacagtaataagctgtgcattttttttcccttacaatcatactcttgtttttgttcttggtctttcaattggtatttggtaatgtagagagtaatgtgttgtag

SEQ ID NO: 31641 - DNA, 319 bp, Glycine max
ggcggatggcgttgtttgtctcattctatgaaccgtatccgattcgatcctagtgggaactgactcactcctttctctccctccctctaaatatatatttctgacaacccaaagtcaaacaaagaaaagcaactgaactagaaatagattgattgtttcatgataaaaaggcctcatgccttgtctcccttttgatcaagcgtgacaaacttgtttttcttttttattattgtaaatcaaaaagttccctttctttttgttatataataatttggaaaaaaaaaaactaaaaggcatttttatttgcatcttcctttct

SEQ ID NO: 31642 - DNA, 472 bp, Glycine max
atcaaacacttctatcaacaacacaaaacaatctcttccccgcaattgtaacctcttattgacgcagactgcacccccattccctgatgttcaagttttctcatcatctgaatacacccttttcaatcttcatctctcttcacacacacatacatcaaacacttctatcaacaacaacaaaagagtgtgagatgttgtaaattctctaatatgtgtctttgatttttacatataaaaaaacaacacacacttctaccaaattttgctctaaaaaaatacagtaaaatatcttgcttatcaaatgtgccatgtcatcccaattccctaggggttcatctgtctttgattgatgagaatatatatattatagtccctcaaagaagttgaataacaagaacaaaaaatgggaatttatatctcacatatgctagattccaaggaaactcgccctctttagtctatttcttcttca

SEQ ID NO: 31643 - DNA, 500 bp, Glycine max
cacctagcgtttaaccctagagttttggtttggcctttcttctcttctcttcttttttccccctaaaagcatttcacaaagagaagacacagtggatcgtggtttcacttcatttcagaccaaacatggtgcagtggcagaggcacgttttcccctttcttcgccacattcacaagcgagcagtggaaccccacgccacccattctgctccaagccttgtaatttctcgcttagcctcttctctttcacaaggtcagttggggaggagaacatggacaacaacaactttgccctgtttctctagacccgtttttctcgctttccaacatcagggaatttcaagttctgctcacttgctggcaaattcatctgaggaaacacctgttttgtcacctttagccccagtttcattattgggtagttcaaaaggtgaagaccagaagcagaaagttgttactaagccagaaaaagttcaagcgatattaaaggcaataaaacag

SEQ ID NO: 31644 - DNA, 375 bp, Glycine max
ctcgagcgaatcggctcgagcaaccctcccttctccctattacaaccgatcgccaccactttttctctctaacttccacatggacgacgtcgctttttactctctgcttttcctgtgcttctttcaatcggtgcgagggattttggaccccaacgatttcctcgctctgcaatcaattcggaaatcccttcacgatgttcccggttccaattttttctcctcctgggacttcaccgccgacccctgcaacttcgccggcgttttctgcgccgacgacaaagtcatcgcgctcaacctcggcgatcctagagccggttctcccggtctcaccggaaaacttgacccttccatttccaaactctccgctctcgcaga

SEQ ID NO: 31645 - DNA, 630 bp, Glycine max
  unsure (1)..(630): unsure at all n locations
cttttgagagtttttcagagagaaagagacagacagagagagcgagcaactttgttagatttcaatcatttcgagaatatcgaattttcaatttcgtgtcttcctgtcacgtgtgcacctctgaggtttctaacaaacaagagaagatatcacattcttaaagattcacaatttcagataaatattatatgtatctgagacttttttaataagaagaatgccaggcattcctgtttccactcgtgctacctcaagccatccagatgcttgtgaacatttatctgcggaagaggagcttgcagctgaagagagtctttcaatttattgcaagcctgtagaactttacaacattctccagcgacgtgccatgagaaacccatcattccttcagagatgtttgcactaccggataaaggcaaagcacaagaagagaatccatatggcagtttccttgacgaggactataactgaaagccaaaacgtgtttcccatgtctatctgtcttgcaaggcggatttctgatcatggagcttcaaggcaaaccgccatgtatcgaattggtcggattttcatcttccgaaactcccctggaattgatttgaatactcangtccaggcaaattttacact

SEQ ID NO: 31646 - DNA, 276 bp, Glycine max
gctaatttctctcgttgtcatattctagtttcaacttatggagtttacctctaataatatgcttccttttgtttcaatgttttggcttgtgttcctaagtcctttagtgaactgtcaactttattataatttctatgactcaccttgtccaaacctgaccggaattgttcgatccaacgtgtggtcagctatggccaaggatgcaagaattgctgcttctctcttgcgccttcatttccatgattgttttgtcattggatgtgatgcatctgtgct

SEQ ID NO: 31647 - DNA, 318 bp, Glycine max
gttaatgcaagtgattcgagaggtcaaacaccactacatcgctgtattctcaaaggaagatctacatttgctagattattgctttctaggggagccgatcctcgggctgtggatgagcagggaagaacccctattgagcttgctgcagagtcaaatgctggtggtgacagggaagtccatgctccattgactgattctagtggatgagagtgataggcaaaaatctcggagtataatacatatataaaatatggaagattggattatgtaaatttgtatttcataaattgaaaagctggtttttttgaaatgtcacta

SEQ ID NO: 31648 - DNA, 528 bp, Glycine max
gacataaatagatatgctgagagaatgaaagaggatgataagaagacttactctctctggacaagggaaaactctccaccatcagtcccaaatcttgctctttctttagattcgactaggttagaatcagatactgatgcttcagacagtgagaaaatagactcttcccctgacctcgtgatggatacaggtatcattaaccctgatcagaaaagcttggttaatgaaggggaaaaaaatgccagtgcagatattcattagaatgagaaattacataccttgggcctttgaaataacatacaggcactgaggatacaatatgctatgagaattcttattttgaagttagaatcaagaaaccttttgttagtttgatgtttggatttaacatgatcacagatgtttttgctttgtgaattctatcttttaaccggcatgaaatgcttgcttgtgcagtcagcagtgttttgctgctgttgtggtagaaattttttttcctccctcgtggatggaagaatggttttagtt

SEQ ID NO: 31649 - DNA, 305 bp, Glycine max
ctttcgcgctccgccgcccaccgccgcctcccctccctccgcgcctcctcctccccggaaatcctggtctccgacaacaacggtgccccctccccgcccccctccgatccgagctccatcgaggtggacgccgtcacggaggccgagctcaaggagaacggcttccgcagcacgcgcaggaccaagctcgtctgcactgtgggccccgccacatgcggtttcgaccagctggaggccctcgccgtcggaggcatgaacgtcgccagaatcaacatgtgccacggcaccagggagtggcacaaggg

SEQ ID NO: 31650 - DNA, 613 bp, Glycine max
aaaccattacattctacaaaaaaccaccttaagacttcacaaccacaacaattccgggaacaaagaacatggtagtatcaaaatgtctaagtctaacactccatgttcctactcaccccagtactccttttctcaccccaccctccaaaaaaactccaaccttgtcttactcttccacccatttttccttccaaacaaaactgaacaaagcctttcccacctcatacaaccattccttaaccaaacactttccaatgaaatgttccaattcttccagctacacatcaccaccagattttgagcttgagtctgatgatccaacactcaccaatgaagacctcaagccaacaacaccaagtcaaaggacattttcaggcttcgaaatagcaagtttatgggttggattagttgttggcgtcccttcttattaccttgctggaagcctcgttgaccttggcatggcatggtggcagggcatagcaactgtggtggcagcaaacatgatcctcttggttcctttggttctcactggccatgcaggaacacgttatggcatatcattcccagtacttgttagatcctcttttgggatcaatggtgctcatgttcctac

SEQ ID NO: 31651 - DNA, 452 bp, Glycine max
agacgacagaagggggatgctcagattcagcttctatctttgagacgaggaggtcgttgattgatatgataagaccaaaagctcatcttcgacaaagcaccgtcaagatcagcctgattttagtggtcctacccccaaatcacagcgaaccaaaatgggcaaatccgaagacaacgattagaagaacttaggtaagaaactcaaagatgtggaaataagcattccaatagtatatgggaacgtagcattttggcttggcaaaaaggctagcgagtgtcagtcgcaccagtggacagtcgaggttcgtggcgcgagcagacgagatgctgaatcgcaatcctcagcaggagaatcaccaccatgaacatgaacatgatcatgctcttaagccccctgttccttctcgtatgtccagactgccgcactctgcgtctacaggagacaagctacgg

SEQ ID NO: 31652 - DNA, 410 bp, Glycine max
gttcagacacatttaaacaaaacaattcataaaatgctcgccggactggccactgcacactacactgcccagtggccacccgccactgcattcatcccacactccaaacattaattctcaggaaaaaaaacaaaacaagcggcgtgatggcggcgaaacggcttattgtcgtcgtggagagcaccgccgccatggggccctattgggagaccattctgagggattatctcgacaagattatcagatgttttggtgaaaatgactcaactgtgcagaactcttgttccaatgtggagtttgctctagtctcctataatacacatggatgttattctggttgtcttgtgcaacggactggctggacaagagatccagatgttttcttcatgtggctatcatctatacccttt

SEQ ID NO: 31653 - DNA, 338 bp, Glycine max
ttgcttttgaaattctcaccaccacctattccaccttggtaatacttactctttcacttaccaaccaaccaccatggtttctgagacactccaaagccaaaccaagaacgtgtgcgtgattggagcaggaccatcagggctagtggcagcaagagagttgagaaaagagggtcacagggtggttttgttggagcagaatcatgatgttggaggacagtggctatatgaatcaaatgtggaaggagaggatccctttagggaaaaagccttttctaaaggttcatagcagcatctatgaatctttgaggctcacatctccacgtgagatcatggggttc

SEQ ID NO: 31654 - DNA, 417 bp, Glycine max
ggtggcacctgcccctgagtatacatttcttatttattgttctccagttggcagctaccagaagggtgcactaaatttaaaggttgaggataaactatatagagcaatatctggctgtggtggaactggagggatcaaaagtgtcaccaattatgcccctgtttatactgcaatggctgatgcaaaggccaacggattctctgatgtgctgttcttagactcagcaactggaaaacatatagaggaggcctcagcatgccatgtatttgttttgaaggacaatgctatctccactcctgcaatagatggaaccatcctacctggtatcacccgagaatccatcattgacattgccattgaattgggttatcaggtcatggaacgttccgtatcagtggaggagatgctaggtgctga

SEQ ID NO: 31655 - DNA, 277 bp, Glycine max
gataaatataaacattacaagaagctatggaaaccaactcagtttccaagcttctgttgcttgtcttcagtgttctctttgttggttctgagttgatccattgctgtgtcacctatgataggaaggccattctcatcaatggccaaaggagaatcctcatctctggctccattcactaccccagaagcacccctgaaatgtgggaggatctaattcggaaggcaaaagacggaggccttgatgtcatcgacacttatgtcttttggaatgttcatga

SEQ ID NO: 31656 - DNA, 538 bp, Glycine max
ggaggaggaaacacacaaaccttcttccaagtgttcttcccattattctacattgtcctctctttggttctctattatttattaattgtgcactccttttggttctctaatatttatttccaccgttttcttaaaacaaaagcctcttcaaattctccaacaactaataaccaaaatggccactgaaaagcttagaagttgtgcaaacttccttgagaactctaaaccctactttgccatgattgctatacaatttggctatgcaggcatgaacattatcactaagatgtccctcaaccgtggcatgagccactatgtacttgttgtttatcgccatgcctttgccactgctgtcgtcgctccatttgccttcatccttgaaaggaaagctcaaccgaggataaaattcccaattttcatgcaaatatttttcctagctctacttgggcctgtgattgatcaaaacttctactatgctgggttgaaattaacctccccaaccttctcatgtgcaatgagcaacgtgcttcctgccatg

SEQ ID NO: 31657 - DNA, 476 bp, Glycine max
acgggttgctgatgccaaagactatgcattggagaaactttatgagaaacgcatgcaaaagaatgctctcaagaaagaaaaagaagaaactggtttgcaggttgatcgtgtagatgctcttccaatcaagacattggatggaaagatccattaccagacagctacgaagacagtattggaaaatgatccaagtgaagagagaactggagagaatgtcaaaaaagataaaggtatggtcaagctaactaaggctgaaaagagagccaagcttaagaaaatgagaaaagacgcacaacaacaagggaaagaggtggctaaagcagaagtggaagagacaccacaagccgccgcgtgggctgaggtaaaggaagatcttacagctgaggaggcatctgaaagtaagaagcataaacttgcagagttggggaatgccttgcttacagatccagagtccaatattaaatttctgaaggaga

SEQ ID NO: 31658 - DNA, 401 bp, Glycine max
ttacgatcaggctaagattttatatacacaaatataaatataataatgttacaacgagtatttgtggtgctttccatcagagaggagtaaagagatgcaacatgcatgaaatccctcctgggcctttcttccttctttggttctggttcttgctctgtgtcctgctgttttctgctcttattcgtaacacttcggctattctgttcgtcgcttagacgagtctcacagatggggagagatggaaatggggaacacaacgatcgctttcactccattcaccagtacgagaccgatgatctgaccggtgcggttcataaccctcgatcttgtcgagaatgggtggttttgtttactctgacgttgatgctgcttataagtgtgcggtggagaatggagctgtg

SEQ ID NO: 31659 - DNA, 611 bp, Glycine max
ggtggaggaggaaagctggatgagttccaacctcatcccgtcacggagcaacttcccggtgttgatgactgtgttaccagctctcctgcatggcctgaagggattattcttggctttcagcattacctcgttgtgcttgggtccattctcattctttccaccatccttgtccctctcatcggtggtggcaatgtggaaaaggctgaaacaattcagactctactttttgttgcggccattaacacactgctgcaaacatggtttggcacacgtcttccggtggttgtgggggcatcctatgcttttctcattcctgctttctccgttgctttttcctctagaatgagtatatttctagatccacatcagagatttaaacaatccatgagagccatacaaggggcccttattgttgcatccttttttcaaatcattgttggcttttttggcttttggaggatttttgccaggtttctcagcccacttagtgtggtcccccttgtcactctgaccggactaggactatttgtattaggatttccaaggttggcagattgtgttgaaattggtctccctgcattggttatcctggtcatcctgtcccagtacat

SEQ ID NO: 31660 - DNA, 380 bp, Glycine max
cagtagaaaatgtggcatccaaactatttgttcaatgctctcggcagaagggacttataaagatctacaggcacttgctaaattatcgaaaaaatgtattcaatctttgcagcttgcctaatctagaaggactgacatatagacaaataagacatagatttccagaagctgttgtatgtggtctttaccggagtgggaaaatatacttccacccaaacgatggtgaaattctgcagcaaaccgacaaagtattgtttattggatccttcgggatacaaatactaaaaagccagaagtaatcctagatgggaaagaaggaatgtatgacattcataatgaggaaatacttgaacaggatgtggaacatgccattgaattga

SEQ ID NO: 31661 - DNA, 355 bp, Glycine max
aggtctttgtccaaaagattaggattggcatgtgcattttgaagatttaatttgtagtgttcctctactattctttctctggtttcttcctaacaagttgaagctagacatggagaaggaaatggaggctgctttagttcatgtggagacgacccagcaacacatgaatccacatgtactaaggcgcaagggtggcttcattaccatgcctttcattatagcaaatgaggcactagctaagctggctagtgttggacttatgccaaacatggtattgtatttgataggggattacaggctccgagtactgaaagcaaccaaaattatgttctattggtttgccgctaccaatttt

SEQ ID NO: 31662 - DNA, 383 bp, Glycine max
ctcgagccgaccaattcaaatagtaccatataatactaccaatgtcccttgaatctccccacctttcttctttcttcctattaaaattttcaacaaaaacatcatcccagtaaggaacctctcttccctttccaagttatcattttttcaacccatccccatcttcctccccctttttcatttcctccaatcccaaacaaaacccccaaaaaatgcaatcattcccccccatccccactctcgcatgcctttaccttactttctttacgtcactactattcctactacctttttctcgtgccggtttactctccgaaccggtgagcgaccccaaccagcctctcgaaccgggctccaacactgtccccgcctttcctgtccag

SEQ ID NO: 31663 - DNA, 411 bp, Glycine max
gaaacatgtctgcttcaagcttacaccataacctgtctccatggtgcttctctccagtccttactatattcttctctctgcgcttcttttcaggcaatttccatcttccatgatccaaggaaggtttcatctatctttcttgcaaaataaacatttgtttgaatttccattgttcagctcaaacctctgttgttttttctcttttgtttggtgggtaccccactgaacatggcaactgaagctgcaggctcttccaaggacaacaataaccaaggccatgtcaccactgaaaatagggctgatatcccaaaacaaaagggtccagcaccatctgaaataactgaggaactcccaagagaacaacatggggcaaggcaaaaccttatcttggatattcctgcaatatctcag

SEQ ID NO: 31664 - DNA, 382 bp, Glycine max
caccgtctacctatctgcacaaactttccttgtctttccctctcagttttgtcacttttcccccaaaactttcctccaaagctttcgattctctctctcgacccgcaccgatcatgcttcaaagcttggtcccccgatcccctcgcacttcaaaccccaacgctatgaaaactaagcgcgccgttgacgccggaggccattcccccgccgacgaaccttccttcaagcggaccaacttctccggcgagaaaactacggccgaagctgaggaggagcaagccttcgatcccgagcctcacggcggcgattccaccggtctcaaactcctcggtctgctcctccaatgcgcggagtccgtcgccatggacaacctcgacttcgc

SEQ ID NO: 31665 - DNA, 506 bp, Glycine max
gttttctctgtatactaagttcgacaacacatcacgatctggtccaaaggcttttgttagtgaatacgctgtgaaaagtgatgctgcaaacggaaatctcttggctgctgtggctgaagccgcatgtcttattggactagaaaagaacagtgatattgtggagatggtttcttatgcaccacttttcttaaatataaatgacaagagatggattcccgatgcaattgtgttcgactcttatcaggtttatggaactcctagctattgggtgcagaaactttttattgaatccagtggagcaacatttattgactcgacactcagtacaacttcatctaataaacttgctgcatctgtaattatttggcaagattcttcagataagaaaaattacctaagaataaaggcagtaaactttggagcagccgctgagagtcttgacattgatttaagtgggttggactcaaatgtgcaacaatatggttctacaataacagtgcttacat

SEQ ID NO: 31666 - DNA, 532 bp, Glycine max
ggaagatgcccatgaatttttaaggcttctaattgcatcaatgcaatctatatgcttggagggacttggtggtgagaaaaaagttgatcctagaatacaagaaacaactttcatacaacatacttttggtggccgtcttcaatccaaggttaagtgtttgaattgtaatcatgaatcagaaaggtatgagaacattatggacctgaccttggagatattgggttgggttgagtcactggaagatgcgctgactcagtttacttcccctgaagatttggatggagagaatatgtacagatgtggaaggtgcacatcatatgttcgagctagaaagcaactgagcatacatgaggctcctaacatcttgactatagttctgaagagatttcaggaaggaagatatgggaaacttaacaagtgcataacttttcctgaaatgctggatatgattcctttcatgaccgggacgggtgatattccaccactttacatgctttatgctgttgatgtgcacctggacacactaaatgca

SEQ ID NO: 31667 - DNA, 376 bp, Glycine max
ctctgcaacaaatctctctccttccaaaactaagctctggttcaatcactgtcattcttctcctgcagagcaatctcagatctattattcatcatctatcacaaaacacaatgttgcaagacatgtggaatgctcctcccggtttcagaccctccaagtctgcaccttcttctccggcgaagcctcttgggatggttcccagaacgcgttctgagaccttccacgtggctcacaaggtccccatcggtgacactccttatgtgagagcaaaaaacgttcagttggtgaataaggacccggagagagcgattccgctgttctgggcagccattaatgcgggagatagagtggacagtgctttgaaagatatggctat

SEQ ID NO: 31668 - DNA, 406 bp, Glycine max
tgaatatgatagaaaatcaaaaccatcgtggaagaagcacatatggcaagaaaaaacggcaaaagtttcacctttgttaccatctaaagggtgcattttacatggattaagtggtgatcattctgaatctctgtttcttttgaccaaggaaggtactttggtggagagaagattacatcaaaggaagtggaaatgggtagtccatggaagtcctgaacatcaaactttgacatcgattacacttgcgctgcaagatgaatcaagcgaaacattcatttctttattctttcctacttcaactggatctgtttttgagtatcaaatgccaaaacagttaggaactgttccaaacaatcagtttccaggagcatggggaagtcatgagcatcccttacatgcaaaagca

SEQ ID NO: 31669 - DNA, 263 bp, Glycine max
tctcgagccgaatcggctcgagtgaagatcactcaaaccaatctactctatctatctggtataggcatggagctttgttggcaaaaatctatccatggctcttaaaagaagcatggaggattgtgtgagacggttctcacccttcacactccacctcctaaagtttgcttatgctttagctattggcttctctaatcaataaccacaaaagggtatgacacatggaggaacatagttctctctatgagtggcatgaagcagag

SEQ ID NO: 31670 - DNA, 531 bp, Glycine max
  unsure (1)..(531): unsure at all n locations
ggtacactggtgtcttgngtacaaaatttccccaaaagccggggtcctgtggtgggaattctaaagggctttgctgggttgagtggtgcaatcttgactcagatatatgcactgttccattcccctaatcaagcatcattaatatttatggttgctgttggtccatcattggtaggaataggtcttatgttcattgttaggcctgttggaggtcacaaacaagttaggccatcagatggaaaatgcttcacattgatctatggtgtgtgcctcctgttggctgcatatttgttgggagtcatggttgtccaagatttggttgaagtgagtgaaactgtaatctcaatattcacaggggttctcttgttgatcctccttgtcccaattgttattcccattacattgacttttggcccagagcaaaggcatccggaggaagaggcacttcttccaccaccacagaataaagaagcagggaaatctcagctggattctgatgaagtgatactgagcgagttggaagatgagaag

SEQ ID NO: 31671 - DNA, 257 bp, Glycine max
aaaatagatgaagggcaatagaggctgctccgtagtctaggcaaacttttcttcataatcatctttatattgatattcatctattttcccctcaagtttgatgaagctatgtatacgttgtatcttcctggttgtagtgtattgccctttcttgcatttgtttttccccacaatactaatggtttgaacagcaattagacttctatatgaactgaagttgtttctctataagtatttggagtccatttattatcaaa

SEQ ID NO: 31672 - DNA, 365 bp, Glycine max
gcagtatgagtttaagatcacatcttgcttccatgaaaacttgcccctaatactgacaagggttgtccttgggatagccttacaagtcgtatgcagttacatcacattccctctctattccctagtaacacagatgggatctcacatgaagaaaacaatctttgaggagcaaactgcaaaggcacttaagaagtggcaaaaggctgcaaaggacaagaggaagttaaggaaagcagggatagatatgagtggggaaacaacaccaagccaaggcacatcacccttgcatttgcttcaaaagtacaagccaagccacacagacaccgatagtgttctctactctccacgatcataccaatctgaca

SEQ ID NO: 31673 - DNA, 441 bp, Glycine max
tccactcgtccgaaagaagagaagaaacaaagaaagacgaagaagaagaagactagagaaagagtttgggagagatcttgtaaataaggaaaccctagtttttcctttttttgggttaattttcccattaattttcagctccaacctgctactgttaccaataaggaatctcttgtcattgcttcaatcgaacaagagtgaacgagttttgtgggattgtgtattgttagaaagctgcaaagatgatgtccaggtcgtatacgaatcttttagatttggcctctgggaatttcccggcaatgggggggagggagactagggagcggaaacggatgccgagagttatgagtgtcccggggtttctcactgaggtagatgatgatcaggcagttagtgtttcctctgataatccatcaactgttactacggatagaatgatca

SEQ ID NO: 31674 - DNA, 285 bp, Glycine max
tttgggaagtggttgttcattctaccattgaggggttgaggtttccaatgactgttcctatggggactgctttggttgacatgtacgcaaagtgtggttgcgttgaaaaagctaggatcttgtttgatgggatggcgaagaaggatgtgtggacgtggaatgtcatgatttgtgggctggcttcgcatgatcgtgccaaggaggcactcgcgctgtttcagaggttcgttggtgaaggttttcagcccgtgaatgtgacgtttgtgggtgtgcttaatgcttgta

SEQ ID NO: 31675 - DNA, 518 bp, Glycine max
ggatggctcaatacggttagtaatgctgcgtcttctgcggcagggaaagtctcaatcccatctggtgctgtttctgctgtctttcatagttccattccttataattcacacaatgcatactcaaaaattcatgccatggagcacttattagtttataccccttctggtcatttaatccaatataaactactgccaccattggtggcagagccaagtgaaactgcttcaagaacagccccagttccttcagcacagatacaagaagaagatttgcgtgtgaaggttgaacctgttcaatggtgggatgtctgtaggagatatgattggccagaaaaagaagtgggcatattggggaatactgttggtggactggaagctgcggaaatgatcttggatagttcagattatgaagatgataatagcgtcgggaacaataattctataaaacttaataagcaatgtcacttctcaaatacagaggtacatataagctctgggcggataccaatttggcaaga

SEQ ID NO: 31676 - DNA, 883 bp, Glycine max
acttcattaaccaaaatggactgctccatcaacttccacaagctccaaacaaagaaaaccacgaaacctcggaaacatcatccacagctccgaaagatcgcaaacatgttgcgttacgcggagttgtgcgttgttctggtcttggtttcgaggctctccatcaacctaccctacacaaccgagtgtttccgcaacttcatgggtagccctcgcttcgtttttctcctgggaaacgtcatcatcataacgctcttcgcacaatctggccacttttcatcttcagccaaacgtgccccagaacctgcagatctctatctcgagttcctccaaaacaccaccatccatcagaaacttcaagtccacgtcagcaaaccaaagccaagtgcgagagtattggagagtgttataataaagggcaccaaaactgcacagactggtttggaggtgaagaaggattatagaaggtctaaatcggatattgttgtgaagcgcgtggagagtgagaaggtgcctccacgcgtgttgcagaggtgtgagactgagaaagttcttgttaataataactcgtaccctgaagatggcatgagcaacgacgactttcgtcgcaaggttgaggctttcattgctcgcctacagaggctacgaactacagaactctgtaattaattaataggagtataggactatgagtattggtaaaaaaaatataaaaaaactcaaatgtctggatattattgctttctactattggggtcaaaagtgaaaaaactatacacatgcagtgctattgcttcggtttaatcaataaacaaacaaaatatgtgatgtatgtactgtatagattaaatgaaagtgagtaaaataatgttttgattgatcctat

SEQ ID NO: 31677 - DNA, 287 bp, Glycine max
ctcatcagttatcttcttctttctcttgtttattatctcagatagatgatcacaaggccccaatgatgggaagagtcatggaaaaaccaagccaagatcttcttcagcagcaacaacaagccctaaagtgccctcgctgcgagtcttcaaacaccaagttctgctactacaacaactacagcttgtcacagcctaggcacttttgcaaagcctgcaagcgttactggacaagaggtggcactctcagaaacgttcccgttggtggtggctgcagaaaaaacaagcgt

SEQ ID NO: 31678 - DNA, 418 bp, Glycine max
tcggtgtgacacagcgcgcaattcgctgctgataaacccgctcactgcaaattgttgtgatccctacccatccatccttcatttccatctcgtttttttgtttcaaacaaagaaatctttatttttttcctattatattttcaatcacgcgaaagtgaaagttcttcggttgttgctattgctcattcattttctcaggggaagaaaaatcatttttgttcccccggattacgttcctagataatagcttttagccaaatatcaaatatcaaatatcaaaaccacattttttcttcggatcttgttttccttgtccgagtcttctcattagcggtcaaacacagactctgttgatttcatcaatcaccggaaggttatacagtttaggaaaagtagtaatttcaatggaagaaataca

SEQ ID NO: 31679 - DNA, 368 bp, Glycine max
gggggtctgattaattctctagttatggctgagagcagagcgaatcacacagtgagcgtatctgggtgggcagctcatgattcgtcgggcaagattaccccctacagcttcaaaagacggcagaacggtgtgaacgatgtgacaataaagatcctctactgtgggatctgccacacggatctccactgtgctaaaaatgaatggggcatcactatgtaccctgtggtacccggacacgagatcattggggaggtaactaaggttgggaccaatgtgaaggggttcatggaaggagacagagtgggtgtgggctgtttggcggcttcatgtttggaatgtcaccactgcaagaccgatcaggaaaacta

SEQ ID NO: 31680 - DNA, 294 bp, Glycine max
gagattggcaagaaaaagagggaacaacaacagaagggagaacatgcctttaccaaaggtgcctactttattgggaagatgatatggagcaaaggctacaaggaactgctccaacttcttaaagatcatgaaaaggaattatctgctcttgaggttgatttatttggcagtggagaggactcagatgaagttcaaaaagctgcagaaaagttggaactagcagttagagtccacccagctcgtgatcatgctgatgctctatttcatgattacaaattgtttcttaatccaagc

SEQ ID NO: 31681 - DNA, 432 bp, Glycine max
ccttttctcgcctccatcgcaggtttctacctatattgctgttctttgcttcgattaggatcagtcaccatgtatcttcagttttacataaacgataacggtgacaaagtttacaccactaagaaagattcgccgctagggctacctacacaatctgctcatccagcccggttttcacctgatgataaatattcaaggcagagagttcttctgaagaagcgttttggattgttaccgacccagcagccacctccaaagtattgagtgatatagaagctctactttttaagtgtcttttgttctatgtttagacagtattttgtgaacaagtgctggtgcctggtgtaaagtgattgagccatttatgctttgtgtttttgaaccaattacatcaaaatctggctcacgctcacgttagactgaagtgacgaa

SEQ ID NO: 31682 - DNA, 404 bp, Glycine max
tcccctaactctctgcagcaataatagatatgatatggaggaagtagagatgataatttgaggagttggaatccaatgcaggaattgacttcttagaattcagaccctcagagattgcagcagcagtggcaatatctgtggtgggggagggccaaacagtgcacactgagaaagcaatttctgttctgattcagcttgtggaaaaggagagggtcttgaagtgtgttaaaatgatccaagagctggcatcaaatagtggtggttctgccaagggtgctagtgcttctgtttctgtccctagcgtgcccgaaagcccactaggggtgttggtcactgcatgcttcagctacaaaagtgatgacacaaatgctgcttcatatgcaaattcttcacataacattagt

SEQ ID NO: 31683 - DNA, 240 bp, Glycine max
gtggatatacatataatgtattgcaataattattataattatcgtttgttacacacttgcacctttgatttattaagacatcagatataggattcacgtttttctataatctttcgatgaatccttttctactccatagatataagactaatcactcactgggttatcctaatggtgggagattggagtaattataatgtataaaaacttaagtatgatctttattgttacagttataca

SEQ ID NO: 31684 - DNA, 692 bp, Glycine max
ggtggcactgtggctaagtagagaggtagctttccctgtaagactgttacttaagattaccaagaattctagctagctggttagttcttttgtcatttcaaagagaaactgagagagccatagctagggagaataccatggacaaattgtatgggttgagtcatctcttcatgacagtgtttcttcataacttctccatgttcatggtggtaccagccatcaccgatgtcacaatggctgctctttgtcccggacaagatgaatgctcacttgccatctacatcactggttttcaacaagcgatgatagggctgggcacgcttgtgatgatgccactcttgggtaatctttcggataagtatgggaggaaggccatcctcacactccctatgatcctcaccatcattcccgtaggcatattagcttacagcaggacgaaaaaattcttctacgtctactatgtgtttaagatacttatttcaatgatttgcgaaggaagcgttccttgcctcggtctagcttacgtggcagataacattccagaaagtggacgaagcactgcgtttggaattctttcgggaattgcgtctgccgcgtttgtgtgtggcaccttatcggctcgatttttatctactgccttgactgttcaagtttccacacttatcgcggtgattggagcactatacatgcaa

SEQ ID NO: 31685 - DNA, 266 bp, Glycine max
gacgacagaagggggacgcataggtaacgaatttaccgttacctgtggcgtcgcgtctcagatccctctctctttggagagaacgccccaacaatctaaatctgcatcgcattatcatcatcatcatcatcaatacttcatttatggggttttattagctacaatacttgtttgctgcaggctgccaacgaaaaggtcaaggcattttggatcagacatcttggccctgcaagcttgatgcaacacaacaaatatatatatcatgg

SEQ ID NO: 31686 - DNA, 383 bp, Glycine max
ttcctatttgaggtagttggttttagagatgcttggcatggtcttgttttgcttgcaccaaagggacacggaactcgtttggcacagacaagcagaatccgttttgagtttcacaagggtgcagctgactgcacattcatgagaattgatggagagccatggaagcaacccctcccacaagatgatgacgcagttgttgttgagatatcacaccatggccaagttagcatgctggccaccccattgcgccgttctaagagtgtgtatgatccctcctccccttccgttgaccgcgaagaagatgatagcagtgaagaagaaccatcagaagattgggaagaacggcgcatatttggcgcagctgagacattcaaatatcctga

SEQ ID NO: 31687 - DNA, 457 bp, Glycine max
acgaggtttcctcagccaaaaaatagaagaaattgacatcaacaggccagaacccacgtgggagaacatcatccattagacgtcagagtgaacttgcaaattggaaagataccaacaacgaaaaatatccacatgttgtatatgaagagcattgcaaggcttgttctgatgctgagcagtgtgactcaacagaaggtaacagctacgacaagatagaagagggagcttggtacagggcttatctcgtgtatctttgggaaaaagtagatgttagcttccgcaatagcaagcatagattttcttctcatactatcattcaggtcaaagaccaaatcacacaaatagaaggggcggctgttatacagcatatgattgatcattttcttctctagaagctttttgcctctaaagtatgctccctgcttgggaatataagcttctcattggatgaaacaat

SEQ ID NO: 31688 - DNA, 238 bp, Glycine max
gaccccaaaataaaataaaataaatctatcatctcctctttctccgggccttgttgccatcctggatacatatggacggcgaaaggttgagggagatggaggagatggggtgtggtcattatgtgggtcatggctacgtgagcaattggggcatgcaatgcaacagcatgcgtcgtcgtcaccatacgggtgaagcaccactgtcgacgacggcggtttccagctacagaaaatattt

SEQ ID NO: 31689 - DNA, 259 bp, Glycine max
cataacaaagcactccttcccgttaacaataagaaaaatgtcacaaccatattacagttactacagattacattagcctgcaatggctgcaactctaacttgtatggctgccaatgtcaaattccactcccaccagagccatgacaataaaacaaaagagcatcccacaaattacaattgcaggatactcgtgcataatcaacaacacacccagggtaatcccaaatttaacataagaaaacaaacacggatattcatt

SEQ ID NO: 31690 - DNA, 259 bp, Glycine max
cgacagacggggggagcagatgaagttatgagtgatgatgatattgacgggaaaacatgtcctatcttatgtttctttccctttgagttgagaattccttgttgatcactcactcacacccatctgatatatgcttcccaacatcatggacttggacttcaggagggcttcaaccattcattccaccaatcatcacttctcttctctccaaccttctcgccttcactctgatgatgatgatgatgctcgatctcttctt

SEQ ID NO: 31691 - DNA, 258 bp, Glycine max
gacagaagggaaagctgtgcagaaattacttgatgagcatcgcaaccaagctgatccttttaatcaaattgagcaaggatggtgtgatattcctggaactgtggatgaagttaaagcaaagctacaaatgaggcaagaaggagccatcaagagggatagagcaatggcatactctctctccacacagtcaagactgtgtgctagtccaaacccaaaagccactaaagccatgactcctctcaagaataacaacttaag

SEQ ID NO: 31692 - DNA, 288 bp, Glycine max
acggctgcgagacgacagaaggggatgcataagaacaagcacaaggtctgattcgtgtttccttacatcaacttgtggtctaaaaatgggaaggatgccatgctgtgagaaggtagggttgaacaaaggaccatggaaaaccgaagaagatgagaagctcgtggcttatgttgaaaggcatggccctggaaactggcgttcagtgcctgccaaagcgggtcttcaaagatgtggcaagagttgtagactgaggtggatcaactacctaaaccctaatatcaaacgagg

SEQ ID NO: 31693 - DNA, 205 bp, Glycine max
ctctggaattgatccttgacaagcttcagcagaaggacacttatggtgtgtttgcggaccctgttgatccagaagagcttcctgattatcatgatgtgattgagcatcccatggactttgctactgtgaggaagaagttgggaaatggatcttatactaccttagaacaatttgagactgatgtctttttattttgctacaaatg

SEQ ID NO: 31694 - DNA, 293 bp, Glycine max
gaagaagccttggaatatatttcaagccttgaatcaagtcaggcagggatgacaataaaggagtatgggaagattctgatagagcacaagccagtggagacaattcagattctcataaggctttgcacggaagatggtgacaaaagagggccctcaaatggagtgtacatgtctatgttgccatctcctgttgatctgcttagcatcttcattcatcatcctcagtcccttatggattttcttgaaaaatataccaataaggtcaaggactcacctgctcaagttgagattca

SEQ ID NO: 31695 - DNA, 346 bp, Glycine max
gttcgccttatgtcaaaactttatatgtacaagttccattttgtatcgaagacaaaaattgggaatcattgccttccttgttaattagtaaggtatatgactggattacaatatgttgtatactataatttaactagtgatgagttcctgcattgcatgggtattttaagaagtttaactttgtatgcattatgatgcttttttcttatgcactgcaagagaactttgtttatccttctctttatcaaaatttatttgttctatataccatatattagtgatgggattcattttttttttttgaaaatataaagatataggtgacatgaatgaaagaatagatggg

SEQ ID NO: 31696 - DNA, 275 bp, Glycine max
taggtcaatcttattcaaaattataacgtatggtcgttcaaggtactcaggattatacatgcgtaactcttctctgacagttctgtagtcatttataggattctcagtggcagcatccacaacatggaccaatagccgggtcctcctgaggtgcctcaaaaaattgcgaccaagaccctttcctaagtgagcaccttctataagaccaggcaaatctgccaatgtggcttcagatgaatacattcctgcccccaagctgggatcaccaccaagcc

SEQ ID NO: 31697 - DNA, 339 bp, Glycine max
ggcgggaagcatagcaagtgatacgcaatatcacgttcttcgctctatcgcttcctgctaaaaattcaaagctggttaatcattcaaggaagtaattgttttactttttgcatgccttcacacattataaacaggagaagctttgataggacaaatatggagcaaaagcctccaaggatgaagttaattagtaagctccctgggtcggaagtggaaaccataaagaagaattcacatacgcttgtgttaccaacaacatctcagaattctctcatgtcaccaacctctcaaaccataacccgaaataactcaaatgggaggttgaattgtctatgctca

SEQ ID NO: 31698 - DNA, 270 bp, Glycine max
ggagaagagtaattttggatgcttgagagttgaatctagaggaagagataaaattttatcttgtgtctgtttgtaaatatgttcagttaatcggccagtgcatgtaaatgtcaatagtgtgtcttgtgtagagaaatattgtctagcctccaaataatgatagagggttgatttgggtgttaattagatttcgcccgtgccctatgttagtagtgtctaaggaaaaataccattctcttttttgtaagtagaagtcgttataggatggag

SEQ ID NO: 31699 - DNA, 252 bp, Glycine max
tacttctgataaataattcagcataaccatatacaaggtctgggtgagaacgcattaagtaatattgatactgccagtatcactgagctgaagagtcaatgtgttaggaaatgtgcctcaaaatgggacaagccctttaaggtgtatagtcgtaggcccaagaccaagttaatgagctgatgctttgttattatcatttacttagttattctagaagggggtagaatgggcattgctgagttggttagagaa

SEQ ID NO: 31700 - DNA, 406 bp, Glycine max
tggttgggcaggttatctggtgtcttgctcatacgatttggatcggaaattccgtggctgttgcagcttcaattggcttgattgcacatcatctatttggtgtctggaatggagacaggcgactggccataagatatggggaggattttgaattagttaagagtcgaacaagtgttgtcccttttgcagcaatcctcgatggccgacaagagttaccaaaagatttctacaaggagtttattcgactgccatacttgacagttactgcaataacgttaggtgcttactttgcacacccgcttatgcaggctgctagtttcaaccttcattggtaggttgaacccaacacatcctgtctcttttctgtaaaatctactgtttgtccatagacagagatgaagagatt

SEQ ID NO: 31701 - DNA, 412 bp, Glycine max
cggacgcgtgggcggcagctcccagaatttccagcaccagtttcagcaatttatgttaatgacttgaccggagagattgttacagcagctggtattcttctggctgtttggagtataaatggggattgcctggcaatgatcaaagcatcacaactgccatcagattccattctctctgtgacaagcagtacgttttctgattggttggacacaaagtggtatgcaacaggtcatcagagtggagctgtcaaggtgtggcagatgattcactgctccaacccagatagctcccttagcaaatcaggttttggtgggtcgggaggtttaaatcttggtggattagaaccagaatacaagttggtcctacgcaaagtgctaaagtttcataagcattcggctactgcccttcacc

SEQ ID NO: 31702 - DNA, 387 bp, Glycine max
gggacgaaaaaatatgataaagtagaagtctccgtctccaacacactcgttctctgccgctcgctggttccgccgccaatttccgggtttgatttgaattggggggaaagaaatggagtttgttaatcgaatagtggacatagctaccagagctgtaaacagcaacgcagtgatcaatgtttgtctgcttgcgtcgtttgcaacactcggcgtaagatctatgaatcagcaaaagaccattgaagctctacaggatgagaagagtctcttaccaaatccaacaagtccattagaaagacattgtgggactggaaacagcagctttatgctgaagcctccgctgatttctgcagggttcctctggctaggctcaaagcaatcttatgg

SEQ ID NO: 31703 - DNA, 436 bp, Glycine max
gggaagatgcagtaatatttccccttttcaatacctattgacttcagcttgtgtgttcatcgagaataacaataataatattagtatttggcatttgatttgaatcgattaagatctaagaagaagaataaggatggtgctgccactgctgaagctgggaacgctggccgtgaaaaccctaagcaaacccgtggcgagcagactgaagcagcaggccgctcttcaccccagattccgcgaactcatcgttagaatggctcagtctaatcatcaaatcacgactaagatgcaaaggcgcatttacggccacgccacagacgttgagattcgccccttgaacgaggaaaaggccgttcaagccgccgttgaccttatcggagaactcttcgtcttctcgagttgcaggagttctcttgatctttgaggtacaaagaag

SEQ ID NO: 31704 - DNA, 364 bp, Glycine max
cggctacgagagggggaggagagggtggtgcgctggtggtatctttgaaacctctttgcttgcggaggcaggagtgcgtctgagagagcgcttcgtgaaagaatcgtgtggcgcggtgaaaggtttcccgttggggtttccggccccctggtcttcacctaattgtggaagaggggaggtgcattgagtataaactctctctcgcgcctttagcttgttcctgttcgtctattcgggacggggcaggcagcccacatacatgaagagaagaagagaggagagggggttccctgagattaaggtgtcaaggcggtcgaagaaggccacaagtggaagcaaccgatgctttggtcattcagttgac

SEQ ID NO: 31705 - DNA, 416 bp, Glycine max
cggctcttgggatcgaaattgacaattctgagtcattgcaatttagcattaacgacatacgaaatgctacagatgacttctccgattacaataaaattggagaaggtggatttggtgctgtttacaagggaaggcttttcaatggacaagagattgccatcaaaaggttgtctggaaaaactagccaaggagatagagaattcgagaacgaagttcgtttactatctaaacttcagcaccgaaatttagttaggctacttggtttctgtgtggaaggaaaagaaagactacttgtctatgaatttgttataaataaaagccttgattacttcatatttgatcaaactaagagagcacaattagattgggaaaaacgctacaaattcattactggtattgctcgaggaattctctac

SEQ ID NO: 31706 - DNA, 254 bp, Glycine max
ggacgacagtgccttcagctgtcattaagttctcgcacggcacagagagaaagagatggattcttctccttcaccagacatatacatcccagagcaatggtcagaggctgcagagtccattgcacacagttcaatgcctcctattgctcttatatgtggtgccaagaattgtgggaagacaaccttctcccgctatctcctaaatgtcctcttgcacaaatacaccaaagtagcttatctggatactgatgttg

SEQ ID NO: 31707 - DNA, 264 bp, Glycine max
acggcagaagacgacagaagggggcgtgtgagcaaacacacaacactgaagaaacaagcttcacttccaccccttaatggcccgaggcaaggcgaagaagaaggaagaaggtgaagacaccgatgtcgcaaacccagaaacgttagagcggaagaggctgaaatccttggccatttccaacaagattctctcggagacccctgcacggagctccgttcacctcgaacccttcctccgttgtggccaagcaccacggcaaagata

SEQ ID NO: 31708 - DNA, 246 bp, Glycine max
gattgggaaaggaaatataaaatgatagctcttacctttactgggcatacaagaacaacattccagttttctgtccgggcttaactgatggctcattgggggacatgctgtacttccattccttccgcaatcctgggtctgattgtggacatagtgcaagatataggggcaatgaacggtgaagcagtacatgcaagtcccaggaagaccggaatgataattttagcagtggccttccaaaacatc

SEQ ID NO: 31709 - DNA, 894 bp, Glycine max
aaaaaaaaagaggatgctgattgttctaatcactctgatggtttgaatacttttggtcatggggtgcataatgatttggacattgaaaaagttgacaatagtaaacaaaaaacagaaaaagctaccaagaaacaacgaaagaaatcaagctcttcaactaaatcggcaaaaccttccaagggtcaagttgctactaatgagaaggaaactgagaaaatgctcgactgtgaaagcaactgcaagatagttcacagttcccctcccgaggaccattctgttgaagctgcaggaccttcagagaatgacaaagggattgatgctaagatttcgtcgccaatggcatgcaatgatgattccgaagttgttgcttctccaccaagtgagagcctctgtgatgaaaatcattctaagaaacttggacgaacaaaaaagaaagatggccctgtaaaagaagggactgcagaggatgtttcaaaggtgacagctagtgattcagaagccaaacctgccaggcggtcagtgaaaaaggcacttggtcagaaggctgatgtgaaaaaaactagtgtcgtagtttcagtaaaaaaaggaagttgggctgcaaatgatgcagatgcaaaaaagcactcagccaagaaatttgatgaaaacaaaaagggtagtggtggatcctcttcaaggcagatggaggacaagaaaaagggaggtcgggggaaagctaactctgaagcagatgttgcaaaatcatctgctattgatgtggacaaggaaatggtttcttctccaacgtctggtacaaaatcaactaaagatggaaagtcagaggagactcccaagacaaatctgaaaagggaacgcactccaggaaaagaaaatgagtctggtgtgaaggaatat

SEQ ID NO: 31710 - DNA, 579 bp, Glycine max
acagtgtacactcccaacccccttcactttaggaacctctctctttctctctttgttctaacttcccacttcccagctactggctgctgatggaaggagacacataatttccactcctcaacttgctatctacactttctctctttctttttcttcaataataattttagtcacaatattagtatttaaggagctaaatagcaatggctgcaataaccacaaaagaacaacaagtagtagtaaactatatgagtgaagagttgcaaacgatttttctgtccaacttggatgaggcacccgctagacggcgtgctcgtgaggcttttaaggatattcaacttgccattgatcattgcttgtttcggttatcatcagatggggtgaagacgaaagaggtttatgaagtgaactccagaggattaaaaatattctctaaaagttggcttccagaaagttctcatttgaaagcaatcatttgttactgtcatggttatgcagatacttgcacattttactttgaaggagtctgcaaggaagttagcatcatctggatatggagtatttgcattggattaccct

SEQ ID NO: 31711 - DNA, 273 bp, Glycine max
atcatgcttcttcataaatttattttctagctccttgattcccttggtggcttacataatggactaagtgacttccttgattcttaagcctcgtttctccctgcactaacatactgtgcaattcatgcacattccagtgatctgttcatggtgttatagctcatgtggaacgggccttactcggacggtaatgagttcagaataaactcaacatggaagttctcattcacaaccattcccaaggtcttaagttttgctgcaatgtttgtcatc

SEQ ID NO: 31712 - DNA, 394 bp, Glycine max
gaacggagaaggaaaacatgatggatccatcaatggtgtccgatactttcacgcaaagtcagaaagatcagggtcatttgttcgtgctcacaatctgaaccaagggatttcattcgctggaagctcttgaaagtagatataaaagtgaatctacaaaagatgaagatgaagaggatgatatgtatgtcctttcaacaagcaaccagcgagtatctgttcaacttttgggtaaagataaagttgcgtgataagctaagttgatttgagaagttaaccagtgtatcattgtcatatatgggcattagttcccctggaatcccatctcacattaataatacagggccaaatataaaagaactcgccctgactgggaaccttcttttggagtggaagg

SEQ ID NO: 31713 - DNA, 242 bp, Glycine max
cggcagatggtgtagtaatacccaaaaaggtattaaaagccattgatattaaaccttttcctgtgctatggcatgaggacaatattggtcacagacagcaagcaagagaaaggctacaagtacccggagcaatacctggatctcaacggggagacgcagctcatcgacttgtcaaaactcccctcaacattaaatcaaataatacctcccatggattgctggagcaacctcctgtccatcat

SEQ ID NO: 31714 - DNA, 240 bp, Glycine max
taagacgacagaaaggaagcacatggattgaatcctaaagagaaagtgcaaaggattgtattgacttctttgcatgcatcctcagataactcaactcacattgaaaacagaacatgaagtcaaaagcaaattgggaagtctaagctacaaatcaattaaaaaaggaacttgagaacacccatgagaaagaaaagtcatggaacctcaagcccgtggatcaaaagcgaaaaatgcaagatg

SEQ ID NO: 31715 - DNA, 261 bp, Glycine max
tattcattagacactagtcactacgaacatctcaaaatgggtcattcaggttaaaagcctaataacaaataattattgttattgacttgtttaattttccaaataacaaattgcagcaagtaacaactacggcctgccacagttcttcaaaactatgttgtcaatcgtggccgtcgcggccgctattgcggcgaagtggagcggcgcgtcccccatccgcgactgggatggacatgcgcgcggttcaacgtcgcggttggc

SEQ ID NO: 31716 - DNA, 512 bp, Glycine max
ctgtcgcgtgggcggacgcgtgggcggacgcgtgggcggacgcgtgggcggacgcgtgggcggcgagctcctccaccgcgccaaaaccctagcctcgaatctcgccacaatcctcaaactcaccaaaggcgatgctgagcgccgtggagaggttccgggtgacgcacgctacgatggtgccggcgctggtggtggctatgacgaaagactgcgtcatcgccggctacgatttgacgtcgctggaaggggatcgtttgcggcggatctccgctgaggaaagaaaccgatgaggcattcaaagctaagttccccaacgtcctcgtcatgcagggatacggtttaactgagtctgcagttacccgaaccactccagaggaggcaaatcaggtgggagcaacaggtaaactgataccaaatatagaagccaaaattgtgaacccagaaacaggggaagccatgtttcccggtgaacaaggagaactctggtcgaggaccttatgttatgaaaggtt

SEQ ID NO: 31717 - DNA, 275 bp, Glycine max
ggcattaagcagaatcataatctttcatcacatgcatcatatggcgcttctacttgtcgctctcttggctcttgttactacattaccatcggttactgtcgcagaagtgctttcacccattctcgacgttgcttcactgaaccgaaccagttttcccaagggcttcatctttggtggcaggatccgcatcgtatcagtacgtacgtggggcaaacgaaggtggcaaaggaccaagtatatgggatacctcccacaaatatccagataaaattgtg

SEQ ID NO: 31718 - DNA, 523 bp, Glycine max
gataattagccatacaaagatgaatctcaatagcacagaagcacttcttgtgctttttgcatttgtcttcttggcatggggcaatgcacaaaatacccttgtgccagcaatcataacatttggtgactcggctgtggatgttgggaacaatgattatctgcctacccttttcaaggctaactaccctccttatggaagggactttagcaaccatcaacccactgggaggttctgcaatgggaaactagctaccgatattactgctgaaacactgggttttaagagttttgcacctgcgtaccttagccctcaggcatcagggaagaatcttcttattggagcaaactttgcttcagctgcctctggttatgatgaaaaggctgctattctgaatcatgcgattccattgtcccaacagttaaaatattacaaggaataccgaggcaagctggccaaggtagttggcagtaaaaaagcagcattgattattaagaatgcactctacatattgagtgctggcagc

SEQ ID NO: 31719 - DNA, 260 bp, Glycine max
cgcgtcacgtttcagagtaagtatgaggctcgggtgataggtattccaaagtaatctactttggttggattagaatgactaaacgggtgtagatctgaagtaactcttttatagttactcttgaagtaagtgaatcctctctctatatatacgcacttaaaatttatacagccgtggtattttccatggtaaataaggatgaaaacatagtattgttttaacttttaaccgcttagtttcctaaagtactcatggtttaa

SEQ ID NO: 31720 - DNA, 307 bp, Glycine max
ccgtagcttctcaatcaaccaagttgcctttcgcttggccttttcaagcttatatctaattctaacttctggatttggggaattcatctttttcttggccttcaaacgatagaacctcagctcattcagtttagcctttctagacattttaactcttttgttcagctggctcttctttccattatcaatatcatcagacttgcctagagagaaccgtacgacatcattgtcagtcttcagctcaactgattcattacttatgtatctggcagggagccagtttcccagaatatcatggattccaaag

SEQ ID NO: 31721 - DNA, 294 bp, Glycine max
cgactacgcgagacgacagaaggtgcaagcatcatatgtgaagaatctctagccttcactaaaagtcgagtgggactgttgatggctgtaagcttatgggtgatacggagtattggggctccatcagctgatagagctgtctcagagctttcacatgcatctgcagaagtcagtgaaatagtgcttctcttgcttggtgcaatgaccattgttgagatcgctgatgctcatcgaggatttaagctggtcactgacaatatgaccacccgaaacccacgccttctcctctgggtg

SEQ ID NO: 31722 - DNA, 413 bp, Glycine max
ggtatctttccaaagttggcttatgttcaaacatagtgccaagacataacctttcggcattaattacaaggcattagttatttcaggtttcttgtggtgcttgaattggaaatcacttgctaattatctgaatacatgtcttaatgttgtcattaagctaaagtctaggatgatagttatcttacataagccaaaatataattcataatggcaaaaatagattgctcagtattgtttttgttttttcctgcttcatcctgagttctacttgttttgttgatcatggtgttttaaacagttagattgttggggctaggatccaatacttgtccagtggataagtgggattccttgtttcctccggtaatgccaagacaaccctccactcccccctaagataatggcattttttt

SEQ ID NO: 31723 - DNA, 404 bp, Glycine max
catttaatggagttaaagccaacactatttgctggtgtcccacgggttttcgaaaaagtctatgaagggatcaagaaagcagtggaagaactcaatccagtgaggagaacagtttttggcatgctctacaactacaaacttggttggatgaaaaaaggatacaaacatagacaagcatcacgtttagccgatttattagccttcagaaaggtcaaagctaggcttgggggtcgtgttcgactaataatatctggtggggcagccttgagcccagcggtggaagaattcttgcgtgtcactacttgtgcctttgtatgccaaggctatggtctgacagtaacatgtggaccaactactcttggctttcccgacgaaatgtgcatgcttggtaccgttggtgctgt

SEQ ID NO: 31724 - DNA, 263 bp, Glycine max
gaggcaaaaggaaaggaaagggctcaggctgagaatgaagcacttgaccgaatcaggcaactgtacaagaaagaagatgcaagaaaacagagtaggcaagtaaggacatgcactaaagttccaccttcaagtaaaagaagattttggggagataatggacctggatacaatgtatcaaatgtgaagagtaacataatgaagaaggcaaagatagaatttctgaagagtcatgaggtaaaaaatcttgcagcaatgaagaataa

SEQ ID NO: 31725 - DNA, 263 bp, Glycine max
ggactgaaagaaggagacaaaaatagaggaggaaaaattagaattgtaagcacacagtttccacctaactccaccgctcaattagttggttacaatatctgccaccaacctaaatgagtcgctcattgaaagctttcaacaggcaccttactcccctccctacttcatcaacgcacagcttcttcttcttctcatgccttcatagcttcctctcctctccctctttttccacatcttgtttcctaccccagcttctctttctc

SEQ ID NO: 31726 - DNA, 499 bp, Glycine max
gagaaatcagagggtatcacttctcctgaagaagaggtttacaacccctaattgggttaagcataaggaaccaagagatgttcatatgcttgttgatctattgcttcaagagcttgaaattatagttaacgaagtgaagcagattttgcctcaaggtagacgtaagcaccacaggactgatagtaatggaagtagtgcttcatcaaggagcaatcccttgcgggaggagaaactggttaggtcaaatactcaaagggcaaggagccagcttttggaaacgcatcttgcaaaattgtttaagcagaaagttgaaattttcacaaaagtagaatatacacaggagtctgttgttacaactttagttaaattgggccttaaaagttttcaagaatttgtccgactccagacttttaaccgaagtggattccagcaaattcaattggatatccagttcgtaaggatcccgttaagagaaatagttgaagatgaagctgcaatc

SEQ ID NO: 31727 - DNA, 542 bp, Glycine max
catttggtgagaacatggtgatgtctgagctagtggagtgctgcaaggagttggatgaagtgcatcatgctttggccgggcataagaaggaggcagcatggcggttaagcagggtggagctgcagttggagtctgagaaggccgggcgaaggagggagaagatggaggaaatcgaagcgaaaatcaaagctctgagggaggagcaaacggctgcattggatagaattgaagcagaatatagggagcagttggcagggttgagaagagatgcagaaagcaaggagcagaagttggctgaacaatgggctgcaaaacacttgcgccttactaagtttctagaacaggtagggtgcagatcaaggctcactgaaccaaatggaagatagagtgacaccattcacaattgggaaatctagtttgcttttacttattatgtcttgaatttatatgatatgaactttatagtcatagtagttttgttcctgtcattattctgaaaaatgttgttacatatggttattaatatccctatcttttcatac

SEQ ID NO: 31728 - DNA, 255 bp, Glycine max
atcgagcgaatcggctcacggctcgagttttttctcaatccagactttctggaatgctcaaacatttcttcatcaaggtgattcaaagtcatgaattcaattattgcaactcagaacaatgcaacagcaaaaaggtttcccactgaggaaactgttgttgatggggaagacataattagcacgttgcatgaaagcattcttggtcacattctgtctttccttccaacaatggaatcagtccacactagtgtgtta

SEQ ID NO: 31729 - DNA, 266 bp, Glycine max
aatccccccatatgggcctttcaattggcacccatctattccaagccaaggcctgcatatcccttgacaaatcccttcttttgagcatcaaggcaaaaaaaaagccttttaaattgagtgttcatattagggttaggtactcgttccacatttagcttaacaatgcttcctttattttcattctctactgcaacaatccatggtggcaagtcattgtaagagacaacatgtacaccctttgtggtttgttggacctttctcttagc

SEQ ID NO: 31730 - DNA, 291 bp, Glycine max
gacagcagagcaaattaactacacattcctctgttttggctcccctgttaaaccaagaaacttccaatggcaccccatgcatcttcttttgctcttgttcttgtcatttttctctttgttgaaatgcacttccacggtgccactgctgactatggcggctggcagggtggtcatgctaccttctatggtggtggtgatgcttctggcacaatgggaggtgcatgtggctatgggaatttgtacagtcagggatatggaaccaacactgcagctctaagcactgctttgttc

SEQ ID NO: 31731 - DNA, 169 bp, Glycine max
cggctgcgagattacaacagatgggtcactccaatggtcatgcaatggcatggaagttgttgagagcaggttactactggatgtcgatggagacagattgttgcaaacacgcaaggtaatgccacaaatgccagatttatgctgacagaaatcatgtaccaccaactac

SEQ ID NO: 31732 - DNA, 259 bp, Glycine max
ggaggtcgcatgtttaacgaggtgggtttcttgtctgcattcatataggcttaaaaagactgatctattggttgggcaaatatctcagttcttccactttttcttaggatggaagactcgtgggagaattggatttcttctttggaaatgggtgaagacaacaattccaatggtcaatcttacactaactcaatggatcgggataagcttctcatgggattgacctagagccaccagatttccccattcatcaaagtga

SEQ ID NO: 31733 - DNA, 274 bp, Glycine max
ccatcttcagggtcaaacttctcttctctttagctagctagctgcagagattaacaacgtggagatagaatcatcagcagcggccaccgataacaacaattggggtggtcgtggtgttgagagagagatgccatacagtggctttgacagaggaaccttcttggcttggcaagatctgagagtggtgattcctaactttggaaagggaccaaccaagaggttgcttaatggactcaatggctatgctgagcctggtagaatcatggctattatg

SEQ ID NO: 31734 - DNA, 283 bp, Glycine max
gcggtgtgttcagacggtgatgaaaagtgaagtggctcaagctcatgctgtggtgcttaagctaaagggcacaattccacaagggaaacatagttctgatgctatgagaatcgagcctgcgtgtttggacaacaatggtcaggtgttttggaagttgaaaagttataatagtgaatgtgctgttctgttgcaagatatcaaaattaaggatgaaactgctactgcacctgctgaaaaatggtttgtttatggtcctgaaaagaaggatgaggttgataagtac

SEQ ID NO: 31735 - DNA, 288 bp, Glycine max
gaatcccaagttgtgtatctgtttgcttagagtggtggtggtatgagttattggtactcctttcagggcttctaaccaatgcagctgatgcagtagccaccgctggaataataattatggtcactttacctatctacaattttcattttgctttgagcttggccgtttcaacaaaggtagggaacaatcttggagctaacgggcctaacaaggcaaagacatcatcattcgtcatcattcactgtcgactactttgtgctttcttaacagaattgtggctactcttaa

SEQ ID NO: 31736 - DNA, 358 bp, Glycine max
ctcgagccgctcgagccgctcacacccttcataagctttgtgtttttttcgtagaaacaaacatctgatacatgacgatgatgagcagcagcaacaacaacgttggagaatttggagacaccactctgaccaaggtttttgttgggggcttagcttgggagactccgaaggatgcccttaaagaccactttgagaagtatggtcagatccttgaagctgtcatcatttccgataagcacactggcaaatccaaaggctatggctttgtgactttcaaggaggctgaggctgccatgatggcttgtgtagaattcaacaactctcattatcaatggccgtcgagcgaattgcaatcttg

SEQ ID NO: 31737 - DNA, 405 bp, Glycine max
ggcaagaagcagaactctctccgcatagccggaataccaggagctatggaatcaatatcatcgcttctacaaactaataggagtgtgattcctgcagctgatgagattggtgaaaataaacttttatttgatcaccaaaattacgggttctggacatttaaccacttgggactcctcatactgaaaaaacttgcacgtgaccttgacaactgtggaaagattggaaacacaaggggcctccttccaaagatcatagacttcacacatgctgaagagtggttgctaaagagtgaaaatgttactccatcccaagttctgacactgaagagatctctgcaactggtgaagatgctggctagcacagttggcaccactgggaaacatcttcgaagagagattgcggag

SEQ ID NO: 31738 - DNA, 236 bp, Glycine max
acttcacctcatcagctagaatgctctctttttttgcacaccaaatcaaggtgcacgcgcttcttcattcattggtgatgatatcaaaatcacaggaattgcatcaccaccgagatcctcagtcctttctttgcttcttcagcccaaatctctctctgagagcatcttcacggaggacagcggcaacctcatgaagctgaatgggattttcatcaactcgtttgaagaactagaag

SEQ ID NO: 31739 - DNA, 280 bp, Glycine max
ttacaatgaggaaaaaggaagggcttgctgattatcgatattttccagaaccagaccttccagcagtaatcctttctcaagaatatgttgatggtataaaaaattctttaccagagcttccagaaattaagcggagaagatatgagcagatgggcttaagcatgcaagatgttcttttcctggctaatgataaaaatattgcagaattttttgatgcaactcttgcaaaaggtgctgacccaaagctggttgccaactggataatgagtgatattgctgc

SEQ ID NO: 31740 - DNA, 254 bp, Glycine max
acaatattccattttgatatgtaaatgtaaatgtgagtttcttagaaaatgttttcgctatagttcttaattagatattatttttccatgtgctatgcaaaaatggtttaaggaaaagttcttgtagcatctcttcgtgtgcatatcacatcatgtcaataaacacaacttccaatattctatagtggtcactcttcattttgactgttatgttatcataaccaaatattttctcttcttttatattatttact

SEQ ID NO: 31741 - DNA, 601 bp, Glycine max
tggcaaccttcttctacaaaccatgtaattatgagttgtttgtgaagcaatctttgaacatggaaatggctattgtcatggcaagggattctggagtggattggataattcatctggatactgatgagctgatgcatccagcaggaacgcaagagtattctttaagacagttgttagcagatgtgcctggaaatgttgatatggtcatttttccaattcaggaaagcagtgtggagcgagatgatatcaaggagcctttcagtgaggtttcaatgttcaagaagaactatgaccatcttcctaaggatgtatattttggaaattacaaagaagcaactcgtggaaatcctaactatttccttacttacggaaatgggaaagcagctgccagaattcaggatcatctccgtcctaatggtgcccacagatggcacaactatatgaaggcacctaagtatgttgatcctgcctgtcattaatttatgagtgtgcattagataatacatgtgcatatatttgcatttttattaccaattattttattgtgaagagtaggtcttgctggatctgctattctgcttgtattttggagtttaataga

SEQ ID NO: 31742 - DNA, 454 bp, Glycine max
cattagaaaaaaattgttttcggcggaataacaaaagaaaagaaaagaaaaacggattaggagaggaaaaaaaaaaaaagcttgtgcgagagaaatgttagaaccttgtttctgatttttttttcctcttcgattttgatttttttttctgttgtagtttttgttgttgttgctctctctattttcgaaacgagattggagctctgactttgtggtttttgaattttattttttggattgttttttccaaattgctgcatcgagcttgcaaatggaggtttggttcctgtcagtgaagctctgaaggatattggtatgtatggaaagttatacctagtgctgagacagaagctttgagggttctttgatgcaggaacaggtttgtgtttgcagaaattgatagttcaagtgcttgggatgtggagaatccatgattcacctggggaggatatca

SEQ ID NO: 31743 - DNA, 682 bp, Glycine max
cggacgcgtgggctctgccagtcaagtgttttccattaaaaatttgttttccgcggaataacaaaagaaaagaatagaaaaaacggattaggagagaaaaaaaaaaaaaaggaaaagctttgagagaaatgttagaaccttttttctgatttttttttcctttgattttgatttttttttctgttgtagtttgttgttttttgctctctattttcgaaacgagattggagctctgactattgtggtttttgaatttttttttggattgttttttccaagttgctgcatcgcgcttgcaaatggaggtttggttcctgtcagtgaagctctgaaggtttgtttcatagtcctatgattcttctttttttttttttttttgaatttctaattctctcttgctgtgattccattggaaaaaaaaaaaacggttaaaacgcgattttagatcgtgttttctggaactttttttgttctgtatggtttagataattagaaacttcattggtatatttgtacgagacatttaactgttttacgtttgactctgttttcattccctaatttctgaagtctgtgctaatacatgaaaaattatctatgaagcgtctcagcataatcaattaattataattcttgcatcaaatttatagtaattgtatttatttccctagaagattgaaat

SEQ ID NO: 31744 - DNA, 243 bp, Glycine max
gtccccaaataaagatccaaacagaaacaggaactttcttcaccacaccaaagcaaaggagctctaaacaatttatgaacacctgttttcttccagggggcattaccccaaaatgtaaaccttcatgaaagtcacagaaaaaatgaatttacatatgcagtttaacaaatattataggaggagatccgaacccattaggccaagggttaacctaaactccattcgaaggggtgtatctctcat

SEQ ID NO: 31745 - DNA, 252 bp, Glycine max
ggcagtgttgtagatgttgatcacttgatgatgctgtccctgttgccggaaacgaaatgggtttgattcctaacccgaaccctggccctaatgctaaacccaagcaacctgcgttttgcttaaaatggccatggaatgatgcaaaccctagccctagccctagcccctgcaagtttgagggtcctttgccattgaaatctctccaaaaccttggcttaatcgctttcaattttgcgagctcctgttcgagtc

SEQ ID NO: 31746 - DNA, 637 bp, Glycine max
ggcaaggctacaagcagaagcaaaggcagctgaagatgctcgaaagcaggcagaggaagaagctgctgcagaagccagacgaaaaagggagcttgagagagaagctgcacggcaagcattgctccagatggaaaagactgttgaaatcaatgagaattctcgaattcttgaagatttggaactgcttagagctgtacccactgagcaattgccaagttctgtagatgagacgagtcctgcacactctcaggatggtctgggtagtttcaagtttgggagtagtaaccccttggaacaactaggattatatatcaaagccgccgatgaagaggaggaaggagagccaccttgtattccaaatcctgtaaatgatgtagaagagggtgagattgattaaaagttatgcacatattgtatgataaattgaggatcgaagtatacttaatcttgatcccaaaaaagttcccaaattaatgcattaacataagtgggacgaagcatattttcttatggaagcattcagcttctagaagggtaatatattcagttttgggctgtgatggcaatagaggaacagtttgaacagaaactaagctatgtttggggctgtttgcaatgaaaatagaagtaatacatc

SEQ ID NO: 31747 - DNA, 303 bp, Glycine max
ggatcatatatatatagtaacccaaactcttttgtctcattagcttttctacctagctacatcgatcaagatggaagctaagactaagccatggttggctctatctctatttctattggctacaaattgcatgcaacaatgtgtccatggagaatcgcaagtgccttgcatgttcgtccttggggactctctatctgacaatggaaataacaacaaccttcaaacaaatgcaagttccaattacagaccatatggcatcgactacccagcaagggcccacgggaagatttaccaatggaaaaa

SEQ ID NO: 31748 - DNA, 308 bp, Glycine max
tgttgattcttttggtttaatctttggtacttaactctttttgttgggtattgtggctgcgtttcaattgtagattgctaatgagaacagtggaggttttcctggtgctaaaaaagttcggaatcatggtctagatgtagaacaaaagagtgaaatgcgagttccgagtctggtagctaggttgatgggtctcgaatctattccggcagctcagcgagacaagtccaagaaagccttgtgtgctgatgggaagaaggatctttgggtgaccattgtgagttggatagcaaagcgtggatttggaaatg

SEQ ID NO: 31749 - DNA, 422 bp, Glycine max
ctcgagccgctcgagccgaatcggctcgagtgtgatttggcctcggctttgcatgccatgggctaggacgagagggctattgaggtgtttcagaaggctattgatttgaagcctggtcatgtggatgcactttataatttaggtgggttgtatatggatctgggtaggtttcagagggcttctgagatgtatactagggttttggctgtgtggccaaaccattggcgagccctgctgaacaaggcggtgtcgctgctgggagctggggagactgaagaggccaaaagagctttgaaggaagcattgaaaatgacgaatagggttgagctgcacgatgcaatatctcatttgaagcagctgcagaaaaagaagaccaaacctagtaatgggggtgctccggggaggcacctttgttattgttg

SEQ ID NO: 31750 - DNA, 309 bp, Glycine max
catgagagtacattgtctaagcagagagaggacttgcgggaatgggaaaagaaactacaggagggtgaagagaggctggccaagggtcaaagaattatcaatgaaagagagcaaagggctaatgagaatgacagactatgcagacagaaagagaaggaccttgaagaggcacagaagaagattgatgaaactaatataacactgagaaataaagaagatgatgttaacaataggattgtgaatattactctaaaagagaaggaatatgattctctgagaacaaacttggatctcaaagagaaggagtta

SEQ ID NO: 31751 - DNA, 261 bp, Glycine max
gatgctgagacacaacgctatgataaggtgtgtcattgaggcatgggtttctatattatttgtttaatgttttgaacatgttactttatgttgttccattacttaacttgttttccttttgacaaaaacttgggcggccttgttttgggctgaagatattttcatacccctgtttgataattttttaatttgatgattaacatggatgtgaaccttttacccacataagccattttatacttagaaaataaaatctctttt

SEQ ID NO: 31752 - DNA, 276 bp, Glycine max
attgggaagcagagaaagaaaaggaggaaatggaggaagcactttttaagacggtgaagaagagcaaaggtgaaattatgggttcttctccggcaacatattgtgttaccggagcaacagggtatattggttcatggcttgtggaggctcttcttgaaagagggtacactgttcatgctactgttagagatcctgaaaagtcactacacctgttgtcattgtggacaagaggtgaccgattgagaattttcaaggcggatttgaatgaagaaagaa

SEQ ID NO: 31753 - DNA, 345 bp, Glycine max
gcaaatagaaataagaaagagtataagtatgcaaatgaatctgtcttgattctttttttatacttaatgaaattacttaatgaattaatgaaatgggggggtaaaacagaaatcttattattcctacctgttagtaacattcatttacttaaaacttccgaggatgtttccggatgtgttgtttatgcttaatcatttccctattttactaaaaatcatataaaaaaaaactttttagatgttctaatagaaaggattcttgtttttcgtcaatggtgttagccctgaatcctttttttgactctctaacagtaattccgctattattatagtctttttagtgaa

SEQ ID NO: 31754 - DNA, 383 bp, Glycine max
acagaagtaaatccaaactcaataaaatggcttcaaattccagcaccgacgacgctggctaccccagcgggaccatcgtcgttttggttcaagaaaaccggtcctttgaccacatgctcgggtggatgaagtccctcgatccgaaaatcaacggtatcaccgggtcagagtctaacccgatttccacatccaatcccaactcgaatctggttcaattctcggaccagtcggtctatgttgacccggacccaggtcactcgatccaagacatttacgagcaaatcttcggagagccttggagcgaagcctcaacggcaaagaaattgccaccgaccatgcaaggctttgcccaaaatgccgggaggcaagcagtgccaaagaat

SEQ ID NO: 31755 - DNA, 239 bp, Glycine max
ggtgttaagacatgagatacaagttcactgttgctgaataactcagacaacagtaatggcaacgtttttctgcctatgcaagtttgctacgttcagcaacattagctcacgaaccttctcttcgttcttaccctccaaaacttctatctaccacagcttgtcctcttcttctgcaacattctcattcacatgggacgatgcctttcgcatatctcaacctcaaactgccacacaacata

SEQ ID NO: 31756 - DNA, 657 bp, Glycine max
  unsure (1)..(657): unsure at all n locations
acgagatttgattaagactggagatagagaagacgtggaactagtaagctgcaataccaaagggttcattgtttcttttggttccttggtaggatttctgccataccgtaatcttgcttccaagtggaagttcttagcttttgagtcatggttaaaacagaagggcttagatccatcaatatacaagcaaaactcaggcactattaccagttttgatgctgaaattaagaacttgtctcctgattctcctccatctctggagattgatggtaaagttgaagatagaatttcaccagatatgaaattggaagatctgctaaggatttatgatcaagagaaacttaagttcttatcttcatttgttgggcagaaaattaaagcaaatgtgttagtggcagacagaaaaatgagaaagctcatattctctntaagaccgaaagagaaggaagaattagttgagaagaagcgaaatctcatggctagacttcaagttggggatatagtgtaatgctgtgtccagaaaattgcttactttgggatttttgttgaggttgaaggagtttctgcattaattcatcagtctgaattatcgtgggatgccactttgaacccagcatcatattttcagattggtcaggttctggaggcaaaagttca

SEQ ID NO: 31757 - DNA, 282 bp, Glycine max
tcagtgtgtgcctgtgtgtttcgatcatacgtgtgtgtgtgtgtgtcattagggtttgtgtgtgtgtgtgtgtctcatgaccaatttttctcactggcaattcagtggcagtgtattgcttaggcttccgtcaaaatgaaaggaaaatcaatgagtctgacagaacaacttcagtcttcactcttcactagttgaacacaaataaaaaaaaattaaactacttccaggataaataaaaggttcagaagcagcagacctagattgtctaagctattttataat

SEQ ID NO: 31758 - DNA, 464 bp, Glycine max
gatccttgaatagatcacataacatggcatcattggcatgcaacacgtttattgttagcagcacgttaagatcagttgttactcgtgcggaaccacctaaacctggtcctcttttcgatcttagttcattcaatcgccacagctttccggcaggcttcactttcggggcatcatcttccgcgtaccagtttgaaggtgcggcaaaagaatatggtagaggaccaagtatatgggatactttcatcaatcaacatccaggtaagatagcagatggaacgaatggagatcgcgcacttgaccaatatcaccgctacaaggaagacgttcagatcatgaaaggtatgaatttggatgcatataggttctctatctcttggtcaagaatcctcccaaatggaaaacttagtggaggtataaatcgagaaggaataaattattacaacaatctcatccatgaattgcag

SEQ ID NO: 31759 - DNA, 238 bp, Glycine max
atagcagaaaataataatagtgttgcttttttcctattttcattgttcaccccgtgacgcaccattcagcaacggcaaccattgttactattacatggaataaattcaccctaaagtcggcgacgtatttgaaatttttggtaatgctaaatcacacattatacctcttctcgtaaaatacacgcaactaagtttgatagtagttgatactacttttatcagcaatttgacaacgagt

SEQ ID NO: 31760 - DNA, 260 bp, Glycine max
ctcccactcttcctatttgattttactctatttcagttgagagaaaaagtgtcaaaaataaattctatgatgtcatgaagtcctgtttgcttaatctgtatataattatatatgatgttctccttcacgagataactttgtaaaggttctttaacctttcttctgttatgaaagcaattgaatctcctgaaatttatgttaattgcaactcatttttagggatgatgatcatctatagtcacaacatgtgtgaaaggttc

SEQ ID NO: 31761 - DNA, 456 bp, Glycine max
acgaggagagagagagagagagagagagagagagagagagagagattgtgagaccacttgcttcagagagtgcaaaattcaggttcaaaccattatcagaagaaatcatgagcagccggatattatacatctcccaagaagagggactctgtcttgatgctgaggctctttcaaccctgagttctatttctcatggagatcctcggtcgggcaatcacatacttgcagtctgcagctcgcttatttggatcttcaatttcttcagagaatctgatttctgtgtctggggttgttccggcaaaggttgtggaggaacttcttaaagcttgcaaaagtggtaattttgatttggcaaacaaggaagtcaacaatttcattgcagacggatatccagcttctcagatgcttactcagttatttgagtccattgttgaagacaatgacttatctgatgag

SEQ ID NO: 31762 - DNA, 338 bp, Glycine max
gttttagaagctaaagctaagcaagctgctgagaaggaaaagagaaaaactgaaaaggatctggaggatgagaatggtggggcgggtgtatactcaatgaacttgaggaagaattacattttagccgatgatgaatggaaagaggatgtgctgccagaaattttggatggacacaatgtgtatgatttcattgatcctgatattctgcatagggttgaagagttggaaagagaagaagggatgagacaggaagaagctgaggatggtgattttgagattgatggaactgaattgacgcccgagcagcaagcagctttagctgagattaggaaaaagaa

SEQ ID NO: 31763 - DNA, 252 bp, Glycine max
gttgcattgaattcctttccatttgcagcaatctccattgttctcatcctcattccatgtagacagcatgccagcatcatccaaaacgccttccttgaacttgaggagtgcttgtctttctctctctatgcacttaacttctgcaagtttacctggccagttgaatcccagagtagattctgaggtatgcaataaaaccagtagtagtacattaaattttttgagaaaataggttctcattgtaatgatggg

SEQ ID NO: 31764 - DNA, 339 bp, Glycine max
gccgaggttgatgtcgttggagttgggacgtccgagggcaaatattggtcatggggatcagaaagagtttgttccacaaaagttgccatcggtgcatcttggtgttgaagaaacgggaacagtgaattatgagattgctaatttaatccggtggaggaaaacttttggaaatgttgtgcttatcatgcattgcaatgggccggtggaacgaactgcccttgaatggaggttgctctatgggaggatattcagatctgttgttattttgtcagaaaagaaggatgtagatcttgttgtagaggagggtcatttggactacgcatacaggtacttgcccaa

SEQ ID NO: 31765 - DNA, 276 bp, Glycine max
agccggcactgaatatgaaacagtcaaaagacaaatagacgaattgagggagctgttgtcaaattagtagatactaatgatcaactgacaaaggatcttgaagagagcgccccgtctctgaacaggcagacttcggccgagttggaaaagagtagacacatccagagaaaaagagtaaccgagcaggcgcgaaaaggttctgaacagataggaaggttgcagtttgaggtgcagaacatccaatacactttgctgaaattggctgatgagagcaaa

SEQ ID NO: 31766 - DNA, 575 bp, Glycine max
cggggcagcgcacgccatgtggcaatggagaagctcgcttcttcttctactgcaactgttgttcccactcaacacttcctttttcaatttcaccaacattctcttttcttcttccccaaaactgcgttttccaccttccaccggaaccgcaccgaaccgctctcactgccatgttgcaaaagcagacaccgtcgcctagaagcattatccagcaaacaggatcaactctgggtcagcgaagaagaattggagctagaattggaagaaggagaagattcgtatttggacggtgatgatgacgacgacgactcgtcgtttttgtcgctcagcgacaagcccgacaggaacatggccatgctcgacgattacgagggcgaggagctcgactttgattacggtcccgaccaccgaagcgggtatgtggcgttacttgggaagccaaatgttgggaagagtacactggcgaaccaaatgctagggcaaaagttgtcaatagttacagataaacctcaaacgacgaggcatcggattctgtgtatatgttctggcacggattatcagatgatactttatga

SEQ ID NO: 31767 - DNA, 307 bp, Glycine max
attattcattacttaatactgctaacaaccatagacacaaaagtgcatatacttcacaaccatgggaaccgagactccgacgagtggaaatcctattgcttcagggggagaaaaggttgctttcccagcagcagagattgataaaagaacagcggagcagaaggcaattgatgattggcttcccataacttcttcaaggaacgcaaaatggtggtactcagcttttcacaacgtcactgccatggttggagctggtgttctaagccttccttctgccatggcaagtcttggatggggtcctggggtg

SEQ ID NO: 31768 - DNA, 245 bp, Glycine max
gagagaagggaagatgatgatggctcattctcgttatcttcttcacattccatcgttatcatctttatctgcatctctcacttccccgcctcgctcgcttcttcctgttcggacattacaacctaagacgctgtcgtgtcgtgtcccttcatttccaacacgcaccccgtggcacttcaagcctcttcattttgctctctctggggcactctcacttgggttattattcggaggaattggcgtgg

SEQ ID NO: 31769 - DNA, 257 bp, Glycine max
ggaataccatgcagagtggattaatatctggaaaaacaaacacaacgatgttttagctgggcaatgggttgaaggaatagtgacacatacaccagtgtacatgggatggtataggaaaaacactactttgttcttgtctgttgcacaacaacttcatgatccacgcacaacaattacccataatgctgcagggatcactgttgaccaaacacttttcgaaattccacatcctcagtcaatgtaatgtactccttcac

SEQ ID NO: 31770 - DNA, 478 bp, Glycine max
ttcacgcgtccgttttgctacaactaccaaatctaccttcaggcccttcacttattaactagaaagcttgaaactttgcagacaattctgagacccagttgccggaagtggcggttcccagtgggaatggaggtggagactgaaaaatcagggtctgatgggaagggttggagtttttgtagaatgccattttggcaaacaactcacactccttcttcttctactacttccatgtcttacatgcacaatgttcatccgcaaactcagaataactctcaatctgttgatagatccagtcatcattccttcaacaacagtttcatctgtggccaagtctctgctccctacaaagaggaggctccgccttaatccttccaacaagctctactttccatatgaacctggtaagcaagttaggagtgcaatcgcaattaaaaacacttgcaagtctcatgtagctttcaagtttcaaacaact

SEQ ID NO: 31771 - DNA, 244 bp, Glycine max
atctcccttccctgatccttaaatgttttagtcttcttttttattctaaaatatgttacgtttaacactctaatgacaacaccaaaacgtaaatatcccaaagccaattctctaattaaagagattaatttccaggattgtatatattgatcgacaatattattaagaaataagtggctaagttctgtccgaacttcatcttcatcaggcatattgtggggtactagcccactggctcctgatt

SEQ ID NO: 31772 - DNA, 685 bp, Glycine max
gagaataatagccatcctgtacaacttgctagccaatcagcttccaggattattcgacatttgtgccttgatccactaaccaatgaattagaaagactgcgtatactgacagaccaaaatatgaaagactatgagaacaagaaatggcagttgaaatgtgattttgagaaggaactcgaggaactttacaggaagtatgacattaaacgtaaggagattgaggttgaatttcagaatataaggaagaacctggatacacgaaataaaatagtttttgtaaataagatattggctgaggctttcagggctaaatccatggatcttaaagtatctggtgcatcaagaatgcagcaagatgcaagtgttccaatgcaattatttcagcttgcaagtcagcaaaatgccactcagccctgtctggttggtgcatcatcttgtgggcctcctgcagccagcgtgcagagttcctacgccacaactaccactcagactatggtatcaccaatacaggccacttacagtacaccaggaactttctccagtgtttctccaagactacctcatatcaactccctctcttcacccttgggaaatgttcaaactgctggggagatacgtgcccctgcaccacatctccagccttatagacccccaacatccatcccagcctccagtccatgtacag

SEQ ID NO: 31773 - DNA, 339 bp, Glycine max
ggcttaagactgtgtgcaaatcagaagaaatgatattttgataaatgagattgtctatgctaacaaagatagtgtatgtaatatccacttcccttagtattatgttaatatttatcggtgctctgtcactttctgatatagtagtaggttagtgctttgagattgttatagagactcttagtcttttgcagcgacccaattatgtagataaatatgtggccttgcgactggatcatcagggaagtcaccaaggctttcttttcaacatgattcaatgtattgctgacctgggaaatgggtttttagagacctcaatgtatatatattttagtttctctt

SEQ ID NO: 31774 - DNA, 257 bp, Glycine max
catcatgaggttgttgcagatttggtgcagacaagctttcttttttctatccccatggatggtccaatgtccttctcaactcaacatgtatctgtgcagtgggttctccgctttgaatttttcacaactccaaagcatgtagattggaaaaagtatgagcatcctcttctaattgagggaagggaaaaaacggaatgggttcttccaattactgtacatgctccaccaccaagaggagctcctgcttctggcacaag

SEQ ID NO: 31775 - DNA, 364 bp, Glycine max
gactgcacaggtgagggaccaaaccaactacctcctcagcccccagtcctcttctctcctatttcccatattttatttgccaatcacacactaacccctaagagagagagacacagatactctctgaacactaataaagagagagagagagaggctggtacttcccaaaagaaaagctcaacctccctcgtagtagctttcatttgaagaaactacataactctctctacacctttttttaccttattgttctctctctctcttcttcccttttatttacattgcttattcttcttcttgttgctcactaactaacaccaacttcacaagaaaagacttaaccatggattttgacctcgaaaac

SEQ ID NO: 31776 - DNA, 490 bp, Glycine max
atgcatcaaatgagcatgaacctcgtaatgtgtcagatgaagtgcaacattcattgggcaactcaagttcaccagcggagtccccaagagtaaagattgaggaggatcagggtgaagcttctaatccttctgataaaagtttcaataccttggaaacgaagcaaaatcctgaggcttctatggaagaaaagagttcatctgaacagccatcagattctcaaccaaagcccgatcatcacaaaagaaatcaagatgctctggctgcagcaaaagagcgctttctggcacgtaagaaagcaaaggaacaatgaaattttccctgcctttgttcagatgtttggtggttcatttggtctttagtttttcgtccttgatctaatatccatgaaccttgaatgccaaagagctttatctgttgaaatgaatgaagtgacatacgttattagtatatgatatttacttcgtgccaattcatgatgcacttcatttg

SEQ ID NO: 31777 - DNA, 382 bp, Glycine max
tctcgagcgaatcggctcaggagaagacgacagaaaggaagaaattgctgaggagttggagaacactatgaagctgatagaagaactcacaaatagcttagagaaggtagagaaagatgagcttgacgcaaatatagaggttgtacatgtgattctcaaaattgaagagatggagcaagacattgctagtgaagccagtattgaagccaaggcagaacttgaggctaagaaatccatgcttactgaagcgctcttcgagtttgaattcgctgaaagagaactggactcagtgcgtaaggagtatgcttctatggcgagctgaagggatatagcactcaacactgcagaagagactattgcatcatccacgcacattgatagg

SEQ ID NO: 31778 - DNA, 322 bp, Glycine max
ggaacaacaagcaacaacttcaccattcccaaagcctgaaaggtttggactttgaagactctgttccctcttttatgcgggcatcaccaacaacacccttagcggttcttgcaacaaagtagcaatggcttcctgttacttcaatcctatccctactagttctcatctcattttggctgacttatctagacagttcaagattcccaagcttcttcacaggaaaaagaggtttgatggctcacctagatcctcaaaaatcgctgcattttatggcttgacgacccctccttatgaacttgatgccttagagccttatatgagc

SEQ ID NO: 31779 - DNA, 261 bp, Glycine max
ctcgagccgaagatgaagaaaaaaaaggagaaagaaaaaaaaaggaagcgagttaatgacatgaagaagcagcagcaagagcatgagaagatactggccaagaaggaagaaataaaaatacaacgccgagctacgggtgaagtcctagaaaataagaaaattatggatgaaagagaaaattataagaatttgccagtgcaagacaaaagagaatgcaatatggagaaaatttctgaaaccgaaccgttggccatgagggat

SEQ ID NO: 31780 - DNA, 405 bp, Glycine max
tccgggtagaagtctagccgaatcggctcgagcggctcgaggttgatggtagtcaacgacgaaggcctgttgctcataggctgagttttgagcagatggttgttccctatggagatccaaatgatccacattacagaaaaaacgcttttgatgctggggaagatggattgggaaaaaatgcacattccctcaagaagggatgtgattgtttgggatacatcaagtattttgatgctcacttcacaaatttcactggtggggtggaaacaattgataattgtgtatgtttgcatgaagaggatcatggaatgctctggaaacatcaagactggagaactgggctagcagaagtccgaagatctagaagacttacagtttctttcatatgtactggtgccaactatg

SEQ ID NO: 31781 - DNA, 320 bp, Glycine max
gataacaacattgtcctacagtttccatgtatctggcaaccattatcgttcaactcttcactcttcttgtgtccaagtaatcatttcacatcccacaacgttgtcttccaacaacaacaagagaaagaagaagaaaacttcaatttttgacagccaagtttgtttccagtaacgacggacaacaacctttcacttttactatgatgagagaaaaccacgtctgaagagtttgagcagcaaagagaacttagaatgatggaggatttttggagcatgttttgtggggatcgtgattgtcctgggaccgggggaaagacttt

SEQ ID NO: 31782 - DNA, 406 bp, Glycine max
atttggtttagaatacatgacaaaatacattgcatgtaagacaggattgagtgctggatggagacagttttctgctgtgcacaaattgcatgagggtgatgtggttgtcttccaattagtggaacctaccaaatttaaggtttacataataagagctaataatacgagggaactagatggagcctttctgagtcttgatagttgcataaaaccaaaaatgggaggcaatgataatgcagatagtgatgatgtggcatagtaatacctccaagggaaaacatggtaaatctgtccaacaagatgtccaaacgaaaaagaaggccagcgcgtcaagattgagacctaaggcaaggccatcagtcgaacaatctgaaaatgatagtgaggaagctctctcagaagttat

SEQ ID NO: 31783 - DNA, 267 bp, Glycine max
gagagaggcagagtggactgacttgtgtgcttcagtttataggcacaccacgccacaacaccgatctcttctttaacggttacttttgtgttctgagaaaggaaaaaggaaataggaaataaaaatagagcctctctgatcagtgagtgatgggagagtttgggtcacccttgctgtgctctgctcagatggattacaacaatgaccctggtgctagggagccgtgggattggcatgggaagaatattagtctcggaaagacggccg

SEQ ID NO: 31784 - DNA, 509 bp, Glycine max
atattgtttaaacaagatcatacacagaagatttttgggtgggaggagaacaagatcagatatgcatgcacaatataaaaataaccccaattacccaagacataataacatttatcaaaaaaagtagtaaacttaccagcatcaaattgatgctgtagagtccagaagacagaaagaaaatacattagtaatcagctgcaagtaaatcaacaaccaattttccaataacagaggcatgttgcaagaaggtaatccataaaatagaaatgaaagggagggcaggaggaatacacatacaagataattaggatatactgttggaatatctttttttaatagaaaaaaatagatagaaaagaggaaaaatttgaccaagggaagaggaaattatccatacaacaaatacaaaggaacacaagggacaacacctatagaatgcaccaagattacctagtacctagtctctacgctttcttaagtagtttttcacattacatatttagagaaac

SEQ ID NO: 31785 - DNA, 375 bp, Glycine max
aggaaatcacaagggtttggtgttgggggccaacaatacgacctgcgtctgtgtaattgtaggtgccaaacatatggttgccgagatgaatgtccgtgaattttccatctctaagaatgaccgtacttcaaattccaattccaaatttcttaccttgcccaccattttgactcttggccgtgtcgccgctgtacctcttcttgttgccaccttctacatggatggttggcgaggaacagttgttactacaagtatcttcactgctgcagcagttacagattggcttgatggttatattgctcgtaagatgaaaatgaaatctacatttggtgcctttttagatccagtagctgacaagcttatggtttctgccac

SEQ ID NO: 31786 - DNA, 254 bp, Glycine max
gggagaggcaaagcgaacaaacggctactctcctcccacttgctatcctcgaaattaacgaaacgtagttgaagaacccacagaatcagaaccccaacactgccttatgctttccctataaatacacactgtcccttcctctcgtcatttcaaatacaaactcacaacacactttgtacactccgtccctcttccctgtctctcaaatggcttccctgacgcaaactttcatgtccctcgcctctcttcccaat

SEQ ID NO: 31787 - DNA, 715 bp, Glycine max
acgagcatgagtcccgcatggctattattgttgacccaaagtcttctggtggcggtgactacttcggaggccaagaacaatgtcccagccgtgattgttttcggagactcctcggtggattctgggaacaacaacgtcatagccactgttttgaagagcaatttcaagccttatggtcgtgacttcgaaggtgatcgtccaacgggacggttctgcaatggtcgtgtccctccagatttcattgctgaggcttttggcattaaacgcgcggttcctgcatacttggatcctgcttttaccattcaggatttcgccactggggtttgctttgcctctgctggaactggatatgataatgctacttctgctgtactaaatgtgataccactgtggaaggagatagagtattacaaggagtatcaagccaaattaagaacccatcttggtgtagaaaaagccaataagatcataagcgaagccttgtacttgatgagtttaggaaccaacgatttcctcgaaaactattacgtgttcccaacgcgaagactccacttcaccgtgtcacaatatcaggattttctactgcgtattgcggagaatttcgttagggaattgtacgcacttggagttagggaaattgtccataactggtcttgctcccgtaggatgtctcccctcagacgaggccacgaacatcttacgcgaccacggttgt

SEQ ID NO: 31788 - DNA, 708 bp, Glycine max
gttgttgcactggagaaatcacataactgcagcattgatagcatgatatggaagatggaaatctaacagatgggggtaggatcaattcaaggcaattgttaatagcagtcactagtttttgactactaacgtttagattttagagtaggggttcagttggttctttgtggaagtttgtgtatgcctccatatagttctgtaaatagagcataaaatttcacgggtattatgcatacagacctgagtgaatgttttattctcaatgcaggatccaactatggagttggagctcgtttttccacttcggaatagagcaatttgaggttaaaattttagtttaccttccttgaatgagggaaggtggtgaagctttggtatagtggacccattaaacttttgttacttagcaagttatctaagtgtcgatggtggtaatattaaagagtctaccatcgaccacagccagtttggcactaatagctgtctacatggcgtggaagttctgtgtttgaaaagatcgttaacgtggttgtttttgatatagccgagataatggggtagagtttcaggggcaatactcaatgtaccgaacatctcttgtatgtttccggttgtgttatgatgttattttgtcagtgctcccgatattgaaattgtcagataatgaatgctcgtgatggattttaaaaaaaaataaaagggcgtcgt

SEQ ID NO: 31789 - DNA, 457 bp, Glycine max
ctctacttcacatactgtcacaacccacatgcagtattctctttctaaagcacagccatacacacactcacacacacaacaaagatcatcatcccatttccaaaccattctttgaaactcaggcttcactactcccttagttcagttgcaatggaagaatggtactacaagaagagccaagtgccagcatttgggagttgggattggaacgataacctacctttcacacagtgcttcgagtcagcgaggcaagctggtttgctacgatgtagtaattactctgagtctgaggaacgtgacctttatgttacaggggatttgtacgagaataatgttgtcacgcccgccatgatcgttgttcctcgcagaagggcaaatgtggttgaccagcatgaaaaagaaacgaaattaaagaattggatcagtgatgatgtggatagtgaatcacccagcccaa

SEQ ID NO: 31790 - DNA, 274 bp, Glycine max
cgtggagcagataaaagaggagatagagaagatggtggcaagttctagttcagaaggaacaggagtacccctattgagagcatctgataataatggaagagatcaaaacacaagatccccccaagctgagggatggtggaacaaagtgttggacatggaagaggccaagcaccaactcttgttttcactgccaatgattcttaccaacttgttctatcacttgatcattttggtttctgtcatgcttgttggtcaccttggtgagcttcagctt

SEQ ID NO: 31791 - DNA, 252 bp, Glycine max
ggagttgcacaaggttttgatagctgaatcgagttccagagaagaaatgctgaaagctctcaatttgaattctgaacatgccgccctagagaccattaatagattggaagctgctacattttcatggaaagagagaattatacaagaaaacagtggaaaatccccagttcgaacctcatggtctttcatgaaggaccctatggcaggtatagataagatggaactattgctggaacgtgcagaaacactttt

SEQ ID NO: 31792 - DNA, 377 bp, Glycine max
aaaatggcaacaaggtacatgactctgagaacctccgccaaaacccttttccatcatcttcaaccccccgttcaagattctcgctgcgcatttcatttgatcagaaccctccattccttcgttgcccgagactcagaccctcgcaaatttcgtaactcttttttttctggaaccttccgaggcatggtctctgccccaaaccccaatttcgacgaagctgcttcgctcgccctcgataatcgcgttcctgccaccgtcataacgggttttcttggctctggaaagactactctccttaatcatattctcacatctcagcatggaaagcggatagcggtcattgaaaatgagtttggtgaggttgatattgatggctc

SEQ ID NO: 31793 - DNA, 262 bp, Glycine max
ctagggcatctatcgcttttgaaatgtaaatgttctttaaaaaccagaacagtacatgaacatttcctcaaagtgacaatcgcttgtaattgtccagtttattatgctgtcatacaacttctgacttttgagaaagtgcattagtacaaccaacacctaactatgaaactactgaagccactgcaatcagcatttcacatgccactgcaatccataagtattgctcagtaaaagtgtaagaagaaaaagttattacctttgt

SEQ ID NO: 31794 - DNA, 268 bp, Glycine max
ttagagtttcattgcttctcagttctctcttctatttttggttttagctcgacttggttttttttcttttatcagttagctcaacttgtaagagtgctttaactggctggttttgtctttgtcaaaatccaattacaggaattcattggatattcatcttgaatgattggaagtccacatttgagggaatcatgtttccagtgcatctctttaatgcttacacaaatgtgatgaatgtaccgttccatgatcataaatcagttccacc

SEQ ID NO: 31795 - DNA, 512 bp, Glycine max
ggcggaactcatggcgccctaattgaagccccaggcggcggatttgtaaaagtggtgatgggttcatttgtccgcatagctcgaaaccttttatggtcttccttttgttcgcagtcattgtcgaagaatgtcagccaacaattatttacgtcttcggcgtctgtgttcaaaagttacaagttcaggtatgggagaacgccggttaggaagcatcgtgaggccaacgccacgcatactacagcggtcgagcttgcattcaattctgtagtcaaaattttcactgtttcctgcagtcccaactacttacttccttggcagaacaagtcccagcgggaaacaatgggttctgggtttgtaattctcggtagaaagattcttacaaatgctcatgtggtagctgatcattcttttgtacttgtaaggaagcatggttgtcccaccaaatatagagcagaagtcaaagctgttggtcatgaatgtgacttagctatattggttattgagaacaaaga

SEQ ID NO: 31796 - DNA, 595 bp, Glycine max
agaaaaaacatcgggaaaaagagctggcaaaacttcagagtgatgaagcaaagagatcctccattgatttgtcaagcaagaaagtggaacccgtagtggacgttgctagacaggttaaatctgttgaacccagtggatataattctaaagtagagataaaaaagatagataccaaaccggagccatctgaaggcacatctggtgcaccaaaaattcgaattaaaattaaaaaccgaatgctcagcaagtcctagggaatataatgtcctttattttgtggatgctagaatgaaaatcacaactccttcatattttctaggttgtatttttcttttcattatccggcgtagtagatcatttaggtacatacaattattgattcaatgagctttattcgctggtcgttcttatctgattgtagagatatatatgattgcaatttcaatcatacatttagattgctatcgatgaataggatttggctttctttagagcggcctaatttgtaaatgaagcttattaagaggttgtttgtgatattgttgtaaatttgtaacttctaagttgtaaatttataattttgttgtgttctttc

SEQ ID NO: 31797 - DNA, 529 bp, Glycine max
atgatggctggctagcaactcatgggaaacccaaagaaaccaaatctgatgaggatgagaatttaccttccatggaaagcctagaaatcagcaaaaagggttctattaagcaaattcattcctacatgggagctgaagagggagaagatattccagatatggcagagtttgacgatacttccaatgttgaaaatgatcctgccactcttcagtccacatatctagttgctcatgaacctgatgacgataatattcttcgaacccggacttacgatgtcagcatcacgtatgataaatattatcaaacaccacgagtatggcttactgggtatgacgagtcgaggatgcttttgcaaccagaacttgttcttgaagatgttagtcaagaccatgcacgcaaaacggtaacaattgaggaccatcctcacttgccagggaagcatgcatctattcatccatgtcgacatggagcagtgatgaagaaaatcattgatgtgttgatgtcacacggagttgagcctgaagtcga

SEQ ID NO: 31798 - DNA, 261 bp, Glycine max
cactctttgaagaaatggaagcaagcagcatcaagctagatactattgcctgtgcagctctaatgagatcttttaataaaggtggccaaccaggaagggttcttagtcttgcagaaagtatgagagaaaaagaaattcctttcagtgataccatattttttgaaatggtatctgcctgtagcatattacaagattggaggacagctgttgatatgatcaagtacatagagccctcacttcctgtaatttcatccggatgtt

SEQ ID NO: 31799 - DNA, 498 bp, Glycine max
acggagtcgatgctgtatgtgatgtcgtagaagagcgttctgcaaaatctaaaaccccgaatttccaacaacaaacgctcatgtatttgagttgcgacgattcatccattcactcaattccttccaatgcagtctcccgatgacgttcgcaatctccctatcgacatcactttctctcgtctcggagaatggttggtggatcgcaagcgagtgcccgcggattggcgcaagcgcgtggcggcgatcagggcacgaatttccaaggagttcccctccctccctaaggactccgacccctttttccaaaccctagaccccgaagggattaattatttggaggccaaacagatatatggtaatctcttgaagtctacttcggagagccggaacatatttggtcgtttatcaggtgctgcgggtgtgtgggaagcaattgcacgttcctttgagaaggatcatgttttccttggagaggctgcgcagattctgattcaaaat

SEQ ID NO: 31800 - DNA, 234 bp, Glycine max
taacgacctccagcacccccatgaacgtgtcgttgttagtacaatatcttttgggtcaattacgacttcaacttcatcagcccttgtaaaaggggctaggacatccctcttccaaaattttaactagttaaagttgtctcaaaggctctcaagtgaaaaatatcttgttaaatacatcctaatctaaaacacttaatgtcaagaatgttttcaatgcctcttactcgttacaat

SEQ ID NO: 31801 - DNA, 249 bp, Glycine max
attgacacttatgttttctggaatgttcatgagccatctcctggcaattacaattttgaagggaggtacgatctggtacggttcatcaagacagtgcaaagggtggggctctatgtccatcttcgcattggaccttatgtgtgtgctgagtggaactttggaggatttccagtttggttgaactatgttcctggcatcagcttcagaacagataatggcccttttaaggccgcaatgaaaggtttcact

SEQ ID NO: 31802 - DNA, 419 bp, Glycine max
ggaacaagtgcgggaagacttttcatggaatgcctaagtttgagtagctcagtttcaaaatttgatgatgctgatgatgtcaatagggaggaccatcatagtagctgttgcagtgttgggatagggaataatagcatgaagatggagcacgcgtgccattctggtattctaagtcatagccgaagtggcgttcctttcaccggagatcttagacaagccaaatctggtgtacaaagttgctcaacattaggtcccaaaagtaggttagctgtttatgctcctccttccacacttggaggctgtgctctagcattgcactatgccaatgtcataattgtcattgagaagctgcttcgctacccgcatttagttggcgaggaagcgagggatgatctatatcagatgctaccgatgagctt

SEQ ID NO: 31803 - DNA, 290 bp, Glycine max
ggtcccaacatattctaagaatcttctttctctctctctttctatctctttgtagtgtaagcaacaaaattccatcaagtgtgatctcttaatatgtggagttgtgtgtggactactcttacttcataatttccatgcctgcaagtgcaagtgcaagtgccagttgctgagttgaacgtgccacttgaccgcaagtgtttttgttgtcaccatgtgtgtgaaagatggcgaacaagttggtgaagatcatatagagaagaacgttgataacaataggagagtttcatggc

SEQ ID NO: 31804 - DNA, 315 bp, Glycine max
gaagaaatagccagagacatccagagggcggagacagaatggaggatcattctgcttcgatacttcaatccggttggtgcccacgagagtggacagattggggaagatccaaggggaatccccaataacctcatgccttacattcaccaagtcgccgttggcagattgcctcagctcaatgtttatggccatgactatcccactaaagatggcaccccgatccgggactatatccatgtaatggacttggcagatggccacattgctgctctccgaaagctttttgcaacagaccacatcggttgtagtgcctac

SEQ ID NO: 31805 - DNA, 288 bp, Glycine max
acgacagaaggggacagaaagaggctgagaaaaatagagtttagaactgaagatccaggagcttttggaactgagaaattgttggaggaaacagtctttcacggtcagaaggagagatctcatggggtctactgttgaatatcacatccaacacattattaacatcccaggagagattgagcctgcattgtggccagaatgctgtatccacaaggtacctactagtcttttgaaggtgcaagaggtcgcctacatgcttctatgatctaattggcccgttaacataac

SEQ ID NO: 31806 - DNA, 272 bp, Glycine max
acggctgcgacaagaggagtggtgaggctgttcgtgcggtacttgaatgtaagtactgtggcgacgtttcgcgaaaatgggggtggtggtcagtgtggaactccttggtggacagctttggagggtgcaaagagcaaggatttggggtctttgagttctgttcgttcgcctgggtgttggaacttctgcttgcagaggcctctgtataggtatctgttgagaacgttcttgttttgccctatggcggcttcggttaaagatgtgtcacaggt

SEQ ID NO: 31807 - DNA, 259 bp, Glycine max
catccactccattttgtggagacgtttatcatatctcctaagaagatatttcctaacacaacaaatgtttttcttgtcgactctttcaaaatcatttctttgggcatcaattattttttaaaattaatttcaccaaatctaaaagatccgaacaagttacaattatttcatattggtgagagaagacgtggtgtctatgtgagattgattggttatgttcaataatgtgacaatgaatactcatttaacattacatcat

SEQ ID NO: 31808 - DNA, 413 bp, Glycine max
agaattcggctcgagcttctttctaaaacaattctctaaaactatcacactatcatctaatcaactaccaacagtggcatcagagctacgttcggtcatacattgggcgtagttatattacctacctaccattccaaaatcctcccaactacttcaaaaatttcctttgtactattaacccactccaataatattttttctaagctatggataacactactcaatcgtcaactatttctgtccctatcttcaatggtgaaaattatgatttctggcgtgttaaaatggaaacatatttttcatctcaagatttatgggacatagtagaagaaggcttcaccgttcccgcggatacatcagctcttaattcatctcaagaaaaagagttgaagaaaaataaacagaaaaattca

SEQ ID NO: 31809 - DNA, 403 bp, Glycine max
gtttctaaagtaattcaggaatatggtgaagaaaatgaagataaactacttgaagaacttctctcatacaaggctctggaaagttctccccaaccacagcagcgaattgagccagatccttgttcttcagagaatgcagggagctcttgggatgatttctctgatactgatattttttctgatgatgaagaaattgcaaaaactatgtctgagaatgatgataccttacggtctttggtgaaaatgggctacaagcaggtggaggctttagttgccatagaaagattaggcccaaacgcctcacttgaagaattggtagattttataggtgttgctcaaatggcaaaggctgaagatgctcttctgcctcctcaagaaaagttacaatacaatgactatgcta

SEQ ID NO: 31810 - DNA, 335 bp, Glycine max
gttggaagcgagcaaccagttaaggaatctgtggagatgggagttcaaaatgtagatgttggtaagttcatcaatgttgtgagggatgatttggaaatgaggaacataacctctcctttgaccacccacaaatcttcaacttgctctgatgctgcaagcttgaaatcagacatttctgatcagctgcaaatgaagaacttgaacactcctccaatccttaaatcttcaagtttctctgatgcttcgagcatgaaatcaagcatttctgatcatcctggtctcaaggagcaagatgcgagtaaccctcctcctatagtctcagcaacctgattctg

SEQ ID NO: 31811 - DNA, 282 bp, Glycine max
gcgacagaagggcttctaagaaaacaacagaagagtagttatctttctttttcttcaatttcaccacctattcctaagtgcattgaacctgtaaaaatgacattatcttaaagttgaacatggacctagatttaaactctgaaaaactgactcagccttcgtctaggtcttttaatgccgtatgtagtgggaacttcgatttttatctaatattatatatatcatcttcccaggcctcaatcagcagaaacatatgcatttctaaaaaaaaaaaactgggaa

SEQ ID NO: 31812 - DNA, 234 bp, Glycine max
tacaccacttgcgggtgcgtccatcgtgaaagacaactcgttagggctttagcaggtggaaccaattggggtattgggtcttcatagcatatgtataggtgggagtgtaggcatttgtgttgactgagggaggtcatgcatggcatatgcatgcgatctgattttgttaattttctatgtaatggttctgttttggtaccactggtaccctatctaatatgtttgatcttttgg

SEQ ID NO: 31813 - DNA, 248 bp, Glycine max
catgaatgttttaacttccattgtgatgatctcgtgataaaccctacattgtgggtcctcatggctagtttccttgtaagctcttagtgcattaattattcctccattttgaccaaaagaaagggtgattcccttcggaagatcattaattagacaggtgttttgttaccatgctagatttaccttgtctatcaaaactttgtgaaacttttttacacttaaaaattagtactagaaataatgtggct

SEQ ID NO: 31814 - DNA, 249 bp, Glycine max
gagaaacaaggcatggaggttaacattgagaaaacgttgctaatgtgtaagagtttcatgaaagaggtaaagatatggggttgtttgaagcagacaggggtcagcctgagatacatgatggagtttggttccaaccccactcagaagaatttgctcatttctgcacagttccttcacaaagagcttcccattagaattgcaaggagagccattgagcttcactctctccctcatggcttgtctcacatg

SEQ ID NO: 31815 - DNA, 480 bp, Glycine max
cttccgttgagcttttctttcctcgaactccaaaatcttctcacgacaagcactttctataagatctgcaggtactattgcagtttcaagtccatccattccttcccaagaaacctcgtagcattctctcccttgaactcttcggctcttaatgatttctgacacaggacacttcacagggatctgtgatcggatataatataaataagattcttgtatatatccaggttcaaaaataaggagcctgtagataaaatttatgttcactaataatagtaatggcattatagaaactcgatgaatggaagatttccctgtttattgatgatacactgaatgcagtagaagctactgtaaatcaatgatcatcgaagaattgaaccattgttataattaccaaaatagaaaatttgtagcatacttacattacttaatcaaatggacagctttgatcttagatgatgaacatgtgaaagagaa

SEQ ID NO: 31816 - DNA, 548 bp, Glycine max
gataggtggcgtttcaatgcgtgcaaccaaactagcaggatgatagtgcctccattaaacacgaaagtcgcaaagagacagtgatcttctcgttcttgtctgaagaagtcgatcatctcccaccgaagaaacagagcagaactgaactagcattgaccaaaaagaaaaatgtgcgctttgagagcgttgactaggtccgtatgcaacagcagctcctatgttaaaacttccaaaccctatctcattctcaatctcatcacccatcagcaccagacccgtagaaatcttattcttgagtcttccgcttctgaattcgtcaagcttcacaaactcactggccctgattccgggattgtcgaaattagcttggacaggcctcaagccaaaaatgctatagggaaagagatgctgcgaggcctgagtcatgcgtttgagttgattaatcagaaatcttacgctaatgttgctatgatcagtagttcagttcctggggtattttgtgctggggctgatttaaaggagcgcaggaccatgagtcagtcagaaac

SEQ ID NO: 31817 - DNA, 236 bp, Glycine max
acggataaccttctttgacacttgtgttgtctattgaactttgttcgtcccttggaatggttcttcttggaattctaaggtccttgtgacaacaaagttagaagaccttgtacatgccttttctttatatcttcttcacatgcaccgataggctggagaggcttaactgtctgtttctgcagaggtaatagcttgggaaatttggtgcagatagcctgctctttattggaaggagt

SEQ ID NO: 31818 - DNA, 328 bp, Glycine max
aactacttcttcgggagttgaagactgtcaaagctgatctggcttttgcaaaggatcgatgtgctcagctagaggaagaaaataaaatcctccgtgagaatcgggaaaggggagatagccatgatgatgctgatttggtacgacttcaacttgaatctcttctagctgaaaaagctcgcctggcacacgagaactcggtttatgcccgtgagagtcgctttctaagggaggttgtcgagtatcaccaacttacaatgcaggatgttgtctaccttgacgagagcaatgaggaagtcactgaagttaaccctcttaaccttccccaagt

SEQ ID NO: 31819 - DNA, 253 bp, Glycine max
caatatgttctttgataattatgcagacttcatgaagattgatatgcaaaggatcaactactatgcttgtcaatgcagggtggcagtggagtacggaatgaatttagatgggaggttttgattttttcttttaaaattaaaatatgcttcggtggataaaaataataattttatcagtgaatttttaatggtcaactcattaatttggatagtggaatcaaaatcactgattttataaaataaaagaattaaa

SEQ ID NO: 31820 - DNA, 425 bp, Glycine max
gagacgctgaccctctttggctcgccccaccctatttctcaaaacgctgtcgttccccgccacgccatgtcccgctcctccgaaacctcctttcccaccctcactactatctccatctctttctctcaactccaagataagaacgccgacttgtcattcaagattgaagaaggctttggacccaatggattggggattctatccgacactgatgttgcaggatactcttcattgcgcagaaatctattgcatcttgcaccaagattggcaaatcttcccaaagaagtgaaggaggatcttgaagatcctcatagtcggtataactttggctggagtgatgggaaagagaaacttgaatctgggaagcccgatattttaaaaggatcttgctatgccaatcccatacttgatacacctacaacaga

SEQ ID NO: 31821 - DNA, 360 bp, Glycine max
tgtacgtgaacaacgatgaggcctgttatcacggaagaaaggaggtgggacttccaagtcagatggctaggttttccaagacaattacagcaatctcaagacaacagagggagataaagagtggatttcttaatcggattggaattggtgccaagtactctactccaaaggatcccctgaatgttcaagtaaccaaaatcaaatgtcttgatgcagaagacacttgtaatattaatatcagtctcaccagtcctgtgtctgctttgggcattggccactggatgggcccaacaacgagaatgtcacttccaagttttagtggagctacagagtaataatcctaacctcctcaaatactct

SEQ ID NO: 31822 - DNA, 289 bp, Glycine max
agggaaattgagaatcggattgcttcacaacagctgaaaattactgctttgagacgggagattgatgatcttatggacttgattgatgagatatgatacgtgactatgctgctcgagatgatgataatatggctctcattttgaccttgttttatagttgcaaagagattagcgatacttctgacggttggaattttggtgcagtctattattgtctagactaaggatctcatcttaactatcgctaattttatatccatgcttatctaaaaaaaaaaaaaaagggggg

SEQ ID NO: 31823 - DNA, 245 bp, Glycine max
tacggcgcagttaagatggatctcaatcgaaaagtcattactaatgacaataatagagaaattccttacgttgttaatacattaatatttacaatagcccaacatttcattggagacccatctctctggaaagataggtctgcagaattattgtcaaatcttaagtgtagaactttagctgattttaggtggtacagagataccttcctaaccagggtctacactagagaagacaatcaacaacc

SEQ ID NO: 31824 - DNA, 376 bp, Glycine max
ttggaacctgcacctccttgcccaccagctgtctttttagcaccagctgattcttcctcaacatcttcactatggcactcagagtcgtcggtgtcttttgtttttcgcttcaaattttgatttggctcgtctgaaccttggtctgcaccagtgccagagcaaacagaggaagaggctactgctggctccttacttttttcagcagctgtctgtcctttagtgccactgtcgccaggaacttggttgggagtttgatcaatctttgcggcactctctttaccagcaggctctgactgcttagaaggcacagcattctgttcaacagattttggcagcaaagagttcacatcagccttggattgctccacaacctgct

SEQ ID NO: 31825 - DNA, 421 bp, Glycine max
accagggatcctaacattgagactaggccatcgacaagtgcccttaagcgtgccctcttgactgctttgaggtgtgttgatccagatgctgaaaaaagaccaaggatgagccaagttgttcgtatgcttgaatcagaggaatatcctatactgcgagaggatcgaagacgccgaaggagtcaggcaggaaacatggaagtggagactcagagggagaattctgatactgataagagcgacaatccagattataagcccagtggcagaaggaaccaacgcatgtagcaccagttatctcaaagaatttccagaatgaagaacacaagtgaactgggaaattttgcattcttttgagcttctgtaagttctgatgcgcctgccactttttacatgaaaaacatggagcaggaaccagttactt

SEQ ID NO: 31826 - DNA, 617 bp, Glycine max
ccttattccagaactcttttaacaaagtccaagtccaagttgattcgtatgaaaggagatagcagccacatttcatcaactcctgtccttcactcacagactactatgtatctgcaggataaatctaaagctggagcatcagaaagtggaaatggatctgttggacctattcgtcgaactaggcataaggttggtgcacaattttcttcaagaagagtggcttattcatctctgtatggcccttcacagagacaaagttctggtgttattgaaagtttcacttctgttgcaaagaggacggaacctgttgggacaagctgcactcataagccactaggccttgaggtgggtattccaacagtacacatgcataccagtttgatggctaagaagatattagaccatattgatagaaacactcccacacctaaagagaaatctgctgagctcaagctggcaacgaaatggaagaaccctgaatcttctattgatttcagtactatctggtcaaatgaagataatggtttgcttaaattagatgatgttagcccttataaatatgatgggcttgaaggaaaggaatctactctatggaatgaaagtaagggggagtacca

SEQ ID NO: 31827 - DNA, 263 bp, Glycine max
gacccctctctcgagggcctctggatcgaacccagcagaagtggtccttggatgatcgtttcgaaccttaggcggcggcggcgccggggaaggttcaatttcagaaggattcggtggtaaaatcccatctgcataagcattgttctgattcagagatgcagctgcagtggcggcagctatggcagacaacaatcccgctgcgtacgttttcgccattgaaggaaggaaggaacaagaaaaggggttttaccaaaatcctctct

SEQ ID NO: 31828 - DNA, 239 bp, Glycine max
cctactgctggagactcaaagacaaagacactcatcctcataggaagggcggaattattttttgtacccacgctatcttttttacgttactttcaaatattttattttcaaagagttattatcacgttctttagtattagttttaaatgagtatttttaattctaatttttgaatgtattaaatatgtttccgttaaattaattttagaaagtgatttataaaacatttcgaatagtgt

SEQ ID NO: 31829 - DNA, 239 bp, Glycine max
gcactctcacatatgaatatgaactgtttagaatgaatcaatatgagaccatacaagatatgcaaaaaatatttactcatatagttaatcatcttgcatcattgggaaaaatatttcctaatgaagatctcattaacaaagtgctgagatgtttaagcagacattgacaaccaaaggtaacagcaattgccgattcaaaagatctcttcaacatgtctcttgccactttctttgggaaa

SEQ ID NO: 31830 - DNA, 246 bp, Glycine max
agtcgatactgaagaggaagctggtgtcgaaggcggacagggaggacatgaagagggagattcagatcatgcagcatttgtcggggcaacccaacattgtcgagtttaagggcgcctacgaggacaggttttccgtccaccttgtcatggaactctgcgccggcggggagctcttcgatcgtatcatcgcccagggtcattactccgagagagccgcttcctctctctggcgctccattgacaatg

SEQ ID NO: 31831 - DNA, 255 bp, Glycine max
ggaacaagtttaagatagtagcaaagtccttcattaattttattttctagaaagaaagataaaaaaaaactcagtcatcagaatgattagatttgacaaagtggtggttcactgacgccatgtattagaagttagtttaaattggaataaaaaggacacattccttcttttttccttttcattgtaccattaaattaacaccgaaatcgccgtgtacgactaaaatcaaaatcacaacactgatcctttcatttg

SEQ ID NO: 31832 - DNA, 265 bp, Glycine max
cggctcgagacgacagaaggggggagtaattcaattctcactcactagtcactatggaaatgcatagtagtataattttttgcatgttcttccttccgtggctctccatggttggtgctaaggttccggcaatgatcgcgttcggggactcgtcggttgatgctgggaacaacaattacatagcaacggttgctcggagcaatttccagccatatgggcgtgactttgtgggtgggaagccaactgggagattcagcaatggccg

SEQ ID NO: 31833 - DNA, 271 bp, Glycine max
cgagaattcatggcagagatggaaaccttagggaagatcaagcacagaaatcttgtccctttgttggggtactgcaaagtaggggaggagaggctccttgtgtatgagtacatggagtatggaagcctagaagagatgcttcatgggaggatcaagacgcgtgatcgacgcattttgacatgggaagaaaggaagaagattgcaagaggtgctgctaaaggactttgtttcctgcaccacaattgcatccctcacatcatacacagagaca

SEQ ID NO: 31834 - DNA, 199 bp, Glycine max
atccataaaattgcttgaatctgttcaaggtccaatgccttaatggcctttttttacttatatcagtttaaatgaaccttttaaaagtctaaaatcaaccctacgcgtaactttattgctttcaaagaactacataggtctgagttcctcatcgcaattgaggatatgtaggagcaagagccacactcttgtcgacctc

SEQ ID NO: 31835 - DNA, 268 bp, Glycine max
tgaattcatcgatgcgattgtggaaggagaaaggctgattgtggatgtggattttagatctgagtttgagatagcgcgatcgacgggaacgtacaaggcgatgctgcaatcgctgccgttcatcttcgtcggaaactcggagaggctgacgcagatcttggcgattgtttccgatgcggcgaacagagtctaaagaagaaagggatgcacgttccgccgtggaggaagcgcgattacatgcttgcgaagtggctctctccatctagca

SEQ ID NO: 31836 - DNA, 501 bp, Glycine max
gacggacagaaatggcggcaggtagtgacggggtggacataaacgacgccgcttcgcccaaaacaaccaccagcaagagggggcgattcaccacctccaccgaatcacgccgacaaaccctaacatcatcttcttcacacactcacacccttcctatcgagctcatccaggaaatcctccagcggctccctgtgaaattccttttacaacttcgatgcgtatgtaagtcctggaaatccctaatttcacatccccaattcgctaagaaccaccttcacagctcaccaacggccacccgcctcatcgcgggattcacgaatccggcgcgcgaattcattctccgagcttaccctctctcggacgttttcaatgccgttgccgttaacgcaacagagctcaggtaccctttcaacaaccgaaagtgttatgatttcatcgttggctcctgtgacggcattctctggttcgcggttgatcaacgccgtgctcttttatggaacc

SEQ ID NO: 31837 - DNA, 296 bp, Glycine max
atcattctcattgataaactaggtaggaagccacttctcatgataagcacaattgggatgacagtttgtttgttctgtatgggggctactcttgctttgcttggaaaagggtcatttgcgattgcattgtctattctgtttgtttgcgggaatgtagcattcttctcagttggattaggccctgtgtgctgggttttgacttctgaaatcttccctttgcgtgtgcgtgctcaagcatctgcacttggagcttttattaatagggtctgcagcggccttgtggccatgtcttttct

SEQ ID NO: 31838 - DNA, 661 bp, Glycine max
agatataatctcaaatccaatgaatctggttcctcagaatctttctggcctctctgcaacagcccaatcgacaagagtgagattactgattggagtaatattgatagccacagaagtagtgagattttttataatacctgctgttccagttgtcggtttcagctacttccaagtgattccatcgcaatgggacaattttatatggatttgcctcagtcggtggttggccgagcaaagcaagccaacaatggtaatttgagtctgctaagggaacaaattcaagattacctgctctcagatggtgaagatgaaacataggactacttttttacattgaggctctatgttgaagggataaatactggttgtggtaatttaatttacagtttgagtgagtgagaggtttccgttggcctttggctaatacaaaaaagagttatagagcactgagcttcactaatttttgagagcatatttaagcagggatagattagatagctaatttttatgtatccttggcaattctaagagagataaagttgagtccgaaatactcgttggaggcatcaaggttattgagatattgctttagcatttatttgcgtctattgtattttatgggaaatgttggaccaagacaacagtaaagaaattattttgc

SEQ ID NO: 31839 - DNA, 471 bp, Glycine max
gttgataccacgttctctagaacagatattcgagataagtcagtccctgaaggatcaggggtggacgttcaaaatgcaggcttcagtattggaaatatataacgagaccctcagggatttgttatcatcaaatcggtcaagtggtattgactcaacacgaatagaaaacggtgttcctgtttctggaaagcagccatacactattatgcacgatgtcaacggaaacacacatgtttcagacctcactataaagaacgtttctagtgcaagtgagatttcatctcttctgcaacaggcagcacaaagcaggtctgtaggaagaacacacatgaatgaacagtcatcacgaagtcactttgtctttactttgcgtatatctgggaccaattcgaacactgaccaacaagtgcaaggtgtgttaaacctgattgatttggctggaagtgaaagactgtccaggagtggggcaac

SEQ ID NO: 31840 - DNA, 229 bp, Glycine max
ggatgacggagacatgtgagcaacagactgctctaggaatctcacctcctggcccttaagtaattagccaacatggcgctgggaaagaattcccgaggtgaggggaggaagttgtcgaactactgttcaacggtctctgtcgctgtgttcgttgcattttgtttagttggtgtatggattgtaatgtcatccattgttccaattcagaattcagtcattcaggtatctg

SEQ ID NO: 31841 - DNA, 254 bp, Glycine max
ggagagaaataggttagggaccaaagcaaagctcagacagataaatagaagaaagagagatcaaatattcattttcataatggtgcgagacatgatgggcacaacaacaacaacatcatcaggagggtgtggtgggggaggagacatgaatatgaatatgaatgagaagcctgcatggctagagaggttgatggctgagacattctttggtgcttgtggggtccaccaggatcgcaggaagaacgagaagaacg

SEQ ID NO: 31842 - DNA, 263 bp, Glycine max
atttgttatctattttatatatttatatatacgtatctcaaataaaaaaatattgttgaagtttttgctcaaaacatttttccgatgcattcaacattgatatgtcacaaccacaactcagcttttataatatgtatacatttgtgtttttaaattgtgacaaacaacagtcatttcattagtgctttttttaacagaattaattttaaatccttaaatataattagaagtgtaattacattaatttcaactataaattttat

SEQ ID NO: 31843 - DNA, 287 bp, Glycine max
cacaaccccaaaactcgctcacaacacagcagaatgtacccattgcttgcgatctaaattcacaatgacaatgtggtgaaaaacgctcggatttgaagatggacatggacgtggtagaagcttctgcacctactagagagcacgcccgttttggtgatcttggtgggcgctccagggagcgggaagtccaccttctgcgaagaagttatgggttcctctactcgcccttgggttcgcgtatgccaggacactattggaaatggtaaagcaggaaataaagctcagtg

SEQ ID NO: 31844 - DNA, 260 bp, Glycine max
tcttgccattgtgtctgaaatacaaactgatggaaaccagactaaaaactttaggtggacagttgcaatggaccattggcttggaaagattcttgtagaccaagtgaggaaagggcttaaagtagataaagtttttctgacagaagcatataacacagctgtttcagccgtaaatgcaaaatttgggctgcatctaacaaaattcaatgttaaaaatcgacttaaaacttggaagaaacagtttgaacagttaaaggaaa

SEQ ID NO: 31845 - DNA, 280 bp, Glycine max
cgaaaaatgaagacgccgtcgctgtgtttgaagaaagacccaccaaattaatcctcattttttcctttttatttcgttttcggcttcaaagcatgaataagcctccaactcagacctcttccactttttttttcagttttcatttccctttacactttctttctctcttctccatctggctacctcattcttaataagcacaattaccaaaagtgggggctgttttctgaatcacaagtgtccccgtcgaagttggtggtggatgaactgttgaattggt

SEQ ID NO: 31846 - DNA, 254 bp, Glycine max
gaggagaagaaaacagaacagcattgcaacacatgggtgcttctggcaacaattttctccaagtggtcgccaagaacttcgatgttcttgctctgcccttggtcacccttgtttaccctttatatgcttcaatcaaggccatagagaccaggtctagtactgatgatcagcaatggctgacttattgggttctctattcattgatcacactcttcgagctcacatttgccaaagttcttgaagtgcttgccata

SEQ ID NO: 31847 - DNA, 523 bp, Glycine max
ggaaatgatagaatattgatgaccctgagatctcagggaggtattaaggctttactgggaattgtaagatgcggacatcctgatgttctttcccaagttgcacgaggaattgctaactttgcaaaatgcgagtctcgtgcatctaatcaagggataaaaagtggcagatcctttttgatagaagatggtgcccttccgtggatagtacaaaatgctaataatgaagctgcaccaatccggcgtcacattgagcttgcactctgccacttggcacaacatgaagtgaatgcaaaggacttgattagtggaggtgctctttgggagcttgtccggatttctcgagattgttcacgggaggacatacgaaaccttgctcgtcgaactctcagttctgtctcaacatttaaattggaattgcggcgattgcgtatagatttttaattataaatgtacctgggactacgcaattatttttgttccccagcacgtgaggctcgttcttgagaattatttctagtagcat

SEQ ID NO: 31848 - DNA, 222 bp, Glycine max
cgggataataacatattggctgactcaagggtacacctaatcatggtctgctgtttcaagccccttgttcttcaggcctactgatgttgattgggcatttgaccccgattttgggatcttcacatatttgttttgcaaattcttttggtctcggtggtctaagaagcaaactttggtgacccaatggagcaaggagggagagcatttgagtttgacacatac

SEQ ID NO: 31849 - DNA, 285 bp, Glycine max
ctcaactcggcacgacatgtcgttccaattacaaggaatgtactaaaattcaccgcgatagagatgcatgcatgaaagaataatgaccatcgtcacttgggttgtgtacttgaaagcagagacatttaggttggtcaaaagtttatccaaatatggtccaaagattaactaggtagctgattgatatggacatgtttgatacaaaagttgggtagaagaaaccttaaacttcttctgaatggtatttgtcataatctgagcaacgcatgttgtaatcaccgcgag

SEQ ID NO: 31850 - DNA, 420 bp, Glycine max
ctgaacacaacctaacggtgttggccaataatttcatgtgtagatgaatagaagtattgattagatgtataattatgtggcaattatagtgacaataattgctgccatgccaacaggatcctttacaacagttgaccattaggcaagaggaaatctggatttcatcatgtttcaatccttgtagccacaattgcaagttggaagtaacatgtttcccaaacgctgcatgtgactaacatgatgagattattgatgaatcaagtcttaacagatgaattttactagaaccaacctataatgagaaagcatggggatctaacacgacatcaataaccttatcccattaggtgagatcaactacacaggatacacaatatcattgacctctaataaaatcaaaattattcaccataatattta

SEQ ID NO: 31851 - DNA, 246 bp, Glycine max
aatactaattcttgcaattcatctggaggatcatcttcaggtttgacttcgacgtggcaatcgatgaagactggctttcagagtttcaaggtgaacataggggccaaaaagtttttacctctacggcaaatacaggaaaataccggctctagtcattcctcgtctgagtcccttgatgacatatttcaaaaactcaaacggccaactttaaaccaatctatatacaatgacgacgattagtatgga

SEQ ID NO: 31852 - DNA, 240 bp, Glycine max
atccttcattttaattgtgtcaaaccattaataatataaattgtaaggatgataggctctatgtgatgattaacattctcaagtatttcaatgttaaacttattaagaagtagacatgttcatgaagtgacaaatatatcacaagaaggaggattgaattaaaatttaaaactttttatactccctttgaaaataaaaaggtttctagtgatagttaagaataaatcaaataaattaatg

SEQ ID NO: 31853 - DNA, 229 bp, Glycine max
ggtcttggtgttggtgtaattgcacctccaaaaccaaaaccaaaaccaatttcgttacccttttctaaccacccgaaacaacaaacggcctttggcagatttaccttcttcttggtaatttcttcttctctccaaaatacttaaccaaaccattattaatggggatattgtatggaatggtggcaagggggcaggtggttctggctgagttcagcgccacccagagtaa

SEQ ID NO: 31854 - DNA, 255 bp, Glycine max
ggcggagcaaatcatgtaattatagaagatagagaaatcgcaacacattaattgcaatttcaactcccatatatcattctcgttaatttcttaacccatcttccaagcattcttatccgacaaggattcctttctctctctcttgatccaatcttttcgtccattataattaggattttaaattctcaattttcaattttcaactccaatccctccggcgagctttccaggaagctcgcttctctccgaccatgg

SEQ ID NO: 31855 - DNA, 474 bp, Glycine max
atgactcaggttcagcttggaacgccaactttgccccataaagggggaaattccaagcttagatatggaatgcgttttggatggggggcaagcagcaacagcgcacattcagaccatgcatgtactgacaatatattgggacccgttatcatggaagtttttgtcgctggaccaatgtccatgtaaagtgaggacctttgctaagaggtgatgcgcctcgtggaattaaattgacatcattttgagtcgcttaccttaagtagcgagattttctgatggattttttttagtaatttgattttttactgatcgagtcacttttgcctcggatctgtccaacagtacattcgtgatttgatttgtttcgtcaatctatggctcaggctgttatttctttttctttttaggctaattgaagaatttaatgaaagtgtaatactacacatataaaaggttcttttatgcgtttgcggt

SEQ ID NO: 31856 - DNA, 230 bp, Glycine max
catcaccagggtgacaagagataccagtccatgcacaaggagactcatcaaactattgccaaaatgggatagagaatgaaaatcgcctaaaaagttaaagtttacaacttcaaactctatttctcatatgaaaaggcatttcacgaaaatttggatagagagacaaaatcccagaatgggaagtgaaaggtgaaaatttgaaaactacccagaatgcaaatattcccccc

SEQ ID NO: 31857 - DNA, 284 bp, Glycine max
gacagcaaagtgagaaagtgttgctgtgttgcagagcacaagaggtggcggtggctgcaaggaaaaccattcaaatagcttccgctgccacccgaaccctcctctctcgtcgatcttcatgtcccactaagctcaatggacttgccttttcttattcttctcctcagaaacgtgccctctctttttcccggcttccggtgctgttggctcgtgcgcaagtgtctttgacgccgttgcatagtgctactgcctctgccatgttcacttctctgctttctctgcat

SEQ ID NO: 31858 - DNA, 228 bp, Glycine max
agaaaagcgtggaacagagaatgtggcttttacgaaaaccatcctttttctcgtgttcctcgtgtcttcgttttgctcctctcctcggcgccctggttgctgctggtcttcttcttacaaatttttcagctcttgttcgttggtgttcctttcttctactgaatgaggaggaaccgagtggaaatcatgtcatttctttcaagctcttcatggtgtgcaactgagcat

SEQ ID NO: 31859 - DNA, 494 bp, Glycine max
gttgcatctcttcttcatgatgaaagattgcctcccttagattggaaaacgaggcacaagatagccatcggaactgcacgaggccttcactacttgcataaaggttgcaagaggaggataatccaccggggacattaaggcttcaaacattttgttaacaaaggattttgaaccacagatatctgattttggactagcaaagtggcttccatctcaatggactcatcattcaattgcccctatagaagggacatttggacatttggccccagagtactacttgcatggagttgttgatgagaagacagatgtgtttgcctttggtgtgttcttgttagaagtaatctctggcagaaaaccagtggatgggtctcaccaaagcttacatagctgggctaaaccaattttgaacaagggtgagatagaagagttggtggatccaaggcttgaaggggcttatgatgtgacacagttaaagagatttgccttcgctg

SEQ ID NO: 31860 - DNA, 233 bp, Glycine max
tgacatatttctctgtctatctgaaaaggaaaaatatttctatatttgttgttggttccagataatgatgtacttcatggaacttgcctccccgcacactgaagaagcaataaaacttgtggatgaagttggaggatttgaatggttgattcagaattatgaaatagatggagctactgcactcaagctggatctctgcactcgacactccaattatcattgttccaaggaat

SEQ ID NO: 31861 - DNA, 537 bp, Glycine max
agagttttgggactgtgattgagggatagttcaggttgaggagactaattttcttgcggcatttatatggaccttctgtgaacactgagatctgtgtctcgttgtatcctaaagcacataagaagttgaggtaatcatcaattgttatgtcataaactagcccgggatccattgctctgtttggttgaacatgccctgccccgtaactgaatggtgtcgccttgccatcagtagcattcagtagtggctccacctcattgtctagtgttgtagctgtggtcatgattgctgatttaattgcagcggtactccacgtaggatataaggctctcaacagtcccacaatgcctgaaacgtgagggcatgacattgatgtgcctgaaactgagttaaatggaatcctgcgtttgtcgaacacttgattggttggtccttgggcttcagtataggccgctgtaactgacacccctggtgcagtgatatcaggctgaatatattggacaaattaagattgttagatatctaacacattacaac

SEQ ID NO: 31862 - DNA, 537 bp, Glycine max
caagatcacatgggagtggggattcccagacctggacccatgggccaacaggagaagtgtctgctgttgattctcgcatagatatgtgcaagaaaaggatagcaagcacaaacgaagagactcatgattgtgacagcactctgataaatggttctcctttacgcatatctgatggttcttgttccttggatgagaactttgagtattgtgtgaaagtaattcgttggctagaatgtgagggtcacatcaaacatgaatttaggttgaaattgctaacatggtttagtttaagggcaacagagcaagaacgcaggggtggttaataccttcattcaaactcttatcgatgatccaggcagtttggcaggacaacttgtagactctttttctgatattatatccaacaagaggctaagaagtggattctgtagtaaagctggggcatcaaattaagggtgatccggttattcaagtttgccatttgcttcaacttttccatttatcattttctgtcagaaaaagtcactctgagttttt

SEQ ID NO: 31863 - DNA, 281 bp, Glycine max
gatagcaagaagaagaagaagaagtagtagttgaaagaaagatgagcgacgaggaaagaacgaagcaaatagcggagctgagcaaaagcctcaaagaaggagagaggctcgtgggcccaacgagacggcccgacggaaccctcacgcaagcccattcgaatccgcgccggctacacccctcaagacgaagtcgccatttaccaacccaaaggagcactcttgaaaaaggctatgggctccgctgggcctcccgggtacgaaccagacgctgattccaagcc

SEQ ID NO: 31864 - DNA, 245 bp, Glycine max
ggaagttgaaggcttgggaagagagacaagataacaaagccagacatggaggggaattatgggagcacaagacgttatgttccccgagcagattcttccttgagcttcctttacaactacaactacaccccttatccaggaatggaagtgaagcaacaaacactggctggcacaagttcatccatggaaaaagtgaactgcgggaaccaggagaagaagaagcgattaacaagtgaccagttaga

SEQ ID NO: 31865 - DNA, 242 bp, Glycine max
ttatcgaggcaatagatctaaatatctgggaagccatagaaatagggccttatatacccaccacagtagaaagagtttcaatagatgatagttcatcaagtgaaagcataaccatagaaaaacctagagatagatggtctgaagaggatagaaaaagagtacaatacaacttaaaagccaaaaacataataacatctgccctaggaatggatgaatatttcagggtttcaaattgtaagagt

SEQ ID NO: 31866 - DNA, 248 bp, Glycine max
aatgctggagttctcaacgagctgttagtggaagctctatttcctaactgtgcacatgcattttatgattataacttatgaattccgcagcttaaaatttttaccctctcagtaactaaattgtttctacaggaagacatccgtggttttcctaggaatagaaccgtgttgagtggagatgtggatttagtagttgaatcaattgaagctccttgtcggaacaaagaatatggttgcaatgaaactgt

SEQ ID NO: 31867 - DNA, 253 bp, Glycine max
ctcagagtactgttattgaaaggcaaaggacaatagagtatacctgaagccctagagccctatccccttcaacacttttgaagtcattgacaatagcaattcccaactgcaatgtgatttaacaacaacattaataaccatttttatttgacatattatcatattcatatccaacaaaatgtcatgaagaatatattacatactccagctatgctgtataggagtgtgagaacaattatatctggtgtaagag

SEQ ID NO: 31868 - DNA, 231 bp, Glycine max
aagggtactcttaagatcattccaatactctactggaggatccccatgaatccttcgttccctaacaagggaagtccaccaatagagagcatacccttgaaagctaagggtagccaatggaacttttctctcttcgctaatatgatggcaagcttagagttgttcaaccttcatttcccaatctaagtacggcccaacattatctttttcatggaaatatgggaggctaat

SEQ ID NO: 31869 - DNA, 361 bp, Glycine max
gacgacagaaggggaagagaaactttcatagtttttcactccttctcccagtgtcggtgtgctcttcttctggggcattcgttttttgcttcttcagctcctccttcactcgcgcttttggtgcaccaagcttcactgggatcactatgcccggtgtgtgagagagggattacggattagtgagtttttgtcactaagttacagctatgtcgtttcatgattgatgggtggtagcagtttggtgttgggattaaaggtggggctttatttggattctgtgtttgttgaaggagctggcgtaggtggagcgaatgtgcttgagttattttttacaccacaattgaaacttacctttctatga

SEQ ID NO: 31870 - DNA, 305 bp, Glycine max
tcgtcgaggcgacgcaaaaagttgaaaataaaacaatagtctctcccgcgcccacacttggaccaatcgctatcgtaatggtattggtacgatgcgcttcgcctcttcaatgttgcgactgaggccgtgagagggttttgccaactcaagttgagattctacaaacatgatgcactctgtaaagggtggctgggggcagacgtttgcgcttgctaaacacaatgaatccgaagggagaaagactcggattcgccgctcaaagcaggaaaggaaggcaatggttgaatcctttataaagaagtacc

SEQ ID NO: 31871 - DNA, 230 bp, Glycine max
ggagctctacttaaagtctgtggctagagcaaaggcagcaaaacttgcttaattgagcaaaagaagggttccctgtgcaatggttcaattttgtcagtttctacatagagacaagagttcagagttaaagctcaatcagcaggatttcactgagcataccagccattcaagaacatctcagattgggaatgaatttaataaaaaatattaaatgcaacatggctgctgaa

SEQ ID NO: 31872 - DNA, 256 bp, Glycine max
aaggctactgggtcaatgttatctccactcacaatgttgatggttacctgactcaacctgatgggtcaaatgtgaatttgaaaattcgggtacaacaattatagtccatcctaatatgtcagtacaattgcagcttcacaaaattcatttctgttcttttggtcttatctgcagaaaggtttccagcatatatgtgtagaacaacctggtgttcatgaatttagttgttgttgactcatgtatcttctttgggggt

SEQ ID NO: 31873 - DNA, 373 bp, Glycine max
ctttcagccagctgtagtttagtgttgtgcattgaaaaaaagcaaaagattgttttgaggtttcttgcactcatttatgattgtatgagctcttgtgatgagttacttttggttgtgtttactattggtgtagtggttaaattatttggcagctgtccataaccagagagcgtagctgcttaattaggaggtttgatatgatgaaatagtttgtattgttattgcagaaggtaggtttaattcagtattccattctactgcaatggatgaatttattgctcatctgcatagtactagttgatgttttttcctgtgcctcgttatgtgttagagtgcgaagaagaataagtgtgccataaaaaaaaaagaaaaa

SEQ ID NO: 31874 - DNA, 260 bp, Glycine max
catatgagaatatgacacgtaatagtcataatccaataaaaacgtgacatatgaccgtcaacattatttcgtaacatccaattgtggacaagaagaccaatattaagtgatttgattacatacaaagataaagttcgtgaataattttattaaagggataaaatataagattaaagataaaatgggagatcaaatttataatttttcctttctacaatatctaattttaacaagaaactctaatggaaagaaaattcaga

SEQ ID NO: 31875 - DNA, 479 bp, Glycine max
ctcgagccgctcgagccgaaaaaacatgaaacgaaaccataatttccccttccaccaccggccacgcaagtgggcgatggtgatccccaccgtcacaatatgcttcctcctcctcttcctcccgctccttcccctcaccaaaccctcatcttcatcttcttctttttctgcgacatggtcttcttcttcgctgaatttaacggaagaactagaagtgggtgttccgagattggcgtacatgttgacggcgacgaaaggggagggggcgcagctgaagagggtccttcaggcagtgtaccatcccaggaactactacctgctccatctcgatctagaggcttctgatgcggagaggctggagctggccaaatacgtcaagtccgagactgtgcttgcggcgtttgggaacgtcttggtggtgggtaagcctgatttggtcacctacaagggccccaccatgattgcttctactcttcacg

SEQ ID NO: 31876 - DNA, 823 bp, Glycine max
gaggaagaaccaataacagaggaatccaagttcctttctagggaccgcgattcctcattcattcattcatatgcttcttcaactttctcctctcttctccctctaactcaggcagattctttcatctcagggagattatagcacagtgcctgaatcctttttagtgagttggcatcaatcatgttgggtggatttgtaaaaaaattcgcttccacaatgggaggctgcgcttcaaagccgaacaggaagagtaatgttcataaaagagaacacaaaaatttaggaaacatgcttcacttggtgacataacaaagaaaaggcatagcaatgcttcagccacccgccggaaatctgatgtttctaacatgaagttgcatcttgcccaactccaataccagagccatagtaaaaaagatgcaagtggaaaaacccatgaggatgcctggtttgactcagttagcattatagaatctgaatcagatgatgattttattagtgtacttggagatggttttccctttgtcactaataatgctttgggaagtgtcccaaacacccagttactccaacatgaaaatgcatcatgcttggtagattcagggtgtaaatatgatcggttatgtgatagctacttcaaagcaggtgtacctgagagatttctttgtcgtcctagagctggccttcagattctaaatacaactcaagagaagccatgccccagttcctggtctgcagtttcaccttcagttttcaacctccgcggagaaaaatatttcagagataagcaaaagtgtcctgctccagattttagcccttatatacc

SEQ ID NO: 31877 - DNA, 495 bp, Glycine max
agaagatctatctatggacaactgaatcaagcaacctctgacatttgaatccgtccatgcctatagatgtctgcgattgcgatcttaccctttctactccacgttctaatggctgcttcagaatcagaaccttttcaagacagtattctccagtgcctctctctctattctgacccctctcttccaaatccaatctctgctgtcacctatttccccaacagcccctcataccctcccatcttagactcctacatcagaaacctcagattcagttcctccacaactccaaaaccatccttcatagtggcaccaacccacgtgtcccacatccaggcctccatcatctgctgcaaaagcttcaaccttgagatcagaatcagaagtgggggccacgactacgatggcctctcctacgtttcagaagccccatttgttattcttgacatgtttatgctcagatcagtcaaagtcaacttggatgatgatgatgacact

SEQ ID NO: 31878 - DNA, 251 bp, Glycine max
atttacgtatgctatataatatttttacacaaatatccaagaaaacttgattatttatttgttttactatttcagtagacactattaacgaaaacacatgctacccatttaatcatcaattatctaaaatattaatttattcttttttaaaagtaatattaggcctttttctttttacatcttttaaactggaaaacaaaaaaattcttctacgaacaacccagacataaagatggcctttatcaactcga

SEQ ID NO: 31879 - DNA, 394 bp, Glycine max
gggcattggaatgttcttctacgtgcgccgtatttcttataggaagaaggaagaggaccctgaaggaaacaagtgggcaagaagtctaagggtcctaaaaaaataaaggtttctatgcttgagaagtcaatttcaaaaatgaacttgaatgatctcacgaaggctactgataacttcggcaaaagcaatattattgggactggaagatcaggaactgtttacaaagctgtccttcatgatgtgaatcactcatggttaagagattacaggaatctcaacattcagagaaaggatttctgtctgggatgaatatacaaggtgtgtcaaacatcggtacttggttccgcatttagagttttgcgtggcaaaaaaggagaggtttttggcctataaa

SEQ ID NO: 31880 - DNA, 533 bp, Glycine max
ggagctagttaggtgttaaatatttgattgcaatattaatatgaaggcacagtgtgagtagtgagaaggggcattagtaaagagatgggtagacgaccctgctgccccatagagatcaacaaaggtgcttggtctcgagaagaagatgaaaccctctccaaatatgtttccatccatggagaaggaaaatggcagaaggttgcccaaaatgcagggttaaagcgatgtggaaagagttgcagacaaagatggttgaattatctcaagcccggtataaaaagaggccacatctctgtggatgaagaggatatgattataagacttcatcgtcttcttggtaacagatgggcattgattgcaaagaggctacctggacgaacagacaatgaaatcaagaactactggaacactaatctgtcaaggaagttacagaaacatcctacatcatcagtttcttcacttcaacacaaacgtcatgaaaaggaaaagaccaaacaaatgcatgtagcacccgaagctccacggcgtaggag

SEQ ID NO: 31881 - DNA, 435 bp, Glycine max
caacacaattatgagaataatccctatgcaaaggagtttggcatcagcatagacagcaagcttgcatcagttgaggctcgggttcttccggctccatggttgaaatatcatgacactggaagagagaaagaatactgtgccacaagttggtcagtggaatatgatgaacaagaaagttataaatggaagtactgtaagatattgggcatgtatctacttctcacgaagtgtacaggaaagtgcagctcgtggattttgccaacagttagttcagatgtgccaatctcaggcatggaattcagtcaggaccctgcgattcctatacattcggctagaccagatcaggtaaagaaggctttgaagtatgtacattctgctgttatagacaaacttgatgggaaagagctagagttgctgattgcccttcttccagac

SEQ ID NO: 31882 - DNA, 293 bp, Glycine max
cgaagccccaacgggtcttctcgcgttccgtcgccgacgacgacgccgtttaaatccactaacgacgcttgggatgttctgtaccgcagctgcaggggcacttgcgaggttgcagatgaacgatttagtttcttcgaagtttgatttccagaaccgtggagtgctgggtggttttcctccacctgttgcggcggagaatgtatttttttccaaaccagggtgtttctcaggttcgataccagcaagtgagaccagagcagatgctgaagcagcagtgtggttcggtttggggc

SEQ ID NO: 31883 - DNA, 255 bp, Glycine max
gagattaaaagcaagggtagaagttttgcaacgttctcaaaggaacctactcggggaagatcttgcccaaatgaatacaaatgagctagagcagcttgagaatcaactggaggcagcactgaggaatattaggtcaacaaagactcaattcatgcttgaccagctttctgatcttcaccaccgggaaacattgcttattgatactaataacgtgttatggagtaagttggcagaaactgatcactcacaagttca

SEQ ID NO: 31884 - DNA, 292 bp, Glycine max
ggttgatacgttgtcttaaaccaacccacatgtgttgctggtgcttggattttgcatcagttaccttaccttaaccttaaccttagcatacttccttgttttgtgtcctctctcttcccttttcactcctttcttgcatgctttaaacattcactcatatcccactctttgctttccaactaaccattattattcctactctcataacttgttgccaccatcatccttctcagactttgcctccccgatgggtcctgtgagaggattcaagaagaaaagaaagccagagaag

SEQ ID NO: 31885 - DNA, 595 bp, Glycine max
gacacttcaacaaaaaaattacaaagcacgagggtctcgtttagcaacttgtaaaggacacaacagcatcacttacataacatgcacttccccttctccaccgcattctgtgttctctagtcaatagaaagtgagcactgaatttgctttgtgccgttcctgttttcttataatttgtgcatttttttgcacataaacaaaacccatgggaagggctccttgttgtgagaaagtgggattgaagaaggggaggtggacagcagaggaggatgagatcttggcaaaatacattcaggccaatggggaaggttcttggaggtcattgcctaaaaatgcaggattattaaggtgtgggaagagttgcaggctgagatggattaactatttgagagctgaccttaaaagaggaaacatttctgctgaagaggaaaataccattgttaagttgcacgcttcttttggtaacaggtggtctttgatagcaaatcacttaccaggaagaacagacaacgagataaaaaactactggaattctcacctcagcaggaaaatttacagtttcccaggtgcaggtgcaggtgcaagtgcagggatc

SEQ ID NO: 31886 - DNA, 400 bp, Glycine max
tatctcacgtactgataactttctatctcacgttctgataacaagttgagagctctgtgatgaacagactctataaataggatggagtgctttcagttttgtatcaccaaacccacttctctattcagaaaaaatacaccatctattcagagtgagtaagggtctggaagaacaaaactgtctttcaggttcatgtgtgcgccgcttttcattcaatttgcaatggctggaggtacgcttgtaattccttttaatttccgctgtttgatctaaatatgctatttaaatttatttgcatgtttagatcagtgtatgtatatttttacatcttcatcttctccttgcatgtaagattacatcgctttctagactggagtaacatatgatgtgtctctacatg

SEQ ID NO: 31887 - DNA, 121 bp, Glycine max
gtgcagtgtgacatccaaatgctcccttgtaagtatgagtttcatcaattaccacaaacctattggttaagatagagtaaacctcaacacaataagaatccattatgcaatattccatata

SEQ ID NO: 31888 - DNA, 239 bp, Glycine max
cagttattgtcttaccaaaatagttaacaaaatgtaacaagttacactatcactatttcatgcaaagagtaatacaagttgcaattttacactataaaaggtgaatttgcataaaatatgaaaaaaacatgctgtgaaaagaacctcctatatgggattgaggaatagtttcattcaccatacaggaagatgtgtgtaatcatctccttggtctgcttccatgtctaaagttggatcaa

SEQ ID NO: 31889 - DNA, 265 bp, Glycine max
gagtacaaaaatattcatctcttctaacttctaagcattcagtaaaagaactaaccatggcagagaccattcgcttgggtgttgctgttcttggcaatgcagcctcagttgccctttatgctgcaccaatggttacctttagaagagttataaggaagaaaagcacagaggagttttcatgctttccttacatcattggcctcttgaactgtctccttttcacttggtacggtttgcctattggtagctacaagtgggaaaattt

SEQ ID NO: 31890 - DNA, 321 bp, Glycine max
gaatggtgagaaggagaagggtggtgagggggtgcagcggtcttgtggcgaaaggagaagatcgaaggcgaatccgaggctgagcaatcccccgaagcatttgaggggggagcaggttgcagctgggtggccgccgtggctcactgcagtgtgtggggaagcactcagcggctggattccgcgaaaggccgacacctttgagaaaattgataagattgggcaaggaacttatagtaatgtgtacaaagctaaagacatgatgacaggtaaaattgttgccctaaagaaggttcgatttgacaatttggaacctgagagtgt

SEQ ID NO: 31891 - DNA, 345 bp, Glycine max
ggagtgtgttgtgtctaacggcccaagtctaacgttgtggagcatagaagagaaagggatgatattgaactgtgttagagtgacagctatgcctatgatggctgttccttcatggagatccacgtgctgctgcgcttcttcttcttcttcttcttcagtttcaaccatcaacactgaccaacttcgttctcaacttgatcaccttcattcagaggctgacgccaccagagccaagggtaccctacttaacttgcccatctctattattgttcttgttcattcttatttcattctgagttactttctctatcttttcttttttttttagataagcagttactttcc

SEQ ID NO: 31892 - DNA, 508 bp, Glycine max
ggacgagaaacagttatgcataaagagcaataagaacaaagagtgaaaggatgaggtagctagagagggtgggagtgagtgggcagagagaaggtttcaaagaaatggccacatgggtgaatggttggggcaaattactaccatttctggggatgttgatggctatgctaactcaaagtggaagcatggtggtaatcaaatttgctatgactgatgggatgaacaagtatgttatggttgtatattcaatggcactctccagctccatacttctcccctttgtcttgtttctacataggtcagagcttcctcttctcacagttcctgcacttggaagcttctttttgcttgcactctttgcgagttcagcacatataatggcttatgttggcatagaactcagctctcctactcttgcatcagctatacttaatgtcattccagctgtcacttttgtacttgctctcattttcaggatggaagaagtacattggagatattttagcag

SEQ ID NO: 31893 - DNA, 252 bp, Glycine max
cccgtttcatgatgcttgaattgcgttttgaagctgcaatgccatgacatgagaacatcaatgcccttttttttcttcttattttgtccaaaaatataatatacgtgtctactttgtaccatgtggtacttgtatttatggcacatgataaaccctcgatcttcaaaagtactaaatcaatttgaattctgcacggcttgatcgttaactatgtgaaatcactgccaatatgccttttacaaagtgttgatg

SEQ ID NO: 31894 - DNA, 358 bp, Glycine max
gacttcttccaatttcaaattcttcactcacccagtcgcgcttttctctgaatttcacgatgcgcacgtccagaaaagcagaaccctccaacaacgacgtcgtctcttcggaacacagaaactggagcaacatcttcaaatcgctggttcagatggtgcgcagccagcagaaccagcttcactccttcgcgagccgccacaagtttctcgaagaccgccttcgaatgcagcacgaagggtgggtctctgatgttcgatgtcacaaggatcaaatttctcagatgaatgggatgttgacgtctgaggagaagaaacggtcgctcgaggtggcaaaggcggattttgcgatgggtttgaa

SEQ ID NO: 31895 - DNA, 260 bp, Glycine max
gatgaaggctttgagaaaaaaagagcaaagaaattctgtctccccaaacaagacccaagattactcatttcgtgcagggacggttgctgctgcttagttgaaacttgtatggtgattagctattaagaggaaagaagaacgaaaaaaacagtttaaccgctacagccttctcaaaaaaaaaaaaaaaaaaaaaaaaaaaaagggggcccccgattagggacccccccccccggggatttatttcgggccgggaacctggg

SEQ ID NO: 31896 - DNA, 303 bp, Glycine max
gacaagcacgaggcgcaaacgaacccaccaaacgagtattggaatcactctctttctgcaaagcgaaaatggcgcagaagaagaaagctagggtttccgacgacgaggaaatggaagtgcaacatgatcaaaccagcctttaccaggttcttggcgtggagagaacggcgtctcagcaggaaataaagaaggcgtactacaagttggcgttgcggcttcaccccgataagaaccctggtgatgatgaggaagctaaggagaaattccagcaactacaaaaagtgatatcgattcgcggggata

SEQ ID NO: 31897 - DNA, 291 bp, Glycine max
tttcccggatacattttcttgatctttgccactggacttagatcttttattctttccaggtccatccttaagtgtttccaacttgcagggagtattaggcaagcctccttccgagctacccactaacggcacacattccctccctgttagagctggggaaatcaacccatcatcggtgctcatgtcctcagtgacttgttcctctggtgaatgcttgttttcgagctttagcacatcagaactaggtatggaggcagtcgttcctccagcatgctgcttgtctgacaaaga

SEQ ID NO: 31898 - DNA, 279 bp, Glycine max
ttcgtaccataaaagcctatctaatatcttaaacttatgactctaattcttctgctgaatgatatgccaaagacaccccaaaactaagaccatttatcctctttctctttttccccttccaaacatttcaaagaacagcatcatccaagactaaatccagcacaatctgtccatgagttatgttctttatagttttaacaataaggccacggaggttctccataggtgactaagtgaagatatgtttggatatatatgcagtgttgcagacatgatcaa

SEQ ID NO: 31899 - DNA, 449 bp, Glycine max
ggaggcaaatcacttcatccttgggcaataaaaagctgattggatcatttgatctaaaaaagcttcaaccatcatattgttaattacttccaattaatatgggctgtgctatcattaaccttctcctaataatttttatatatgaagccagcgccgacacacaaactgcaacagaaccagaagtggtcagaacttcacaagacttccactactgctgtgattataagcaggctagaggaaactacgcagccaacagcccctatcagaccaacctcaacacccttttgtccactctcacttccaatacagatattgactacggtttctacaatttcacaaccggcgaaaaccccgacaaagtgtacgccattgggctgtgcagaggagatattaatccagatgaatgccgtaactgcctcaaactttccagagccaatctcacagagctc

SEQ ID NO: 31900 - DNA, 265 bp, Glycine max
tacgaagacgacagatgggggaatgaagagtgagtagtgtagtgtgcacctaacaagagagaaagaagcaatcgctgccatgtttcctttcccagtgaagttgaaaattgagatcaatcaattttttattattgtatctttcatcattttgtagagcgaattctgtgttgaagggccttccttattggttgtaaaagagcaatcttggccattgaaattggtgggccatgcttgtgattgcctatgctattctccggatctcaag

SEQ ID NO: 31901 - DNA, 249 bp, Glycine max
ggcccctcaacgcttgataatcttattgaaccatttaaacaaacggatccatagaataattccacaccttaacttgagtctaccctgttacattactgatcagctactccataacttattctcctttgatattttctgttggagaacattgcataagaaagctgcagcacatttaacagagaaacaagtagccctttttatggtccttaaagcgtaggtgccttgccagttgcatgaagatcttttttg

SEQ ID NO: 31902 - DNA, 268 bp, Glycine max
cgacagaaggggagatacaatggtggtaagctgtctgatcggattttaatctcaactttctcattaagcaattatcaatcgctaaaaaaaatcatcaacaacaatgaaatacgaacaaaatatgacattctttccattcaagatggttcataaaatctgagataaactcatcataggtgaatactcgagtaaagcaatcaagaaacttgaattgagttgaacacaaccattttggtcaaagcccactatttccaagtaacaagacatc

SEQ ID NO: 31903 - DNA, 480 bp, Glycine max
gaaggatgctgaggctttgcacaccttctaaatgttctggcacctgaatacaccaatccctccacattggcagttaaaaatccctttgaaagagcaaagttagttcttgaacatgctgataagatgggttgcaagcgatacttaactgcgagagacatagtggaaggatccccaaatcttaatcttgcctttgttgctcatattttccagcacaggaatggactttcagcccagacaaaacaacagatgtctctccttgagacatttccagatgacaccctagactctagagaagaaagagcatttcgcctttggatgaatagccttggaaattcaacatatatcaacaatgtcttcgaggatctccgaaatgggtgggttcttcttgagactcttgacaaggtgtcaccagggattgtcaattggaagattgctaacaaacctccaattaagatgccattcagaaaagtagagaactgc

SEQ ID NO: 31904 - DNA, 269 bp, Glycine max
tcgtttaaataaaggtggtagagagagatgaaaagcgaggaaggtgaagcggaaaaggaggaaaaattgggagaaaagttaaggcgaggggtattggtagggaaaagtaggggcccctttactccagtgccctcttggtcttgggctcacaacaaccatagcagcagcgttctttctctttctgctagaaagctcgccgcggctctctgggaattcaaccactctttcccactctttcaaatgcatcatcatcgttctgctaacaacgc

SEQ ID NO: 31905 - DNA, 309 bp, Glycine max
tctttttctcttcttcttcatgcatcctttctgctgcgtgtccgccatttccgaccaggcctcgcctgtaaaaccctcgttcgcggacttcgccatgccgcctctccccgccgccgccgccgccaccaccgtgagatccgattcggctccgcgtcacagccacaagcacagccacagccacagcgggagccagcgggagcagccggtggtggacgtgaagatcaacgacctcgtcgggaacggaatctccggaatactgtacaagtgggtgaattacgggaaaggatggcgaccgcgatggttcgtgct

SEQ ID NO: 31906 - DNA, 423 bp, Glycine max
ccgtagtgtccgtccacgcgtccgcatttatcaattgttttgtttaaaagtagttatccaggagcacatattggacctgagccaacaactgataggtttgttgttgtcatgtctggatctgatgagagaagcgttcctggaaatactgttgctgtccaagcagacatgccatttagtggtcttacaacttttggcacagcatttttgtcaaaatttgtgtgttcacagatgcctcatcctctactggaacacatcacatttgttgacactccgggagttctatctggagaaaagcaacgcacacaacgagcatatgattttacgggtgtaacatcttggtttgctgctaagtgtgatttgattctccttctgtttgatcctcacaaacttgacatcagtgatgagttcaatcgtgtgatatca

SEQ ID NO: 31907 - DNA, 301 bp, Glycine max
agtgccaatgcgagctaccagaatcttacgaagcttacaggaaacagcagcatagatggcattctgggccaatgcaactgttccgcttgtgtttgcctgatatcatcagggccaagataagtgtgtggaagaaattcaacatgatattcctcttcttccttcttagaaagctgatattgccattctattcattcaccttgttttgtataatcctgcctatgacaatgtttgtgccagaggccgagcttcctgcgtgggttgtgtgttacatccctgctgccatgccttttctcaacattct

SEQ ID NO: 31908 - DNA, 360 bp, Glycine max
cgaaagagaaaaaaagagtcactttcccttctttttttttttctttttttccccagtttccaccttctccattttccaacaccgttctatcatggcacaccactcctcacaacgtcggaatctagcagctccagaatctaaccctacaaccccaaactcaaacccagatctcattcaaacatataaaccctctttcttggtaaaacacttgacaaaccttaacctgagtcaaacacacaaaacccgtccaccccacaaacactctcctcttattgacacccatttgcaggcaaaagccatggcaacctctgccatacaagagaaagagagtaccgtgcctgtgaagagaacccacaagag

SEQ ID NO: 31909 - DNA, 482 bp, Glycine max
caatctcttttctggatttctcatgccaggaccgaaaattcctaaatggtgggtttggtgctactggatttgtcctactgcttggtccttgaatggcctcctaacttcccaatatggagacatagagaaggaggtactcgtatttggggaacgaaaatcagttggttcctttttaagagattactatggcttccggcatgacagattaagccttgtggctgtggtgctcattgtgtacccaattgtctacgcttctctgtttgcctatttcataaagaaaatgaattaccaaaagagataagatagacacagacaaagacacagtttggttcttctgcagtatgctggcttcaatgttcatgtatagaaatatagaaatatgtggctacatagattagcaagatctctctctctctctctctacagaaaaataacagtggttctgtgaccagactcatttcataagaaaaaaaatatatttt

SEQ ID NO: 31910 - DNA, 320 bp, Glycine max
tcggaatcagctcgcctcgagcgaatcggctcgagctcaagcacttttgttgaatttgctaattcaaaatgcacactacatatttcccactttggtgggagagcactggggaccaatggtggtatgcatcaccaatagattgtgctgctgcaaatggccactatgacttggttcgggagctgctaagaattgacaacaaccaccttttcaagctcacttaccttcgccgaattcgccgacttgaagtcgtgtgggacggtgaagaagaacaacagttcagtgatgttgcaaagtgccgcttcttaggtggcacagaagct

SEQ ID NO: 31911 - DNA, 256 bp, Glycine max
ccacctcattcatactcttagcttatgctaaatacttgaccaaagcccatgtggttgtgaactgtggtggaaccatagtaactccaaagagactccgagctatagcccaaaaacaggtggattacttgctgggagacaaccccttgaagatgtcttatatggtggggtatggtccacggtacccgcaaaggatacaccacaggggctcatcgctgccgtccgttgctgttcaccctggcaagatccaatgctcagc

SEQ ID NO: 31912 - DNA, 272 bp, Glycine max
aaaattttcaaatggaaggcccaactagagtgatgaatcagttgcgagcattatggcatattcttgaactgttagacaaagaaatgtttgcccacctgtcaaaaattggtgctgaaagccttcattttgcatttcgtatgttgctagttctctttcgaagagagttgtctttcaatgaggctctttcaatgtgggagatgatgtgggcagctgactttgatgaatccatggcttatgatttagaagagaactgtctggaagcattggagtta

SEQ ID NO: 31913 - DNA, 407 bp, Glycine max
  unsure (1)..(407): unsure at all n locations
ttgaataatccatctacctctttntcttagtgcatgcctttcttcattttcttctcctcttcttcttcagttgaagatcttctatcatttattaatggtgcagatggagatataaagggaactagagctaataaaaataaaaagaagaataggagaaggaaagaccatgcaaaggatatttcttcagaaaatacaaatgaaaacgataaggaattgaatcctcttccttctgcatatcacgatgtcaattttgacaatgccttggaggcctctgcaagtaaacactcgaggacgcaaaacctccctgctattaatttttctccaaaatttgaatttattgatggagatgttgacgatgatttagatcctgcgatgaaagaggagcttgacagggaagtggaagattt

SEQ ID NO: 31914 - DNA, 664 bp, Glycine max
ctcaaagttcttaccttttctgtccaaattctgattctcttcatggatttcccgttcctggaaaagctgaaaatttggaagaaaaaagcagagcaagaagaagaaggtcctcctctggtgtggttcgaaacctctgccactgtttctcgccgcttccagtttgaacccaatggccaactttctgtaacgcttgttggtgattctaggccattataccacaggattgttgactctttcttgaataaatttttcccttcaggatatccatacagtgtgaatgaaggttacctcagatacacgcagtttcgagcactgcaacacactgcgagtgccgcgctatcagtgttatcaactcagtcactgctatttgctgcaggcttgcggcccactcctgcacaagcgactgctgttagttgggttttaaaggacggtatgcaacatttagggaatataatatgtagcaagttgggtgcaagaatggattctgagcctaaacgttggagaatcttagctgatgtgctctatgatttagggactggtttggaagttctttctcccttgtgtccacagttttttcttgagatggcaggcatagggaatttggccaaggggatgtcaattgttgcatcacgagctacaagattacctatatattcttcatttg

SEQ ID NO: 31915 - DNA, 407 bp, Glycine max
gttttgatgcacttcacattgctgccaagcaaggggatttagatattgtgaagatcctgatggaggctcatcctgaattgtcaatgactgtggatccattcaacaccacatgtatataacattgtcgactgttaatctctatccgcagatagtaaagcttctattggaagcaggtagtaatctggcaaccattgctagaagtaatgggaaaacagctttgcattctgctgcgagaaatggacatttggaggttgtgaaagcgcttctggggaaggagcctgcggttgcaacgcggactgataagaagggacagacagcacttcacatggcagtgaagggacagagtcttgaggtggtggaggagttgataaaagctgatccctcaacaataaacatggttgataata

SEQ ID NO: 31916 - DNA, 340 bp, Glycine max
accagttccaggattgaagtagaagagttgtttccacattcacatggttacggctacactgatttgaactacttttgatgaatgcctaattgtctataattcttattccatgagatcaactaggctatttgagggaactgaaacagtttagtgtataacacaaggtaggcaatacagtgagtgagcaattgccagccacaatgatgatcgagacattctgttatcctcactttcaaacaagctgcagagtttgtggtcttgcactatggatatttgcggctcacagccttattggtagaataatggctatgtggatcaaagaaaatatacagcatttatt

SEQ ID NO: 31917 - DNA, 368 bp, Glycine max
catcattaaccaaaaaaaaaacatcaaaattaaaagaagcaagcatgggggaatccaatgtcatgaccaagactgaggatggtgcttgtctgtctgcaatgctgcttagtactaatctagtgtaccctgcagtactgaatgctgctattgagctcaacttgtttgagatcattgctaaggcaacaccagctggttcttttatgtcatcccatgaaattgcttctaagctcccaacacaacaccctgacctgcctaataggcttgaccgcacgctgcgtttgcttgctagttattctgttcttactacttccactcgcaccacacaccatggtgccactgaaacagtttatggactctcacaagttgga

SEQ ID NO: 31918 - DNA, 299 bp, Glycine max
tttgatcttacggatgaagatggtactcagatgcaggcatctatgtttaataatgctgcatggaaatttttcgacaaatttgttctgggaaaggtttactacatttcaaggggaactttgaaagttgctaacaagcagttcaaaactgtgcaaaatgattatgaaatgacgctaaatgagaattcccaggtggaagaggtggtcggtgaagcaagttttgttccggaaacaaaattcaactttgtgcagattgatcaactgggtcctcatgtcaataagtctgagcttgtggatgttat

SEQ ID NO: 31919 - DNA, 439 bp, Glycine max
acgaggttctcttctcttcgttttctccttaaccatgaagaagctctaccgtaaaggaaccgtccacccctctccctcgccgtctccgccaaccatctccgaccacctctccttcctccccgccgccatcctcaccctcactctttccctctcttcggaggacagagaagtccttgcatacctcatctcatgctcatccaacaacaacttttccggcaaccctcgccggaaacctaaggttgtcgcggacggcgatcaccctcctctcttcaactgcagttgcttccggtgctacatgagctactgggtccgctggaactcctctcccaaccaccaactcatacacgaaatcatcgacgccttcgaagactctctcacccacaccgcaaagccttctagaaaggacaagagaaacaagaggggttcaaaacccaagcct

SEQ ID NO: 31920 - DNA, 387 bp, Glycine max
cgcggcacttccttgaacaagaagaggaagtttcaatttgagtgataataaaagtataaaagctccttcattcccttcgcagttcgcagccaatcaaatccattgttttctcttctcctcctccttcaatggattctctgacttccatcaacggcgatttccgcttcgccggcggcaccgatcgcagattcgcgttttcgcgccaagcctccttccaacagcctcacacgccgatagacattccggcgcacggccaccactactggtccgcgcgtgacgataaaccctcctccgcctcgctccaaagatcctctctgtcctccttcgttttctccgttttccgaaacgttaggtccggccacaggtacatgaagaggctctttctct

SEQ ID NO: 31921 - DNA, 250 bp, Glycine max
agttggaggagcaaaatcgagctttgcaaatggaaaagatgaatacaatgatggcgagccaggcgagagcttcgtttcagaaggtcacgagtaatggaatgagaaggccatgcactcaattttggggttgctttcgatgatgcaagatgataatttgaagagtgaacagaaacttattgtgaattcaatgctaaggaccagcactgtcttgtcaaacttgataaatgatgccatggactactcaactagg

SEQ ID NO: 31922 - DNA, 189 bp, Glycine max
ttcatgaatatacagaatggaatatcttcttgaagagcaaattgtattatactaactgctaattacttctaataaataacaaggctagcacaagtgtccctagttcctccacctaaaaagacgattacaaatgccagccttgttatttattagaagtaattagcagttagtataatacaatttgctctt

SEQ ID NO: 31923 - DNA, 496 bp, Glycine max
ggacaatttcagagctactcaagaatccaagggtgatgaagaaactccaaagggaattggaaactgtggtgggtatgaagaggaaggtgggggaatcagacctggacaagttgagcgtgggggagatggtggtaaaggaaggcttgaggctccatccagtggcaccgttactattaccacaccactcgagggaagattgcatggttggagaatatttcatacctaaaaattcaagggtgatagtaaatgcatggacaattatgagagacccaagtgcttgggatgaggcagagaagttctggccagagagatttgagggaagcaacatagatgtgagagggaaagacttccggttcttaccttttgggtctggcagaagggtctgtccaggattgcaattgggcctaaacacagttctcctaacagtggcccaactggtgcattgctttgattggaagctaccaaataacatgttgccatgtgaattagacatgac

SEQ ID NO: 31924 - DNA, 318 bp, Glycine max
gtagaatgtgaagctgttgatccagttgatgtggaaaagttagcaactactgtaaagagagcccttggaacctatggtaccccagccatgacacaaatgatccagaactgcatggcccaagacttttcatggaagggaccagccaaacaatgggaaaaggtgctgttgagcctagaggttgcaggcagtgagcctggaattgatggtgatgagattgctcctcttgcaaaggaaaacgtcgccaatccttgagcataaccattgataactgtttttgaatatggccatcattgtcaagaacgttatctaatacttgca

SEQ ID NO: 31925 - DNA, 196 bp, Glycine max
taccaatcgcgggatcgtagggaagagaactcaacaagtgcttgtaatcctgaagatatagccaatggataggcaattgtaccttgtggtcttatagcctggagtttgttcaatgacacatacagcttctcccgtgacaataagaatttgactgtgaacaagaatggcatctcctggaaaagtgatagagagcaca

SEQ ID NO: 31926 - DNA, 263 bp, Glycine max
ctaaagggagatcttcctattggagttgacagaaacagtgtggatacctgggtttatccaaatttgtttcgaatgaacacttctactggggcacctccagattattttgataaaaatggccagaattggggtttccctacttataattgggaagaaatgtcaaaggacaactatggttggtggagagctcgattgacacagatggcaaaatattttacagcttacaggattgatcacattttgggattcttccgaatttggga

SEQ ID NO: 31927 - DNA, 271 bp, Glycine max
gtatcctccagtgccatttccatggagctagaggtgcaggtggtgggaggcagagactcctgcttcgtctccctccctctctctctcatccaaactctccagtccacgcgctcatcaccgatccctcaaatcctcgctctcgaacttcgctctccgactcacccccctcacacctggttcgtcgcttggtccggcgccacttcctcttcttcttccgctagagaggtttctcctcaatttgcggagtgtgtttcgttgccgaatcatgcta

SEQ ID NO: 31928 - DNA, 174 bp, Glycine max
cggaattcggctcgagcaactttctctccgacgttgacttggagcttccttcttgcccttcgtatctatgcgcgctgcttgaggtatttgcagatgagcttttaagaaatcaatctttgagaagatatcttatgaaggttgattcagtgtcttccaccattgaaaaactttttg

SEQ ID NO: 31929 - DNA, 437 bp, Glycine max
caacttcctccggatgttctcataatttatacagctgactagaagcctagaactgccaattgttatgctgttttgcaatgactgtgttatgccctaagggcaagtttaaggtggtggctagcgaagatttggtacatgttggccactgttgttatgtataatatttttggcttaaaattttattaaaattcattttgtctcccccctaatgttacccctttagcttgtgccttgtcatttggcaaacaagtgtaagaaaaatttgcatcttcattagctttgtgaaactctagtgataatgtttacttaaaactgaacatggacactgcatagatggatgcaagaccatttactttgtgtttctgctagtgtctagctgttgattagacttggatcccaagttccaattgaatgagatatttgttttatgcaagacc

SEQ ID NO: 31930 - DNA, 439 bp, Glycine max
gctgattgtggccttcgatcccttgttgtttcaaacaaatgaattgaacttgtgattgtgtgaatacaccccttcttcaaatgatggttcttgtggcaaattagtttgattcacaaagcgccacaaaaagcaaagagagggcatgggcaattagggggttggttgcctctatttgacccaccaaggcatgacattgccgagaccataagacgtgctattatgactgttgtcttcttctaggcgctgctcttacatcgaatttcttcacggacatatttggcgtgagatctatcaagaacaaccaccgtgagctcatagcaggtgtttatcttcaagtattgtaggtcaggctttcattgctacacagtcaaggagctggacttacattgaaatgggtatgctctcctaatattcttactcttgcatagaaaccacacat

SEQ ID NO: 31931 - DNA, 394 bp, Glycine max
tgaaaaccaaatatggatcccaaccttggttccaagaaaacttgcacagtggatgcatctctacaaaggacgccttaaaattttctcttatctatcctcttcaaaatcttctggaatgtaaatcaaatatgggccctttccgcattcgtttaacatatactcacacaaaagggaatgataaatcttccgattgtgctgctgagacttgcaagagaagaaaaataggtgatccaagcatagttggagatagatcttttagcagtacacttgaaaatgattcctctgactgctgtaaattcacgctagacaaggcaaatgagccttgccattttacttacagttgctacaggacgcctttctattttggtggaagatacctaaagtattcacggaa

SEQ ID NO: 31932 - DNA, 488 bp, Glycine max
  unsure (1)..(488): unsure at all n locations
tacaaacacaatctcacttcacaatctcgcaactaaacacgcactctgcattcattgaattatctcaattctagaacttcaccatcacctttgtcccaatccccaatcctcctatttaatttggtgtccctaaatcaccatgccaacttcactttccaaattccatgcttcaattcaaaattaacaaaaattaaaacacacccatcatcacttttcaacactgattcttcaaattcttggatctgactctgctctccacagttaccaaagctacgttctttggtgctaagttcaagatccaatggcggttgctacaagaggagctagaggtggatctagttttcgaagcttgttctcgttccggatcttcatttctgccatgttttctcttctcttcgttgccaccctttcggtcctccttaccaccaacccctncacatcgaacgatgaccctgatcttcccaccactggtaatgcatacgtgcata

SEQ ID NO: 31933 - DNA, 460 bp, Glycine max
accatttcccgccacactcctcactatacaaaaacattttcactctcactctctcgttatctctcattctctctgttttctccaaagcaaaaccttccctacacactttcaatggccgccaaaacggtaacccctgacgccgtttcgatgctcctggcaaacacttcccccgattcctcatcggatctccccgaaatcgttgttcaagttctcgatctcaaggcgacaggcaataaatacatgtttactgctaatgatggaaaaacgaaactgaaagctatgattccttcggatatgcgctctcaggtgctctccggggctattcaaaacctaggtcttattcgcgtccttgattacactgtcaacgtaatacccaataaatcggacaaatacctcattgtcactaaatgtgaacctgtatctcctgcgcttgaaattgagataaagagtgaggaatctg

SEQ ID NO: 31934 - DNA, 305 bp, Glycine max
cactcactcactcattctgccgccacaccattgtcggcaacgcccagaaacgcaaccgttatgctcaaaccgcggcggcgcgcaactcatttctcttccgagcacaatgcagctccaccgtgtctccgccgcatcgaaactgagcctcacgtgcctcagcctcgccttgaaactcgtgctgttgtacgccgcggaggcacagcttcagcaccgcggccccgacctacattggtaccccggaaccgccacctggtacggcgaccccgaaggagacggcagcaccggtggggcatgtgggtatggaa

SEQ ID NO: 31935 - DNA, 392 bp, Glycine max
gtttttctctcttcatttatgcatatacatacgtcttgtcaccctatgcgtttttgtatttcttttcgtcctcttcttctcttacaattaatactattattaattgcaactgcgtttattagtttaccttcttgagtaacaacatatttactcatcatagtgtagttgtggggaaaaaggataaaaaaaacatactgagagagagagagacagaggtaaacgaggacacagtagtaccatttattcctctgcttatttattagctatcagcaacgcttcgcatggctgcaggttcttcttcaaattgggtcatggaaagtggtgatgttcctcatgttttggccgttgatgacaaccttattgatcgcaaactcgttgagaaactcctcagg

SEQ ID NO: 31936 - DNA, 295 bp, Glycine max
cttgaaactcagaccaactgacacacagagaaagagactgacacagagagagagagaagcatcagcagacatgggaagagctccttgctgtgacaaagccaacgtgaagaaaggtccatggtcacctgaagaagatgccaaactcaagtcttatattgagcagcatggcactggtggcaactggattgccttgccccagaaaataggccttaagagatgtgggaaaagctgtcgtcttagatggctgaattatcttcgcccatacatcaaacatgggggtttctcagaagaagaa

SEQ ID NO: 31937 - DNA, 356 bp, Glycine max
ttttaacatgttgtttttcaattcaaacactctctctctttctttctccctgtcgatccgagttagcattccaaggagcgagtcactgactcgctagcacaggcggcgttttctcgtttcgccacgcatcattcgatttcgctctgttctgctacgctccactccgcaccataacgaatcgaatcgaatatcccgaaacaatcacgtgatattcgatcatcatctattttctccgatcaatcacgagatattcgatctccttctcaatctccacagtttaactccagcttcaaacacacaccacgcgcgcaaacttttttttttgttcaacttcgcgttgttatggattttccggg

SEQ ID NO: 31938 - DNA, 527 bp, Glycine max
tgacgaccagactcttcctcttcgcagggactcttctactgcttctactctcacgcgccacgcacgtgtcatccgccaccttatgtccgccgtgcggcaacacgacggtgccgtttcccctgagcacaaccccaacatgcggcgacccgtcgtacaaaatccgatgcagcagctccaacaccctcgtcttcgacacgcttaacaactcctacccgatcgagtccatcgacccgaactcccagcgcttcgtgatccgacccgctccgctgttaacgaacacgtgcgtgtccaccgataaagtgcaccaggggatccagctcaacaccaccctccccttcaacatcacaagctccaacaccatcgtgtatctcaactgcaccaccacgctcctccagtccccgctcaactgctccgccgccagcgcctgccattcctacatcaaggccaccgcctccgccgccgcatgccagggagctgggccactctgctgcacctatcgcaccggcggctccagcaactcctacatg

SEQ ID NO: 31939 - DNA, 360 bp, Glycine max
gtttctctttctcttctttctcctttttcttctttccttttccctcattttcgtttctttgttaatttcttctcagtcaaccatggactcctccgaggtaccaccaagagcaccaccactaccgccaccatcaccgtgtgaaccttcttccttcgccgcgccacagtttgacgtcttcagacagcagcactagcagcaccagcagcaacaacaatggactccaccactcccaattactgccacctctgactcctaccaccgtgtctgttcctccatctcctacatcaccctaccctccgaaatccgtgaccagatccgaatccggcaacccgtacccgacaaccttcgtccaagccgaca

SEQ ID NO: 31940 - DNA, 457 bp, Glycine max
agcgaggtggtggtgtaggaggtggaggtgttggcggcggcggcggacgtggtggaggtggagggattggtattggcattgggattggagtaggagttggggttggagctggtgctggtgaaggtttcggcgttggtgttggtggaggaggtaggggtgggggtaacaattaagcacattgcatgcatgaggttatatatggaactttgattatgggatcaaatatataattatgtcttaattagttgaccacatttggatatgtgcctcaagatgagtttttttatgtgatgattatcataaagtgttgtcgtaagtttaagcaaggtttttggaacagtcctattacaattactagattccatgttaattaataattagtgacactagtactatactatctccatttgggagagtttgcaatcttcatttgtaataacatgtttagtgttgttaa

SEQ ID NO: 31941 - DNA, 459 bp, Glycine max
atcattattaagttgatgaaccaacgaatttacgtgtctgtcatgacagactcttctattgatttggaaccttgctgtatctgtcaggatgaatttgctgatggagagaatgttggatcactggattgtgggcatgagttccatagtggctgcatcaagcagtggctaatgcagaagaacctctgccctatttgcaaaacaaccgccttagctacttgatagggagaacctctatcctcttaagctggttctacctatagcttcttttattttttaaactttatgaacttctttgaactggacctctcatttgtcatgattggggacgataacatgtcccctaaaaagaagtaaacaaaaaacattggtgggtgaactataactattgtagagtttcatttatacagttgtaatggatgattacatgtggtttagataagctataagcacttggatatt

SEQ ID NO: 31942 - DNA, 295 bp, Glycine max
ggcagtattcacggaatgtgagtcaaacacgctggatcattgatgatgaaagaatgggagaagcatcagttgaggaaataattggtggaaacatcctccaagcctgccaaggtccggatgttgggtccaggcaggccatttcttgttgaggtgcaaaatggaagacatatcccgtctgaactgtttgtaaaagatatagagaaaacgatacataaaatggagaataaactggttacggtgacaaatctgaaacttgttggtagtgatggatggaaccttatgcgtgaaggtgaag

SEQ ID NO: 31943 - DNA, 493 bp, Glycine max
gatccgtggtcctcgcgctcggtggcttccgtcgcctccacgcactttatctcttccctctctccaaacctcaacaactacaacaactaacatcatcttcatcctcttcctcttcctcctcggcctggggccccaccgtaccgcagatgattcgatcgaaaccgctacgtttggggaaagacgaggttcacctctctctttcgctcctctctattcgctactacgagaagatgaatttcaataacagaaccaccagatgattgatcattcttcttccataatccatccaccatccgcgtgttgcttctttttttgttactattaatcaaacctaatctcggatgtggacttctttcttttccttaatttgtgcgatttttagatttcagttgccagagtctgctttttattcgggcaattagtctataagccggacgtgttctgtaacttgtatgtactttgccctgataaatatataacaatatatatgaat

SEQ ID NO: 31944 - DNA, 452 bp, Glycine max
aagagatggaagttgcttgtatgttaattgattttcatggacattgtgtcagtggttcatgccagtagaaatggacttcatatttgtgctattgctattgggttgcttatgttcttttgtgttgcctgatacgccaggagatgcactatttgcattgaagatatcattgaatgcttcagctcaccagcttactgactggaatcaaaatcaagtgaatccttgtacttggtcacgtgtttactgtgactcaaacaacaatgtcatgcaagtatcactagcatatatgggattcacaggatacttgaccccaataataggagttctaaaatatcttacagctctatctttgcaagggaatggaatcactggcaacataccaaaagagttaggaaacctgacaagcttgagcaggttggatttggaaagcaacaaattaactggagaaataccct

SEQ ID NO: 31945 - DNA, 582 bp, Glycine max
ggctcgaggttgattaatatctctaaactataactccattagcctctctcagtctcaaacatatatactttgactagctaggcatggttgagcttcggttaagcataagggctctgcaattgccaacactattgattctgtgtttcttcctcattttggggaattttcacaaagctgaggccagaattagacatcacaaatgggaggtaaagtatgagtttaggtcccctgattgctttaagaagctggttattacaatcaatggcaaaactccaggacccaccatccaggcacaggagggtgataccattgtagttcaagttaacaatagtttagtgacagaaaacctttccatccactggcacgggataagacagattggaactccttggtttgatggaacagaaggggtaactcagtgtcccatattgcctggagacacatttatttatcagtttgttgtagacaggcctggtacatatctttaccacgcacactatggaatgcaaagagaagcggggctatatgggatgattcgcgtggcaccccgtgaccctgaaccctttgcttatgaccttgacc

SEQ ID NO: 31946 - DNA, 183 bp, Glycine max
gttgatttgatacatgatagcacagtaattagaggtagaaaaagaccaagaagaactctttagtgaaaaccttaaaacagatatagatttaaatggcttatccgaagaatttgtttttggaaaggctttggtgattgttttatgccctcgaattagcactgtacattaaataaaatagtttaa

SEQ ID NO: 31947 - DNA, 299 bp, Glycine max
gtgtacgtaaccgtaactgcactgtgaacatttgaacccaatccccaactcagcactgcatcgtgaagccgaaatggggaaccaataccaccaagcaacagatgggcttctgagccttttcacaaaggccaatcacgatctctctatggttcaccatcgtctcgaaaaggagtttcagcaggtttaccccgacaacgctaaccctatgaagctggtttctagaatcaagaaggttcaggaagatatatcaatcttgaaggggcagtgccatgagcttctggctgctaagcaggatttga

SEQ ID NO: 31948 - DNA, 264 bp, Glycine max
aaagcataccacagagccacgcgcagagggggagagggaaagaaaacagaaaaacaaaacagctgaattttggtgtctagtctacattaagattgtcaagagatggattttgattcatctttcttccaataccaaaactttaactcttcctttgtaaattcctctgtttgtgcagaaccattcccttgggaagactttcttttcttcaatgaagaaaacaccaccacaccaccaccgcccttgattccttcaccatcactgacc

SEQ ID NO: 31949 - DNA, 304 bp, Glycine max
tgccttgcttggaagagaaaaatggcaacaaatggcaagacacctgcgataggaatcgatttgggcacgacatactcatgcgttgcagtgtggcagcgtgatcgagtggagatcatcgcgaacgaccaaggaaacagaacaacaccctcttatgttgctttcaataacacccaaaggatgattggtgatgctgccaagaaccaggctgctaccaatccaaccaacactgtctttgacgcaaagcgcctaattggtaggagatttagtgatcaagaggttcaaagtgatatggagctatggccat

SEQ ID NO: 31950 - DNA, 825 bp, Glycine max
acgagagagcatctattggagcctctattacagacaatacttgctttatctggaccacggactacaactatgttgggctatgagatccgctccacgagcgtccatgagaagatgcttcagatgtggaaaagaaactttgacgtcaagactgtcgcgaagtccaagatggatgaaacatttcaacatccaagtattcaactcttcattatgggattcaaacaatctgccgagtgcacagagaacccaggtcaggcaactgttgaaaaagttgatgtggaaactgttgtggaggataaaagcagggagggaaatgttgtagtagaaggatctggtctcgttgaagaaaatgttgaggatcacagtaagccaatctcacaaaatgcaaagcttagtgagtgggaagccagaaggtatggagcaatggctgcaaggattttaaaagatgtaaaaatatcctgattttgagagttgttggtctgggggatatattgtcatagcaaatacatcatgatagtcatatgcatatgcttcaagtatgttcggttcggtttaatttaccgaaactagaaattgttttttgttacattctgaaaagtaacaccccccacaaaaaatactaaacatgcactttcacctttacatgacccacttttctttatgacttgctggattccaatctctgtttaagtgtaggtgtatcaatgctgaagcattgaccttaagtttgcccgaactagaaaacatttgcatgatgcttggatgctgcaccatgtaatatggttattcttattatgcatgatacaagagatcttcagaacatttgtc

SEQ ID NO: 31951 - DNA, 344 bp, Glycine max
tgtgcatttgtgaagctcaaggagggatgcagtgccacatcagatgagataatccaattttgtcagaatcgtttgcctcgttttatggcccctcgaactgtggtgtttactgatctgccaaagacatcatctggtaagactcagaaatttgttcttagggagaaagcaaaggccatgggaagcttgactaagaagaacgctagccggttataaggcacatttattctgaaattttaatggaatgtttgttgatgttatgtgctttaaggtttttattttcgtttatttataaaataaaatctgtccatttgtatgaatagacaattatgcatagttgtaacaag

SEQ ID NO: 31952 - DNA, 259 bp, Glycine max
gtagaaagaaaagcgagagaatatatgacagggccagttcatggaattcatccattggcaaatggagggggtaagggccttgaacttcggctgagggaggttgaactcaagcacgatccatctccaccatccgtcaaagccaggattttattttgaacatattgtacgtgttttctatataatgaatgtatctgcatgtaccgattactatattccccagtctagtttgctaagaatagtattatatccggtgtagcac

SEQ ID NO: 31953 - DNA, 397 bp, Glycine max
tgatttttggagctcgcggatgagacagaagtacgggctgaaccatggtggtgataagtacagcttccaaccatgaattcgaggcgatgagtgctactatactagtcatcaagcaattcaatgctgtgctgacatctgagtacatgtgaatatctttggtttttaatgttttatttactttcatttgttctcaggaaaatttataatgtaagcaatatattggtggtatatgtattttcaactatagttattgattgaagtttaagtcatgtacttaaatagcatagcaagagagaagaattgaaaagaaggctacaatacaaaggacccgatgtaagcaccttcctcaatgttgtactgaccgtgcagtcttaataacagtaaaatagttattgac

SEQ ID NO: 31954 - DNA, 849 bp, Glycine max
cccacgcgtccgcggacgcgtggggttgaattttgtgaggaacagagattttgaagttttttgtgctggggatttggtttttcacaattcaaggatgagtagagtacaaggaagctagcaattagggagttttcagcaatattactctttttccagattgtttggactctgaggctacaggatgccttttcaaatcatggatcagaggggtgtttctgcttcatcccactattttgatgacatttcctttcgctctgagaggaatgttggattacggaaaccaaaatccattaatgaccattacccacaaggaaacaatggaatggtagcatcacctggcagcattttgaacgctacacccccccttgatgtaaatgcaaaagctggcttactggtgccacaggctagtctacctggggatagcatacattccacggaatcatcgaattgccgtcccaaatcattgtctgatgcatgtctgcagtcagcacctacctcttatggtttaattgggaacaagattgtgaccaatgctgccccttgtgaaagtagtttattctcaagctccatgtctgagatatttagccaaaagttaaggttattcgggaatgatgttcggtctgatcatctcattaatgctgattcccctcctgaggaagaaccatataaatctctcgaagaaatggaggctgacactatagggaatctccttcctgatgaagatgatctgttttctggtgttgttgatgagttaggatgcagttctcatgccagaacaaatgatgattttgaagattttgatctgtttagcagtgggggaggcatggagatggaaggagatgaacattt

SEQ ID NO: 31955 - DNA, 487 bp, Glycine max
gacttagcacactcttctttgttgtctcttccctctcccatttctctttcttcgccaactgttcctccttccattccaacacacacaacaacaacaacaaaaactagttagattcatcgctacaccttcacattgctacctaaaaatatcaattcaacaacggtttcagggttttagcttctgctacgtgttggtgtggtgaatgccctttctgttctgcgtgtgccacctctctcagccagtgttcactacacccacaacacaagctcttacagggtttttaagaaagatcagtctgacagctaagtctttgcggggaagcaatatttggctgagcttgctgactgactgaggttaaaggtgatattattggatgtgatgaagcttaaaacatggcttgcgagtgttctgttgctcactgttgccatgcttaccgctacattaggtgcattcgtgggggtaaacattggcactgatgtttctgatc

SEQ ID NO: 31956 - DNA, 246 bp, Glycine max
ctctccctcactttctcttttcttctgcaacaaaacaataataataccacacactcactcacatacaaaacttcccttcaacaccatcctagctagctcctcactcttcaacaccatgggcgtaatagcgccgccgcagacatcaccatcacttccgttggttacaaaccttcaccaccttctctcttctcttcttctcttccacttcagccattaccaatctcgccccacatcccagtggtgggg

SEQ ID NO: 31957 - DNA, 235 bp, Glycine max
tgcttcttgatcaggacactgggagaaatggatattcaatccacacctattgacactaagggcttcgagacacttgttaaattggtaaagagttgttaacatttcccctactttctctaaaaaaattcctttatatgtggttatgtatcatatggaaaagttacttgcagaaggagacgatgatgagaaatagttttgatttgtatagtggattattcgtgtataacagattcgc

SEQ ID NO: 31958 - DNA, 235 bp, Glycine max
acaactcacacatccactactcatcaacacacaaaagtcttagctacctagctagtagcaatttgtgcctcaaattgaaactagctttagatatggctaattctcttaatagccacttttttgtagtagtatttattctttctctcttggccttttctagcaatgcaactatctcccaccttctatgccaaaacttgccccaatgttcaaaccatagtgagcagtgcaatgaggc

SEQ ID NO: 31959 - DNA, 747 bp, Glycine max
  unsure (1)..(747): unsure at all n locations
gaagaaagtttgaagaagacagtaagtttcaaagttgcatgcatagcaagtcttgagaaggccttgcatgagctgcgtacagaaagtgctgaaacaaaggttgcagctgagagtaaatttgttgaagcacgccaattaatagatgaagcacagaaaaaatttacagaggctgaagccaaggtgcgtgctgctgaatctttgcaggcagaggctaagcgatatcacaatgttgcagaaaggaagcttcatgatgttgaagcacgtgaagataatctcaggcggcaaatcatatctttcaagtccgattgtgatgaaaaagataaggagatgattattgagaggcaatccctttctgaaaggcaaaagggtttgcaacaagaacaggaaagattacttcaatcacaatccttgctgaaccagagagaggaacactntttgagtaggtctcaggaactgaatcgtcttcaaagagagttggaggacacaaaagtgaaatttgaaaaggaacatgaagccctatatgacgagaaaaccaccctaaaactgaaggaggcaaccttaatacaacaagaagaggaacttgctaaatggaaatctgagctgagcaagaaagaacaagagttacttgaatttcaagcgaaactttctaatagagaatctgataaaacacagaaagttgttgctagtcaggaagccgcactgagaaccaaaaaatataacttggaagttgagctgcaaatgcagcgc

SEQ ID NO: 31960 - DNA, 294 bp, Glycine max
cagcgcttcaactcatacggagtcctcagctcaaaacatatgtgggacacaactgaatacttcaaaattcaaattaggcctccttctctgtgcagcttccaccaaatgaatcgccttcttcttgttcgtcaccctctactagctttatccaagctaccaccactatcacccttttcccaaacctattattattcatacacacccacacggataaattctcaaatatataagattaaggtccctcctcgcacaatcgatgcattttgcactaccaacaaagagttgtcatctaag

SEQ ID NO: 31961 - DNA, 311 bp, Glycine max
ccactagtaaccagagtttaaagaaccagataatttttcagtgaagaagaaaaatcccaatgattgtgactcgttctgctttgatgctccatctccaaaacccaccaattcgctaccacttcttctcccacttcagctatgctcccaccttccctactctattcaaacctcgccctttctctccaaccactccacgccaagcacaaaccagaacctttgtaagcgctgttgcatcatcatcatcagcagcacatggttccaatggcagagacactttctttgcagaagaaaacgtttcgtggagttcactc

SEQ ID NO: 31962 - DNA, 332 bp, Glycine max
aaaaattgaaagtgcagactctataccaaacttgcattcaattattacagcgtctgatggggccatggttgcaagaggagatcttggtgcagagctccctattgaagaggttccacttttgcaggaagagataataagcatatgccgtagcatgggaaaggctgttattgtggcaacaaatatgctggaaagcatgattgttcacccaacaccaaccagtgccgaggtatccgatatcgcgattgctgttcgagaaggttctgctgcaataatgctttctggggaaactgctcacggaaggttcccggtaaaagccgtgaaagtaatgcata

SEQ ID NO: 31963 - DNA, 480 bp, Glycine max
gcttcattcattggcttcttccactcctcacaataacatcaacatggctgataagcaatcccaactaaacggtgcgtattacggccccgcaatccctccatcggagctgccacgtcaccaccaccgtggccgacgctgctgctgttgcctcttcagcttcttctggaagcttctccttgccatcgtcgtcttcctcgttgtcgtattcctcgtcttctgggctgtggtccagccacgcaccttcaagctccatgtcaccgacgccaaactcacccaattcaacctcaccaccaacaacaataataacattaacatgctccgctacaatctcgttctcaatctcactgcacgaaaccctaacaaaaaactcaacatctactacgaccaagtggaggggccacgtgtcctacgaggggatgaggttcgcctcagcggacctgatcacatggcgaaactcctttcgccaatacacaaagagca

SEQ ID NO: 31964 - DNA, 503 bp, Glycine max
ttcgtccgcctttgtctgtgaaggtttaaggttaaggttttcacagaattcctctaatggcatccatcgtatccaccaaagccaaccaatttcgctattccacgcgccttctcttctcacaccttcttcgccaaggcagaccctccacgctttcaccacccttctcttctcatcttcaaccactccatcacccttacaaggttcggaatcaaagttatggaaatgggtcgttgaggttgtgtcaaaggtttctatcttcttcttcttctcctcctgctgctaatgttagtggagaaaaaccagcatcagatccagatcactctgcaaaagatggttctggccaagggaaagagtctgggagtggaggagatgagggtcagaaaagtgatgctgggaaatccgttcgtggagggcctgtttcttggttgagctttctcttgctggtgctcactggagctggattggtgttctactatgacagggaaaagaaacgacatattgaa

SEQ ID NO: 31965 - DNA, 559 bp, Glycine max
gttcaatcagcagtattgtggagtacactcttttccctgaacttgagaaggcagctgaaattacaccagtgaaggacaccacaactgacaaccttccagctgagagcacagaaaagcttattatgccatccaaaattcccaaagctgctcaagtcccacagaaagtccagtcaagaccttctaggctttcattgaacaaaacctcctcgaaggttctgtcaagtgttagaaaacctgcagccagtagctcttcttcggtgaagccccctaaacgatggcaatagttaggatgccacttgatgctgtagagtgcttatttatagagatagccgttaggaacttttttctatttatgttaggtgatcattctaactattacactgtactcaaggctcaagggtcagctcatttcagcttcaatctgttattaaatgaggcgatttgcaaactctagcttgtaaccagtttgtatgtaagcatcatggccttttatgccatattactgaatctgctgtatttacaactttccattcagtaatgtttatctacgatgttgtat

SEQ ID NO: 31966 - DNA, 473 bp, Glycine max
  unsure (1)..(473): unsure at all n locations
gtgaatttaattgtagnctattttttatttattattaattaatggcagtgacaaactgaagcatttgtccgcctcgaggcaaaacgagatagcaggtttggagaaagagttcgtagtcacgcttctgggagttggtggaggaacgcaactgggagtgctcagggacatcctcatcagagaaggatttgatgcagttgctgttggaagcagcaatgactgatcagagtctggggaaggacttctccaagcgtttcattgtggataactgcaaaaacatttactttgctggccatgaaaccacagctgttgcagcctcttggtgtctgatgcttcttgctttgcaccctgaatggcagacccgtataaggactgaggtggctgaactttgccccaatggtgtaccagatgcagattctgtccctctgttgaaaacggtggctatggtgattaaagaagtgctacgtttataccca

SEQ ID NO: 31967 - DNA, 489 bp, Glycine max
acttgcactcactcacacaaagtgctggagcaaacactaacactaacacaacaccaccaacaagaagaagaagaaacattcccagagacccttttgctctgtgaagccaaagttgctatcttttctcaaatggggacccgaatcccttcgcaccagctcagcagcggcctctacgtgtcgggtcgacccgaacaagtaaaagagcgtccgccgacgatgacgtcacgctctgttccgtacaccggcggcgaccccaagaagtccggcgagctcgggaaaatgttggaaatccccggcgtcgagccgaaaccgtcgcgtccgtcgtctgggtcggtgagatccgggccgaactcggccccggcgggagggaggctgagcgggtcagggcccatgtcgcgaaagtcgtccggttcgggtccgatagcgctgcagcccacgggcctgataacgtcgggcccggtcgggagtcggcggtcgggtcagctggag

SEQ ID NO: 31968 - DNA, 419 bp, Glycine max
  unsure (1)..(419): unsure at all n locations
gaaattcgtcatcatagagatttctgaagaaatcttggtagatacaatacaagtagctaattttgagcaccattcttccaatttaaaagcttttgaacttcttggcagtctgagctttccaacagatgtttgggttttctttgggaatttcactgcctcaaatgttaggcatgctcagaggtttgttcttcaggagccaaaatgggtgagatacctaaaattgaatcttcgtagtcactatggttctgaattttattgcacactaagcgcagttgaagtttatggtgtggatgctgttgagaggatgctggaggatttgatacatactcaagataatctatatgcacctggagatggtgatgctgataaaaggacagtatcaccccatcctaatccatctgagagtngagatgttcatc

SEQ ID NO: 31969 - DNA, 309 bp, Glycine max
atagaatgtttgtaaaggtgatgagtgcacacgtgattttcttcttggtattggggaggataaacaacgttctgccaggcttacagcctggttccacactccagagaactagatttatccatgcatatgaaaagcaccatcagaaattgttgtccacaagtttaatgctgcccacctttcagtcttctgaaactagaagcattcatcaacctggtgggcgtccattacgtgtttacacagatttacctcatgtaggggaatacttgactcatccgaagtttgcaatcacaaaggaaccaaaagatgcag

SEQ ID NO: 31970 - DNA, 671 bp, Glycine max
gattgattcccttttcaccctctcggagtggaaaaaatggatcggagctctttctcaccgggaaccggaaaaacccgaaccaaaccggacatatactctaccttcgtggtccacgacgacgaagacgatgacggaggaggaaccttccggcgccggaaatccggcggcggcgcgcagccacaggacgatccgtacgcgacaatggtgttcaaagacaacggccacgacgacgaggacgacgaagactcctctcttcctccgctcctcaagcgcctccccaaggacttcggcggcggagcgccgctggactacgacgacgaagacgatgacgccggcgacttcggcacaatgatcgtgaagtccgaccggagccggcagcgcgaccggccttcttccggcgtggcttcgccagcgtggaaggctcggagtcctctgaacagattcggtggcggcgatgacgacggcgatgacgacgacgacgacggaggacgattctcgacgttcgtagtgcgatcaacggtgaagtccggcgagagagagtcggtgagcggaaccgtggttcgacggaccagtggcggcggcagcgtcggtgtcggtgtcggtgtcggctcgacgatggagagagcggtggctagcatgcaagggatgggagagttcggattcggaaagca

SEQ ID NO: 31971 - DNA, 363 bp, Glycine max
gtttccgaagagcttccactttcagacaaaaaccttcccaaaacaaagcgtgttgcatcccttgacatctttcgtggtctcactgttgcgttaatgatcttggttgatgatgctggagggcaatggccaatgattggtcatgcgccatggaatggctgcaaccttgctgattttgtcatgcctttctttctgttcattgtggggatggccattccacttgctctcaagagaataccaaatagacttctagctgtaaaaaaggtgatagttagaacactcaaactcctcttctggggtttgctattgcaaggttagtttttctcctgtgaagagatgtaataaacaggactcttttctcatgca

SEQ ID NO: 31972 - DNA, 397 bp, Glycine max
  unsure (1)..(397): unsure at all n locations
tcgttaactgcaatttataattttccaatacataggcttagaaactttggtcccgggaagggaatcttcaccatatgccactcacgttatcttttcatcacaccttcaccttcgatccttcctatgtccaattaattgtttaaggagagaccaactcataaagtcacaaagaatattactataaacatttggatttaggtggtggtggggtgggcggnnnntatttccaattccagctgttactattgttgttttatcgaaaacccaaattcccaaaggaatcgaaattgaaatcgaagtgggaacagagcaacacagagcgtgatttgttccaatcggtcggtgggctatggagagtgtgaatgatctgatccaagaggccaagctccgcactctc

SEQ ID NO: 31973 - DNA, 290 bp, Glycine max
tgtttgatgagtatttgttaggttgtggttgcaaatataggagatgccaaggcagtattagctcggtcaactaatggatcccaaaatcacccagatggtgtccagacacagctgaaggccattgttttgactagagaacacaaacctatcttccaactggagcgtgcacgcattgagaagttggtatcagagcctccgatccaaggggatctgcttctgcattcttccaggcagccttcattgctgcagttgatactgtttcagtgcccggtcactgcgtataccactgg

SEQ ID NO: 31974 - DNA, 271 bp, Glycine max
ggaggcaccccttgaaggatctataccagacatgacttcttctactgagcaatatgtgaatttgcagaatatctatcacgctaaagctgaggctgactttcttgtaatagagcgtctactgagaagtactttgaagaagattggtcgagattcaaatagcatttcgaagtcaacaattaaaagcttctgtaaaaatgcaagaaaactcaaagtttgcaggtaccgtctaattgaagatgagtttaattctccaaacctacctgagttacag

SEQ ID NO: 31975 - DNA, 283 bp, Glycine max
ctcttctctctcttcgccgttggtttcactcagctctcactctcatccccatcccaaaccctagcctcgctatttttcatgattcctctcgatctcttccactgaactctctctcaaatcggtcgtatacggagaattatcggagacactcggaggtctgctaaaattacacattcgcgatggcggcttccactaccagccaggtctacatcgatgtaatcgaggatgtcatggtcaaggtccgtgacgagttcgtgaacaacggtggtcctggagaggaagt

SEQ ID NO: 31976 - DNA, 425 bp, Glycine max
atctcttcctccacgactggcttctgaaaagatcagttcatccaattcagcgtctgtgagaacctcatctaaggcagtgaatggtggcaaaacctccttatcaagtgtaacggctgaagttaccttatccaatgcaagagggaaagagaaagttcaaatagctgcagcagccactgaagagaacaatgccttattgaatgagacaagtaaagttcttcctgtgaatggtgatttagtcgttgaagagaaaccacagctcaacttggcacaagaacccatagcagcggagactaagcaaacagcaggaacagaaccaaatattaactatcaatcggatcaattgattcatctcgtgaatgttatagaagcatatgactgagattatttaacaatgaaggcttgcagaatttctttgtggtttgtga

SEQ ID NO: 31977 - DNA, 418 bp, Glycine max
attttccagggttttgagccacccttatggaagaagattcttggaatgaagcttacaggtggaaagcttgatgatatcactgtaatagttggtcagattgtgagttcatgagatttgctaataatgaaagaagacaaagtcctgattgctgagatcactagagaagggtttgccttaagtatactgcggcaactaaattttggtgatgctctgagaaataaggatctattcattgaagtgagttctcctgctttgcctgttgtgctgcatgcattgagaaaggctgtctgagatactcattcagaaatagttttgtttgagatgctataatctaagaactgtctctgatacattggagaagcatgattgtgaataataggagaaaaaaaaatcaaccagtaacagcaaacattatctt

SEQ ID NO: 31978 - DNA, 363 bp, Glycine max
gtgaatgagaagacatacaacccaaaaatggacattgtttctaatgcaagctgtacaacgaattgtcttgctcctcttgccaaggtggttaatgaagagtttggaatagttgaaggtttgatgacaacggtacatgcaacaacagcaacacaaaagaccgtagatggtccttctatgaaggattggcgaggaggaagaggggcagctcaaaatataattccaagttcaactggtgctgcgaaggccgttgggaaagttcttcctgagctaaatgggacactcactgggatggcattccgtgtaccgactcccaatgtttctgtggtggacttgacttgccggcttaagaagaatgcttcctat

SEQ ID NO: 31979 - DNA, 470 bp, Glycine max
gaaagggggaggagagtacgagggagggagaagcgtagggaagttgatagtgattgcagtgatggtgaatctaaggagcgggacagaaagcggcataggaaagaggatggtgattacaagagagagagggaaaggagtgtcagcaagccaagcaggaaatctgaggaacatgaaggaagcccaagaaaaaagagtggcggagatgattcagataccaaagatgaagagaaaaaacctacccgtgaagaggagatggaggatgaacaaaagaggttggatgaagaaatggaaaagcggaggaggagagttcaagagtggcaagagctaaggaggaagaaggaagaagcagaaagagaaaaacaaggtgaagcaagtgctaatgaacctgagtctggaaagacctggacacttgaaggggaatctgatgatgaagaaggactgggtactgggaagcagacaggtatggatgt

SEQ ID NO: 31980 - DNA, 554 bp, Glycine max
catcacggccatcgacagcggtgacctgaagagggtcttcgaggtgaacgtattcggtgccttctacgccgccaaacacgccgctaaggtcatgattgccagaaagagagggagcattgctttcactgctagcatcgcttctgtgtcgaatgcgggttgggcgcacccgtacgcggcgtcgaagaacgcagtggtgggtttgatgaagaacctgtgcgtggaattggggaaacatggaatcagagttaactgtgtttcgccctatgcggtggggactccaatgctgacacgtgcgatgaggatggagaaggagaaagcagaggagatatatttggaggcggcgaacttgaagggagtggttttaaaggaaaaggatgtggcagaagcaactttgtttttggctagtgatgagtcaaaatacgtgagtggagtgaatctagttgtggacggaggttatactaccaccaattcttcttccaaacaagctttcacaaagttttcttttaatgcctaagcccaaattgtaagtttcaatttcaggattactacagccg

SEQ ID NO: 31981 - DNA, 474 bp, Glycine max
  unsure (1)..(474): unsure at all n locations
ttttgcgtcncgtttttgacatcaatcctcacaatattttaatagatgaccattttgttccaaaaatcactgattttggacttgccaagttgtgtcccaaaaatcaaagtacagtttctataactgctgctaggggaaccttaggctacattgctcctgaagttttctcaagaaactttggtaatgtttcttataagtctgacatttatagttatggaatgttgctcttagagatggtgggaggaagaacgaatacaaatatgtcagcagaggaaagtttccaagttttgtaccctgaatggatccataatttgctcaaaagcagagacgtgcaagttactattgaggatgagggagatgttagaattgccaagaaacttgccattgtaggactttggtgcattgagtggaacccaatagaccgtccatccatgaaaactgtgatacaaatgcttgaaggagatggagacaagt

SEQ ID NO: 31982 - DNA, 361 bp, Glycine max
accagatttaggagacaatgcgagtccaaatttcaacttgagaccaacatgtgcttatttcatcactgaggtagcaaaatgagcatccggaagggctcacatagtacaggcttccatagctgatggtgttttgtcaggtaatactgaccccaagaaaaatattgagttgctacaagatgctattgcttctattactctcttaggaagcataatcacgtccatccctttatcgaggcaagcatgttcatagcttagctcatgcaacttctggatatcacaaagttcttgaagaaaatagcaaactatacaatcaagttcatgatcttaagggtaaatttctgattggttggttgctataagc

SEQ ID NO: 31983 - DNA, 323 bp, Glycine max
gaagaaaagatggtagtatattaaaatttaaagaaaagaatacaatttgctgacgcaaagaaaaaaggaattggattgatagcggtggttgcaaaagcacgtgatgatgaatcattttgatccgaagccagccaaccttcccaagatcccctgtttgtatggcaaaaaggttctcttcttcaaatcctctgtttccgctttctttctggcgtagtgcaattcatgcgcggagaggggttcctttctcctagtctttgggcctgggttggaagcttttgggtcttcgggcttcttgtagaaagtggggtactttctcaaggggt

SEQ ID NO: 31984 - DNA, 403 bp, Glycine max
tcaacattagcactcaatacaggcgaatcgttacccaatttctgtcctttaacttatacccttccttattcaatccatgggtgtctaggaagctcattaagaagaaagataacggctttagttttatttatatccttcaaaactcaatacccttttgtccaacaagcctaaagtttgtgtcttgtcactctattcaccttctgttcgttcgttcgtttggaattgccgagaaaagaagatgcaacttgatctggaatcattatccgaagctacttctggtgccattggatcacttgttagtaccaccgtcttgtacccgcttgatacttgcaagaccaaatatcaagctgaagttcaagctcagtcagcgcaaatacaagagaatttctgatgtattatggga

SEQ ID NO: 31985 - DNA, 416 bp, Glycine max
attctcacgcactcccacgcgcgccatgctgcttcttcctccgctttcgctttcccttcactttcacattctccccttccaatttccccgccaaatcttcttcgcgcctcgccgtcatctccgcttcttcatccaccgccgagcacaaccaccccaactcctcctcctcctctcaagacctccccgtccttctcgaagtccagggggttcttatggactcgcaccgcgttggaaatcgcctcgccttcaataaagcgtttgagaagcttggactcgattgcgccaactggactgaacctgtctattccgatctttcaaagagaagtgctggagatgaggaaaagatggtgtttctgtattttaatcgtattgggtggccttcttcgttacccacaaatgagcagggactgtttgca

SEQ ID NO: 31986 - DNA, 367 bp, Glycine max
cagcaacacgtgttttgctttttttccaaaacaacaacacgtcttctctttcttaaagcactaaaacagcttttaattccttcatttcacactttcgtgcactttctcccccctattttgttaccctcttgagtttcttcctcattcactgaactttttatgaatatttttgcatttttatcgtattatgtttgccaagtttttgtttttgttttgttttaacgtgtttgtgagttttctaacatttttcccttccttaatggtgttttattttgtctgcagaacaagatgcagggtatcaggcgcatggatgctgccctggacgcaatgcgtccacttggatttaggacacaactgattctacgaa

SEQ ID NO: 31987 - DNA, 460 bp, Glycine max
ataaatggtggacaagaagaaccaatgagatgactttagagcgtagataattttgaagggctttggacaaatagattgaagacacctcatttaatgaggccacgtgcgtacgaattttaagttttttgagttaagtccttgcttaaagtttctattatttcattagagtcctgaccagcgcatctatttcttaatttcattccctcttccacaccctatttggtctcactctcactacgtgtccggtggcctcaaaccgctccctcacaattccaaacaccgcgtgcgctgcccacatctccgttcgcatctcctccgtgaccagctcgaagtttctcgtgtagtccagtgttgctttgtgagaagtcgttcttgcttgaagtggcttttcattcacaagctctttgagactttcttggagatgagagtagaaattctcaggatcaatagagacttattt

SEQ ID NO: 31988 - DNA, 358 bp, Glycine max
ctcatacctagctattcctacctaaacgaaactctgtatgacattgattgcgtggcgaggattttaggttattttttggaagaagaacgaaacgttgctgcaatcgacggccgcgctccgagatcgccggggctgatgctcgttggaaaactcatcgatggttatctctcggagatcgctaccgatgcgaatttgaagccgtcgaaattctacgatctagccatctcagttcctgatcgagcgagactgttccacgatggtctctatcgtgccgttgatgtctacctcaaggcgcatccgtgggtttcgaaatcggatagggagaagatttgtgcagtattagactgccagaagctga

SEQ ID NO: 31989 - DNA, 507 bp, Glycine max
  unsure (1)..(507): unsure at all n locations
acgagctgattcgcagtcctaagttacttaatgaaagtagtgtgacacctaacatcaaattgttgcttgataatggagttacccactcaagcattgctttgttgctccagagacggaaccagttactctggtctgctaacttgttgaagactgttgaggaattgaagcaaatgggtttcgatccttcaacttcaactttcagtatggcattgcttngccaaacggactgtagggaaaaccaaatgggccgagaagattgacacttttaagaagtggggatggtcccaagaacaacttcttctagcatttaggaggcagcctcagtgtatgttgtcatcccgtgataaaattaatgcagtgatgagtttttgggtagaacaggtgggtttcaattctgcagagattgtcaaagctccaggaattttcctatttagtctccagaagaggattgctccaagggctgtagttgtgcagtttcttatctcanaaagtctgctacagaaggag

SEQ ID NO: 31990 - DNA, 355 bp, Glycine max
cccggctcaataagaggagaataccttaggaatccataagacacattaattcaccactatagttgttctgttagaagtgctacaaacaacaatggctgctaatcaggaagatgtgaagcttttgggagctactggaagcccatttgtgtgcagggttcagattgccctcaagttgaagggagttcaatacaaatttttggaagaaaatttgaggaacaagagtgaactgcttctcaaatccaacccagttcacaagaaggttccagtgtttattcacaatgagaagcccatagcggagtctcttgtgattgttgaatacattgatgagacatggaagaacaaccccatcttgcct

SEQ ID NO: 31991 - DNA, 445 bp, Glycine max
ctagagcatacatatgtagaacggctctttgtgtacatctatatgccaaggaaagtgtacgaagagggcaaaaacctcttcccggaacggatatagcttccctttttgaggatgccagagtgaatgatgatcttaatagcattacaagtaaaagtatatttagggaggagttagttgcgtcgctggtggaaagttgctttcagctgtctcttccattgcctgaacaaaataacacgggcatggagagcagggtcattggagctttggcatatggaactggttatggtgcattaaactggactgaacctgctttggaagtagtggaagtttgtcggccttgtgttaaatgggattgcgacggccgcacctacgcggttgactgctacttgaagttgcttgttaggctatgttacatatatgatactcggggtggggtaaaaagagt

SEQ ID NO: 31992 - DNA, 305 bp, Glycine max
gttgaggttgaagtgagggagaaggagagagttgaagttgcagcaaaggatgcatatgcactggttgggtcccgacgtacctgtgttcgaccccaatttcacttacaatcatcatcgtccctacttatacgacgatgacctctttccaaacgacgccgtttcggcccgtcgccacgatgccgtttcagcccatcaccacgacggaacctcacctctcccactgggcatggattggagccctccgccgcgcctatgggagggtcgcagcactgtttggccgcgtcatcctcccaccggatggagct

SEQ ID NO: 31993 - DNA, 517 bp, Glycine max
gctgaaaggaaaatagaggtttctctttcaagtttcacctcctcaccaccgccaagcttcgtctccgagaatgtcaccatcgcacacttttttgtttccaagcacagcaccgatgatattagcaaccaaaccctaatcgtgtccacgctttctttcttctttcctggcacactttctccctctccactttcagcacacactttttcgttttctgttctagttatttggttctgaagcttttgtttcaatggaaaaggacaagcctgtttctgtcaaagatgctgttttcaaattgcaaatgtcgctccttgaaggcattcaaaatgaagaccagctgtttgctgctgggtctctgatgtcaaggagtgactacgaagacattgtaaccgaacgatccattcaaacgtgtgtggttatccgctctgcagcaatgctttgccatccgatcgcccacggaagggtagataccggatttcactgaaggagcacaaggtctatgacttacacgagacttaca

SEQ ID NO: 31994 - DNA, 289 bp, Glycine max
ctcgagccgagagaacttcttgctcaatacctgttgaggtgttgattgttcatagtgcgcaattagtttttttgggaacttagatgctgtggagtttatttttctgtcattaaagacaaatttgaggcatatagagaacatgtctagtaagaaggaagagaaatctcaggctgcggctgaaagaatcaaggctgcagccctgagtgctgcgaaaggccttagtcgtgcccaggctgaaagggctgcgactgcagctgcccgaaacgtcaatgcttatgggcagaaggaa

SEQ ID NO: 31995 - DNA, 408 bp, Glycine max
aaaacaacacgcaatggtacaacacgatttggtggtgtccagaaatattgttagcagtcaccataggatatccattgcctcactccaagatggctcttatggtcaaaagggaaagcttatcaattgcctgtcttcatatcagatgcggcgatggtgcactttggagtggttttatagtgctatcgattacccatggttttcaaagagagagtttgtggagtacttataccatgttggattaggtcatgttcctagattgactcgtattgagtggggtgtcattacaagtactcttggcagaccacgaagattttctgagcaatttttgatagaagtgaaacataaacttaatcaataccgggaatctgttagatcacattatgctgacattcttgctggtaccaagga

SEQ ID NO: 31996 - DNA, 513 bp, Glycine max
  unsure (1)..(513): unsure at all n locations
acgagcctgttcattcaatccacatccataacgataacatgacctctcacgcgccgccgccagaggacgacgacgcaccgccttgccgccggtgattcctccgccgacatgcttcggaaggccaaaaccatccccctccggcgcgccgtcgccgcctccttcttcttcgccaccgtttctctctcttgcttggtcctcctcggagacgtcgattcccaccgattcctctccagcttccattcctcttattctctgtctggctttactcgcatttttccgtcggtgtataacgatcccgttgcgactagcaatgaatatccacttgaaaagatcctgaatgaggctgccatgaaagacagaactgtaattttgaccacgttaaatgaagcatgggcagctccaaattcagtcatcgatcttttccttgagagctntagaataggagatcgtaccagtacttttttagatcatttggtaattattgcattggaccaaaaggcatttgcacgctgt

SEQ ID NO: 31997 - DNA, 318 bp, Glycine max
ttttcgcgtccgcccacgcgtccgcccacgcgtccgctaaacccaaaagctctcttacgctgaaaccctaaaacccctctttctctcactctcgcatggatctttcctctccttttccttccaaaccctaatttttgctactgcttatttttattcatcgatccttcgccccccaaaacactcaatcacactctctccttctcttctctgattctcgcttcagacaactctccacacgcgtttatcttattatctctagaataaagaacagaagtaacagatggagaggtagaggaggacgtggtagagcccattctg

SEQ ID NO: 31998 - DNA, 251 bp, Glycine max
gctaggtacatgtaacagctgatcaataaattagcagtataaaataaaataaagaaagaaatacatgctttgacaatagtaataataataattaatatacagaggacaaacaaaagaggctaaccatgaaatttggaatcatttcttggaacgtttcttggggcgcttatcctttccagcactagcactattttctctcccaccctctacactccatagcggagacaaaggccaatgtaattttctgcaca

SEQ ID NO: 31999 - DNA, 258 bp, Glycine max
  unsure (1)..(258): unsure at all n locations
gacggatgaactcatgtatagagtnttgttaaataatattttcctgtaacggatgactagttcggtcataattgacgtataagtagaatagccttcagttgtttatggaaaatcaaactaaaatctcaaattttatttgattttcacgttgggttctcgtactcatatgaaatgtttattatcacatatcataggcaatgaatgcatgtatttgacaggatcgttttacaacactacaatttggcctgtatgtcgtaa

SEQ ID NO: 32000 - DNA, 286 bp, Glycine max
gagagatcgccggagtgagagcttggctaaacggagatccaaactttccagtgctgcaaagcgcaactgcctcagcataggttgctttctggtagagatatggcgaagtttaaacttcaccctagtttttggtagtcttgtttgagggtgattatgataaacatttatggtttttcactttaaatacatttgagttcatttaagtattttgcaaatttttgagagttcaatcgaatcgaattgatgtgttgttggcttctataaagttgcataatacttttcattt

SEQ ID NO: 32001 - DNA, 591 bp, Glycine max
accggggtggcatcgccgaacagcacgatatcgagcatcagcgggaagcggagcgagagagagggcaacggagacgaaaacgagagaacatcgagttctcgcggcggcggaagcgacgacgatgatggcggagcttgcggcggagacggcgacggcgaagcgtcgaggaagaagctgaggttgtccaaggaacaggcattggtgctggaagaaacattcaaggaacacaacagtctgaacccgaagcaaaagcaagctttggcaaagcagttgaatttgatgcctaggcaggtggaggtgtggtttcaaaacagaagagcaagtaatgtaggaccaagttgaagcagactgaagtggattgtgaatacttgaagaactgctgtgagaatctaactgaagagaataggaggcttcacaaggaagtgcaagagcttagggcattgaagttatccccacagctttacatgaacatgaaccctcccaccactctcacaatgtgcccttcgtgcgagcgtgttgccgtctcatccacatccttttcctcatcggccaccatgccctctgccccgcctccagctaatctcaacccgg

SEQ ID NO: 32002 - DNA, 421 bp, Glycine max
atttttcttgctagctctttagtgtttgctgcttattttcaaataatgtctgcactggtggatatatggtcaagggaactgaccaagatcagggaaaaggagcaatcccttaattctgctgcccagcccctccaggaaaatatggacaagagctcatctgggttcgctgtggttgctgccaaactcatgcaatttaacaagcctaggtttctcttttcggatgcttcaatttccatccttgttgaatgttttagcccttgatgagaaaagaaattaatgcttcagtgagactttagttggtttcttttaacccatagaaatgatgtgtgcatagtctgtctagtagagccagagggaaagatttattagataatatgtataaagtcatatgttccatttccagtgacaccattattttcta

SEQ ID NO: 32003 - DNA, 749 bp, Glycine max
cgctttcgttcacacctgcaaatctcatcgtgttcgtctcaatcctcttcgataagaaaccctcacatcgcttctctcacacacacactctcaattctcgcacatcttcgatcgcgtctgcgtcttcatttggctaattatttactcgaatcgattaaaattttgacatgaacggtggacgcattggtgaatgaatctcgctgagtgctgaaaatgccgggattagcgcacaggaatgaacaccaactcactaatggctcatccacgccgacgtgttcgctctctgcgtatggattctggtgcgaagaattcggacgacgtttgctacaatcagctccagaagttctggagtgagctgtcgctgcaagctcggcaaaaactcttgaggatagacaaacaatccctgtttgagcaagctcgtaaaaatatgtactgctctaggtgcaatgggttgcttcttgagggttctctgcagattgctatgtatgggaaatctttgcaacaagaaggggtggatgctcactttccttgcaacagatccggcggtttgaaaaagctaaataatgacgaatcaagcattatcaatggatgccaagatgaaattcaagatccatctatccatccttggggaggtctgactacatcacgtgatggctcattaacacttatgagctgctacttgtattcaaagtctttgaaaggactgcaaattgtctttgatggtgcacgtgctagggagagggaaaggg

SEQ ID NO: 32004 - DNA, 472 bp, Glycine max
tgtaatctgtttcccgtaaactcagatttgcaagaacccctggtgcccatattacggccagaagaagcgcttctctgaagatgaagggggtgcataaaccagtaattggccttggataaaatcttccttctggctagtgtttagttggcagttaattcactttgatgacaagtccaagttccccccttgcgagcattcggctcctggtcgcattgtggcagatatttttgcgggtgcaatctatcgttttgtattaatgtaagttaaactatgtttattttcttctctcctattttctttttgagggtgaacattgtttccggtaaaccttgttgcaaaagcacagagataggggcattcttaaaagtgaactgatattaaaaattgtaagaaatgtatcagtttttggtctcaataagtgttgctatgcttttcaataaatgaaagctttggcaagtttaactggctgttc

SEQ ID NO: 32005 - DNA, 418 bp, Glycine max
tggaccaattgatggcacaatatgcgcagtgtaatctttttcccgtaaactcagatttgcaagaacccttggtgcccatactacggccagaagaagcgctcctctgaagaggaagggggtccataaatcagtaattggcctttgattaaattcttccttatggctagtgtttaattgacacggttaattcactttgatgacaagtccaagtgaacattgtggcagatatttttgcgggtgcaatctatcgttttgtattaatgtaagttaaactatgttttcttttcctctcttcttcgattttcattctgagggtgaacattgtttctagtaaaccttgttgcaaaagcagagatagatgtattcttaaagtgccccgatattaaaaattgtaagatacgtatcagaatttggtctt

SEQ ID NO: 32006 - DNA, 329 bp, Glycine max
gggatttccaatggcctgccggatgttgattcggtattttattttactaggaagtcggtgttggagacgtttgatatccggtttgatgagcatgcgccgaaggtggcgctgccgcagggcatgatggtgccggtgaattcctttaacacgatgtaccattcgcccgcgttttgggccttgatgctcccggtgtcggtcagcacgatggcctccgatgtgttgagaggttactgggggcagagactgctttgggaggttggtgggtatgttgtggtttaccccccaactgtgcataggtatgataggattgaggcatatccgttttcgga

SEQ ID NO: 32007 - DNA, 435 bp, Glycine max
gaaggaagctgtcctaaaacaaacgtgttatggttgatctacttggtagacatactcctcatgaagaaatcatttgaacgtactgcgaagcacgagagagatctacgatccttgaagaaacgtcttgacaagtatgattcggccaaggaagcaattcttgaccccttcttcactgatttgttcgttgagtcggacccaaaggcttaacaagctaaagctccttttcccacctaacatggcattttgtcaaaactttactcgactttcttgcatccttggaggcagctttactccattgttcaacttgatccgtacaaggtgaattttgtttttgctcagttaaaatattattgtatagatcgaaatgtgataactgaatatatagcttcaaaatttctacagcaatgcaggttaactgtgataattttcttttgt

SEQ ID NO: 32008 - DNA, 481 bp, Glycine max
aacttaacatgccttccatatctaagattttttttgctctgcaaaaaggagcgagtttgacatcatgaatgcgggccagccatgtttttggaaatctgaatttgaatgctggcattatgatctcataaaactgttgtccaaactcatggtttgagtggattatgttgaatgttactaaggatattcatgtagataattggagttacattggttgagctggctggtgatgcaaatgggttactagttaaatggagtctggttcagtggaaatacattggtagaaaagatagcttaacattatttttaagtatctcatcctagtgtgaaggagggtactgcggtaccgtctcatatgcacaaaagtcaggaccataaattgtcaatatttagtggctgcctcatgacaaacaactctgcattatattcagttgtttagaagcaagtgtagtgattgtggcactaactaactaagcatgctttt

SEQ ID NO: 32009 - DNA, 331 bp, Glycine max
gtttctttcttcttttgtaaaattctcttccttgactctgtcactgccaccaactacgagattttgattttccattgacgcgtgaactggctgggaaaagcaacgaaaagaagggaggaagaagagggagagcgtgcgtggtggttttgggagacattggacgaagccctcgaatgcagtaccacgctctttcactcgccaatcaggcttccctggaggttgacattgttgcatatggaggttcagagccccatactgcacttcttgccaacccatctattcatatttacataatgaagcagtggttaacagccagtcaaagcttaccaaa

SEQ ID NO: 32010 - DNA, 647 bp, Glycine max
gtccatcctaaatgttttattggaggttgggatgacaccatcattgccaaagatatttcttcctggtccacctgaagctcttactgttctcttagatggttgtgttgttggttgtatagcttccagtgaagtggagaaagttgtggctcacatacgagaattaaaagtgtcatctgtcgcagtgattcctgatgatatggaagtgggatatgttcctttgagcatggggggggcctatcctggtctttacctgtgcacatccccttcaagatttgttcggccagtaagaaatatatcaattccttccaatggaagtgaaaacattgaattcattgggccatttgagcaggtttttctggaaattagatgtcctgatggcggagatggtggaagacaaagttcatttcctgcaactcatgaagaaattcatccaacagtaatgcttagtgtagttgctaatctcacaccatggtcagatcataatcagagtccacgaaatatgtaccagtgtcagatggcaaagcaaacaatggcattttcttcacaaactattcaacatcgtgcagatcaaaagttatatcatcttcagactcctcagactcccattgtacgcactagtacatatactaaatacaacattgatgaat

SEQ ID NO: 32011 - DNA, 566 bp, Glycine max
  unsure (1)..(566): unsure at all n locations
gaatantctctgaagctactgcagaagctgtcaagttgtctgtagatccttctgaggtataccaacttctcggagatatcaagttagagtttcatgattcccatcttaattattcaaaagagtcatattatagggagctggatttggatactgcaacagcaaaaataaaatactctgtgggcgatgtagagtttaccagagaacatttgtgcgtctaatccaggaccaagtgatagtgacaaggttatctacaagcaaacctgggtcattatcatttacagtgtattttgatagcaaaatgcatcacgattcaagggtaagtggccaaaatcagataataatggaagggagatgtcctggcagtaggatcccaccaagagtgaattcaattgacaatccacagggaattcagttttctgcagttcttgatatgcagattagcaaagataaaggggttatacatgttttggatgataagaagctaaaagttgaaggttcagattcggctattttgctattgacagcttcttcttcctttgatggcccatttactaagcctgaagact

SEQ ID NO: 32012 - DNA, 377 bp, Glycine max
tatggacatggctacttcacccttgatggaccaaaatatgatgatgggaacaatgaaaatgaccacatgagcaccaacaggcttggaaatttgggattggttaatcaagttcccatgtttgctttgtggaatgaatgaagggaatgttatgttgatgagttgagattacaaaaaacattagcttaggaaaaaaaactaagatcagatggcagaattattgaatgattattatattgtagcttggtatggtaactttttattttatgttgaaagaaaggggatatgtcagtagtgctgattccttatgctgtgtgtgttgctgttgttggtaggtagggtacgtaggtatactaacttgcaaaacattatccactttg

SEQ ID NO: 32013 - DNA, 456 bp, Glycine max
tcattcaggcctttgtaatgggtcctttctttgtattgctaaaggttctccagactttatttggttatgagccatatccaggatttaattcaacagtgaaagcaaaagttgaagccaacataaatgagtggcaagaaagtaagcagaaactaatatcttagcttcttcttaagtttgtgcatctttaaaagttaaatgatctcccccaacagaggaagaataaaagctacaaatgatcatatatgtatggtactagggtatatatgcctttcaggataattgtgtatatgccttgtatatttgttgagaagacacagtatatcatattatcatgggcatgctactatgttattctaatagaagcatcgactctgtattttgttcgtgtggtttgaatactctctttggacgtggcaatatatgaacaggtgattgtgtaaaaatgtttacactacc

SEQ ID NO: 32014 - DNA, 281 bp, Glycine max
cggctcgactcgagcgaatcggctcgagcaggacttcgaccatctcggcgtgattattcattgctccactcacactagtcgacctagggatagattccgtgaaagagaaaatggaagatctggtaatgaagggagcactagagctggcagtggaagcttacagcctgaaattccttccaccagttcatcaatggcaccctcaccaactatagttctttctggatctcgaacgttctcaggacagccgcctactatcttacagtcacgtgaccgacaggatg

SEQ ID NO: 32015 - DNA, 273 bp, Glycine max
gaagaacttgaagcatcataaggatgaagatcttcataagggtcaagctgtgaaaagccagaaggccctctggtacaaaattcttgagcttagattcttacttcagaagccattctcgagctccaatagtttgccacaggaatcaatcaagtctttgttctgtgaaacagatgagacagttagagtagtatattcagatctgctgacttcgtccaaagagactttggattctatattggaactgcaagaggctctttttgctaagaatccatc

SEQ ID NO: 32016 - DNA, 261 bp, Glycine max
aaaaggtgaaactgaaacggaggatcattttcccatacttctagctacatcttagattagagttaagagagagattgggagaatgagttactccaggatattgaactctctattgttagtagtgttattggttacatgtgcaagttgggaggacccttatagattctacacttggaatgtcacctatggagacatctatcctcttgggatgaaacaacagggaatattgataaacgggcagtttccaagggcacagatcga

SEQ ID NO: 32017 - DNA, 265 bp, Glycine max
gacatttaaagctgtaaattgttgatctcagaagcagctattggtgctctcaaagttcaccactcgtactatttggctgcacttgacccatgtagatataaataacacaggcgcaaggtgctagacacttctccgcctccaaatcacattttctttaaaaaaaaaaaaaaaaaaaaaaaaaaaaaaaaaaaaaaaaaaaaaaaaaaaaaaaaacaaaaaaaaggggggcccccccaatcagtggacccccccccgggggtttttc

SEQ ID NO: 32018 - DNA, 256 bp, Glycine max
gttttaagtgtcctaggatcttaacctgctaggagtttaagagctaactcgagaattttacaagcatgctcttgtgttgaatttttaggtgggatttttttattatgtatatcatttcattttaatgatttgggctgatcatgttattttcattgagatgtatttgactgagactttatgtgttcaataaagttgtgataaactcatttttattaattcttgtattaatgggttgaatactctgaacctattacgg

SEQ ID NO: 32019 - DNA, 480 bp, Glycine max
ggccacatcatgtcttgtgatgaggaatttgggtataaccctgagtatatatacggcaattactttcagtggtttaaggctagaccttcttctgttgctgctgttgctgatgccgttgttgagaaagaggaagaagaagaggaggatgaagagaaacaggagaatcagggtttgagggagttgattgataacaaggattccgcggatgctcgcattcttcacaggaacatcaacgctgcttgtccaagcctgacaggtactagataagacatgattcttcatcggaaattcaagttcaaagtgttgcgagcagaggttatagccaacatctcatttcccgtgttcagcagagattgatttcccctgctattcagagtctaaatctcagaagcccgcatcgaggaatttgtttgagctttaaattacatgtaaaggatgcgagacctagatttctctacaataatacatttatctttgctc

SEQ ID NO: 32020 - DNA, 189 bp, Glycine max
gcgacaaacaacaaagccaagtctcggatcttttaaatttgtttgaaattcatatgtgctcattttgggataattttggcgcttcaatcatcaaatttctagaaaggggaccaatttcattgccattttttttttttatgctcaagctcaattaattacaattgatttgtgaagtttgtcacgcacatg

SEQ ID NO: 32021 - DNA, 389 bp, Glycine max
cgaaagtactaatcgaagcgtggatattgggtttttcccgcccattttgaaagaaaagaaaaccctggctggttccatttctcatcttcccccactcgcacaaaaataagtttcgacttccgagcagcaaaatgagtgctcacatggagacggagctcacaaccgaccaaaacggcgctgcttaccaacactcacttcccgttcccgaggacaaagttcttgtccctgtcgaggtaaccctaaaaccttcaagcacagctaaaatcgacgatgttcgttccgccgttgaggggatgttggaaaagaggagtttgagctataacgatggaccggttccagtgcctcttgatgacgcgtttctcgcagataacgtgcaaagaatttgcgtt

SEQ ID NO: 32022 - DNA, 245 bp, Glycine max
gtttttatgtttcttgtagatgctctgctggcgaggaggaatgctcttctactgcagcagaagttaagcatgcggcgagaagaggcagcaaattatgaagctcttcgcctgccgcaggaatggacgtactgactccttcgataatagttcgttcaaacaagattcaattaaaccttggtggagaaagaaagccagtgaaattagtagggttgtgatagggaagttggtttttattataatatgaa

SEQ ID NO: 32023 - DNA, 206 bp, Glycine max
tacagaattctcgttgataaccaaatttttggtggcacagttatatagtcaaaatatatagatatacgcaatttgaggcaccttacccaatttttttcggcttgggtatttgattacgtctataattgtaaattagatgaggcgaattatttgtatactagagatttttactcaatcaattttggtggtaatatatttcttacttc

SEQ ID NO: 32024 - DNA, 813 bp, Glycine max
cacaactttaggttctatggcaaggtatggatgggcttaggggaccagtattatctggcacaggcttctatatgaaaagggaatcactgtatgggaattacaaaattaaagccactgaccttgaactccgacaatatgttggcacatccaatgggtccatcaaatccttaaaacaacactgtactccggattcagacactgttggacatacattgcctgaagaagagactttgcttctggcttcttgtaattatgaaattggcactgaatggggcaaagaggttggattcctgtatggtacagtatgtgaagatgttcacactggattcacattgaattgcaatggttggaattcagtgttatgcgatccaccacagccacagtttctaggaaatggtaccaccaatttgaatgacttactaattcaaggcaccagatggtactgtggactgcttgatattggtttaagcaggttttgtcctcttatatgtgggcctctaaggatgtctctacttcagagtctttgttatgcacaacttacatatttccctctttattgcttgcccctttggtgtttagccattgtccctcagctttgtctagtagatggaattcccttgtaccccaaggtctcagacccatttttcttcatttatctggatatccctctatcagctctcaccaagcacttagtagaagtcctctcaactggaggaacaatcagaaaatggataattgagcaaaggatatggatgatctcatccatcacatgccatctatatggatgcttggatgctctactgaagaaatttg

SEQ ID NO: 32025 - DNA, 270 bp, Glycine max
gaagctctttctgccgcaacaacacactaaccataaacctaaaccccaacgttccttttgatcttcatcttcgtcttcgccttcaagcttgagcaatgagaagaccgaaatcgagggagtttcggaagcaacagcgagtttcagaggaggaagagataaacctcttgaattcatggatccagttccagccaccggattccggttcgaacccaatgtcgcttccgcctctccccaaaaactcccccgttggccgcctcgacgacgacgaca

SEQ ID NO: 32026 - DNA, 305 bp, Glycine max
tcgccccatcacgccgaagcagcttcggtttggagaagtttcatggactctgattgaagcttagtttaatatgcaaaacccacttcaggaactgtgttgtatttcccagtgttgactccaaggattgcatctttcattccttgtagtgtgtggtcttttgtactttaatttatattatctagcatttcattgatttttctgtacactgagattgttgggtactatactttgggcaaggttgcttgtagaagagagagtatttgtacttctttaaaattgtaccaatggaacaccattttggtcaa

SEQ ID NO: 32027 - DNA, 284 bp, Glycine max
tggtcctggtattggctattcatagcagcagccccatggctaccggaattggtttttgtttgtctctttgaacccatgatctctgtgcttcattgattggttttctgttgttctgaggttgtctgggttctcttgaagtgatcatgcagaacattacagatctcattcacatcttcattgggacgcttgatgttagtgtaagattgttggttgaagatacggtatggcttgagacacattaggatgagcccttgtagtgtagtcactagagtccacttcctctc

SEQ ID NO: 32028 - DNA, 381 bp, Glycine max
agaggagggtatggagcactagaacaatggcagcatttccatggaattagcaacaaccaccaccaccaccacctttcatcatcaccccaacaagctgaactatatgatcaccatgcaggccacttcaacttgccactcaagataactccttcaatgagtagccttgaggcacttctcctccaagctcccctcagtggtgccaccatcaacaccacaacaacaaccactcttgccatctcattccccgcaacaacaacgacggccattggagttcatcatgggaatgcagaaagtggcaaaggaagagttggaacaagaagaggtgtacaggccagaacttgacataggtgagagtagcagctccttgccaggaggagggta

SEQ ID NO: 32029 - DNA, 429 bp, Glycine max
tgattcccactttgcgctatcttggtgcgtactacggtatacacactaaccgactcacactgtgtattaggttccgttttccgctaatcgcaaggtttttccatgactgcgcgaccattctccgtcactcttcccagaaaatccccacacgctctcctcttcctccccccttcgtcgcattctccgattctttcccccgtcgcggatattgacacgttcgagagcgggttagggtttcgataggttcgtgatttcggtggagaaagagagggacggagatagagagtgagacagagaaagtgtttgttagggttttttgtttggcgtgtttcttgttttggagatggggagcgacgatcgggacggcaacacgctgatcaaggcgaatttcaccgccgacggagcggtgaggctgaaggagagtgtgat

SEQ ID NO: 32030 - DNA, 511 bp, Glycine max
tagactgatgtgcttggaagggaaaagaccagcattcaagatcaaaccaaaacattatcctccagagttgaaagagttgatcgaggaatgttgggatccaacacctgttgtgaggccaacattttctcaggtcattgcacggttggacaaaatcgttgcaaattgctcaaaacaaggatggtggaaagatacttttaaactcccttggaaataaataacaaagtacatactacgtggcaaggaagacatcaagttcagggttgcatcctcaaaaccaatttgtcagcttcatggtggtgtactgttaatagcccttgcaattaataattttggaattcgaataatattaacttgagcttggattaatttgagcgtgaaaatgaatttgcatggttcgtcctatgttcctgtctactagagggctggaacagctcctctctgtacaatgtaccataaaggagatataacatctcagaaattttcttataaaaatgtttttctattcgcgtct

SEQ ID NO: 32031 - DNA, 413 bp, Glycine max
gaatgttgggatccaacacctgttgtgaggccaacattttctcaggtcattgtacggttggacaaaattgttgcaaattgctcaaaacaaggatggtggaaagatacttttaaactcccttggaaataaataacaaggtacataccacgtggcaaggaagacatcaagtccagggttgcatcctcaaaaccaatttgggagcttcatgttggtgtactgttaatagccattgcaattaataattttggaattcgaataatattaacttgtgcgtggaaatgaatatgcatggttcgtcctatgttccctatccactagagggcctggaacagctcctctctgtacaaagtaccataaacgacatataacatttattctcagaaattttctaataaaaatgagtttctatactt

SEQ ID NO: 32032 - DNA, 275 bp, Glycine max
tgatactgttgctcagagtgacgtggacgaggcactgcggttaatgcagatgtcaaaattctctttgtattctgtacgatcgtcaaaaatctggtctggatgccatatctgatatctattccatactgcgggatgttgcagctagaggtaaccgaatggacgtcagctatgcccatgcactgaactggatatctaggaaggggtacagcgaacccagttgaaagagtgcttggaggagtatgcagcacttaatgtatggcagatacatcctcaca

SEQ ID NO: 32033 - DNA, 530 bp, Glycine max
tttatatattatgggtctcaatgaacagtttcagaaagcacgagaatgggttgcaaactctttggattttaacaaggattatgaagcaagtgtttttgagacaaccataagagtagtaggtggtcttcttagtgcatatgatctttcaggggacaaagttttcctcaacaaagcaatagaaattgcagacagattattgcctgcatggaatacgcctacaggaattccttacaacatcattactttgtcacatggacgagcacacaaccctagttggactgggggtgagagtatcttggcagattctggcactgaacaactggaattcattgttctatcccaaaggactggagaccccatgtatcagcagaaggtggaaaatgtaatagcccagctaaataaaacatttcctgatgatggattacttcccatctacattaatcctcatagtggggcagcaggctactctcccatcacattcggtgccatgggtgatagtttttacgagtacttgctcaaagtttggatac

SEQ ID NO: 32034 - DNA, 453 bp, Glycine max
gacgaggatcaggcctactcctcaccctcccctgactcttagtatctgagcaacttccaagaacaaaccatcacttgcactgcactttgctcattagtcattacccatatcatgcctcgcctattgggaaaccttacacctcaaatccttgttcaggcacttagatccatgcctcgccaagctacatcctcgctcaaagtgagaacgcacggaggaacaagagggtcaggccccagccatggaagcgttggagggaaaagagggtcacccatcagccaggggaaaggcggacaacataatgaggtggttcaaaaaatgccgaatggtaacaacggaagcaaaagaaatgacgaggctagggttgaagctaacgcggcacagaaattgggcaattagagaattagaaattgcaaagtttcagaaaacatatttgatagatgttttaattaagac

SEQ ID NO: 32035 - DNA, 644 bp, Glycine max
ccctctcgtccgcacgccatgagctctgatccagaaaagcgggtgacaagcgaggtggtggaagacgatgaactctctcccatcgaggaggttcgtctcaccggaaccaacaccgaccacccgacccgaccggtatggaccttacggatgtggttcctgagacttctctcctgctccctactctcctttctcaaccagtgtcttcgcttaccgcacggtgcctctcatcatcacacaaatcacagttcatgtcgctactctccctatcggccacttcatggccgcgtttctgcccacaaccacgttcagcattcccggattcggttccaagatgcttctccttcaacccgggcccgtttaacatgaaggagcacgtgctcattaccatattcgccaatgccggaagcgcattcggatccgggtcaccctatgcggtgggtatcgttaacattatcaaagccttttacggacgcagcatctcctttgctgcttcttggcttctcatcattacaacgcaggtgctaggatatggatgggccgggttacttagaaaatacgtggtggaaccggcccatatgtggtggcccagtaccctcgtccaagtctcacttttccgagctttgcatgagaaagatgaccaccga

SEQ ID NO: 32036 - DNA, 300 bp, Glycine max
tcagtttcgcaatgcctcgtaagcgctttcaggagccgcaacccaaaacaggtctacaacatacccaggatttcctgaggaaaatagggttggggaaggagaactactacttctggaagcagattggaaaggctttgctttgcacctatgcagtgatcggggcagtgtgggtgtacaacgagacctcaccactgggttggtggacactgaagccaaagccaaaggaagagcttgagctggctcatttgtacgagcggcggcagtttccttacccgggcgatgaagaggcaatgcaagagt

SEQ ID NO: 32037 - DNA, 478 bp, Glycine max
tcgtttgccttttaccgtcttgatttgcattagtataggcgcactagggtttccacatttggaaattcttttatcgtttgttgcctcaatgagcgattttgttctatcaatgtcaactctagattcttttgtggcatatatatttgttaattttgtatctggacggtgtggttgtgtgcgatgctaatgctatgctatgatgcggaaaatttcaaaataatcgacacagaatcatatgcttttacccattgatggatgaacttaaagttagacgtggtacagaaaatacgttattgctttttaaaaaatagtggacaagtgttgaattgcatcttattattctccgttggaattctgggtggtgctgcatcgctttcagattttctagatgagagagtagggctttgtctataatggtatggcgactatgtttcttcatggaaaagatatccctggattatcttttcatgtaaaaaca

SEQ ID NO: 32038 - DNA, 145 bp, Glycine max
cggccaatacatctagtaaatagtctggccataaaatttaacttttcttcatagagtgtgaagtttgagtagcatttaccatttgatcctaaaagaaagcttggtgaaaggaattcttaaaccatgtaaatgaactgaagtgtaa

SEQ ID NO: 32039 - DNA, 358 bp, Glycine max
aaaagaaccatcagaccaaatgcaaagaagcttagtgcgctgttcatgtcaaggcatgagatggactgggatacatttgcaagtaaggttaaagcatgtcaaagaggattcatgggagagccagatgagatgagacctggacgaggagagtttcatgaatatccaagtacatgtgtgtgtgagaaaccattcatggatgatcttagccaagacggattccggccccctaaactcgcagccaacaacgtgacagtgaatggaggaggaaatgaagaaagtgtacgaaagcgaagtgggagaatggccagcacgtgataaagatgagtgagtttggaccagcgtcaggaagaagaccaga

SEQ ID NO: 32040 - DNA, 263 bp, Glycine max
gcccctcgcacccacctgacaccctttttcttgtgcttccaaattcccaagcgtccctttcggtgcctctttcttcattactcagtgtccctccttcccaaaataatacagaagccaccaccaccaccatctttactctttactctttactctgccccgaaagtcacatttttcttttcttttctttttctctgaaagatctgtgactattattattactattattatttctgatttttgtgggaaaatggctgactgggcac

SEQ ID NO: 32041 - DNA, 428 bp, Glycine max
ctcttgctttctctttctctttctctttctctcactttctttctttgtgtgcctcttacaatttcttatattattgttattgtaatagtctcccacatagacatcccctgcttagtagtatataaggccaagagattagaggtaccccaatagtccaatacttgttcacttggcaccaaattcaaaggctcatcaacaagtaccgatttcagttgcatacccaacatggcctcatggaagaagaccatcgccaccccattcaaaaaagcttgcactttctttaaccagcaacccccaagggaccataagaataagtctcaaacagagcaagagaaccggattatggatctgcacggtgaagtcatggcatgtggctatgaagatgttcaagttatgtggtcaatccttgataagtcaaaatccacagc

SEQ ID NO: 32042 - DNA, 244 bp, Glycine max
ctgtggtggaaacgaatagtaataataatagcttattgaagcaggttcgggaacatgaagaagagatcatcctattaaggaaacgtcttgctgattattctgtaaaggaaggacaaatacggaacgaaaaatatgtcttggaaaagcgcattgcatatatgcgtctggcctttgatcagcagcaacaggaccttgtagatgctgcatcaaaagctttatcataccgacaagacataattgaaga

SEQ ID NO: 32043 - DNA, 707 bp, Glycine max
ataatgatgatgcagaaagtagttcaaaagagacaggaggcaatgaatcaagaggagctttgggggaaaatgataatggagaagaatcagattctggagggaatcaaaatgacagtgatggggaaagtagtcctagagaagtggaaaaatcacctatagagtcagcaagtcctgatggtgccaaaattgctgaagtttctgatgatgagccactgagcaaatggaggcgtccctcgggaaagaaaagctcagggcaaaaacggtgagcagtttgacagttgtagcacaaatccctgaagatttcagtagcagcagtgctgtggcagcatttcgtgtgtttcagttcaagtataggtatcagagtggatgatgactgccatttattggcacactaatagatatgctatgcatgtcttgcaaccaccttgtagatgtaatattatcagttgtcatccccacgtttagaaaaaatttaaaaaaagagtagtgctttagggttttctagggttgtaatgctaaatgaccttttattagtgtaggtgataggtttagcatatgattcatgaggatgttttcatccttccaacacaattgatattccattgaatggggcaacatgtacagctatacgtggggataattgtatttgtaacttagattgtttgtactttttagtcttagcatccgtgaaaatatgacctaccgtc

SEQ ID NO: 32044 - DNA, 274 bp, Glycine max
gccgattatacaaactggtctaagtagtgaatcaaaggggtcagagtgtgtggggtggttggataagcaaagtccaaactcggttttgtatgtgtcgtttggaagtggaggcacactctctcaacaacagcttaatgagttagcttttggattggaattgagtgataaaatattcttgtgggttctgagagcacctagtgattcagcagatggtgcttacgttgttgcttctaaggatgaccctttaaagtttttaccagatggggtcttagag

SEQ ID NO: 32045 - DNA, 511 bp, Glycine max
tgtccatggtttgaccttaaatgtgcggaagatttttaatgatgttgatgccgatctatccaaagaatgtttacaaaagtttgaggaagaagagtcaaagaaaagtgaagtcatggcagggcgtgaagccacttggaaacgcttggaggaacttgctgcaaatggcgaagcagtgcttattggtaaagcaccacctcgcaactctgcaggttagatcgaactggaatactgggaatactggaatacatgtattctgctccaatagcttcatttttttaaacaaagatattatagtattttttttcttttgcatgtggtgggttggctaagaggggcaattccttgaaatactttcttattcacttcttgtagaaggctatgattagtagcaaatatctcatgcaaggcaacatccaaatcttaattagtatatactatatagatacttttgtacccaagacgcacatttgggcacttccctttttaatgaatctccaatgaatttcatttc

SEQ ID NO: 32046 - DNA, 284 bp, Glycine max
cggctcgaggccggtttagtttagtgagcaatgcagcatagttgtttgggaagtcgaaaactttgaaccgtttccccgggagacaaagaaaggaaacttttgcagaaaaccgctaagcaattacccagacacacacaccgattcaagccttcttcaaccaaaccaaagattaaaaaaaaagtcttcacaaaacgccagagtcagagagcacagttcaaatctcacccctttccttttctactttaatattattattttccgttccctttgaaacaactcaaagc

SEQ ID NO: 32047 - DNA, 348 bp, Glycine max
gaacaagattgaaagaagggcctgttcggccactgcctgctctgaaagagaaggtgaagaatgttatgttttactgttgaatagagcagggtgaagaatgttatgttttacagttgaattaggcacaataaaaggcttcaaagtagagaaacagcagcatatatatagtagacagaaactaattagaggtgaaaaaattatccatgttcatattgtaagaaaattctgcatggaatttttttagtgtaactttaaagtcatagttctctctgcgtagtgccgttttaagttaaggtaaatatccaatgttgatattggttggttgccttggacaatttcattcaaatt

SEQ ID NO: 32048 - DNA, 421 bp, Glycine max
gttcaaatgatctttgatgctttgagctgtgatcagaagaaaatgttaattcatattgcctataacctcattggacaagaaaaggcaatagttgaagacagacttcatcgtctttttggtgtttgggcaaaagatggtattgacatgttgcttcataaatctcttgtaaagattgatgagcaaggtcaggtgacaatgcaccacttgacacataacatggtaaaagatatggagtatggcaaaaaagaagaccaacctgcatcaaattatgggagcatgtgtgatttgatggaattggacaaaaacgggtatgtcatggaagaaatccaaccttcgtctaatgattacgaaccaatggaatatgaatatcaaaattgttctacctcctcttcttgagatccttcatgatgttatttaagat

SEQ ID NO: 32049 - DNA, 315 bp, Glycine max
cggaaaggaaagtagctagacactttactgagaaacgcttcttaatgaaataactttctctcactctgaagatgatccacggtggctacaacctccatccttatctgaaactgccactaatatattagtactttctttagaattcatttatttatattatcatcatttttacttagcaccaaaaatgaatatataattaagccataccgatggagagtgtcagagtggtaacactagctaagtattagtggcaataatcgatcaattttcatttttcaactgtgacccatctttgttattgccaccatgcatagg

SEQ ID NO: 32050 - DNA, 504 bp, Glycine max
ccagaatgttactcctgcacatgttccagatattgtgatatttatagatgccataacaatagtttttgaagaggctacaaaaattggacctccatcctcattaccaattgcatgtattgaagctggaaatggccattctttaccaaatttagccctcaggagaggtgaagaacattcttttatccttaaacctgcaacttctatgtcaaagaatttaaaggctccggatgaaagctctcagttttcaaaggtgcaatctccaaactcagcaaaatcaagtatctgctctacgagtcctgacagaacaaagattgcttcaattgacgatcagtatgcaattatcgtgtcttgtcgatgcaattatacagcatcaagattattctttaagcacgcaaccagttggcgaccacgtgcatcgatggatattataatctctgctgcatctgacatgtcatgagagtctcctgtaccttatgaaagaaattctcaacttcctgtgcaggt

SEQ ID NO: 32051 - DNA, 451 bp, Glycine max
tttcgattgagaagaaggaattggcagtggcagcaacagctgaaaaggatccccagaaagttggatcttcaatagagaagaaggaatttgcagcaattgctgaaaaggatccccagaaagttggatcttcaacagagaagaaggaatttgcagcaattgctgaaaaggatccccagaaagttgaaactgatgagaaggtagaagaaaaagaagaaacaaaggatccaaagaatgctggatacaagataagtgcaactgctgcttataatattgctgcctctgctgccacttatctgcattctcagactagtagcatatttccattcaaatcctcaaatgctgtgactggtgaaggttcacttgaaggaagcaatgaaagccttgacactgttaacatgctaaacacagaggtggcatctttgatggcaactactgattcagtgacagcagt

SEQ ID NO: 32052 - DNA, 301 bp, Glycine max
gcagtgttgttatatagcggccatggtggcgccatagcagaatggcgtggtggttttttttgccaaccgccgccataggtaatttgtgaaggaaaacccgccatggcgtgtttatatggcggaattttggccttctgccatgttcccaccatccgccattaataacactgatccagtggaagatggttaatcataactgattgggataagaatatagttatcttacttatcctgaccctgttagttcaaggttttatacagaatttgagttccctagttcctacagttttactatgctctg

SEQ ID NO: 32053 - DNA, 305 bp, Glycine max
atcgagggagtgagggactagcacagaaagatattgtttggtgtacggtggtgagtgtcgacgctgccactctcgcctgtgtctgtgatcagaaatggaatctgatgcaccgacatggggagacaaactcatgttgaggggattgtcattccatggttttcatggagcaaagcctgaagaaagggacactgggccagaagttcttcatagatatagatgcttggatggatctcaaagcagctggcaaatctgatcacttatcagattctgttagttacacagaaatatatgatatagctaaggat

SEQ ID NO: 32054 - DNA, 710 bp, Glycine max
tctcgagccgctcgagccgcggctcgagaattgttagacgagtgcacgctggaaatggctgaagacggtgacctgtttggaaaatctatcccgcagacactatctacacctttcatactcgggacctcagatctatgtgccatgcaacaggactgttctggcgatttacatgcagttgggtctctcctctacgataaagcaggggttgaatccaatttaagtgaaagagaaacagttttagaggtttgtgagacaattgtaaagcgaggtgggagcttagctggtgcaggaatagtggggattctacaaaaaatggaagaggatcagagaggtctcgtctttgggaatgggaagagaagtgttgttgccattgatgggggcttatatgaaaattatcctcaatacagggcttatttgcaagattcagtcacagagctgctaggaacagaaaagtcaaacaatgtggtgatagagcatactaaagatggatctggaataggagctgctctattggctgcttcaaactccatgtacaaccaagacttatagtccattatcatgcaaataaaaattgaaggaataatccatttttccttttgtatatgggagaggaaaaggtcacttgatggaggtccaagattattatttttcctcataaacgtagtattgaaatttgtattttatataaaatactcaagtctcttgttact

SEQ ID NO: 32055 - DNA, 431 bp, Glycine max
ccttcaaccgtttccaatccaaaccaacgtgaaacttgaaaactgaactcaattctcatcttcccctaaaacactaaaccctaaatcccaaattcttcaccatcaaccctaaatcctagaagtgttgcaatggccatgctgccactcacaaaccccactccaattcgccacaacgcactgccttcctcctctttcgttcaaagaaactgcgtttccctgaaccctagaagcagaaggtgcgccttcgaaccccagcgacgtcgtttcgcgtccgtgacatgctgctccttctcgacagtcgacagcgctaagattaaggttggcgtgttggcggcggcggcaacaatgctgttaaccgcatgatcggttgcggattgcaacgtgtagaattttatgctataaatactgatgctcaagcactgttgcattct

SEQ ID NO: 32056 - DNA, 258 bp, Glycine max
gaggtttccgcataattgtactactgtaaattaaagaaaaaaaaatgcggtttttctaactagtcttactacgttaagagtgttttctgatttgaagtgaaattaacaaaaaggccttgtttttgctacatctttctaagagtatatgtaaatgactctgtaatttccttttctatgtgaaagctcaaacttttggcaccaaaaaaaaaaaaaaggggggccccccattaagtggcctggtcacccgggaatttattc

SEQ ID NO: 32057 - DNA, 473 bp, Glycine max
tcggggacatagaagacggtggcggtgtggcgcattgatcttctcttctcccttgactgccccaaaggcacaaatttggcaatgaattcgacaccagcgaacctggaatcatcactttcagttcccagtgttcaagagttagcattccaacggccagagaaagtgccagcaaggtacataagagatcaagacggtgatggcatcattgccacctacccttctcatccatctcttcgtgtgcccttcatagacatggccaagttggtcaacgctgacacacatcaaaaagaagagcttcgtaagcttcatcttgcttgcaaagactggggtgtctttcagctggtaaatcatggactttcaaattcatcccttaagaatatggggaatcaagttaaaagattttttgaacttcctttacaagagaagaagagatgggcacagagaccaggaactcttgaaggctatggccaagc

SEQ ID NO: 32058 - DNA, 285 bp, Glycine max
gaaaatgcacatttcaccaaagaaaaaatggtggtgaatgataatgatgatattgcttctgcccctggagtggtggcaaggctaatggggctggattcacttccaaaccccaaatgggtagtgcaatgtggcaccccagattcggttcctagaagcaggtcagtgaactttgtggattacttgcttgagtttgatgcaagccatgttagtagccataggagggtgaagacctcggcatcgttcagagaggttcctagtttggttcagaaccaaaatggtaatggt

SEQ ID NO: 32059 - DNA, 389 bp, Glycine max
aaggaaggatgtgaagcatagggaatggggagatagggaaaaagaaagaagtgatcgtagaaacagtccacaagtaacaaacagtaccggtgactgcaaagaatctgccaaggaagatagagatgtagaaaggttggagagggagaaaaaagatcttccagaagggaatgaaaatttaacagagagggaatgggatcagatgaagagagaatcatggaatggaatggagaaagaggtttcaaataacgagaaggaatctgatgatgcatcagataaactaactgaacaagaaattgtgttaccagagcagaagaaacaaaaagaagttgatagctggaaaaatgtacatagagaagctagagagaggagaaaagaaagggatgctgatt

SEQ ID NO: 32060 - DNA, 273 bp, Glycine max
ttgtgaactgtgtggcaaacgtgcttttttcaccttgaggaagacagagcagagagagactgaactaattggtggggctgatttgtatatgccggtttgtcgcctgcactacctgaacagccaagttgctgagaggagtgttctcgaatctcaaaattttaaaaccgattgattcccttcttgaggcagctgaagatgtttaagggttattgggaaattggcttgtatgtagcccaccatgtttaattgttcgactgatacatgtttttatct

SEQ ID NO: 32061 - DNA, 463 bp, Glycine max
ctctctcctccataaccaaaatatcaaacacccttcaaccccttctcttctctgttggatttcaatctctccctcgcgctctgatttggcctttttcaattttccatggagggtcatcatctccatcaccatcaccggcaacaacaacaacaacaacatcatcatcaacaacaacatcaacaacaacagcatcatcaccaccctcatcacaacatcacaactagtaacgtggatgccacggataggttcccccaatggagcatccaggagacaaaagagttcctcatgatccgtgccgagctggatcagactttcatggatacaaagaggaacaaacagctttgggaagtcatctccacccggatgaaggaaaagggtttccataaaagtgcagaacagtgcaagtgcaagtggaaaaacctcgttacccgctataagatttaaagggatgtgaaacgatgga

SEQ ID NO: 32062 - DNA, 456 bp, Glycine max
caaaacatcaaaaacacccttcaataacttctttctcttctctattggatttcaatctctccctctcactctgattttttttttctttttcaattttcatggagggtcatcatctccatcaccggcaacaacaattacaacaacatcaccaccctcatcacaacatcacaactagtaacgtggatgccacggataggttcccccaatggagcatccaagagaccaaagagttcctcgtgatccgtgccgagctggatcagactttcatggagacaaagaggaacaaacagctttgggaagtcatctccaaccggatgaaggaaaagggtttccatagaagtgcagaacagtgcaagtgcaagtggaaaaacctcgttacccgctacaagggatgtgaaacgatggagccggaagcgatgaggcagcaattcccgttctacaacgagcttcaagcga

SEQ ID NO: 32063 - DNA, 395 bp, Glycine max
gtttcggatttcccaattggactagagtcacgagtgctagatgtaaggagacttttggatgctggatctgatgatggtgtccacatgatagggattcatggaatgggcgggctaggaaaatcaacacttgctcgagctgtctacaatgaattgataattgctgagaagtttgatggtttttgctttcttgcaaatgtgagggctcactcagacaaacaagacgggttagaacgcctccaaggaatccttctttcagatatactcggagagaagaacatcagcttaacgagtacgccgcagggtattccagtcatacagtctaggctcacgggaaagaaggttctcttgattctagatgatgttaacacacatgggcaattacaagcaattggaag

SEQ ID NO: 32064 - DNA, 288 bp, Glycine max
aacaattactaggtttgggagaacctggagttttaagggaggttcaccctttagttgtggacaggacttgattgatcattgtttacctctctggttgtctagccaggagatggaaaatgcagagtttgaagctatcaagttaaagctttccaatgtttcagttagtcagggaggaattcaggttctcatagagactaaataaaagttgtgtaacttgatatgtcaccttaaatcattctcagtattgttggcagccaaatcttaatattaaatttgttagtcaagttc

SEQ ID NO: 32065 - DNA, 467 bp, Glycine max
ctcgttcgtttcttcgttcttcttttcttttctctcttcctcctttttctcgtccattggttaagttcttcttcttcttctcattctctctctctccgaacatgcatatgcaatctttgagagaagggtagaagtcattaaaggaaaaaaaatcgcagtacaagaaagcgcgtttttcttccctctgttaatgtaacggcttttctccttaacgcttagagattgtttccaacatacgctgagggaaaagagacagtgggtcttcttttcttctcagaaaatttccttcttgtctccaatctcttcgttttcttcatctctgtccaaagggtctcgtgtagtggtttcttgtcttctttttctggctctagaacatggtggcagagagaaacattgtgctgctgttgctgtgcgttactgttgtggctccgattgtgctctacactgatcgccttggcacctttgag

SEQ ID NO: 32066 - DNA, 726 bp, Glycine max
agaagatgattatccatcttcaagcacttttagggaacagatgggctgcaatagctgcttacctaccacaaagaacagataatgacataaaaaactattggaacacatatttgaaaaagaagctgaacaaaaaattggaagcaggttctgatcaaggaagcttgttgggaggaggacataataatattgggttttcatcagtttctcaaccaatgtctagaggccagtgggaaagaaggcttcaaacagatattcacatggccaaaaaagcacttagtgaagcactctcaccaaacaaggcatcatcatcatcatcaaccttgttagctgaatcaaattcaaacctctccaatgaaaatagtaccttctataatagtaacactaataaaccaacaacaacacaatctatgtgctatgcttcaagtgctgataacatagctcgtttgttgaaagggtggatgaaaaacacaccaaaatcagcctcatgtgctgcctcggctgtgactcaaaattcctgttcttctagtgaaggaattacaacaacaaagggaagcacaacaagcactagtactgttgaattgtctgagacttttgagtccttgtttggttatgagtctttcgataattactcttcaaattctgagttctcaccatctctttctcctgaggctactcttttccaagatgagggcaagccagatataactacaggattaatagacatgc

SEQ ID NO: 32067 - DNA, 351 bp, Glycine max
aggagataagttttcacaaggatccatcgttccatttggaaacatagagatcagcccttctgctggaatcttaaattatggacagggactctttgaggggctaaaagcacatagaactgaagatgggcatgtacttttatttcgaccagatgagaatgctcaacgcatgaaacgaggtgcagatagattgtgtatgccatccccatctcctggccaatttgttaatgctgtaaagcagatagttattgccaacaaacgttgggtgcctccaccaggaaaagggtcactatatgttaggccattgctgatgggaacaggagcatcgataggtgtgggaccagctcctgagta

SEQ ID NO: 32068 - DNA, 259 bp, Glycine max
gtgatttttatacgcacatgaggagcaaaataacacttgttctgaaatccaagatggattgaatgagaagcaacttgaacttcgagaccccttctctcaggaagaggtgttgatgaatacgttacttgtgaacaaaaatcaactaccacaatacagtagaggagtgttgatattattaaggtccaatactccaactatacttattttacatgctgattcaagtgaacaagcaaacgtgtttgatatatataatttgcct

SEQ ID NO: 32069 - DNA, 315 bp, Glycine max
gtgcactgcttttcatgacaatgaagagacatttttgaaaaaatacttatatgaaattgccagaagacatccttacttttatgccccggaactccttttctttgctaaaaggtataaagctgcttttacagaatgttgccaagctgctgataaagctgcctgcctgttgccaaagctcgatgaacttcgggatgaagggaaggcttcgtctgccaaacagagactcaagtgtgccagtctccaaaaatttggagaaagagctttcaaagcatgggcagtagctcgcctgagccagagatttcccaaagctgagtt

SEQ ID NO: 32070 - DNA, 403 bp, Glycine max
cctccgtcccggcccaataacctctccatctctcccacacttttctttattttcatctctgcaacaacagtcacaaaaaaaccaaaacaaaacaaaaaatgtcaccagattttacactcttgttcttcccggaactcatccaaccccctatcgttaccctccaagccgccctatgcatccttctcttaaccttcctcctcacgtttttcctcactccaggcgggcttgcgtgggcctgggccaccaagtcctcgacccggcccatcattccgggcccagtaatggccctgctcagcgtcttcaccggctccaccccgcaccgcaggttatccatgctcgcccgctcttaccacgcagaaaagctcatggctttttcaatcggtctgacccggttcgtcatctc

SEQ ID NO: 32071 - DNA, 404 bp, Glycine max
gctcaggaccagcagaactggtttttaatggaaaggctactgctgttaagggtcttgaacttatcttcgatagtgggagctcttacacatacttcaactcacaagcctatcaagctgttgttgatttagtaagatagaaactagagagaggctcaattttcatcatcaatctcgttgtcttatatggcctaagatatttagtcagccatcttaagttaataattccttgatccataattcaggtaactaaagatttaaagggaaaacagttgaaaagagcaactgatgacccatcacttccaatttgttggaagggtgcaaagtctttcgaatcgttaagtgatgtcaagaaatatttcaagcccctagcattgagcttcaaaaaaatcatgaatttgcagatg

SEQ ID NO: 32072 - DNA, 458 bp, Glycine max
gcacccgcttcatgatcatgatgtgaaactgaaactgctccttcccttccttaacccctgtatgaatcttctcttcattttcttttgtttccagagctggtagaaaacaaaacgaaattcttttgaataaagtaaacccagaatattcattcattcagacacttcaagttttccctccgcggaacaaaatggggatgggaactagcacctttgttactagatggatcaactttctcaccatgcttttggccattgttgtgataatatttggagtgtggatgagcactcatcatgatggctgccgaaagtctctcactgtgcctgtaataggcctcggagcagttattttcttaatatctgttgttggctttttgggtgccctgaaaaacaactccatactattatggatttatctgatcacgttgttctttgtcttggtgggaatcctggtcttcaca

SEQ ID NO: 32073 - DNA, 274 bp, Glycine max
cttggagtgatacctagcagcggatgaacgtcgctgcgcgtgtttggaaactcgttgagaaggaagaaatcacgtctggaatgtagaagctatatgactaactactagctagcttctcaggtgtaaaagttgtaactattagcttcttcgaaaatgtgtgaaagatcatatctgaaacgtgaaaccaaacatgcaacgaatgtcgtatgtcatctgtggtgtgttaaattttgcatgtgaaagagaggggcaaaaaagaaaaagcattggaggg

SEQ ID NO: 32074 - DNA, 390 bp, Glycine max
gggattctggtatatgaagccattgatagaatcattgccggtcctaaaagtgtggatggttttttaatgtttttagttgctgcatttggtcttgtggttaatatcatcatggctttgttattgggtcatgatcatggccacggacatgatggtcatggtcacggtcacggtcacggtcacggtcacggacatgatggtcatggccacagtcatggatttacagtgtctacccattgtgatgcaaagcatacaaaagatgagcaccatcacacacatgatgatcatgcacaccatcatgatgaaaacctttcaaaagatgctcaccatcatactgaggaaagatcacttgcaccatcatgctcacaaagatgttactgaacctcttcttgg

SEQ ID NO: 32075 - DNA, 253 bp, Glycine max
ctgaagattcatgcacaaattacgtaattagttgtccacgatataagttgaattaaatacagttctttgtgtcgttcacccttgttttggttctttctcatccaaagtccgggcaccatgtaggttatgatgctaaatgcagccaataaaattgagccgcttttaactatagatatgttcccaggctaggatttgcattaaactagcctgacttatttaactagtgtcttttgaaggcttgatttgatttttt

SEQ ID NO: 32076 - DNA, 448 bp, Glycine max
ctgtatcaagcgcctcctccgcgtcgaaaaaaccggccactccggtaccctcgaccccaaggtcaccggtaacctcatcgtctgcatcgaccgcgccacccgcctcgtcaagtcccagcagggagccggtaaagaatacgtctgcatcgcccgcctccactccgccgtccccgacatctccaaggtctcccgcgccctcgaaacccttaccggcgccgtcttccagcgtccccccttgatctccgccgtcaagcgccagctccggattcggaccatctacgaaagtaagctccttgagtatgaccctgataggcacttggttgttttctggatttcctgtgaggctggtacctatgttaggactatgtgtgttcacttagggttgcttcttggtgtgggtagccacatgcaggagcttaggagggttaggtccgggatcatgggggag

SEQ ID NO: 32077 - DNA, 603 bp, Glycine max
gtatatacaaaaaagacttgcatttgaagaattaattccggtgattcgagtagaggcacggaacacaaatcaacatttttgcagtactctaacaaataacttcactacttaacgcctagtagatttaatacctaaatagtctgataaaccaagttccaattatgaaaaagaatgtgctcaaattactagtttatgaataataatgtctcaatggtatacaatgaattacactagaataagactaagccgggaagtatcccaagttagttctctagcctcccgctccaataaagctcccataaattgtgcttaaccaggtaagtataagctgatgattagggtcactataatggtaaatatacaagcccttgcaccaacagcagctgaggttgaccttgctaccaggtccttgacggattcggttgttagtccgaaaccaaaaggaaaaagaggatcatagtgaggatccccaacattcattgggagttgatctacggatttgaaccatgtcctcgcaagcttaccagtgaacccatagtcaccaaaaaggacgtccgtcacgccttggccttcagtgcctggtaaccatgcagccaccaatgc

SEQ ID NO: 32078 - DNA, 441 bp, Glycine max
ggaaaatctctttacacattctacattggccaaaatgattttacttccaacttagcagccattggcattggtggagtgcaacaatacctccctcaagttgtttcacaaattgcttccaccattaaggagatatataatcttggagggcgtacatttttggttcttaatcttgctcctgtgggatgctaccctgcattcttggtggaacttcctcataatagttcagacattgacgaatttggatgcttggtttcatacaacaatgcagtactggaatacaacaacatgttgaaagagacattgaggcaaactagagaaagtctttctgatgcttctgtcatttatgtggatgtttacgctgttctgttagagctcttccggcatcccacttctcatgggcttaagtatggtataaaagcatgttgtggatatggagggggt

SEQ ID NO: 32079 - DNA, 481 bp, Glycine max
cagctacactatggcgactaatcttcctgcaacgaagtccaccacgacgacgtcgtctcaggagaaacgacaccgttcgatcttcgaagttccaccgaacttcttcgactcttgtcgtcttctcccttctcctcactcatccgtttccgaccaccacagcgtaggccaaacccaaatcatcgaaacatcctcaaacgacgacttcgttttggatgcccctcaaaacgccgtcgtttccgcgcctaggtggacctgcaatacctgcaagactcaattcgattcccttcaggaccagcgttcccatttcaaatccgacattcatcgattcaatgtgaagctgacaattgctggaaagaatattgtgaaggaagaagattctgaggttctaacatctgaatttgtcaaagactatgatgtgtcaagtatatcgggatctgaaagtgacgatgatagtgaaaccgagtctcagagtcaaagtgca

SEQ ID NO: 32080 - DNA, 360 bp, Glycine max
cattgatggagtcatcctctgatgaaatggtgctaaagggtatttttctgccctttatatcaccgagtcatctggtgcccgtcgtagacatagcgaggatcttcgccatggaaggtgtggatgtgaccataatcaccacaccagcaaacgccgccgttttccaaagctccatcgaccgtgattgtatccgcggtcgctccattcgaacccatgttgtcaagttccctcaagtccctggcttgccacaaggattggagtccttcaacgcttccactcccgcagacatggtcaccaaaatcggccacgcgctctccattctcgaaggtccattccgtcaactctttcgcgatatcaaacccg

SEQ ID NO: 32081 - DNA, 393 bp, Glycine max
gctggctgttgcattaacacttatcggaggtgtgcaacatgttgatgcttctggaactagggtaagaggggagtcccacttactcttggttggtgatcctggcaccggaaaatctcagtttcttaaatttgctgcaaaattgagcaaccgttctgttattaccactgggttgggaagcacaagtgcaggattgactgttactgcagtgaaggatggaggggaatggatgttagaagctggggctcttgttttagcagatggaggcttgtgttgcattgatgaatttgatagtatgagggaacatgatagagcaactatacatgaagccatggagcagcagacaataagtgttgccaaggctggtcttgtaacaacactaagcactagaacaac

SEQ ID NO: 32082 - DNA, 396 bp, Glycine max
acgtgatcaataactaaattgatattccgtagagctttcattctgtgtgaacactctagttgctaacagatgcattaagttgtaggtatttaattgtccccagttgagagaggtttccttggagttttcttgccaagagaatgatagtacggatctcaaaactatgattgaaggtttgggaaggagttgcccgagattgcaaaacatacatatagcttcgatacggctttcacactccgccgtgcttgctcttacagctgctcagttgagggggctgcgaatgctttctcttgttcttggatctgaaatcactgatgcatctgttgctgccattgcctcaagctatccaaatcttgaattgcttgatctcagtggatctggtgttagtgacagtgg

SEQ ID NO: 32083 - DNA, 326 bp, Glycine max
aaaccatttgagcaatttatataaattataagttaaactaaacttaacacttacgaacagaaacaacaaacacaattcagcttctcctccgaggaaacgctgctgacatggcgttcgggtcttccgaggatgtctcaggtgtcaaattgcttgtccttctggcggttatgtacggactcttctcggcgctgacatactccgtcatccacatgaagttcgtgaagcctctcgggaatgacgcgccgctcgatcgattctctgaagccagaaccgtacaacacgttcgaattttgtcgcaagagctcgacggtcgtcaagaagggcgt

SEQ ID NO: 32084 - DNA, 312 bp, Glycine max
agttaactccgctagataatctgttactattgaaccaccttatggaaaattatgatccaagtgtgcttttaactgttgtcaggtgtgcatgtgactttggaatcattgatcaaggataatgacctccaaaccaccatcaaagatctcgtcggttggagtggaagatcactccctaaggaagacgactcagaaatagaagcgagcccagtgtcggtgttgtcagcagcagaagctctttctgagaagcagaagtttgccagtaccacggaaaagcctgttcttgtcaaataaaaattagctgatgttattcat

SEQ ID NO: 32085 - DNA, 288 bp, Glycine max
ctcgagtcgcctcaacagccgtaacatgctacttcgcaccaaacactcactttctctcttctcactctacactcgccacagctaccagattcgcgaaggggtttagggttccgttcatggacgctgttgaattgccgttaccacttgacgtggcagccacccccaaattgatgggatcggagggtttctcgctaattcaaaatgatgttgcaagtataaaaactgtgcctgagtttccttcctgcaataaatttgtagaaactcaactctctaagaattctagtctgc

SEQ ID NO: 32086 - DNA, 415 bp, Glycine max
gcaaattgcacgaccatggctttctctatctcactctttttattagtcctgcttttttctttccaatcttcttcatcttccctattgtcattgaacaaggggtcctccctctcagtggagaaacacgcagaagacgttattgtctccccaaatcaaatgttctgtgctggcttctttcaagttggtgaaaatgccttctcctttgccatatggttcaacgaccctcacactcacaacaacaaccacaccgtggtttggatggcaaaccgtgaaacacccgttaatggaaggctatcaaagctttccctcttaaacagtggtaacatggtcttggttggtgcaggtcaaatcactacatggtcatcaaacacagcatcagatgctccagtaaagttgcatctccaagatgatggca

SEQ ID NO: 32087 - DNA, 442 bp, Glycine max
gatgccctagctaaggctaagaaagctttacaaatgcagaaagagttgtcagaaaagctaaagaaaattcctcagttgaataagagttctacccaaaattcacaaggaagctcgaacttgggctcaatgaatgaatctgcagtaccctcttctgctgctggagtggcatcaaaaagttccacctcagcttctttgggccatgctgcaaatatgtcaatgttcccctcaactgcttttgctgcttctgctaatactccagtaattggcactagtgctgttggtattccaaatgcaactctgcccaacttggaagctgtcaggcgtgctcaggagcttgctgccaggatgggatttcgtcaagatccacaatttgctcctctgataaatatgtttcctggtcagatggtaacagatgttgctcttctgcagaaacccacaaaag

SEQ ID NO: 32088 - DNA, 279 bp, Glycine max
tatcacatgatttatgattaattcacaatataaaaaattctaattaaaactatcctctaaaaatttagactagagtaaaatagtttattttgacaaacaatttttttatagaaaaaaattactactatgtgatttcctaatggaaaaatcaacgacacaggttcaactatatggctatatcagatgaaaggcagagaagcatgccaacgataagagacagagaagctgggcaaatcctagcattcccagaagcagttctattaaccagaccaatcagcc

SEQ ID NO: 32089 - DNA, 255 bp, Glycine max
atcgcattcctctccttctgtagcagtgttcagttgcagcgttttcaagatttctatctattaatttattcctttagttagaacgaaattagggcttaaattgagaaagagacaattttgttacaattttttttaaaattatttatcctatctattttttatgtttgtggtgcagtagataatgaatcttgctctgtattgttttttttttttttggtaataattataactccgttttactcggttctaaatgtt

SEQ ID NO: 32090 - DNA, 521 bp, Glycine max
aaaaatcacattcacatatcaatagcatcaacacacacattattagagaagaaaagagtgagaagcagaaaaatgggagcagaacctttgtccaagaacgaggttgcacttgcacaaacacaagctcccttcgttcttgggctccaaccttcagcacttgttgaccacgtggcacgtgtggattggtccttgctcgatcaaattcccggtgaacatggtggctccatacctgttgagcttggagagcttgaacatatactaagggaggcgaagattcatgttgtctcatgccatgacaatgacaatgacactgatgatgattatccttcttctcacattaagaccttggctggaggcagtgttgctaacacgattcgaggtctaagtaatgggtttgggatttctagtggaattattggggcgtgtggggatgatgagcaagggaagttgtttgaccataacatgagctccaatggagttgacctctctagactcaggaagaagaaaggacacacagcaca

SEQ ID NO: 32091 - DNA, 562 bp, Glycine max
  unsure (1)..(562): unsure at all n locations
gtaccacccgaggaatcaatatatcttgcacttagatcttgaggcgccaccccgggaaaggttggaattggcaaatgcagtgaaagctgatccaatatttcgtggggtggagaatgtgcgtgttatgtctcaatccaatttggtaacttataagggtcctacgatgattgcttgtaccctccaagctattgcaatattgttgaaggaaagttcagagtgggactggtttattaacctcagtgcctcagattatccccttatgacacaggatgatttgcttcatgttttctcaaatctgtcaagaaatatcaatttcattgaacacacacgcattgctggttggaaactgaaccaaagagcaagacccatcattattgaccctgctctttacttatcaaagaaatctgatttagcattgactactcaacgaagaacacttccgacgtctttaaactgtttactggctcacttgggttgtactgactcggtcctctgtggagtattgtatatggngatgggataactttccacggactatgctaatgtattacacaaattttat

SEQ ID NO: 32092 - DNA, 404 bp, Glycine max
atcacattcctgttgtcaccttaaaaacctgaatttctctctcttcggcacggggcctaggttattcactttcttcctccattctcgttccgtcacaacccaaccatggaaacccccgaaaactccgcatactgttcgtcgtggctgccgccggaagacgaaaacgacagtggcgccaaattggcaaaatcggtgaacaaactcaacgacctcgccgttgcgatacaagccttcaataacaggtaccaagaattgcagaaacacctcgaattcatcgaacaagccattgacacgaggaccaaggagctccgagcactacgctacaattctactcaaggaaccgccgaaaacggcgtcgttcaatcagattcaaatccgaagccagaagaagccaaggcggtaga

SEQ ID NO: 32093 - DNA, 277 bp, Glycine max
cacagtgccgccgccgtagtgggaagccatcgtcgactcggcgaaaagtcctacaagatttgggaaatggctgctgcacgagggttggtactgtcacgtcctgttacttttgtgacggccaatgccaaaaagcttgaagaagttcgtgccatcttgggcaattccattccttttcagtccctcaaacttgacttgccagagttgcaaggagagcctgaagatatctccaaagagaaggctcgaattgctgctcttcaggtgaatggacctgtgttgg

SEQ ID NO: 32094 - DNA, 366 bp, Glycine max
agaggctaagatttttgtgaaatctcttcgctccacattctcatttctacaggatgttcgtgttccaactattgctgttattgaaggagtagctcttggtggtggacttgaaatggctcttgcatgtgtctttcgtggttgcggagaaaatgctctgatgggtttgccagagacaggacttgcaataatccctggggcaggtggaactcagcgactgcctagattggttggaaaagcaatagcaaaggatattatatttactggtcgaaagattgatggcaaagaggcactgtccttgggtctagtcaattactgtgttcctgctggtgaagcttattcaaaagcacttgcaattgctcatgatat

SEQ ID NO: 32095 - DNA, 242 bp, Glycine max
gttttctccttcattctagtctagtctttttcttctttttttcccccatgtatagctccaagttcagaaagctgttttgttctgtgttgttttcatggctctgttttggaggtttggccatggcagcaggtgaaagtagcagcagctccagagacctagaccagacaccaacgtgggccgttgctgctgtctgtactgttttcatcttggtatccatagcactcgaaaagagtctccacaaa

SEQ ID NO: 32096 - DNA, 282 bp, Glycine max
caatacaaagaaacgagataaaaaaaaaaaacaaaaaaaaaactccctacaaaaccaactcattaaaatatccaattcacatatccgaaaacagaggaaacatgtctctgtttgcacccctgttgttgaaccagagcgaccccttcgaccatttccgagccttactcgggggaaattcagaatcattggatctcggagcgtacacccaaatggattggaaggaaacccttgacgcccatgtgttcgaaatcgatcttcccgggttcgccaaagaggatgtga

SEQ ID NO: 32097 - DNA, 401 bp, Glycine max
cgctgttaagtttctctgtctcaatctctctcagtcatcttaatgttatctctacacttcagaaccaacacaacaacatctctctctttctatagatatatgttctgagtctttggttttacgcaaccttctagtgtcactcaaaacaaagagagaaaaactattctcactttaagtgattgattgtgcccatattcattgtttcagcatcaacaatgaggcgctacttgtcaaaattcattcattacccaattggctttaatccatcaaactcctttccgttgaattgtgagatggggtcctactgtgctgccagaagtactaaccgtcaagcttcattcagtggcaacatgcatgaatatgccacaagagcttttgcaacaacatcttgtgcttcattg

SEQ ID NO: 32098 - DNA, 359 bp, Glycine max
atccagcacgcgcccaatttctttgaccttctctctcactctccgatcccatttcgttccaacgcgaaaggacgaacccctagagagtcctagacgtcgtcgtttcttacctctacctcgatccgtgtcaatgtccagaggcgcgtggcgatgatgacggggaagtctggacttgttgtcgatccgcgttccctacaagaatctccaccacgattcctccgcccgcgaactcgaactcgtcgacgtcaaccaccgcaacttgccaccatcaccgccaccgccaaatcactctccctcgccgccgaacaacaccaacatcaacgctccgttgcttcatctcgttctcagttgcaccgtcg

SEQ ID NO: 32099 - DNA, 397 bp, Glycine max
cttacagtagcccacacccctctcaacctcatctcttccttccccaaaaatttaacctttcgatctctcactcatatccttccatgattccgaaatttgcaaaattttttcatctttggatttttccaagcacgaggaggtgacgggaaaaaggggaaaaacactacgcgttttctagatttttctgtttgatctctttaaggttctgtggaaaatatagtgcttgaccttcctaacaacggtaaaagtcagtgatgcgttatttaggtgagtagctaatatacttagcgatttccttaaagttcttttatggaggaacaagtacacttctgaacatatatatttttggtgagctttgatatatattttgagatcttgataatatataaggatgaat

SEQ ID NO: 32100 - DNA, 309 bp, Glycine max
ctcgagccgattcggctcgagggctcgagcggctcgaggcgcacgggcttctgcatgagggcggcagtgcggagctttgaggaacaccgcagatcagtttttttctctttgaaagatagagattaatacaactacttaaaaaatatagtcaataggttactaagatattgcttagcgttaagtttttaacgtaattttaatagcttaagattttaagagaacatatgaagacttagacgagtagcctgaggacggaaaagataaaaggtttctaaaacatgacggaggttgagatgaagcttcttcatg

SEQ ID NO: 32101 - DNA, 272 bp, Glycine max
ctgtggtccaaggccatttctgctggctataagcggggtctccggcaccaaagggagcacacagctcttcttaaaattgaagctgtttacgcccgagatgacacagaattctatttgggcaagagatgcgcttatgtatataaagcaaagaacaacacagtcactcctggcggcaaaccaaacaaaaccagagtcatctggggaaaagtaactcgggcccatggaaacagtggcatggttcgtgccaaattccgaagcaatcttcctgctaa

SEQ ID NO: 32102 - DNA, 569 bp, Glycine max
gccatgtacgttgctatccaggctgtgctatccctgtacgcctctggccgtaccactggcatcgtgatggactccggtgacggggtcacccacactgtgcccatctacgaggggtatgccctcccccatggcatcctgcgtctggccctggctggccgggacctgactgactacctcatgaagatcctcaccgagcgcggctacagcttcaccaccacggccgagcgggaaatcgtgcgcgacatcaaggagaagctgtgctacgtcgccctggacttcgagcaggagatggccaccgccgcatcctcctcttctctggagaagagctacgagctgcccgatggccaggtcatcaccattggcaatgagcggttccggtgtccggaggcgctgttccagccttccttcctgggtatggaatcttgcggcatccacgagaccaccttcaactccatcatgaagtgtgacgtggacatccgcaaagaccttacgccaacaccgtgctgtcgggcggcaccaccatgtattcgggcattgccgacaggctcccccaacgagatcaccgccct

SEQ ID NO: 32103 - DNA, 268 bp, Glycine max
ctcatctctgaaagtcgtgaaggcagcagcccaggtcttgaatacattatggcaatatcgggacctccggaccatttataaaaaggatgggtggaatcagaaccattttattacacctgtgtcgacattggagcgagaccgattcaaatcacatccttccttgtctaccaccaaccaacagatgtcacccatcattcagtcaggctccagcaaaccttcaccaatttacatcagttcctattcctcaccagcaagagaacaagataga

SEQ ID NO: 32104 - DNA, 448 bp, Glycine max
gcgatgggcatctctcgggacaactggcacaagcgccgcaaaaccgggggcaagagaaagccctaccacaagaagcggaagtatgagttggggcgcccagctgccaacaccaagattggcccccgccgcatccacacagtccgtgtgcggggaggtaacaagaaataccgtgccctgaggttggacgtggggaatttctcctggggctcagagtgttgtactcgtaaaacaaggatcatcgatgttgtctacaatgcatctaataacgagctggttcgtaccaagaccctggtgaagaattgcatcgtgctcatcgacagcacaccgtaccgacagtggtacgagtcccactatgcgctgcccctgggccgcaagaagggagccaagctgactcctgaggaagaagagattttaaacaaaaaacgatctaaaaaaattcagaagaaat

SEQ ID NO: 32105 - DNA, 314 bp, Glycine max
cgcgctgagcggctcgagcggctcgagatcaccatggcggctgggaccctgtacacgtatcctgaaaactggagggccttcaaggctctcatcgctgctcagtacagcggggctcaggtccgcgtgctctccgcaccaccccacttccattttggccaaaccaaccgcacccctgaatttctccgcaaatttcctgccggcaaggtcccagcatttgagggtgatgatggattctgtgtgtttgagagcaacgccattgcctactatgtgagcaatgaggagctgcggggaagtactccagaggcagcagccca

SEQ ID NO: 32106 - DNA, 275 bp, Glycine max
ccctcggaggcgttcagctgcttcaagatgaagctgaacatctccttcccagccactggctgccagaaactcattgaagtggacgatgaacgcaaacttcgtactttctctgagaagcgtatggccacagaagttgctgctgacgctctgggtgaagaatggacgggttatgtggtccgactcagtggtgcgaacgacaaacaaggtctccccatgaagcagggtgtcttgacccatggccgtgtccgcctgctactgagtaaggggcattcctg

SEQ ID NO: 32107 - DNA, 277 bp, Glycine max
agaaaatagaagccatgtttcgaagacctgtattacaggtacttcgtcagtttgtaagacatgagtccgaaacaactaccagtttggttcttgaaagatccctgaatcgtgtgcacttacttgggcgagtgggtcaggaccctgtcttgagacaggtggaaggataacatccagtcacaatattctctctagcaactaatgagatgtggcgatcaggggatagtgatgtctaccaactgggtgatgtcagtcaaaagacaacatggcacagaatatc

SEQ ID NO: 32108 - DNA, 505 bp, Glycine max
ttattcccactcctcacatcgagaaggaactgttgaagcaaataaagacgcatccatcccctcaaaccatatataaatggattaaagataacatctctcccaaacttcatgtagataaaggattcgcgaacatcttaatgactagcttcttacacgacattactagtgaagtaaacccccccagcgatgaaacagattcatcctctgcgtccttccaaagaacagtgagagcaggaaaaacaactactactatctttcaagccactaatgcagaaattccttcatgagcacggtgatctacaagtcagtgccctgtatgctctccaggtgcactgctataacagcaacttcccaaaaggcatgttacttcgcttttttgtgcacttctatgacatggacattattgaagaagaacctttcttggcttggaaagaagatataacccaagagttcccgggacaaggcaaggctttgttccaggtgaatcagtggctaacctggttag

SEQ ID NO: 32109 - DNA, 264 bp, Glycine max
aatatctgcgcctttgcctgtcctttctcccactctactgaaacccggaacagattcccgcttgccttctgatgaagagaggttaggtaaagagagtttggaggataaaagccaccaggaggcaggctgcggggtaggagagggttctgagaggaggcagcaatccagaatacctccttttctagccagcatcccttgaacttttgaacggttgtgcctaccactggctggcacaccagggcaatgatttccctgcagaaggaa

SEQ ID NO: 32110 - DNA, 339 bp, Glycine max
gaagatggcggaggtgcaggtcctggtgcttgatggtcgaggccatctcctgggccgcctggcggccatcgtggctaaacaggtactgctgggccggaaggtggtggtcgtacgctgtgaaggcatcaacatttctggcaatttctacagaaacaagttgaagtacctggctttcctccgcaagcggatgaacaccaacccttcccgaggcccctaccacttccgggcccccagccgcatcttctggcggaccgtgcgaggtatgctgccccacaaaaccaagcgaggccaggccgctctggaccgtctcaaggtgtttgacggcatcccaccgcccta

SEQ ID NO: 32111 - DNA, 342 bp, Glycine max
ccctcgagccgaatcggttcgagggctcgagattttttgtgtttaccttcaccaaccacgcgttcaccacgtttagaaatgaagcatcttatcatcgttccgtgtttttcctttcttttttctctcactcgcagaaaattaacgcaattccacaaaagcggagaagctcgatggtttgaaagtgaaataaataaattgcactggattgggtttgcatgatgggcatgttcccttttgagccaagtttgtgaattgaagagaaggaagcaccgtagcagcgaaaaaaggatgagcgcacgggatgatgatgacccagaaaggagaagattgaatagtgggttg

SEQ ID NO: 32112 - DNA, 497 bp, Glycine max
tgaatttatggctaataatagagaggctgaaaaagatgcttttgaagaagcagaaggagaaagaagggctcgggaagaagaggacgcacagagagcaagagaagacggtgcaagaaggcggaaggagagggatcataaatatggaaataggaggcatcgtcgaaggccggatccccgtgatatggatgattaccatgatgaactttgaagactgcactaagggtaggtggcaggtgcgtaattacaacactaaaatgcatctttgaagttgcgaattgtaggaccaaagctgcaattgcactgaccatgccgagctgtactgaactgtaacatctgaaatattagcgtcagtcattatgtgtaacttcatttcttttcgattattaggcaacagctggtctgcttctgctactgctactgtattcaaaggatggaatttaaactttctctattctgttaccgaaaggggggaaaagaaagaaattattttttagtac

SEQ ID NO: 32113 - DNA, 342 bp, Glycine max
caaggaagagcatgatcaaatcagagccaagaagagttgcccagaggcaccactggagtggacagattataagtcaatggcatttactcaatgtgttgtgaatgagactttgagggtggcaaacataattggtgcgatattcaggagagcaatgacagacatcaacataaaaggttacactatcccaaagggatggagggtcgttgcttcatttcgtgcggtacatctaaaccctgaccatttcaaagatgcccgcaccttcaatcatggcgatggcagagtaactcagaagcaagtagcccttcgaatgtatataccccttttggaggaggtccacgtcta

SEQ ID NO: 32114 - DNA, 272 bp, Glycine max
aaaaaagaccagcggttgacgatgaaacagaagtgtcttgttgttctggtctttgttgttcccttggcctgtgcggttggttgggatgagggtatacccggcggatggaaccccatcaagaacattaacgatcctcacgtgacggagatcgcgaatttcgccgtgacggaatacgataagcaatccggtgagaagctaaagttggtgaaggttatcaaaggcgaccttcaggtagtagcaggcctcaactaccgcctcagcctcaccgccag

SEQ ID NO: 32115 - DNA, 483 bp, Glycine max
  unsure (1)..(483): unsure at all n locations
ccctcgcgtttgtccacgcgnccggaagcttgtaataagatttggaataacgctcttgacgtctattagtttttccatattcgaagctgcaggctatgaagcttatggtactgaaactcctagctttcgtgttcctttggttgtggtggagtacttgtattcatgttaaagcagaaaatgatcgtttaaagcctggtgattcactgaatttttcacaatcactaatttctaaaagcggcaaatattcaacaataatttttcgtattcttgatgaggatgaatatcacttaggaatacagtcaaaagataaaaattttgattgggtcgaaattagaaaaccttttagcaaggattatgaatttctatcactaaacacctctggcgtgctgaaaatagaatctcgatacgggaaaaaaccaataatcctttattctccacctcaagctatcaataacactatggccatcttggtggacacaggga

SEQ ID NO: 32116 - DNA, 580 bp, Glycine max
acattagctcaaacaaatcaagtaacaaggaagagtaccaccttcctcgtcgggcttcaaaacgattagctgcaattgaacatgagtcaatgaactccaaagcaaaattgcagcaaagtgagtgtgggccagttacagtgcttgcagatcaagcaccaacaaatggaaagtcagcaaataaaaggagaaaatcagaacctcagctggggaaacgtgtcaatgaagaaatggaggatgagaaatcagaatctcagctgtcctttgcatttcactactcctggtctgacccaagtttggaatatgcaatcaataccctcactggtgtgttaccaccagctgaaactgatataccaaaaactttggttgacaatgttacgggaaaaggcgccactaccatccctgaaactgatattccaaaatctttggttgacaatgctacaggaaaaggcaccactacagtccctgaaactgatattcaaaaaactttggttgacaatgttacaggaagaagcggaggcagtgaaaacaatttgcttgacactgttgcaggaagcagggacagaaaatcccaggcacgttc

SEQ ID NO: 32117 - DNA, 404 bp, Glycine max
ggctagtccatctgatcctgaaaactttccatttgttgtgttgggaaacaaaatagatgttgatggtggaaatagcagagttatttctgagaagaaagcaaaggcatggtgtgcttcaaagggaaacataccatactttgagacctcagcaaaagaaggatttaatgttgaagctgctttccagtgcatagcaaaaaatgcactcaagaatgaacctgaagaagaaatgtacctgcccgacacaattgatgttggtggtggtggacgacagcagagatctactggctgtgaatgttaaagtgcagagaattctatggactagctttagttgcttgttttttgccaaaatacaagcgatcctcatggattattagcctgcaagtactttataacctatgcaaaac

SEQ ID NO: 32118 - DNA, 288 bp, Glycine max
ccttcctcttgtcactcccccagctttctggctatattccttgtccacgtcatcgactgccaaggtttgaccctcaaactggactactgactgggacaaatgatgggacacttgttaacttctttctaagaaatttaggccgaaagtccgaaaaggcactttgtatttatcttcttgctttccaggctatagcgtgctgtttatgtttcttgctacggtatttccttgctggttggtacaaatgaaagcacgaagtggataaaagaaaagatatggatgagaaccacg

SEQ ID NO: 32119 - DNA, 291 bp, Glycine max
gccaactctagtcacaaccaactgcttggtaattatgaacttagcatagctaattggggttggagctggaaggaatgctggattgctgctcgtccatgggaaagccgtatccctagcttatccgtcaccccggagaaagctcaacataagcagccaagcccaagcaaagttcagaaggataagaacacatcaacaccaaaaactcccgtctcatttaaacctccttcagccaatgcaaaagggactcctccctcggccaacgcaaaaggcacttcaaaagctaggagattg

SEQ ID NO: 32120 - DNA, 295 bp, Glycine max
cgccattgccttcttattgggtggaaagggacaccaattaactctgtttctgtctggaaattcctttgatggaaagtgcaacaaggttttaaaaatcagtccataaccacgattttggtcgtagcgttaaggatctttggctctatgtggccataacctacaatgttatgaatcgagacaaaaccgtgactggaatttaaaatcttaaagttttctttcatgttgttcctaatcaatgtgtgtatcatctcatgtgcagttctcattactagtcaccaaccacagttgttggtta

SEQ ID NO: 32121 - DNA, 351 bp, Glycine max
ccaaacattagttcaccactaaaccaacaagcagcacagctttggagcaatcaagaagaatacaggaagatggtggagaggttgtacaaatctgcaaattgatatcagtcttgcaggagagaagaagggtccattcctgtctgcttcggagaagagaaagggatgaagccattatttgtttttagggtgcccttttctgatgggcctgcttttatatattacaatttacgaattgttgcatgtttctctcttctttacaattgatagttaaaaaaaagatttcgtttttcctacattttgtgttctttgtgtgatcatgtttacgaattaaatctaagttttaacaatcat

SEQ ID NO: 32122 - DNA, 278 bp, Glycine max
caaattctataaattaagagagttatggtggattgacaactataataaggatgaatccaacaaggatgctttattctccttcttaaaattatgccctaccttggagcaactttttgtgactaatgatcctgaaagttatttggctggagggtccaattcatacgtagtgaaagggactaaatgcacaggaatggaacatcttaaactgctaaagtttatggggttttcaagtcgaagagatgaaatctccctggctaaatgtttgattcatctgatca

SEQ ID NO: 32123 - DNA, 608 bp, Glycine max
gaatatgcaagaagatgcagaatcaagaaacttcatacacaagtgggttgccaatggaaaacttgccaaacaaaggacaaaagctgccacagctcatcttagctttgatcagcaatgcaaattctgtgagaaggaatctattaaccaatcattattgaacttgctcagctatccttggatacaagatagagtgagaaaagagttgctttctctacatggaggatattataatttctctaattgctcttttgagaaatggacccttgattttaaacaatgcaatgttgaagaaggaagcagttatgttgtcaaagaacaagaattctggtgctgactgttgctataccaggaagcttgaaacaacattcatgacaatgaagtcaaattcaatttgagtatacattatacaactatataaatcttatgttgatgttagtctctgcctgaaaatgaatcaaagaaattaaatgattgattctgaatgcaactttgtcatgatttaaggaagctacggtataaattattgttttaggaagcaacacaaatcagaagaaaaattcccctctatatatactatgcattaaagggcttggcatttctctttcttt

SEQ ID NO: 32124 - DNA, 215 bp, Glycine max
aataatttcttacattctctgatccccttgatctatagtgtctgcatacttaaattgtagtcctttcattgttggtaacttcattgtagggtcaatttccttaatatttttggtactttgtgataggaggaatttcacacatttggtgcttcaaaagaaccttgtccatttatattacataagggcataaggcagctgcaagttttagtttatag

SEQ ID NO: 32125 - DNA, 509 bp, Glycine max
gcagtgcaaaaggaaagagaagtgagagagacggaaaggggcacagcagggaggtacaatcccgaactggaactactaaagttggtaggccagcatcatccagtgctaagggagatagaaaatctaaaacaaagcctaagcagaaagcaactcagaattctgtttctgtgaatggcctcctcgggaagctatcagagcaaccaaaaccagcattgccttctgttccaaagtctaatgaaatgcctacaaatagcaatgcaaaggaaaaggatgagtttggcttgggtggattggatgaccacgagcctattgacttgtccaacctgcagctacctggaatggatgtacttggtgttggtgatgaccaaggtcaggatcttggttcgtggttgaatattgatgatgatggattacaagatcatgatgactttatgggcggccttgaaatcccaatggatgatctatcggacttgaatatgatggtttgaagctgctttttttgtatagtc

SEQ ID NO: 32126 - DNA, 315 bp, Glycine max
cgagaattagagatggaaaagagcagagtgcttattgttgggggaactggctacataggaaaaaggttggtgaaggcaagtttagctcaaggacatgaaacatttgttcttcacaggccagagattggtgttgatattgagaaagttcagcttctattgtcattcaaggagcaaggagctaggcttgtttcaggttcatttaacgaccataagagcctagtgaatgctgtgaaacttgttgatgttgtcatttgtgccatttctggtgttcacatccgcagccaccaaattctactccaacttaaacttgttgat

SEQ ID NO: 32127 - DNA, 365 bp, Glycine max
cgttttccacccggtaaagtaactggtcagaagtctgatattctgattcagatgcctaatggaccgctaccaagatctgatgctgctcaggctgtaaagaagatgaagattgagaaacttgatgatgatgaagatggtgaaaaggaagaatgagtgcagagtgataacttttggtgatcaagagtcgttcaagttgatgtttttgctctttttgaacaaccttttctgaatggggctgattaaagaatggtgaacacctgagtgtaatagatgcagtttattttaatttttaattttgtttttgtaaataagtttgttagaaactgaggtgtatatctttgcaaagttacaaattttgagtgcta

SEQ ID NO: 32128 - DNA, 140 bp, Glycine max
ctggtatttgcatggtctatgtgtatagtgaaagtcgaaacatttgttgctgtttgctagcaataattacatctcaattcaataacctaccaaaattttggagttcccctgcaaaacataaaaaaaaaggaaaacaaaaa

SEQ ID NO: 32129 - DNA, 429 bp, Glycine max
aaaatgggcttggacattctactcttggatctttcaatttcatggacagggaaaaattggatacacaagcaccattacggcttagaccgttagctttacatgtcataacaggcatcggtaatcacagtcgaggactggcggctcttcctgcagctgtcagaagtttcctcaatgaaaacaggtaccgttttgaggagatgagaccaggagtaattacagtgtggcccaagtttcgtcaaaactgatttttgagtccccgttagaaacttgttcttgtattgtaccatttcatagggatcatatactttatgagtatttagcagtggtgagatttaattccacatatattggtctccctgttgatgtaaaataaaacatttgccttggcattgaaaattaattcagatggaattatttatttcagacatc

SEQ ID NO: 32130 - DNA, 281 bp, Glycine max
gacagttgatagagatgttggtcaagaccgacaactcatgttagtgaattaatttactcactatactaactcccaactccaacttcagcgacattctcccggcgtttcgatcgatcttgatcccaattcccatctacacacatatcacaatgctaagtcgtaaacgactcatcgtttcgctctctctcgccactctccttctcttctcctccctttccctcactctctgcgataaaatcccccctcaaaacgacaacaacaacgatgacgacgaagatctc

SEQ ID NO: 32131 - DNA, 255 bp, Glycine max
cgattggactctgttgaggcctcgcggacaatggactatgaaattgacttttccttctcagaaactaatagaagatcctccatggatgattcccacgccaaggtgaatgacaaccttcctgttagtcctgtgaaaaccaatgtgagaaaaagccaagtttctggaacaagaagttctggaaaagatgaaaagtcaaaagtgttgcgtgattactctgggaagagcaagcctgaaatcatgtcgagggcagaaagc

SEQ ID NO: 32132 - DNA, 301 bp, Glycine max
aaaaccagaagaaaaagaagaagcgccaatggccaagggtcgcaaattccccaccacgacccgaaccgaccgcttcttgggaatgggaacctactcctcccaagcctccgccgccacagacctgtcggagttccgggaagaggacgtgtggtccacgtcggaagaccgtgacagagatgtgaatgcctaccccggcgagtgggaggcactcgcgccgccgcgtcgtcggagcagcagggagctgcaggggcaccgccacgtggggggtttgtcccttgcgttcgaggatgggtccggtggt

SEQ ID NO: 32133 - DNA, 288 bp, Glycine max
cacgagagaacgtggaacaataatacaccagacacagtacttgatttctagggtttgaagcacttccccaagtcgtggctggaaaacaagggaagacaaatgagcgaaagcacagagacccagaagcgccaagctgctgattcagagagcaaggagaatgctgttgcttccacgacaccagaggtcgaatcttctggaacgggtaccgatggtaatgccgtaaagaaaccatctgtcctcattgaagctgatgcagctgaagataagggcgccaggcacaccatggag

SEQ ID NO: 32134 - DNA, 293 bp, Glycine max
ataagggagtgggagcagatatcatgcgtgaagaagcagtgggcatctcttttccgctgcgattgcgaatgcttctggcaagctgcactttccctccccctccaacatggcctgttcctttacccaacaactccaagaggagattcattgctttatatattagtcaacacatctttgcctccgatcctccacacgagatccttggccacacctatctcttcttgaaagatcagcttcaaccttctattatgcctcctcatagtggaatacttcacggaaccatcattgatcag

SEQ ID NO: 32135 - DNA, 332 bp, Glycine max
acaccctccaccggtccatcctaaacataatagcgtagaacataaaagcatcacaaaaatggaagctagcaattcatagctgttctgtttttgtgaactcccaccatcaaaaaaaaatattagcgtctcattaatattattattattatccactcgcgaccttcgtttttctcttttgccttctcggagttaattcaggaggttgcagcgacagcgatggcgcaaggcatggcgagtaaccgaaaccggaacccttgcgcgcaagaagcgcgcaaggtgatggtggtggcggacccgacgcgggaatcggcgggcgcgttgcagtacgcgct

SEQ ID NO: 32136 - DNA, 284 bp, Glycine max
ccacagcatctcgtatctgtctgctacgtacgttggtggaacgaaaagatgatgaaggtgtggaactggtaccaaaattgcctttctgttcatccagtaaagacccaagccatcagttctgccattctctggggcgttggatatctttcagctcagtacatcactcattcagctgcaaaaaaaccccttcaactatctgattcagatgctaaatttacgataaactggaatcgcttggttgttacaagtatgtttggattcggtttcgttggaccagtgggcca

SEQ ID NO: 32137 - DNA, 277 bp, Glycine max
gcgaaaggccatattcaaagccctggaagatctctgaagggtaatgcacataaaggcaaccttgccatcactaattacaaagactaccagaccatggcattggtaaacttgttagaagaagctgaagtgatcactttttccacgtttgagtcattgctgaatttcttttctgggtcaacacaagcataacgaattagcagctgggctttggtttcaaagctgatgcacaacaaaagggtaggctacgcacaaggagcagatgagaatgagtttgcaa

SEQ ID NO: 32138 - DNA, 461 bp, Glycine max
acttgatgtccgtccctcaaatgaacacaaaaaggcatgggtgagagcttcaacctggattccaatatttgatgttgataataagctagattttggaaccattcccagaaaagtcacaagctttgttatgggaggttggtggagtggcatgcctacactgtcttatgacagtcagtttttagccaaagttgaggagaagttccccaaagatgctgaattaattgttgtatgccacaagggactgacatcacttgctgcctgtgaactgctgtataatgctggctataaaaatctgttttgggttcaaggaggatatgaagctgctgaagaagaggatctcattgtagagggcccaatgcctctcaagtttgctggaattggtggcgtttcagaattccttggttggactgatcaacaaagagcagctgcagccaaggaaggttggggatatagattagtgt

SEQ ID NO: 32139 - DNA, 993 bp, Glycine max
tcgttcacgcgtccgcccacgcgtccgcccacgcgtccggtcgccaccgccaccgcctcctcatccatcacctccgccatcatcgacgccgccaccgaccgccacctgtcctactccctcctcctccgccaagtcaaatcccttacctcctcccttcaatccctcacacctctctccaaaggccacgtggcactcatcctcaccccttcctcccttcacgtccccgtactctacttctccctcctctccctcggcgtcaccatcgcccccgccaacccgctcagttccctatccgagttgactcacctggtcaaactcgcgaaacctgtcatcgcgttttccacctcgaacgccgcgaaaaacattccctcctccctcaaattcggcacaatcctcctcgattcccctctcttcctttccatgctcaacaacaacgaatacgtcaacgccgattcacgaactcgccgagtcgaagtgagtcagtctgactcggcggcgattctgttctcctcgggcaccacggggcgcgtgaagggcgtgctcctcacgcaccgcaacttcatcacgctgatcggagggttctatcacctcagaaacgtggcggatggtgaccctcacccggtgtcgctcttcacgctgccgctgttccacgtgttcgggttcttcatgctggtcagggccatcgccgtcggggagacgctcgtgttcatgcagaggttcgatttcgaagggatgctaaaggctgtggagaggtatggaatcacgtacatgccggtgtcgccgccgctcgtggtggcgctggcgaagtcggaactcgtgaagaagtatgatctcagctcgctacggtatttgggctgtggcggcgcgccgctcgggaaggaagtcgccgacgacttcagaggcaaattccctaacgtggaaattgggcaggtgaacgaactgctttattttttttttaactttttctgcgttttaactcatgcgtgggctggt

SEQ ID NO: 32140 - DNA, 188 bp, Glycine max
ctttactgaagaggtaggcagggaagagagagatggcaggagggaggtattgtgagaaggaagtgcttccattcaccgcaatggttgctgttgagtgcaccaacgttggtgtcaacggtctattcaaagcagcaactgagaagggtttaagttactatgccttcatcgcttattcatttgcagtctcc

SEQ ID NO: 32141 - DNA, 327 bp, Glycine max
tgtttttgttcaaggctggatccttgctggatgttgacagtcacattctttattctccacttccctgccgtgttcccttgcctgggcttgacagcttccggttttgcttttcacaatatgatgagaaagacagaaatctcctaagaaacttgtgctttcatcttggagctaaatatggggacaagttgactaagaaggttacccatttgttgtgtaaattcaccaatgggcccaagtatgaggctgcttgtaaatgggggattcaatcggttacatctgaatggatatttgaatgtgtcaagcagaatggagttgtggccattgatc

SEQ ID NO: 32142 - DNA, 272 bp, Glycine max
ctcttttggacaatggaacgtggagtacccttccttgactgtctcttgcaaaacactcttagaagcatttgctcatttcccacttcttcaacttcttccaagtgggtgtatgcagtcttctggaggatagtacctcgaaactttcctccgcctaggtgggaatttggaggaacagctcttgatcgctcaaagggaaacaaaagaaactggatccttgtatgggaagatggtttctgcgattttaatgaatgtgaacaagggaggaatggatg

SEQ ID NO: 32143 - DNA, 490 bp, Glycine max
gaaaaatccacttcattttcattttcacttccattttcggattttccatccgaaatcacaatctcttagttctgtctctctcttctttctctctcttccattctatctatccattcctgtccatcgccgacaaccgccaattccctccatttcaaagcaaacccctttctcttctcggctgttgctttgaacttgaaaggtgctgaactattttccattctcttttgcaaatttacatctgttctgcaaatactttcttcacggaccttgcatttgagaaatgttgctggagcttcttgatcctgattgcagaatacctttgattagtggatgtattacctggctttctggagttgaaatttgaatttccacctcagcaatattgcttgcatcacatagaaactttcaatatcaattgattttacttctcaaattggtttaagatgtcagaaattgacatggcagttattaaacctgagatgatgaagcc

SEQ ID NO: 32144 - DNA, 388 bp, Glycine max
ttttacatcaccatatcaaggcttatgtggtaaaggagacccggttgaacggttagagcgtaaagtatcagcactacagcgccagttacatgaggctgaagaagaactggagagactcaaaaggggcaactaggtttgatggcctccattcatgaataatatgtcattgtattcctttttggttcacattattttttagcttaaatttgataaagcatcttttttctttgttgggctgccaacacaagtcattccctatatgttttttatttaattattggcacagcgagctttcttatgtaaccccccaaaaatattgctgaggttagcctaatttgtttcacgaatattcttttcatattatgagttggataatttcttatcaaaa

SEQ ID NO: 32145 - DNA, 568 bp, Glycine max
tcctccaccatatgtttataagtcaccaccaccaccttctccatcaccacctacaccatatgtttacaaatcccctcctccaccatctccatcacctcctccgtcatatatttataagtcaccaccacctccttcaccttcaccaccttctccatatgtatataaatctccacctccaccttctccatcgcctcctccactatattactataagtcaccacctcctccatcaccctcaccttcttctccaccatatcatccttacctctataactcacccccacctccggtatattaagtttgcggctaaagcaatttgattttgtttctttttcaataaattatgttcaacattgttgcacttaatttgtaatcacttatgtattattaaaaagggtctacacttaagtgagagccttattttggctggagtgtagcccatgcgtgtgtattggttttaattgatcaaaagtgtgttttaatctctcttaccatatgaatatcaaaatttgttcttcattggtgttggattccaaaaaaaaaaaacaaaaaaaaaagggggggcccc

SEQ ID NO: 32146 - DNA, 294 bp, Glycine max
cggctcgacctcgagccgattcggactcgagggagtatcaaaaccaaagggccaaggagggtcgattctgtgagaaactcaagatcaagaacaggcctaagtttgtaggagtgagacaaagggcttcagggaaatgggcagcagagatcaaacacacatcaacgaagattaggctgtggcttggaacttaccaaactgctgaggaagctgctcgagcttatgatgaagctgcgtgcctcctccgaggttcaaacactcgcaccaatttctctactcataaatatggcattgctc

SEQ ID NO: 32147 - DNA, 599 bp, Glycine max
cagttacactcccgagcctcaattcagaaatcctcccacagcgactacaaatcgttaaccttatctcgactcgctcgcgactcagctcgagtcaaagctttacaaactcgcctagatctctgtctgaaacgcgtctcgaactcggacctccacccggccgagtcaaaggccgagttcgagtccaacgcgctgcaaggccctgttgtctcgggaacgagtcagggaagcggcgagtacttcctccgagtcggaatcgggaagccaccgagtcaagcctacgtggttctcgacacgggaagcgacgtgagctggatccaatgcgcgccgtgctccgaatgctaccaacaaatcgatccaatcttcgacccgattcgtcgaatcgtactctcgatccgctgcacgagccgcaatgaagtacctggacctttcgagtgccgcacgggcacgtgccttttcgagccttttacggggagactacacgcgcccgaagttccgactgaactgtgacgctggctcccggcgggtggaacgtgccatcggtgcggccccaccacgaaaagaatgtcgtcgcgccccgcgttgtcgggcctggcgggaag

SEQ ID NO: 32148 - DNA, 449 bp, Glycine max
tacctgagcttcgggttcctcaccctgctgaactttttctggacatggctcgccttcactttctggaggacccgagcccccacctccgagttgctgccaccacccgatgacccggttcgcgacgagtcggatcctgttgccgtgaccgggccaagtccaactgtggttgacgttgacggtgcgaggacggggaaatttaccttgtattacgaggatgagtctgagagggaatgcgagagccaccaggagacgacggcgctaacggagagagacggaagaggcctgaagtggtgggagagttgggaagagttgttgaaaataagacgaggagaagaccagaacggatggtacacgtgccaggatttaacggtgcttaacggcagctgtgttaggttatgggatggtggcttccgctttggtacctcaccacagaacccagggacactaca

SEQ ID NO: 32149 - DNA, 440 bp, Glycine max
gaaaaatgggtatgattgtggggtgtttatgatcaaatatgcagacttttatagcaggggtctggaattgtgttttaaccaggaaaacatgtcttactttcggcgtaggacggctaaggagatcttgagattgaaagctgaatgaggaaagacatgactgagcagcatcccaatatatagctgtggatttttggtacaagatatttcgaaaggtcgttattattttttggcagcacttggtgaaaggatacagctgaaaggattcttcacattttgcaatgtcttaacaataaccatcatacagttggagcatttgtcagcttggatactaaattgactatacatataatggttatgtttggatatagctggtgggttgtgtagaatgttgtaggttgtatattgctatacaagagtggattactagcgaggcatagttt

SEQ ID NO: 32150 - DNA, 383 bp, Glycine max
aggctgaaatattggtgaatgttgtgccaataaccaaagaggatgacagaattcacaactaccaagtgccttctgatgactgttttgctcacttggaagttcagttcagactctttgctttgtcccagaaagttgatgtgtgcttggaaggacttataggttggattttgagaaccctgcaaagcctggtgtggctatgcctgttgttggtggagaagacaagtacaggactaactcattgctctctcctcattgtggttcttgtgtgttctcacagggaagttcaactgagaaagagaccactccccaacaagtgatggaatatggcacccttgattgcaccaagttttcatatgggttgggaattgtttgcaggaaatgag

SEQ ID NO: 32151 - DNA, 716 bp, Glycine max
agtggatccccaacaacgtcaagtccagcgtctgtgacatccctcccacgggcctctccatgtcctccaccttcatggggaactccacctccattcaggagatgtttcgccgcgtctccgagcagttcactgtcatgttcaagagaaaagccttcttgcattggtacactgccgagggaatggatgagatggagtttaccgaggctgagagcaacatgaatgacttggtggcagagtatcaacagtatcaagacgccgccgccagcgaagaaggcgagaacgagatcgatgacgaggaagccatggctgcatgagagcctcattaaagcctctccggaagaaattattatataatctagattaccacgtcatcatggtcgactcaattttcactgttacattaatcaaaatttttaatatacaataacaaattttgattagatgcaatgtgaagattgatcaaaattattactatttaatgatttctagtgatgtcatgagaaatgcaaatcaaaacacttggtatatgccatatggtgatggtaagggaaaggaaaggaaaggatgtgtttgtatagttaatgctaggtacatatgagatgtggggtgagtagtattttttacggattttgttttgatatttttctttcttattggcttcgttgtgggttttgtttgttattgttaatgctattatttcatggcgtttgttttgt

SEQ ID NO: 32152 - DNA, 366 bp, Glycine max
acaaaaccataaaaacctttctttttgcactctgcattttctccattttccgctacctcaattgtctttaattgttcacgctttctcgtttcgcgagaaagggaaagttgaacgagcaatgaatgccagaccacgcaccactcttcactcaatgaaacctcctttaaatgaaaccaaagggaagatggaaactggaggagggaagagagcagtgggtggtggccacaagaacgggcgtcgatccaatcgagaaaggaaaatggctttgatccaagatgtagataagctgaagaggaaactcagacatgaagagaatgtccatagagctttagaaagagcattcactaggcctttgggatctctacc

SEQ ID NO: 32153 - DNA, 292 bp, Glycine max
aaatttcttattcaaataatctttgttgtctgaactcacattgaaggttgcgtactaagtctgagtctaatattaaacctgttgctcctgagactgctggctccactgcagcggttgccattttaagccaaacccacatcatagttgcaaactgtggagattcaagaactgtcttataccgtggaaaagaagccatgccattgtcttctgaccacaaaccaaatagagaggacgagtgggctaggatagaagctgcgggaggaagagtcatacattggaaaggatatcgagt

SEQ ID NO: 32154 - DNA, 307 bp, Glycine max
cttttcccacgtgctgccccatgaactctgatttccagggtttgttcttcccgcaccgaacccttttcgcttttctctatttctaatcatgggtatgcgctgaagtgtggaaacttctaatttttattttctcggatcggcatggaacccgaacatcatgattcttcgaacatgctttggtctcttcccgatgatgctttcgccatcgtttctcggctcatgtcgccgagagatgtgcgcaatctttgcctatgctgcacgagcttaaacgctcttgtggcatccgagaaactctggctcacgcaat

SEQ ID NO: 32155 - DNA, 433 bp, Glycine max
cttggaccaaggggggcagttccaaatttgagtggtaaccagcaaaccctcccttctcagggaaatcaggttgcgaggcctccagctactgttgccactcaaggaatggctcgccctgaaacccctggcatttccagttatggcaagatgggtggaactccagaagcaacttcctctccagtagcagttagaggaactagtcccccatcagcgcaggaggggcttgggtttggatcaaatgtgcgcacggccacctgcccaatatcctgcctcccccataaagtcatcagatcaattggttcaggattctaaaccagtggctgcttctgttaacggtgattcttccgatgcatttgttggaggagatttattctcagctagctcatttcagcccaagcaagcttcttctccacaaggattttcttctggcact

SEQ ID NO: 32156 - DNA, 273 bp, Glycine max
cgtaaaaccatattctcctgtgatcgtgtgatttctttctgagttcttagcacttacttttttcatacacatttgttgtcttgttgggaagccatggatgaggatttcgagttcccaagtgctggcaacatggaaatgccagaggaggaagagattgagagtccgattctgaaggttggggaggagaaggagattgggaaaatggggctgaagaagaagttgctaaaggaaggtgaaggttgggacatccctgactgtggagaccaagttgaa

SEQ ID NO: 32157 - DNA, 264 bp, Glycine max
cgaggcctctgagtctcagtctgacggagctaacctccgatgtcctatgcttcatcatcctcctgcttctcctggaacagatctcctacatactaaaaaaagcttccatcccaggaccctcctttgtacttcccttcataggcaacgctctcccattggtccgagacccaaccaatttctgggacctccaatcctcttttgctaaatccaccccctcgggcttctccgccaactacatcatcggcaacttcatcgtcttcatca

SEQ ID NO: 32158 - DNA, 459 bp, Glycine max
catttttggtgcttggtctgttggtaactgctctagcaactagccactaatcttcatgtgcaaaagttgccaaaggggcattaaattcatagaataaagacgaagggtgtcactggttagaaggataagagtggcttctgttaggtaccagcattcaagatttgtgacatagcttttgttggccaccctacatacaaggagtatgaccaaggcttgtccagtattgcgctttctagtttggtttttttccccttgtttttcttgttctctactcttatccacttattcaagttttgattattttagggtgagaaagaggtttctttttaagaaggttttaaaggacaatgaattgtacaaagagtagagcatacatttcccttgaaccacggacccttatttatcaatctatgatttgagattataaaaaaataatttaaagctattgtcaatagagag

SEQ ID NO: 32159 - DNA, 275 bp, Glycine max
gaagaaagggtgctagttcatgtgaggaaaattgggatatgcttgcatggacttggggaaaccatctaaatagaggctacacattttgcagatttgaagcaaccagccgaattcggatgatggagagcaaggcaaatgaggagatgaataatggcagtgagtggcatgtgcctatactggccatgacagctgatgtgatccttgctacgtacgacaagtgcgtgaaatgtggcatggatggatacgtcccaaagccatttgaggaagagaatctg

SEQ ID NO: 32160 - DNA, 284 bp, Glycine max
gaaagacagaaggagatgcatggcattggcctattgagagtgaaggaacatggtttcccacaataagccttacactcgtagccaccctcttctttctcgcattgttccttatctccatcttcttcttcttctccaccagaacaactcttcaccccgctccctccatccactcagatctctacatccacctccagccactttctccgcctccgcccctccaacctctttctccgcctcctcctccttttccgtccccacactcctcctccgccaccactgaaacc

SEQ ID NO: 32161 - DNA, 286 bp, Glycine max
caaattctcttaattattttctttttcttgatgaaagcaagctaaaaaaccaggcatcaccttcatggtagtaatcatcatcaaaagcaccacatgccaggtggaggagacagtccctatgatgaccctttcttgaattcttgttgctgctgctgccactgttttcttgctatctcatacattttcagtgctttccaaagatgcatcctttttttgccttgttaccctctcttcaagtgctttgggtggaatgaatctgctcctagatatcaacatcatcacatcc

SEQ ID NO: 32162 - DNA, 360 bp, Glycine max
aaaagctgcaattttacagcttgataagatcattggattcaagctctctcctgattgcttagaagtgcgggcgaggatgttgattgctcttaaggattatggcagtgccataaaagatatcagggcattgttaactttggaaccaaattatataacttcaaatgaaaagatctcagggaaatacttggttcatctccttagccatgtggtacagcaaaagagtcaggctgaatgctggatgcaattatacgaacaatggtcttctgtagatgatgttggttctttggctattatacatcagatgctggagaatgagcctggaaagagcctgctggagtttcgtcagtctctactcctttt

SEQ ID NO: 32163 - DNA, 270 bp, Glycine max
tttgttttcatttactaatgatgctttggtacaaggctgttatatcgtgggtgtttgagcagtgttgacatctaaagcttctattggatagtttaacccttatttttttttgttgcttttcgcctgttgttggtcaacatgaaaggggtgagtctgttcatccaatttatgtcgagaaatttgttttaacttcttgccacattcgttgagtgcgtcattgttatattaacaagatcgcatttctaaaaaaaaaaaaaagggggggccgcc

SEQ ID NO: 32164 - DNA, 238 bp, Glycine max
attgccttctacaatcttccgtttcataccatataatggagattggacatctaatcgttttagctttattatgtgtacctctcaagggagctgatgcgtcgcaatccgcgaaagattattggcactccgtttttccaaacactcgtctgcccaagcctctctgggatctagtgttgccttcccctaaaacaaatatgcctattaaagtcgaagaagagaagcagtattggactctctt

SEQ ID NO: 32165 - DNA, 462 bp, Glycine max
cttcttctttcacaattacacccaaacccaatcctcttcctcttcccacaaatcgtgacacctttctctctttcccttctctattccgcgcgattcgcaaacccccagattgagacccgcccgcgcgcaaattgaagaagagaaggccaaaagatttgatctttcaatcgaggggtttctggggtgtccgaggatgaggctcaacggtgaaatctcaagtggcagaagaagaggagaaacaaaccgggaacgacgacgtttttcgtcgcacgaaagtgggtcgttggcctaccgctttaaccgtccacagaaagaaaaaggagccttttctgccagccaagttttcacctgggcctccgcacgcgaaccaagggggattaaacttttgtttgctattggatcttaaaccaacgccactggcttagaaccaagggtcccttttgattattaatcttggcatta

SEQ ID NO: 32166 - DNA, 469 bp, Glycine max
agcattttcaattgggctcggatcagttccatgggtgataatgtctgagatatttcccatacatttgaaggggactgctggaagcttggtggttttggtggcttggctaggagcttgggtagtttcatatactttcaactttcttatgagctggagttctcctggtacattgtttttgtatgctggatgttccctcttaactattctatttgtagcaaaattagtcccagaaaccaaaggaacaactttggaagagatccaggcttgtattagttcatagagataaaagatcaaaaacgcactgcaggacccagtcaaaccatttaccacccttttttcaaattctttttacatcccatttaggaccgtcaaggcataaaataacataatgttgccatatcgatccatttttgttgttgtataataataataataataataataatgtatcattagcttatttgataag

SEQ ID NO: 32167 - DNA, 500 bp, Glycine max
gcacgctctctctctcttcacactactactcttcttcttgggggttacaatttctcttcaattttacttctttagccgtctcatgacttcatcagttagacgcggactccactcttctttctgtgtgtactgcaacaacagataatcaggtagaaccaccttcaagtttggatttttatcctttctcatattggacatacaaggacggctctaattactgttccagctagtgttttgtgatggccatggatgcaaaaggcataacttgggttggaaacatattccagaagtgtgaggacatttatgtggacgtggaagacacaatgttggaggaaaccgctaagtacatagggaatcagatgcagactgttggggaaagtgttaaaaagatctattcagatgtcatgcaagatttacttcctccgcctttatatgatttggatgaaacatcagcctctgagttgccaatagatcaatatattgacgctggattctctaat

SEQ ID NO: 32168 - DNA, 258 bp, Glycine max
actcgagccgaatcggctcgagcttctcagccaggtcgttgagatgcacctaaaccccttattgctgagttcgaattcgctgcttgttcatagtttctttctttgattagttatcttcaaatacaaaagacggattgagggaagtcctcgttgtatttattctcctctagatcacagattaaatcaatggagttggacttaacaccgaagacggcagaagcattgtttgagggagatggtggaggtactacacttggt

SEQ ID NO: 32169 - DNA, 257 bp, Glycine max
cggacaacctggaattcctacaatggctgaaacgctactgtgattctgtaaatggtggcattatgaatgagaactacaatcctgtagagcgtaggattaagggtggaaaggaccggaatgttaagagtctaaagagctcagaatcactgcaaacaaatactatgaatcattctggttcaggcgactcactcaggtccaagcaattgaggtcaagtggaggagctgacggggttaattcttcagcagagatacaagct

SEQ ID NO: 32170 - DNA, 399 bp, Glycine max
ggactcccaaagttacaagaatggaggaaagatctgtgtgtatcagctggcattcctaaacattatacccatgaaattgaaggctttgattattgtgataaatacgcagaaaatgtaggactcccaaagttacaagaatggaggaaagatctgtgtgtatcagctgtagtgaacttatttatcaacttggagacatatcgtgattcgtggaatgatgatattgatgagaagcttcaagaagcccttcgaagtccttacttcactcaactaggagttgaacctgaagatccttctctgtaaaactcaaattaattagcgattacttgtatttctatgttgagaacttcaatctttgtggctcaataatctcaaccttggttcctccaaatttgtggactc

SEQ ID NO: 32171 - DNA, 323 bp, Glycine max
aacacggtcccttctgtcttatggaccgataagacctgcctccccttatgttggaagtttgcaaccagctcgtggtgcttatgttgggggttttggctaccagcaacaaccagtttcctacagctatcaacaaggattggtttaccctccttacgggtatacgacatacggacctgagtacatctacccacagagtctgtacaacccatatatggggcaacagtaccttcagatatatggagtgcctggggcagtgaatacaactgtttatccttatggacaagtgggtcaggctattcctagtggtcatggttattcagcta

SEQ ID NO: 32172 - DNA, 273 bp, Glycine max
gatgtctgcaccgcaagtgattccaagaaaccatcttcctttaaggttcccattttatcagggaagacatataaaacaagtagtcaggctgtacagcatccaagctgccaggtgcaagactgtggccttgacctctcatctgctaaggatccccatcgcgaacaccgagtttgtgaagctcattccagatcccctaaggtggttatagctggtttggaacgccgattttgccagcaatgtagcaggttccatgctctgtcagagtttgatgac

SEQ ID NO: 32173 - DNA, 279 bp, Glycine max
tggaatagcaatatcaacactgtgttgggctaccatgttttctctgcttatctatctctcattcataactagtccccttctagtgctcaagctctatggaattccatattggatatttgttatgtggctggactttgtcacatacttgcatcaccatggtcaccaccagaaactgccttggtaccgcggcaaggaatggagttatttaagaggtggcctcaccactgtggatcgtgactatggttggatcaataacattcaccatgacattggcaccca

SEQ ID NO: 32174 - DNA, 302 bp, Glycine max
tgccaaaagcaagagaaaaattcacacatacacacacaaagaaaattagagagagagagagtcgataagatgggtgtgaacgaagatttcaacaaggatattgatgatcatcatcatgagtatgtggatgatgatgatgttcctacttccggggtttcgtttccaccctacagatgaagtcacttgttagtttctatcttcgaaggaagcttcacaagaaacccatcagcatcgagctcatcaaacagattgatatttacaaatacgatccttgggatcttccaaaaaccagtgccactgca

SEQ ID NO: 32175 - DNA, 433 bp, Glycine max
  unsure (1)..(433): unsure at all n locations
ccataattctcttctagttttctccactgggagatcgcctactatatatggagagttaagacaacagaaacctttgttgactcctgatataacaataatgtctgtgggaactgagattacatatggtgaatccatggtacctgatgatggttggaaacagtatctagatcataagtggaatagggacatagttatggaggaaacagccaagtttcctgaactaactttgcagtcagacacagaacaacggcctcacaaggttagcttttatttggaaaaagggaaagccccgaatgtcacgcaaactctctcaaaacgtttggaaaaccgtgggttagatgtgaaaataatttatagcaatggtatagctttagatgtattaccccaagctgctggaaaaggacaggccctagctnttctacttgaaaaattg

SEQ ID NO: 32176 - DNA, 301 bp, Glycine max
ctactttgaagcatttctttgtactccttcacaaaaccattataaatggctttccttcgatctaccttggcgacctcaatggttcttttagcaatgctagccattgcctccgcaactgactattatggatatggtccaacaccaaagcttgagaaccccaaacccaaaacagatcacaaagttgacaaaccacaccccagaataccagattactatgcagtgcccaaaccaaaaggaaacgatgaactacatctgcttcgcacaatcattggtgtccaggtgttgtttatgtaatcgggtt

SEQ ID NO: 32177 - DNA, 314 bp, Glycine max
gcaattgggaatgatggaagaaggtaacaagagggatcaaaatatttcttccatatgaatgatagagtggaataaatttaaaattgcatttattgttgtagtgtctattgttcctttgcctaaattgtgatcttgaaatgttgttatcgcattacttggccagagactacattggtgactgttgcaaacttgtgacggcacttcaaaggcaggttgtaatatgtatatttggactaagcacattgttaattttgttatagtcaatgaccaacattgttgtctatatggtgttattaagcacggataattattgg

SEQ ID NO: 32178 - DNA, 285 bp, Glycine max
ttaccttcttccaagaaacacaacaaagcttaaaagaaaaaaagaaaggtagagagaaagatgatcaggttgagatcaaagaggttttcaagaagcagctccaagcctggaaacaatgggagcaaagcagcatcatcatccccagaaaaggattgcaaaagtattggtgaaatcaagtgggaacttaggcctggtggcatgcttgttcagaaaagggagagtaatcaaagttctggggaaggggtgatcactattagagtgtcaactgtgtcacagtggcatgac

SEQ ID NO: 32179 - DNA, 483 bp, Glycine max
atttctcactagtgaatttgaggatcagcagtagtgatgaattccacagaagaagagtgtcgtggctgcgagattatggagaaagatgctcatgtcaggtttctcgagttaatgtaccatatgctcccatctccgtacgagtcccaagagatcaaccatctcaccctcgcttactttgcatctctggacttgacattctaactcactccacaaagtcgcgaaggatgctgtatcagttgggttttgtctttccaagctcaccctggtgccaaggctgatctcaatgatggacaattctatggctttatggtccaaaacttgcagtttcctccagatgagaatggggtttgattcacaacaacagtcacttggcaagtacttattgcgccatttccatattgaaaattgttggttatgaattgtccaatcttgattctgaaacaattgtgacttctatgaggaaccttcaacagcctgatggaa

SEQ ID NO: 32180 - DNA, 463 bp, Glycine max
atttggtagagtgcattcccagaatagaaactcagcaactggtgcttctttggcaagtcaatcagaggatagtcagaaatcattgagggatgacgtatattccaaggaagtgggtagtgtctctaagattttaaggggaattcctgggaatgataaatgtgctgagtgcagtgctcctgatccagactgggcatctctaaaccttggcatattgctgtgtattgaatgctctggagtgcaccgaaatcttggtgttcatgtctcaaaggtgagatctataacgttagatgttagggtttgggaaaataccgttctggagttatttgataacttagggtaggtgaaccaaatgtgccaatgaaaccttgctctgcagatgccttccaacacaaggagaagtacatccaagcaaagtatgtagagaaatcactgatcatccgagaagaggatatacccgagaatc

SEQ ID NO: 32181 - DNA, 539 bp, Glycine max
gcactttttattagtttttccgaaaccgtgtctgtctgctttcaactttcttcttacatgtaacaagtaacatattcttttctctcgtttttgttattggaatcccgtgcaggatcctttacccttttgattgcttctcatctcacttctgagtttcactttggtgtctttagcaaagcttccacgaaacacgtaactaactggcttcagtttaattaagctttttttttctagtgtgtgaaatggcgagtacacgcttcatggctttccaagaacatgtttttgtttccttttttgtgtcaaccttctttgctgtctgtcagtgttttgatctgtcatcctatgtttcttcaaagtgtgatttgtgtatgaatgtggctgcttagctggatatatcttcttcatttttttctttctttttttgtatttttttttttaaattttgtgtatccttttttggttctaagaaaaaagcattgtgcgatgaatgaaaagacgagggaaaaaaaatggttctttgcatttggttacaccatgtg

SEQ ID NO: 32182 - DNA, 361 bp, Glycine max
ccctctcgtccgatttaatccacattcatgtgacaacattatcactcatccacggcaacctaccacccccagcgataaaatggcttctttttcagtggaagaattcataggacttggcattttgatggaactgctccaaaagttgttggaagaagggtgggatgatgtaccaaccctgaagatgatgagttcagaggacatggatttactacagatgacacaagagcaaaaggatgcacttggaatcagatcatacctgcatgatcgtggactaatgcaatatgcagataagatggaagattgtgggaaagctctgtcagagcttatcaatttaagcaccacagatctttctacgcaattc

SEQ ID NO: 32183 - DNA, 438 bp, Glycine max
gcagttttcttagtccaaagtctatcattcttatcccccaagtagaaaaagatgagttttgaagattcctcgaagaaacatcagtcagttggaccatggggaggcaatggagggtcccgttgggatgatgggatatactcaggagtaaggcaattggtgatagttcatggaacaggcattgactccatccaaattgaatatgataagaaaggaagctctatttggtcagagaagcacggtggaagcggaggccgtaaaaccgacaaggtgaagcttgattgtccaaatgagttcctaactaaaattcatggatactatggcagctctaatcaaagagggccaaactttgttcggtcactgagttttgagagtaacaagaaaacttatggaccatttggtgttgaactagggacatatttttcagtcccattgactggt

SEQ ID NO: 32184 - DNA, 444 bp, Glycine max
actcgagccgtatcggctcgagggattatggagggaggtaagagcaaagggtacgcgtgggcactatctgctggattcaacgccgctcttgcagccatttccgttaagctccctcttcaccagtttgttaggtatgggatggtgttattgttcaatgtgaccatgtgggcttgttatgtgaacagcctcaaagcgctctcctctcttcaggcaactgtcaccaatttcgccaccaatttcatctcttccggtttagccggtttcttcttctttcacgaatcactctctttccagtggtttgcaggtgccatacttataataattggtgtagtaatacttagcaactcaagtattgagaagacggttagcactgattaggtgttacagttcaacacgatacctttacggcttgcttgttcaagaaggcggcaagcatcgcagctg

SEQ ID NO: 32185 - DNA, 261 bp, Glycine max
attacaatgcccaattgggggggcatgtgtgtcgggttattttggattttccgtggcgcccttagccttaggcgtagcttctgggtcattcagcaatagccgcggtgaagatcggaaccctccactctacgctctgctctgcaatggcgaagatcgaagaactgaacgaatccatccccaaatcgaagaataagaggaatcacggctccaccacgttctttgtctttgtcgattaccttttcattttgttctcctcggatt

SEQ ID NO: 32186 - DNA, 393 bp, Glycine max
gattagtattatctctgttactcttttccttataacgaccaaactccttgtgggggcataaacaataagcagagcagattttctagaggggtttatctttggaactacttcttcagctcaccagcataccaaagagatctgcaattggagaaaagcatctgcttgtaagatttgcagtagacagaggaggattagttggaccagatggttccacacactatggtgcccctgatgtcacttttacggcctgcctccctaacatggtggtgatggttgcttctgatgacgcagaaatttttcacacggttgccacagcagctgccattagtgatcaaccgtgttgtttccgataccagaagggagatggagttggtgttgaaataccaccaggga

SEQ ID NO: 32187 - DNA, 439 bp, Glycine max
gacaccgcttgttggtttatgagtacatgaaccgtggttcccttgaccgaaacctctttgctggtgaaccggttttggaatggcaagagaggttcgatgtggcgcctggaacagcacgtggacttgcttaccttcgcggtggatgtgtacaaaagattatccattgtgacatcagaccagagaacattctcttgcaggatcagtttcaggctaagatatctgattttggactctccaaactcttgagtgccgaacagtctggtttgttcacaacaatgagaggcacacgtggctaccttgctccggagtggctcacaaactctgccataacagagaaaactgatgtgtatagctttggaatggtgcttcttgaacttgccagtggaaggaagaactgctattacaggtccagaagccatagcatggatgatagcaacag

SEQ ID NO: 32188 - DNA, 508 bp, Glycine max
tagggaatatggttgtctgtatactgaatgcagtgcaaaaaccagagtcaatgttacacagtgttttgatgagcttgtgatgaagattttggagacaccaagcctcttggctgagggctcatctggtgtgaaaaagaacatcttcaagcagaaacccccactgtctgatgcatcaagtagtggctgctgctcatggtaatttacatgtttaaggggatttcatcttccactccttggtatggtccggatttcaagtgcaattaaatttcattacatgtatcagaaatatttttattacaacctatatatctagattaaattattgctctcaagaattttcttaacgtttagagatctccattttatttgtggtgtgagcaagtaatcagctcgggatacgtagttcatactgcccttgcatatgaaaagcgtgtgtctatatttatgctttgatattttaacaagatcatgggtatgatttacataatggggaaacaaatttctctac

SEQ ID NO: 32189 - DNA, 470 bp, Glycine max
gtgatggcaaacttaaaacaccagcacaaagtgaaaccctgcatgtgatggaccaaatgaaagaattaggagtgctgattgcaaagggtggctattatggaaatgtattcagaattacaccacccctatgtttcaccaaagaagatgcagacttccttgtggatgcgatggactacacattttccagaatgtgaagcttaaaataagaactaagtgtaaataaatctctattttacataatcatgttaagtaaactgtattaggttgatgcttggtttcatgctggcgccacaaaagtcacattttttatgtagaaatctggaggctacaaagagttgtggtgagattgaatgtgaaaaaaataattgtatccctttcaccacaccgcaggaaccaaacacaccagtataccatctatttagattgtagcaagtcaagtttataaattttacatggaagcttagtcccat

SEQ ID NO: 32190 - DNA, 313 bp, Glycine max
ctctccctttcctcgcaaatggattcaccaagaacagctcctcccccatcgcaggagctggacttggacaacctcaaactcctcaaagtcctaggaaaaggcgccatgggaactgtcttcctcgtacacgacacaaccaacacccccttcgccctcaaagtggtggacaaaacgtgcgtccacgcgaagctcgacgcggaacggcgcgcgcgttgggaaatccaagtcctctcaacgctctcccaccctttcctcccttccctcatgggaacgttggagtccccacagttcctggcgtgggccctaccctact

SEQ ID NO: 32191 - DNA, 293 bp, Glycine max
cttcaagtaaaatgagagactgagagtagccagaatgggcttatggagacacgagatttcagaagaagcaaagaagcagctatggctatcagggccaatggtatttgtgagtgtgtttcaatacagtttacaaatgatatctctcatgtttgtaggccatttggacgagttgcttctagctgggtgtttctctggctacttcatttgtaaatgtcactggtttcagtgtgctgctaggtatgtcaagtgcacttgacacattttgtggtcaatcatatggagcacagcagtat

SEQ ID NO: 32192 - DNA, 332 bp, Glycine max
gtgcacacacactctcactcaacgctttctgggtttgcactcactcactcatctctttctctctctctcatcaatggaacccgcgaaaattgattggaagaggctagagtggagcttcgtggaagacaagctctacgagcacatcaacgcgcccaagtgggttgacttcttgtcccttgaccactccctcaatgatcatgctgacgaagcttggttctgcaagcctgattgcaaacatcccaagacagcagaggattttctgagatcaaaaactcctccttccaagaagggttttagcccgggttatgtttcagagctcttccaagtggtga

SEQ ID NO: 32193 - DNA, 512 bp, Glycine max
cgtgaatttactgaagtcagacatgttcggggtattctttccattggaagatatgatgatccacacagtgcatcatcttcaatttcaatactacttggagatgcccctcatcttgatggcaagtatgcaatatttggaaaagttactaaaggcgatgaaacgttgacaaagctcgagctactacctacccgctaacgcggggtatatttgtaatgccgatggaacgcatcactatcctgtcgtcatattactatgatacagagacagaaaattgcgaggaagacagatcaattttgaagcgcagactagccgcctcagctattgaagttgaaagacagcggatgaaatgcttcccctgataaaagcaaatttgatattaatttggaatgaacattacactgttgcattctcattttatataatgaacaagcagtgtatacagatattgcttttgtcatgtatgagaaattgttctaaatatgcacaaacatgaatttaaagagcttgtttgc

SEQ ID NO: 32194 - DNA, 352 bp, Glycine max
attcttttatggcagcagctctcctatatataccaggggaaaacttatttgagtcacttgagttcacaaacagataatgaagaagaaaagaaagattgccaaaatcttgttacatattttggtcttcaatattctgtaacgagatttttgccaaccttccgtgttactcgaaagagacacatctaatgaaacagtcgtgttttgtagtcaattactttggcacgttttgacaatttgcatcaacgtacgattggaattttttcagaaaaagatcacttcaacgtgtatatacttgtggactagcataaattgttgacaagaggtgtcaggagtgccagtctcttttgtgttg

SEQ ID NO: 32195 - DNA, 697 bp, Glycine max
ttgttctcttctcactctcactacacacaacaatcacaaccaacatcactataaacaacgtagagagtactgtgtgttcagaaactgccaaaaactcacgcagagaaagtacaagtagaaggagaagaagcacaatgaagctgctctctccaaaattgttcactctcgccattctgctcgcggcggcgctggttttagcttccgccgacgcagtcagtgacaatgagatgcagaaacatgaagccacggaatcaagggacgtggttgaagagaagttgcgagtgcagagcttgaagaattcgtcaatggcagaaaggtcagggggtgctttaaatgaacatgcagttgataatccagaggagattgcttccatggttgatgagagcatacgcaattacacagctcgaaggaacctgaacttcttctcatgcgggaccgggaacccaatcgacgactgctggcggtgcgacaagcggtggtacgcccgccgcaagcgcctagccaactgcggcatcggcttcggccgcaacgccatcggtggccgcgacgggcggtactacgtgtgtgtcggaccctaacgacgacgacccagtaaaccccaaacccggtaccctccgcacgccgtgatccaggaccgcccctctggatcgtgttcaagcgcgacatggtcataaccctaaagcaagaactcatcatg

SEQ ID NO: 32196 - DNA, 451 bp, Glycine max
ccctgttggtcaaccatcgaccaccctttccttggagattcttcccacaaacatgtcacgcgccgctgcttcattcggaattctcctctgtctgttccttgccgcccccgccgtcgtcaactgctccgatcaggcaaactgcagcaccacatgcattgcggagcagtgcgacactgttggaatcaaatatggcaagtattgcggggtggggtactggggttgtgctggcgagaaaccatgcgatgatcttgatgcttgctgcatggcccatgacgactgcgttgacaaattcggaatgactcatgtgaaatgtcataagaaattaaagaattgcctaaccagggaactgaaatctggtaaggttggattttcccaggagtgtccctacagcagagctgcacctacgatgataagaggcatggacttggccatcttgctcagccattgggtg

SEQ ID NO: 32197 - DNA, 474 bp, Glycine max
agagaataaagataaggagaatgaaactgaagggaattcaatggggaggaaaatcatgagcaagatagtaaagaaatgacagatgagagcaatcaaagagaagctgagaaagaagaacatggcaagattcaggaagagacttcatctgagaatcaggctcaggatggggggaaaattgaggaagagcatcgagaggaaaattatgcaggagataatgcctctagtgctgtagacaataaatcacaagacgacacctcggatgaaagttccaagacagaagaagaatctgacaaaaaggaaaagaatgagtttgagtctcagaaaaatggtactgaaactacagaagtggctgattctactgtcacaacaacaaacagccaaggaaatgaaaatcagacacagtcagagaatgattcacagaaaagtgttacatcggagtcaaaatggcagcagcaagagcagaataaccccaca

SEQ ID NO: 32198 - DNA, 354 bp, Glycine max
ctccatttcaatattacccttgcacagcccccattctctggccagcttttctgatcgagaaaaacaatgaagatcttcaattgggttcacaagaggtttcatcatcacaacgctctgaaagatgggtttgcttcaaacatgaaaaagactgaacctacaattaacaacgcggatagtcaagctttgctgaaacaagttgccctcactgaatcacttggtggatgggaagatggcattctaaccattggcactcttggctatgatcccttgaagaacatcaaccctcacaaagaatactttgatttggagattgaagttgaacaagaagatggtgaaggagagaacatcatggtc

SEQ ID NO: 32199 - DNA, 284 bp, Glycine max
attcctctgatagatgggtaccgcgctcggaaagccggcggacgcggtgcaccgtcgccggcatagcactgcgactaccagcggcggccataatcccgctaaggttcgggagaagcagaagcctctacacgccggcgacctctccggcgttataccggcaccagagcgccggagacctcgacttgactcattcactgcgagccaccaagggtggcctccgtggctaatggccgtcgccggcgacgccatccgagattggactcctcgtcgtgccaacacgttcg

SEQ ID NO: 32200 - DNA, 417 bp, Glycine max
cggctcgagcggctcgaggggcaactatgcttgaccccatggctgtcttcgctctgctctttgggagtgcattgtttgaggactacatagggcatctagctgtggcatcaatggcttcctctgagctagctgatggaactgaggatcctgataaactcaatgagaagctaaaggctgtccaaaaagaaagagaagaaaagctagcaaaaattttgagggattatcttggtcaatatgtccggggtgacaaaaaaggattcttccaacgtgcagaatcagaagcaagacggctttctcgtgctgcatttggagtagatatgttacataccatcggctacatatattcaagacaggcagcacaagaactaggtaaaaaagccatttatctaggagtgccatttctggctgaatgggtac

SEQ ID NO: 32201 - DNA, 254 bp, Glycine max
gttgtgatggatcagttctactggatgacacgcacaacttcactggcgagaaaacagccctacctaatctgaattcaataagaggtttggaagtggttgatgagattaaggcagcggttgacaaagcttgcaaccgtcctgctgtatcatgtgcagatatcttagctatagctgctcgtgattctgtggccatattagggggtccacacctatggtacggcgtgttactaggcagaagagacgcgagaacagca

SEQ ID NO: 32202 - DNA, 277 bp, Glycine max
ctttaatcaacacaaaaaaattatcatctgcagtttcagggaaatacaacaaattgggattttgttttcatttgtcatattgttctttggcgtgatctcctgtctcatacttctgttcacattggctttgccactttttaaacccttcctggttttatgatgctttagttgtgctacaatataaaggtgtgatgtttatagctttggggtcatattatgggagctctctactatgcagcaaccatggggaggaatgaatccgatgcaagttgttggt

SEQ ID NO: 32203 - DNA, 279 bp, Glycine max
caggatcctttcaatcttcatcagctttgcttgaacctggatacatattaaagcatgactcttcagcaatgcctaaaacttctattattgacactacagtgtcttcctggtcaaacaactatctgcagaaaaccaccaacgtattgcatgggcaaaaacaaaaagtgaataattgttgcagtagcagtgaaagtccaagagcacagttggttggtgaatctaatggtcgagggaataatagccatccattgagagttcttccggattttgctgaagtat

SEQ ID NO: 32204 - DNA, 586 bp, Glycine max
cccatcttccgcggacgcgtggggtccacaatcacctcccacctcataaaattatgtgactgcaaaaattgtcgaaaaacaaaacaacttcggaaaatccttaattttttgtaaatacttccaaacacacacatatatacatgttgctgttttgttggtgaagaaatcgaagatattcaaaggcacatcatagtttgtgtgtatatatatatatatagtcttcttcacaagaaatcatagtgaccaattttgccaccctaattgagctagctattcaatcgatgaaggacaccacggccggcgccgccgtggagaccgccgcaggctacggcatcaagccgtcgagctccgatggcagccaccttttggtgagaagggccatgcaattcaccatgttcgttgttgggtttgctgtgttgtggatgtttctctataacactgcctctccctttggattccatggcttctcgcattacttcattgatgagtcagcaaaagctggatatgatccgaagctacaaagtgttcttagaaacgcatctatgaaagataagacagtgataatcacaactctaaatgatgcatg

SEQ ID NO: 32205 - DNA, 257 bp, Glycine max
cgtccggctgtctcatcattgccggcttctcgccgtgcaagtgctgatttcactcgtccagtgttcaccgcggttgctttttatttatgtgctaagaaacacaagcttaaagtagataaacttaagttaattgagctccgtggtacatctgagtctgagttttctagtgtttctgctactatgaaggatttgtgccatgatgtttttggggttgcgaaggaaaagaaggatcctaaggaagtgcagtcaaatcgaga

SEQ ID NO: 32206 - DNA, 359 bp, Glycine max
attgaactcaaggtaaaatttattgcttgtacaatgctctcaatgtaagatgcagttgtcctagtaacaagtgatccattatacattcatggaactcagatatcaataggtttttttgcagctgatccctaaaagaaaaggtgtcaaccttcttggtctagcctggtttgacattactactttgtaattcgaaatttaagtagtgaaataagtgtgaatttgatattccattgcatcaaagttgatccatatccacaacagcaaatatttatagcttatgcatctgcaggaatgttttgtagcgtttcgtttttcttttttacctctccaaaagcacatccaagacgtccacttccaaa

SEQ ID NO: 32207 - DNA, 479 bp, Glycine max
aagatatcatgtgctgttgacaatagaatttttaacacttgttgagactatagacgtgtgatactgggttcaattgcttttccacttggatgctgctcaagatttgtggtggattagtttcttcgttttggttatggtaactttgatgtggaatattggatcgtggatcattgtggatattgaattgagttttgttaattactaaattttgcagatcccagtcaagatccagatctccaaattcatcacctcgacctcaccaaagtccaagtagctcatcataatcttgtttggggcgagggagatctgaacgcagctgacctgttgactctggagaccactactgggcatgtaatgtattttgtgtgctgcattttaatttgataactacacagtagcacgtttaagacccaatatagctctgtcgccacattagcatgtaatgtatttgaattttaaatttgataattgaagccatg

SEQ ID NO: 32208 - DNA, 251 bp, Glycine max
ggccgccctttttttttttttttttatgaaattaaatatacattttatatcacatgtaagaatcaatagtaacagaaagatactggggaagctccgaaaggcttctgacagctgacttgtcctttggtccataatactatcatgaatcacacctttcaacttctcagtgcaaattgtgagtagatatctgagaatacaaatagataaaatgtagaaggtaaaacagttttcaccctcaaaccaatagcctc

SEQ ID NO: 32209 - DNA, 487 bp, Glycine max
acgagcagtcacacaaaggaaaacatgaacctgatgttggtcatagtctgagtgacaacatatccttaagacataaagcaggagtgtcatctggatttattgcatctggtagcagcttggaaaatggatataatcagggatttcattctgcgacacagctacctgcttttattgataactcaccgtttcatgtgaattctagcattcacaagatcacaagaggggcatctgcgggaaaagtatctggtgtttttgaggccagtaatgcttttgatgctatgaaatttgcatccatttcgaggttccatcctcattctttacctgaatatcgtgaaagtttagctactggcagtccttacaacttttcaagtaccattaacacggcttccaatattggaactggatcgacggaatcatctgaaagcaggcacattcagggaatgagttcaactgggaacctagctgagtttaatgcaggaggaaacgg

SEQ ID NO: 32210 - DNA, 428 bp, Glycine max
atatttatataaccatcttcatactcattaccaccttgtgatcacaatattttatttatgttcactacactcttatcatcataactagaaaattaaacagaaaagcagaagcacttttttcatcatggaagcctattctggttcttattcctcatcatccaactctgcacacttgacccaaaacaaccgtgaggactcaaaagggtatcacatgaaccaacaaatttaccctcttcaaaatcacagttcttcgtggctccgttccgtgagacagacaccagcaaagccgtggaagaagcaccatgtggcaccgatgccaccaacaccagtgaaagtgtacaaagtggatgctataaactttcgtgaagttgttcagcaactcacaggtgcacccaagcacaagcctcagcagcttctccaaatcaaca

SEQ ID NO: 32211 - DNA, 413 bp, Glycine max
  unsure (1)..(413): unsure at all n locations
caccgagggcanccaacagagagcataagcattctcttctctgagcctcttcttagtttctcaaagttctcaaaccttttttttttttcccttttcaccaactcccagggaaaaaccactcagaccaatttaagattatggccagggtggcaagaagcccccgtggcatgatccaatggtggtaagaagccttcccaagggagattctctgcggcgtccacattcccaaagcgtggacaacgtgaaactctggaatacgttgtggggctttgcaaacctctgttgcttccattttctctcgcagcagagccaccagagggtgcgctacacctactcaccttgctcactaggttccaattctatgagaccaaagcaacgagtcacaaaagttttgatctttttttttgtttttg

SEQ ID NO: 32212 - DNA, 540 bp, Glycine max
accaggccaccaattgttatctaattttaactatcatcgccgcacataccaaccaatctacatggcagcttattcttccggttcttaccctgcgtcgaccaagcctctttctctgcttcacaccgtgcggaaggtacaagcaaaaccgtggaagaaggcggcagtggcgccaccggcaccgacaccgatcagagtgtacaaggtggacgctatcaacttccgtgaccttgttcagcagcttaccggtgcacccgagttcaagccagctgatcaggaacaacatcaacttttcccaagtgtccagtcgcacctattggctgccacctccttgtagatacgccccaaaagccaatgttgtcgagcaaagacaatattgcagcatcatcgacagtgtcctcggccactaattggtaccagggggcaaaatctgaaccattggaaatgaatttatcatcaccctcttcttataactgggtttttgtccctcctatcagccaatgaaacatgaccagcttggaaaccgggagggttctctaggta

SEQ ID NO: 32213 - DNA, 287 bp, Glycine max
gacaaatttaagatatctggctgaactcccacaaaatgttgatttggtgactttgagacctctcattcatctctattctcttggtgatgcccgccgtggtcaatgccatgaaggaaaatgcagcattagtgactttggttaaaccacaatttgaagctcgtagatctcaagtaggaaaaggaggaatagtgaaagatcctgctgttcatcaagaggtccttgagaagattataaagggagtagagaattttggtttctgttgtataggttggattgagtctcctctg

SEQ ID NO: 32214 - DNA, 443 bp, Glycine max
gattggaaaatagttgcaatttcattagatgatccgaaggcgccatttgtaaatgatgttgatgatgttgagacagcattttccaggaactctacctgcaattagggactggtttagagactacaagatccctgatggaaaacctgctaataaatttggacttggcatcaaggcagcaaataaggattatgcgcttaagggcatcgcagagacccatggagtcctggaataaacttatcaagagatcaattcctgcagaaaagttgtcacttgtgtagagatgtattggtgcgaatggctattgttcatgccattgcttgcactttgctacaattcgtatttatgaagtagcgaatttttctattgagcttcccagttatatctttgcacatcaatgtccatttggccaggcattagttcaataaatccatcttgcgtatgtg

SEQ ID NO: 32215 - DNA, 273 bp, Glycine max
ttctttagccggtcataaacacgagtccattcccagcaccgtaatccgccgtggggttgtacctcagcagcagctccgccggcacgccggcttcggccgcaacccgctgcaagctgtcaccgacccgatgcgggtacgtcatgaacagcccataatccttggacacgtgtcggtttccgcatgtacagtttacggtcacgttgatgttcacgttgtctggtatctgattcggcgggtaactgttgactctgcctacccaatcctccgtcgtga

SEQ ID NO: 32216 - DNA, 499 bp, Glycine max
ctgtaattagatgtgaaactttcatcatacttgtactcttcccacaggctataataaccagtgttctttctctctctgaactgcaccacactctcgcataatctaacgtatcaccttcttcccaatgtcaccgtgtctttgagacgcctcgctctgttccctcttccacgcgtctctctctctcctacccacttcatctcttcactcccttttctgacaatgagatcaaagtcttaacctttccctcttttcacttcctggggtggaccaaataataccatacaaaagaaaacaagaaaagaaaagagtttaaatcagttcgttgaacaggcggctgagatattgaaaactttctggtatttatttttgattcctacgtgagttattgtaaattttttaagtaactgtgtttgattcctgcggataaaaaacaagaaaaagatattttttttttgttgaaatggcaacttcgttgaaatggtgggggaaggagagtcac

SEQ ID NO: 32217 - DNA, 404 bp, Glycine max
  unsure (1)..(404): unsure at all n locations
tttgctgtatcatgaaaaatgaagcaaaattatagtgatgagaatatttcatgattattaaagttgaatgggtaggtttgcttttgaccccagatcccgtcaaaaaaatccccccctcataaaaatttcgttataattgtataaagaaatcaaaaggtaaaggaggaaagccagagtgagttatgctggtgcaaccgatgatgatctattgaagagtattaacgtcacagcgttggctattttggccatgttttcatggttgtgctttaaacaatttgagaattttgtatgtaatggtataaatttttacccccctcaaacttaaacaatgaattctaagatataatgatttttagnnnnnnnnnnnnnnnnnnnnnnnnnnnnnnnnnnnnnnnnnnnnnnnn

SEQ ID NO: 32218 - DNA, 403 bp, Glycine max
acgagtcagaactcaaaaatttcttccgcatacgacttctttgatatcagtataatacttgttgtgtggagcaacagaaaataatgggttttcgcatagcaggtattgttaggcggacttcgttttatacaacccaagcagcctccaagagggtggacgtaccaaaaggctatgctgcagtctatggtggagataagatgagacggttcacaattccagtatcatacttgaacgaaccttcatttcaagaattactcggtcaagcagaagaagaattcggatacgatcatccaatgggtggtctaacaataccaagcaaagaagaggaattcctaaacgttaccgctcacttgaatgagctgtaattcatgctaacggagactgagatagattagatgaggca

SEQ ID NO: 32219 - DNA, 269 bp, Glycine max
cgtcattttggattagctacatggacttctgcaccttcagttcctttcctttgcaaaactgtcaaaggaacatttggatatttggcccctgagtatttccaacatgggaaagtatcagacaagactgatgtatatgcttttggagtggttttgttggaactcattactggccggaccccgattggggcaacaggacctccgggagttgacaccttggccttatgggctaaaccttttctacaaaaagggaaaggagcaattgaagagtt

SEQ ID NO: 32220 - DNA, 574 bp, Glycine max
cagtattgtgaaatgttgaaagcagacgagtggcctgtttgtgcatttatttctcaagattgtcgtccagcaaatccatcggaagaagcgcacaatgttcaaacatcgtatgaagtgtgggagaagacattagagatgattggccttccctcagatgctgtggaaaggcttttagatggggaagaagttaaatgccgttatggacaagaacagtaatctaatatacaatatctcccttaatctgtaagggcacttccattatttatagctagtaatgagcattttcattctgaatatgtgggagaagaacccttttatatttttttaaacatgatatgtatatccattttgatcatatttatgtactcaaatgccacctgctcctcctaatgggagaatttagccagctttgaccttaaatgtcaccatagaagtaagaattaaattagtaagcactatttgttatagttgtttttgacttttgatacatgtcatatgtgacccacctaaataagtgaattccatcaatagtgttgctttcaattttggaatgttaccatgtatgttatcatgc

SEQ ID NO: 32221 - DNA, 352 bp, Glycine max
aaaattgatcatcacaataacatggcttcagattttaatctatccccttcggatgcacatcccgagactattgatttcctttcacttgcatggtgtaactttgctgtgcaagctctgcagcctgagccacaacatggatcagttgttctacttgataataactctatgaagcaattagagcctagtagccccaacgctcctccttcgatggaaatgagtgatagattggatggtgcagatttcgggtcattcccagcatggaagtctaataatgtaaagtcatggatatggatgcagcaagcgatgcaccctgaattgaattacaacagctgtttccggaagacatggatgc

SEQ ID NO: 32222 - DNA, 291 bp, Glycine max
cttgagaacactgtaaaccgtgatgatgaggccaatggcaatgttccacatgtcatcccagcttctaacctagctaattctgttttggataagtcagagattgttgatgacattagtgccaatttgggtcactcggtggtagctgtggactctgaagagcctgctattaagaccgagaaaaatgcacctgacctgcagagagagctgccagagtctgttctgcaagatttaaggatcatctccagaagcttcacctagaagccatttaactgtccctgaatcacaaggaac

SEQ ID NO: 32223 - DNA, 540 bp, Glycine max
tgtatattgatatatctaggtgtgggtggtacgtaattaattagccatggacaaggcacgaattggggttttccttcaggtggctcattctcctttcttctcagatggtggtacaaacagagggaaggcactgtgagtcaaagagccatcggtttaaagggatgtgcctcagtaagcacaactgcgcttcggtttgccatcttgaaggcttcacgggtggcaagtgtcgtggatttcgtagacgctgtttctgcaccaggcactgttagttggtccatgaaattttatccttgttggttgctctttcacctttctgtttctgggattaagaaataaatactccttagtgagtcgtgtttttaatttctaggttcatttgggttggctttatatcttatgctttgatctacctcgcttctgtttcaatttggttggccaatgttgcaattttaatttctagtgttgtatgtttctcttttgtggtgtacttgccataaaaaataacagtgaaaccacacctttttcaaaaaaaaaaaaaaa

SEQ ID NO: 32224 - DNA, 489 bp, Glycine max
  unsure (1)..(489): unsure at all n locations
ctggtttggtcccatatgatggccagattcatctcgaagaagaccaagacctagctactccgtcattccgaatcggctaagggcgtgatagtgggtggagatcgacggagtgaggctgttggaggatcacgtccaccgtcttatggtgaagaaggccacacccgattggcttcccttcctccccggttcctccttctgggtcccacctcctccttcccctctccttcacacattctccatcccctctcatcccttcttccttcaacaagacgacgaatctgggaatgctattgccaccccacgagggacagaggttactgtgcaactcaaggttatgtcacccactcaaaaccttgctctctctgaagatgaggaaggatgatcatcatgctaagtgtttgtgtgtgttgatatcatttcagaattgtctttggattcgacttanagcacatgccttgctgagctcaaactatgtataattntcagggt

SEQ ID NO: 32225 - DNA, 481 bp, Glycine max
cccaagtctagcagaagaatggaatgaagcaatgtcaagcatacttgaatggctggcaccacttgctcataacatgataagatggcagtctgagagaagttatgagcagcagagctttgtttcccggacaaatgtgctgctggtacagaccctttactttgcaaaccaagaaaagacagaagaagtaatcactgagcttcttgtgggactgaattatgtctggaaatatggtagggagctcaatgcaaaagctctggcagagtgtggcagttttagggtagacaatgaatatcctaatctgaatggataaataatctgtataggttgtggccatttcctacaggaatccagttccttgccagagatgaggacttgcagaaacaccaattatcagtcttgttaaatcgacaaatgtgcatcaaatgctagcataagtatgagagacgtacctatgtattcattattgtggaaatttagtatc

SEQ ID NO: 32226 - DNA, 587 bp, Glycine max
cctcgagccgaatcggctcgaggcggttccgcacgaagttcagccatcgcgcagaaggagaagataccacaagttcgcggagaaagcacggtgcaagattcagaagcgcgacgaggatttgattcacgaaatttgcaacgaagttggcgttgatagaagcgttctcaaggtttggatgcataacaacaaaaacacctttgccaaaaaggataacaataatattgttactagtaatgatattaatattactactaaaaataatatttctactgataatgatgcaaatgggagtgatgtcaaggtttttgaaaaccctaacaatgatggtggtgaagatcgcgctgaagatccgagtagtaatccctatgatggggtgaacgttgttggtgccaatggatcttctagttcttgatctaagggggaagcaaataataatgtattagataggttaatgatgaattatgatgatgcacgatgatgctacaaggttaattaatcagctgtttttaatttcctttcttttctatttttgtttttaattgtttagtttttatattgttaatgagagcatgatgatcaatcagttt

SEQ ID NO: 32227 - DNA, 263 bp, Glycine max
tttgaatatggctacactgacttggtcagtggtaacttctgttcaagggcgtgttcctgttgctagtgagggctcgagtttggttgtaagctcttgtgatggtgaatgacatacttgtatcatttggaggatacaatggacattagaataatgaggtctatgtccttagagcaagccacaaatcaaccttgcaatcaaaactaatagtgaaccccattccatacagtgtttctggtgcgcataatgccgcaaatgttacccga

SEQ ID NO: 32228 - DNA, 426 bp, Glycine max
cggctcgacctcgaccgaatcggctcgagtcatcctacaaggacttcagtgtggatggttgccagtggccagacccataccctgcctgtgtctcaaccacaaccaaaaattggtgggatcagtatgatgcttggcccctttctgatgatcagaaaaaggattatgcttgggttcagaggaaccttgttatctatgactactgccaggattctgcacgttatccaactaccccagaggagtgttcattgagtccatgggattaatatgtctaggggaaaaaaaaatccttattcttttaaatctctcttttctgccctatcattttttagttaccatgagaatgagaataatgtgcagttttgtatgtcgtaagctttttacaccttggcaattaattccatattgaaacatttatttaattcgttg

SEQ ID NO: 32229 - DNA, 290 bp, Glycine max
atttactgctttatggtgccaaatcaggaccagtacacaacttgccagaaaatccttcatggcagtgaaggaaagcaacacaagccaaaatattcagcagcagcagcagcaacaacaagaagcttgtgatccttgcaagtcttttggccaaaagtgcagccacattgtcaagaagcagcgtgcaaaattctacattcttcgccgctgcatcgccatgctcttgtgttggcatgagcgtggtgacacataataaggcctgccacacagtatcatccttttctctatcattg

SEQ ID NO: 32230 - DNA, 393 bp, Glycine max
ctctcactcgcagaaaattgacgcaattccacacaagcggataagctcggtgtctggtttgaaagtgaaataaaaaaaataaaaaagtccggcatgatgggcatgttcccttttgagcaaagtttgtgacttgaagagagaagaaaaaggatgagcgcagcggatgatgacgagccagaaaggagaagaagattgaaagcgtcgaatagtggtgggttgaagagctttcagcgcgatctgatcgctggggcggtgatgggtggtggggtgcacacgattgtggccccaatcgagagggcgaagctcttgttgcagacccaagagagcaatttggcgattgttgcgagtgcgcgtcccaaattcaaggctatgttggattgcatagcccgtacg

SEQ ID NO: 32231 - DNA, 468 bp, Glycine max
gattggtcgaggtcgaaatctcgaaggcgagacataaattgaaactgaagcagcatatcatatgattccacgatggaagtgtctgcatcagcatcaaggaggaggaacaacagcatatgcataaaaatctcgttgcttattctcgtaatctttcacttttcatccacaatcactgctatcaggaaagatgttggctttcaaatcattcatccctgcaaaaccaccgttcaaggaagatacctcctttcagatgataacggttatgtgtgtaatgccgcgtctgttaattcacgctctcgatgctgccctcaaagaggggagaaattctcttgccatggatgcaaccttctttcacaatgttgcaactcttatgaatattgtgtttcctgctgcctcaatcctgctttaataagtaaggaacaagtgctgaagatgaaggttgccaagcctactactgcgaggacttat

SEQ ID NO: 32232 - DNA, 279 bp, Glycine max
gccttcatgtctttgattaaagaccctgatgaaagacgtctagagcagtgggagacaactgttcaagcacaaagaggctggaattttgctaacttgcttggatttggtgacttaggtggacctccattgtctgccgctgaagaatattctgtgcactctagatatctttcaaaagcagaatccttaaatttgtctgaaattgcagagatgaaagttgtctatcgtggacgggtagacattgacggtcgtcctgtcatggttgttgtgggggctcatttt

SEQ ID NO: 32233 - DNA, 370 bp, Glycine max
tctcgagccgaatcggctcgagcggctcgagcggctcgagcggctactgatacttcccatccactggagtcatcacaacattactgtttggctgctatgtttcagccgccaattttggagttccatccacagagccgattacatggcattgcgcttaggcttcattactaatcatggtcttcccacaacatacgacttccacaactatatgcttcgaagcatggatgaggaatttcgtgacatagttggtgttagtgtgcttctctgggtatatgccatctgctgtatttttctaaattttcacggaagcaacttttacttctggctgtccttcgttccagcaattttgatccttatcattggtactaaa

SEQ ID NO: 32234 - DNA, 410 bp, Glycine max
gtttctgttcttctcaatttgtttgaatttgttttaacccagcaattttctctgctcaccaagccgttggtttctcagtgctcacgccaaagatcattctttcttcttctgagtacgtgcacagtgaatttgattgaagaatggcacaagatattgctactccaccagttccttttgattttgaactcttggttggtgatcaccttagaactgtcacagcctcatccaacagcagcaggacagacccatggattgaacctgaaaggttgaaactcagacacaggattggtcggtgaccctatggagatgtttggttagcaactcatcatcaatcaactgaagattatgatgagtatcatgaagttgctgccaagatgttaccttcaatcagagaggaacatatgaagact

SEQ ID NO: 32235 - DNA, 430 bp, Glycine max
ctcttctcaattctcataggccaatgtcaaatcctcaaacaaacaacaaccgccaccagcccagccgcctgcagcgccgcgccccctcctccctgcaaataaaccgcgccgtcgagtggaacgtcgccatccccctcctctccccggctcgcatcctctccgccgccgatggagctaaaaccgccgcaagagccgccgcagcgggaggcggagaaggtcaccgtgtcgttcaagaagtggcagcaccccgccgcacctttctgttacgagcccgctcccatggtgcctcccttcgttcccgtgtagatatacaaaccaaagaaaaagaagaagatgaaggaacagagagagttttaggatgctgctatctaatggttcatactactatttagatagaatgaagaagatctaacgctgtattttaataatt

SEQ ID NO: 32236 - DNA, 469 bp, Glycine max
gcgtggaggcgctatggtaaaaagaagctggaagagtctcttagggaagaggagaacaggctgcaagatgcattgtccaaagcaggtggtagttcaccaagtctaggtgccacaatatatgcttcaaggtttgcagctaatgcacttagacttttacgtagaaatggcacatggaaggccagggtgccagagagaatatcacccatgttgctgcacaagcctgctgagcctgattttacatctgaagatcaatagttgtggaaacaattggtggttctgtaataagaaaagaagggatgagagtgaaggaaaattcacatcaaatgaccttttttgatagaggcccaaaatggcatttcgtttatcttattctattttttaagttagtgtaaagatgtctgtaaaatatacactatcaagctgtatatataaatatatgattgttgctgaagtatttcattcgtaaaaa

SEQ ID NO: 32237 - DNA, 258 bp, Glycine max
gatccttcctcaaacacccatcttttccacccccgtgccacctctaacccttgaactcagttttcttttagctgagcccgcttctttctcattctcccacatggcacgtctcactcactttgtcttgctctttgtactcctctttctgtcccatgaactactcggtagtgagggaaggaatctgagacaaataaccattcaatcaccagatgctaccaaagcaatgagcattgcaacaaaaagtgctaatgccatccc

SEQ ID NO: 32238 - DNA, 264 bp, Glycine max
gattggggagcttcagtctcaattttatagccatcaaagtagtgaagtaattggggttccaggtctatcatgtacaggataaaatgccaaggagtttgtctagaggtgatgcggaaactacaaaaattgagatacaagactttttccttttcagatttgaaggatgaaggatgggttgagttttggctttggtcactgactcaggtggtagtttaggtatcctctgaaataaaacgaacaagaaatagtttttgcgaactactg

SEQ ID NO: 32239 - DNA, 274 bp, Glycine max
aaaaagagctgactttggcattcctccttctcaccgcttctgtcaggagtctgttatctgcacaaggagttcacttctactttctacttttccaaggggtgaccttcctccttgtggggcttgatttgattggagagcagatgagctagttttcattcaaaaaatcataacagatgatgaataggaaacaacacctactgatttatcagccaagttgcattccagcaacaaaatggaccatggagcctagttaaaacccttccttccctccaaa

SEQ ID NO: 32240 - DNA, 585 bp, Glycine max
atcatattatttggatacttagccccaggaatcttttccagctccgggaaacttttgcatgctacaataacctctatggaatacattggaacaggacataaaaaaatgtggtaatggtgatttggaatctctcttacatacggtgatatggtgtatagactgccccgagaaacattttgcaaaggttgtaagagattctatagttgggtttggaaccgatgaagattccctcaacagagctattgtaactcgagccgaaattgatctgttgaacgtcagatttgaatatgctaacgtgtacaagtccagtcttgatgatgatgttattggggatacctcagggtactacagagattttttgatgactttgctagggaaaggtccagagggagagtgatacattataaccaacaagcaccgctcatggtattctaggattgcttgtaatctgcatttgatggtctagactctgtaatatatacgttgctcctttttatttcaaaagaatcagaattcaagattgaaaccaaaaccatttatttgttattctgcattgactgtgtagattattaattgtaactgatg

SEQ ID NO: 32241 - DNA, 494 bp, Glycine max
ctagtgtattacagcttgctttttgacatatttcttgtcaatttggtacttgggaagcctgttaagaaagagtctgttgtgattatgccagcttttggagtacagcttgagactcattatgtgagtggaaaagtcatccgatactttgttcccattgacaagattctgaaacctgttctaatagaatgggtgactccaccgacttgtcattggactctatcattgattattcgtggggaatcagaaatggtgttagttttcaagaacttacgccctccggtgaaaatgttggcctatgtctggaaggccctgtgtgctgcaactgatagtaaagaagagacctgtactcatgcagaatgaataattgacagttatggcttatgtactggtgtctggtgtacccccatcattgaacgccaatcctgtgtgagagaaggattggattcaacatacatttggaaagtgaaatttttgcaaaccacactcttctcgag

SEQ ID NO: 32242 - DNA, 282 bp, Glycine max
ctcttgtgtatacagacactgcttgtagccaattgacaaacttcttgctgaagaaggaaatgggtggttgttttgggacaacacgtgccaatggccaaggatgaagcattagtttcgagatccaaaggagcaacaaaatttggtattgcaagcactagagctgtgatgttaacatgttttaaatttgtaaaaccaatgtgtgcttgttcattccattgtaattttgtatacttaccattgagaagattagttagtggtgcaattatgggcgtgcaacacggt

SEQ ID NO: 32243 - DNA, 151 bp, Glycine max
ttattctaatcgataggaatctggactagaccataaaattgctttggaaatgatacattcacccaaatcaaacactgacccgaatcactaaaaaacagcactaaaagccgcattaaagaaaaaccatcgccactgcaaccttccacacaac

SEQ ID NO: 32244 - DNA, 272 bp, Glycine max
cttcaagcttgatcagtccatggctttgtctttctttcgctgttgctgtttctctgagtcctcagaatccaaagagtttatatgccatggtgatgtttgcatgctcagagataggaagaagtacaaagccaaaaaatccaagagcaacaagcattagaaaagatggtgttatgcaagttagaactatatgtcctatgtatgctgtttgattgtgtgcaagttacttttggttttatggtaaaatctttaaggttgtgtttggtatgaaagag

SEQ ID NO: 32245 - DNA, 454 bp, Glycine max
cattttcccagaagtgttttactgctgcaagtttcagggatacctatgcagagactatacaccccatccccggaaaacttgaatggagtaaaacaggcaactcttctatggatgataatatccttgttgtaaggccaccaaaattacggcgaccaccaggacgccctgagaaacggatgtgtgtggatgaccttaatcgcgagaaacatacagtgcattgtagtcggtgtaatcaaactggacattacaagagaacttgtaaagctgagatgattaatagtatagagcagttttagttgtctgattttgtacttagttctttaccaaagatctagtttagttttaacatctacaggccctatgtttagggcattcctatgatgcagatcatgtagaagttagatatacatcactgtactaaatccgcgggtgtaatagaaatgaagtttacaac

SEQ ID NO: 32246 - DNA, 453 bp, Glycine max
taaaggatcggcacaatgggaaccttctttgtgataatgttgggaggcttgttcatattgacttcggtttcatcctagaaacttctcccggtgggaatatgcgttttgcaagtgctcattttaagctgagccatgagatgacacaattactagatccatctggtgttatgaagagtgatacatggaatcaatttttaagtttgtgcgtgaaggggtaccttgctgcccgtcgacgaatggatgggatcatcactactgtggcattaatgctagacagcgggttaccttgcttcagcaggggtgacccgattggcaatcttcggaagagatttcatccggagatgagtgagcgtgaagcagccaatttcatgacacatgtttgtaaagatgcttataataagtggaccactgctggctatgacttgatacagtatctgcagcaaggcatcgaga

SEQ ID NO: 32247 - DNA, 357 bp, Glycine max
gttaccattccattgggtgcacgctcttcccaaaaccctagattccctccaaacagaaagctacgatgccaaccctcaccaatttctactccatcaaagatttatcccagcacactaccaaagacgattgctggatcctcgttgatggaaaggtatacgacgtgacacagtatttggatgatcatcccggtggagatgatgtaatcctcgccgcaaccgggaaagacgcaacagaagaatttgaagatgctggccacagcaaaagtgctagagaacatatggagcagtattgtattggtgagcttgacacatcttctccaatttccaccaaagaaaagttcatacaactcactaagc

SEQ ID NO: 32248 - DNA, 418 bp, Glycine max
gtagttttggacagtctcataaaacccttgttacgttgcattaatatctatagttaggcacaacacttcattagttttcaatatgttttcaacggctactgcagacggtgttccgacgccgtacaattctacggtggcgacgatgctggggcggcggcggattccgatacacacgacgttctactgggggcacaaggtggacatactgttccggtgctggcccggggacagcgccgccatgtacgcggtggcgctgctcctcgtgttcttcatggcggtgctggtggagtggctctcgttcaccaacatagtgaagctcaagcccgggggctcaaacgacgtcgttggggggctcctcaagacggggctatacggcgtgcgttccgggctctcttatatggtgatgctggccgtcatg

SEQ ID NO: 32249 - DNA, 396 bp, Glycine max
ctttcgggaataaaactgttcctgctgttggtaatggtgtttctccttcactccttcaccatatcatcaactctgtctcttcaccctttgaagggacttcttttgaggacacttttggtggtgctggtggcgatgccatgacgaaaacaaccaccgccgatgacggtgccagaggaaacaataatgaagccctgacaagagatttcttgggtcttagacctctctctcacactgatatcctcaacattgctggtatgggaagttgcatcaactcctcccaacataacctaaccccaaacccttggcaaggttagctccatatgtcttatacatatttggtttttctttttcttcatttcattggtatatatatacatttattttaaccaacttttt

SEQ ID NO: 32250 - DNA, 376 bp, Glycine max
ctggccaacaatgccagtacccaactcgagtgggaagattacttcttccaccttgctttccctgaggacaagcgtgacctctccttctggccaaagaaacccgctgattatattgaggtcacaagcgagtatgcaaagcgactgagggggcttgcgaccaagatattggaggcactctctattggattggggttggaaggacggaggttggagaaggaagttggtgggatggaagagcttctacttcaattgaagatcaactactaccctatttgtccccagccagaacttgctctgggagttgaagcccacactgatgtgagttcactcactttcctccttcacaacatggtgggatgtctgcagctattctacg

SEQ ID NO: 32251 - DNA, 261 bp, Glycine max
tctattttaccaaacaattcaaactctattattcagtaaaaaagaaaggaaacctccgcaatcaatgaagtggccaagttcttcaatagtaaattgaaagaagttgtgagttcaactcacaaaagaacttcctttggctgccatcacttatgttgatgtttactcggtgaagcactctctcattagtcaaccaaagaagcatggttttgaggagccattaatagcatgttgtgggcatcgtgggaagtacaactacaattt

SEQ ID NO: 32252 - DNA, 364 bp, Glycine max
caataaagtaaaatagagttatcaattgtttcgcctaaattgtacagtgtggctcttgtctcttggtttgtgcttgtgtggttcgtgagcgtcgcgaatggcatctgggacgcagagtagtggaatgttaaccagagagcaactttattatcttttcgatcgtttcatttttcttacttcccaacctgatgtgaaaaaaaggattgcagaggctgtgcaggataagcaggaagctgttgctgtgaccactgcaatacaggaagagatatttttggagatgggtgttgacccaagatttggtatctcatgccttggaaaagtcagtactgtctatgagaatgacctggatttggtgattcagttt

SEQ ID NO: 32253 - DNA, 300 bp, Glycine max
gcgggtttcgcggcgcggcggaagaagaagaagactcatctggaaccctttgggccgacagcgtgaagaagaagcggaagaagaagatgaacaagcacaagtaccagaagctcaggaagcgcatgaggagacagacgtagaaggtcagggaacagaaaaagcattcaactttatcaattcagttttctttttagtgaaactgtaatgttgtcgtctttgtttctattagtttttttttttttgggtagtgaaaagaagaattgagaggaaggggggagactgtgacattaagttggaggc

SEQ ID NO: 32254 - DNA, 411 bp, Glycine max
tgcagatggctaatccacacattgcactgctcaaactcacctccatcttcattgtcattgcctcagcacctgagctgtgtggaagcagtaagactttcactctagtaaattactgcaaggagacaatatggcccggaataacgcgcagtgacaaccacagtggcgatggcttcgcattgaaatctgggcactcaactgtatatactgctcctgatggatggagtgggaggatatgggctagaacaggctgcaactttgacaacaatggccatggcaagtgccaaactggtggctgtggcaccagcataaactgtactgtccctggaagccctccagcaacaagtgctgacttcacttcttgtgaacctgatttcttatatgttagccttgtggatgtttcaacttgcctat

SEQ ID NO: 32255 - DNA, 522 bp, Glycine max
ggatttgttacatcaaaagtagcatgttgcggtcaaggaccctacaatggtcttggactgtgcactccggcatccaacttgtgccctaaccgtgacagttatgccttttgggatcctttccatccatcagaaagggctaataggttaatcgttcaacagattttgtcaggcacctcagagtatatgtacccaatgaatctcagcaccattatggctttggattcgtctaagaactagatcaatcaatcaagggtctctgtccatcattttattaccgcacatcttctgtgtcttgcaaaagtctacctacgcctgttaatttgtcatatatgtgttcaaattaggtgccatatatagtaattaatcatctccaatgtgtcagtgaatagtatattataatgttggggtggatggatgatgttaagtgccgtcttcgttctccttctcttgggcagtacaaaagaaagactgcatatataataattgagtgaatttttatcttcaataatttctctttttttc

SEQ ID NO: 32256 - DNA, 450 bp, Glycine max
gtcaacacgcaacagatgcacatcgacttcatcagtaatcctcaacgatatggatttgttacatcaaaagtagcatgttgcggtcaaggaccctacaatggtcttggactgtgcactccggcatccaacttgtgccctaaccgtgatatttatgccttttgggatccttttcatccatcagaaagggctaataggttaatcgttcaacagattttgtcaggcacctcagagtatatgtatccaatgaatcttagcaccattatggctttggattccaagaactagatcaatcaatcaagggtctctgtccatcattttattaccgcacctcttttgtgtctcacaattatatatagtctacctgttaatttgtcatatatttatatatatatatatgtgtgtgttcaaatttggtttcatataatatatagtaattatctccaatgtgtc

SEQ ID NO: 32257 - DNA, 563 bp, Glycine max
  unsure (1)..(563): unsure at all n locations
acgagatcaaattcaaaaccccaccatcatcatttggtgcttcttgacaacacaaaatcactttcaaaggcttgacaaagaaaactgaaaccaaaccaactttcccctttcactgatcatggcttcttctctcataatttccccaagacagcttcgctctgatttgtactcctactcctaccaagaggatcattacagcacccccactggtgatcaatgttctggcttcactgattgagaggagcatggccagaacagaaaggatcgtgaagaatggttcgaggtctttgtccaaggccattagcacaaacatctttgactgcagagagatccttgacatgacaatccagtcttatttagagagaattttcaggtacactcgtgcagggccttcagtgtatgttgtagcttatgtctacattgacaggttttgccagaacaatccaggattcagaatcaatgctagaaatgtgcataggcttctcatcacaaccatcatgcttgcttccaagtatgttgaagacatgaactacaganattcctactntggaagagttggtggt

SEQ ID NO: 32258 - DNA, 388 bp, Glycine max
tcgaggaaagagaagagatggaagaagatggcaagagagacaacactgattcacccaccaattcgcaacaaacagtttctgatgatgatgaaatagactacacaaccaaaccagagttttatgacccagatcttgatgataacgatgaaaagtggattgataaaaaaaggcatggacatgactctgatgctgtgcttagctgccctgcttgcttcaccaccctctgcctagaatgccaaaggcatgaaaaatatttgacccagtatagggcagtatttgtggtaaactgcaagattgggaatgacaaggttttgaaacacaatacttcaagatcaagaaaaagaaattgagggaaagaaggatttgatggagatgatgcacattcaac

SEQ ID NO: 32259 - DNA, 442 bp, Glycine max
ctcaatgtggaaactggcttaagtgacgtgaaggttacagttccagcacttctgatcatgggtgagaaagattatgttatcaactttccaggcatggaggattatattcgaagtgggatggtgaaaaattttgtgccggacttggaaatcatatatattccagaagggagccattttgtgcatgaacaaattccagagaaggtgaaccagctcatcattgagttccttaaaaaacaaattgtctgattctgatctatggccaaaagcacgtttcccttaatgtttgtgtgatttctagtctgcttaatccaataaacgttgtaatatccacctctgaacttctagttcatgaagggggtataaacattgcaatatccacctctttatatgctgtaatgaaatctgcaacttcatatcaaataaagtctgaagttttgtgccg

SEQ ID NO: 32260 - DNA, 593 bp, Glycine max
atctttgtcaacaattgagaacatttggcttaaggggaatggacagtacttgcttggtggcttgcggccatccatagcagatctcagtctggtttgtgaaattatgccattagagctttagattgagaaggacgggaacggaatcctgggccctcacaagaaggtccagcagtggattgagagcacaagaaatgcaacgaggcctcattttgatgaagttcatacaatcctctataagctcaaaacgaggctttctgagcagcaatctaatcaggcagatggcgtgatgcaatctaggattagaacccctctaaattcaaagatgtgaacaaacaaccatgccagtaacgtgcctgtgacaacttatatatgtgtgtgtgtgtgctgttggctgcaagtatcactgtatcaggtttgaaacatcaaagatgaagtttatgtctgtattgagaccccttaatctaagtaagttgggcaggtaataaatgtgatttccacatgaagatacaatcgtctcctcctatgagcagatttggcggcaataatgttagactgtcctttatatttgccacgcacaatattttctaggagct

SEQ ID NO: 32261 - DNA, 246 bp, Glycine max
cggctcgagctcagtcactgtgatcctgttgtttggaatattgttttgtctgggttttcagggtctaacaaatgtgatgatgatgtgatgagggtgttcaggatgatgcatttgagcggacaggctatgccaaattctgttaccgttgcctgtgtccttcctgtttgtgctcatttgggtgacctggatgctggaaagtgtgtgcatggttatattatcaagtctggttttggacaagacatgctt

SEQ ID NO: 32262 - DNA, 299 bp, Glycine max
cgctggttcagctatctacaaggagattgtaaaattactacccgtagatctagggtatttcataacaccattttcatggtacaccattttattggtggcaatttagaaaccttacccctcatatggttttccaattctagtagcttgggaattgaaaaatcgctactacgggaattcattcattgagtgtcatccacgtattcgtttccgttctagattgcaaccttccttcgtactccgtgttttcgtcgttcgtgtgtggaaagtgggaaaagataacaccccaatttcgaagcccc

SEQ ID NO: 32263 - DNA, 210 bp, Glycine max
agcacatccaccacttacttctattacaataacacaatattctcatcggtaacatccatcaccagaaccatggtccaagagaagaagctcgtggacgaagtgtcgggttggctgagactctacgaagacggttcagtagaccggacttggaccggttcgccagaagttaaattcttggttcgaacggttcatccccatgaagaatttatc

SEQ ID NO: 32264 - DNA, 233 bp, Glycine max
caagaaagtaacatttcgaacaagccagctggaagatggagatatcatatgctttcagaaggcttcctctatggacagtgaggaaaatgcccggtatccagacgtgccctcatatttagaatatgtgcacaatcgccaggtggttcactttcgatctctggatagaccgaaggaagatgactttttcctggagatgtcaaggcttctactatgatgatgtggtggagagatac

SEQ ID NO: 32265 - DNA, 455 bp, Glycine max
gaaaaccgttatttcggtcttgcaggtccattcagagggacagaggttgagccaaagcgggtcgggtcggaatagcgatgataacgaaccgggtgcggttatatgtagggagagtgttcacacggtgagggagttccggaagctgtatgggcttttgcgtttgggatctaggaggaaagaggagtcctattcggggcccatagagaaagaggctccacgtatctagactcgggtcggataaaagtaatcgggttttctttcctttttttattttctacaaaaaaatgtatagttgcttgccaagttgcccgagtttttttttttgcagttagaaattatattgttgtatctacaaagaaaaataatggtaggtcggtaaggtcgaagcaactacacctcacatttttgtttagtccgttgataagaacacatatcaaatgcatcacttattcttt

SEQ ID NO: 32266 - DNA, 283 bp, Glycine max
gaaagtcctaatatcatactcagaaagagagagagagtgagatagagaggatggaaaaactaattttcagtggtctaattgtgcttgtggggttattaaccacagaaatcaaagtagcatctgcaatttggctgcgagctcatgcaactttctatggtggaagtgatgcctcaggaacaatgggtggggcatgtgggtatggaaatttgtacactgatggttatggaataaaaacagctgcctggagtactgctttgtttaatgatggcaagtcatgcggtgg

SEQ ID NO: 32267 - DNA, 302 bp, Glycine max
gtcacacagaatttggtggagtaattgagggaaagatcaggatgaacactttgaagaaatggttcacttcttctcaggctatattgagcatggtactagtgcaactttttgtaactgggttgcagcttctgtcaagggttatattggttaaaggctctttcattggtgcacttattacttatcgtcatattgttgctgcaatttgtgttgctccctttgcgctttacttcgaaagaggcctcacaaagaagttcacttggaaggtttggttttggctattcattaatgcattaatggggatg

SEQ ID NO: 32268 - DNA, 276 bp, Glycine max
aaaacgccaagggattcgaacggacatgggacccacgtggcgtcaacggcggtgtgtgtggctgtgagcaacgcatcgttctatggtctagccacggggaccgcgaagggtgggtcccccgagtcaagattggcagtttacaaagtgtgttataggaatgggtgtcgtggatcagccatcctggcggcgtttgatgatgccattgccgacggagtggatgtgttgtcgctatcgctgggcgtattacctctttcccgaccaaagttgacatccgac

SEQ ID NO: 32269 - DNA, 279 bp, Glycine max
aaccaacatacctcccagtcctttcatttcctcaaaccctagagtcttcactctcctcgacgacatctcctttcccatcctcttcgacaattcctttcatgccttccacctccttcactggctgctatcgtacgttcgtatggcgcggtgaaggcgctggtggcagcactagagatacagacaatgatggcaaaggagaacacggtgtgcgcattggttcggttatcgaaacacaaggaggaagataaggtgatgatagggacggtgggagcgattctg

SEQ ID NO: 32270 - DNA, 258 bp, Glycine max
caagtgatgaaattggaaccttaaagaactcaaaggatgagtcccataattcagtaaatgagacggttgcatttgatgagttggttaaatccatggactctttgcacgccaaaatggcgtcgattactgaaaatgtgctggctgaggagactggtgatttggttgcggaatcttctgctgctccagttaaagcagaggcctctgtacctgaggtacaaagcgttgataatgatgataaagaacattcctcctttgatg

SEQ ID NO: 32271 - DNA, 294 bp, Glycine max
attgcctttgcatgacagagtccttaagctctcaaaaatgattccaaaggtatctgccgatttctttgtcattgtcacaattgtgttgctttgcttgttcagtttaagtcacagtgaatgtaatttcaaggcaattttcaactttggggattcaaattcagatacaggtggtttttatgctgcttttcctggtgagtctggcccttatggaatgacttactttaagaaaccagcaggcagggcttcagacggaagactcattattgattttcttgctcaagctcttggattgcc

SEQ ID NO: 32272 - DNA, 270 bp, Glycine max
tgatgacaatggtagtaggcttcagcaagagaataaggttggtttggtggtggaggagcaatttgctcagatgacaattgcaagtggggtgaagccagatgatggattggtgaatgttgtttcttctgcagtggctgtgcctgtaattcctgcatctgtgactatggcatcagctggggtgattactactagtgataatgtgatgaatagagttgtttgtgaggatgacagatcagatcccgggtttcagaagccccctttaccattgca

SEQ ID NO: 32273 - DNA, 272 bp, Glycine max
tccttgtccctgacggaactaggcgctacttggcttcattcacagcatttgtctgttatccaccactcttacaagtttggctgaacttcaaggaacccgtggttgatgcagaccttgacttgttcaagaaaattcttggagtaacaatgtaccagtacatggaaaacgatccaagaatgaacccaatccttaacaagtccatggccaacttgtgtgcaacagagatgagtagaatacttgaaatatacactggatttgagggaatatcaaca

SEQ ID NO: 32274 - DNA, 286 bp, Glycine max
  unsure (1)..(286): unsure at all n locations
tggagtttcctcatgatagttcaaacattgatgattttggatgtttgatttcttacaacaatgcggtactgaactataataacatgttgaaagagacattgaagcaaaccagagaaagtctttctgatgcttctgtcatctatgtggacacccattctgtcttgttggagcttntctaacatcncacttctcatgggcttcaatatggctacaaagcgtgttgtggatacggagggggtgactacaacttcgatccnaaagtatcttgcggcaatacccaagagat

SEQ ID NO: 32275 - DNA, 484 bp, Glycine max
  unsure (1)..(484): unsure at all n locations
gtcgattatgcgtccgaactaattactcttgtgatattctctcacaagggtgtgtaattaaggcatagaaaatatggcatcctttgccagcaataattatcctttggtgtttttctttgttctcttttcactggccatgcgcttagctcatgggactaattatgcaccaacattattcatatttggagactcaacttttgatgttggaaccaacaactttcttaattctaaagcaaaggccaacttcccctacaatggcattgatttttatcctccatttcccacaggaagggttagtaatggcttcaacactgctgaccaaattgcgagactcattcggttacaagcagagcccaccaaccatttttaactttggagaaagaccaatacagcctaaagaagaacattctgaagggtgtaaattttgcttcagggggatctggaattcttagagaaacagggcactcagaatgnggagaagtgg

SEQ ID NO: 32276 - DNA, 303 bp, Glycine max
gaagccaagaggtttagcgtgagaagtgttgtggttttaattttagtgaaaaaactcaaaaccgtcgtcttagccgcatgtcgaactccggcgacgcaaatgtaaccacagaagagcaagaagcagaggctgagcagcaatcggaagaatgggagacgatggcacgagcgtggctctgctccttcccggagcccaaggaggtgagcatggccgaagtcgaagcctggatcgactccaacctcgcctccctccccgaaggcctccgatccatgccccgccccgatctctgccacagactcatct

SEQ ID NO: 32277 - DNA, 451 bp, Glycine max
ttcacaactacacttcacatcaccgtatgcagttagttactgtttctgctgcttttcgattcctgagaatgtttcagaacatcatgaacgctttcaccaccaccggagacgacgacaacgggccagggcaccgagtgaaagggacggtggtgctgatgaagaagaatgtgttggacttcaacgatttcagtgcttcgtttcttgatcgtcttcatgagtttgtggggaaacgagtttctcttcagctcgtaagttctgtcaacgttgaccctgggaatggcaatgggttgaaggggaaacttgggaagcctgcttatctagaagactggatcacaacaatagcacctttgacagcaggagaagcagcattcaaggtcacatttgagtgggatgaggagataggaacaccaggagcatttataataaggaacaatcatcatagtgagttcta

SEQ ID NO: 32278 - DNA, 247 bp, Glycine max
ctctgaaaaagatttttggtagcccatgaaagttgaaacacaaaaaggatcgcagatcaaacaccagaaaacgtagtagcatacgattctatgaggtgaagtgtgattctgaaaaccttgaacatcgctcctctcctgccagtgtaagctagattgtttgattttctagtccgtggaagacatccctaatttgtttcgcaccgagcaaaatacaattcgaaagacaaaaaaaaaaaaaaaggggggg

SEQ ID NO: 32279 - DNA, 135 bp, Glycine max
tactcgagccagattcggctcgaggcttgttgaaaatgttgctaccagcttaatcaaaattgtggagcgagttgtgcagtcctcagaaatgttggatgagctttgtaaccatggattgattccacacaacatacg

SEQ ID NO: 32280 - DNA, 288 bp, Glycine max
gtaattatattctccatataccaacaactgagaagttcggaagtcagagacagactcaagaaatttcagcaatgcatgaagccatgaacagtgatatctatgtgtaaaccaagtagtttgcttgcattgctatagttgttatagttcttactttctttctcttaattattctcaaccaccctcttcatacataatgctctcttttttctttttatgtttttaatttcttttttcggaagtattttggataaagtcgatatccttcagtttatatatatgaaaatgttt

SEQ ID NO: 32281 - DNA, 330 bp, Glycine max
aggctcgagattttgttaataatggcgtattgttctctcaaggttttgtttggtgttgtgctctatgcctttgcgttccaacattgctacgctgatgcaaactcaacactgattgtaaatgctgcttccaataatgcaactgcaaggcaaattcctaacacttttcttggagtattcgttgaggagattaatcatgctggcgcagggggactgtgggctgaacttgttatcaatagaggctttgaagctggaggcccaaacaatgccttaaatgtgtatacttggtctattattggagatgagtcatcccattcgatatcaattagccgt

SEQ ID NO: 32282 - DNA, 277 bp, Glycine max
tagcaaataaaataaaaaagtgaagaaagaaattagaaaataaggagagatatggcgccaccttggggtccaccggcagggccttccggcggtatctgcagctgtatatgtaacctttttgtattgtctgtgttgctgctgtctcctggagagttgttgcggcccaatgtttggtggacctcctcctcctgggccccctggtccaggtttctgatccattccaggatgaatcgagggaataaaaaaacatgaatctgtgctgagtgtgatggttgtg

SEQ ID NO: 32283 - DNA, 649 bp, Glycine max
gtgggaaatgggtcgctccgatcccagaaagatcatattctccgccaaaatgggactcgctctcattcttctttcgcttttgatatttctgaaacagccctttgaggacattagtaaacactccgtttgggccattctcactgtcgttgtcgtcttcgaattcagcataggggcaactcttagcaaagggcttaacagaggattggggactttgttagctgggggactagctttgggaatgggacttttatcaaaattggctggaaaatgggaagaaaccattatagttattagcattttcactgcaggattttgtgtcacatatgcaaaacaatatccaacaatgaaggcttatgaatatggtttccgtgtgttcttgatcacctattgcttcattattgtatcagggtatcgttcaggagagtttgttgaaacagctgtagatagatttttgctcattgcactgggcgctgctgtggctctgggggtaaatgtatgtatatatccaatctgggctggtgaggatctacacaagcttgtggcgaaaaattttgtgggcgttgcagcatcattggaaggtgttgtaaataactatcttaattgtattgaatatgagagagtgccttcaaaaattctcacgtaccaagct

SEQ ID NO: 32284 - DNA, 297 bp, Glycine max
catgaagttgagttgcaatgggtgtcgcattctccgcaaaggttgtggtgaggattgtgccataaggccatgcctcgagtggatcaacactcctcaggcccaagccaacgctaccctcttccttgccaaattctatggtcgtgctggcttggtcaacctcatcgattctgccccacaacacaatgcacctgctgtattcaagtcactattgtatgaggcatgtgggagaattgcgaatccgacatttgggtcagtgggcttgttttggaccggtgagtgggcccaatgccaagctgc

SEQ ID NO: 32285 - DNA, 468 bp, Glycine max
attttcttgttggatgtgcagaagttttcaccaacattggttccttagagttcttttatggtcaggcaccagatgctatgagaagccttggtatggctctctcactcacaactaatgcgttgggaaattacattagcacccttcttgtcattattgtaactaaggttaccacaagacatggtaagcttggttggattccagacaatctaaatagaggtcatcttgactacttctactggcttttgaccgttctcagctttctcaatttccttgtgtatctctgggttgcaaagaggtacaggtacaagaaggtagctggaaatgctcattgaagataatagcttgaggttggacagctctgtttacttgctgaagatttttttttagtatttttatatcctgggatttgcattaatttgtatagatttgtgggtgtatttattgttttaactttcatgttcatgtttg

SEQ ID NO: 32286 - DNA, 362 bp, Glycine max
gttatttataatgaaataaatggcatttgcaagagactcaaggcagtgcaatacccaaaatgaagctcactaccatcttaatcttcttcatctttgcccttccgttcacatttgctaacctgcgcgttggattctataccgcaacatgtccaagagcagagacaattgtaggtgaagttgtgcaaaggcgtttcagccaggataaatccattgtcgcagcccttcttcgcatgcactttcacgattgctttgttagaggttgtgatgcctcaatactaatagatccaacaagcactagaacatcagagaagattgcagggccaaaccaaactgttcgtggatttgagatcattgatgaagca

SEQ ID NO: 32287 - DNA, 519 bp, Glycine max
ttgtatagtatgtctcagcaatggtggcagcaggggctttagtaacatacagcaggcaaaatgacaatctatggtttgctatagtcttaatcacttctgtggtggccacaatgtatcaactgtactgggattttatcaaggactggggatttcttaatccaaaatccataaatccatggctcagagatgatctaattctaaagaataaaagcatatactatatgtctattgtcttaaacattgtcttaagagtgacgtgggtggagactatcatgcacttcaaagtagggcctgttcagtcacgactactagactttctattagctgcacttgaggttattcggagagggcattggaatttctacaggttggaaaatgaacatctaaataacgttggtcattaccgggcagtgaagacagttccactaccatttcgagagatagactctgactgatgaggtgatttttcttgtacaaaaaaagtgtcctatagacatgctaacaaaatagaggcatgga

SEQ ID NO: 32288 - DNA, 564 bp, Glycine max
gtcatttgtccttgcaacactctaaagccatgaaggcaacactaagatacttagcaggaatggcaggccctagtggttttggctcaaattcaacagctgaacaagtcactgaagattgttcttccttccttccttctgcagctctaaccgctctcatcactggggcgagttctggtattggagctgaaacagcaagagtgttagcaaagagaggagtgagagttgtgattgctgcaagggacttgaagaaggccacggaagtgaaaaagaacatacaaaaggagactccaaaagctgaggttattctgttggagattgatcttggctcttttggttctgtgcagagattttgttccgagtttttggctttagaacttccccttaacattctcataaacaatgcagggatgttttctcaaaacttggagttctctgaggataaaattgagatgacatttgctacaaattacttaggtcatttcttgttaacagaaatattattagacaaaatgatagagacggcagagaagacaggtattcaaggaagaataataaacgtttctt

SEQ ID NO: 32289 - DNA, 373 bp, Glycine max
gtttggatttattatatgtgttgcggctacagctgcaagggctctgaaatcagtgctacaagggattttgctttcttctgaaggagagaagctgaattctatgaaccttctgctttacatggctccaatggctgtggttttccttcttcctgcaacacttataatggaagagaatgtggttggcatcacgttggctcttgccagagatgattccaagatcatttggtatctgctgtttaattcgtcacttgcatattttgtcaacctgaccaactttttgcgtcactaaacataccagtgctctgacccttcagggaagtccttattatttaatatttatccaaattggctttcattccttttctttttttta

SEQ ID NO: 32290 - DNA, 274 bp, Glycine max
taaacggattcatagctattctaattttgatttctcacttggtattctttgtggctgctgttacacatattttcatcaagacaaggtggcaaatgtgggaacggaatgttagctttttttttcttcgttggtttgttaatcgttcgtctagcttcttttctctaaaggtggttagggttctaagagcaaatccagtaattgttacggcagttactgcaatggtcttgggaagcttggttcatccatcctttggtctccttatacttctcttctc

SEQ ID NO: 32291 - DNA, 497 bp, Glycine max
tatttgcacaaattagtcgtaaatacaaaactacataaacaaatttgaaacggctttcttccatcacccttttggcagttaccaattcaactaccgcatcacatttacaaataaaactcaaaatccaaacaccaccgccacacaccaccttgtctattgattatcatatttattgtgagccttaactctagtattactactacttccacctttcatcatcactctttcagtccaatggggtggtctttctcaatttccgttttgctgtttcttacctttctcattcagatacatggaagaggctttgcagagaattatggttgtaatttgttccaaggaagttgggtttatgatgaatcataccctctttatgcaacctcacagtgtccctttatagagaaagaatttgattgtcaaaacaatggcagaccggataagttctatctcaaatatagatggcagccagcaggctgcaacttaacaagattcaacggtga

SEQ ID NO: 32292 - DNA, 269 bp, Glycine max
aggagccaaattggtattatcgcacttattgattcccttggtctctccttttgtcaagaacaaagtattttctttgatggagggagatcaacatggctctaattactcttttccacctggctttagattccacccttccgatgaagaactcatagttcattacttggaaaacaaagtcagttcacgtccacttccagcttgcattattgctgaaattgatctctataagtataacccgtgggagctaccgaataagtccttgtttggag

SEQ ID NO: 32293 - DNA, 262 bp, Glycine max
gcaggcaaggaagactatagtgaaaattcttagtaaactcctagaggaaagaagagcatcacatgaaacctaccatgacatgcttggttgcttgatgggaagagatgaaagtagatacaaactaagtgatgaagaaatcattgatctagtgattacaattacgtattctggttatgaaactgtttcaactacatcaatgatggcagtgaagtacctccatgaccatcccaaagctcttgaagaactcagaaaagagcattgg

SEQ ID NO: 32294 - DNA, 383 bp, Glycine max
gtgggtcaatggaatttgttgttccacaagccgaaccttcggcgttcttccccatttcagttcgttttatagcaactgaaacatttagtgacctgaaggtcaccagcatcataccgctaaatgggggtaatcctcctaagtattctcagagaacacagttgatcacagaaaactaccaaattgtgtgatcgtttttcctctcgacactgagcttttatgacagttttgcttttacattcgtgattcttttatcaaagggcttttctttgccatgttgcatcattttattaaattcgtaaattcataatttggttttactttttgcaagcatggggcaaagtatgtttttcataataccaaacttaagagtgtctttttactcc

SEQ ID NO: 32295 - DNA, 490 bp, Glycine max
acgagaagtacgtatgatacgtgggcggcgacacacgcatcatcggctgcgaacgcgccacctcactctgggacctatccactgcgcctatcaacaacattgcatgaatggaagacccttgacgctcaagtaccagctgcgcaacagaggacctagagtgcctcatctacgtcaccaccgacgaggacctagagaacatgatcgaagagtatgagcgcaccgcctgcgtcgccacctgctgcgacaaaccgtgtcgcatacgcctgttcctcttccccaccaaacccgaatccactcactctatccctgcccaaattctcgacacgtcagccaaatcggacgattggtttttgaatgctttaaacggcgccggattgcttaaccgcgggttttcggactctgcctctgttaattgccttcttggacttgacgacgaggttgccgggaacaacctcgaacccggttcgaaggacggtgtggatggtggtgt

SEQ ID NO: 32296 - DNA, 404 bp, Glycine max
ggttcaagacttctggtgcttgtgctgcattccttgcaaactatgacaccaaatcttccgcagcagttaaatttggaaatggacaatatgacctaccaccttggtctatcagcatccttcctgactgccaaactgcagttttcaacacagcgaggcttcgtgctcgatgctctctgatgaagatgactgccgtaaacagtgcatttgattggcagtcatacaatgaagagggtgcatcgtccaatgaggatgattccttgacagcatatgcactctgggagcagattaatgtcacccgagattctacagattatttgtggtatatcgcagatgtcaacattgatgcaaatgaaggtttgataaagaatggacaatctcgtgttcttaccgtaatgtcagcaggc

SEQ ID NO: 32297 - DNA, 377 bp, Glycine max
actcgagccgaatcggctcgagccacgatgacgcaacaagaatcaaccatgtcactaatattcttacaactacttttactcttgtcatgcctaacactgaacaatagtattgcagaatcaaccaccatcatcaatgtgtggcccaaaccaaggaaccttacatggtccccaccataccaaaccaccctcctctcctccacattcaccatcaccaccaccaccaaccaccacaacaagcatctctccatcgccatccgccgctaccagaacctcatcaaatccgagcaccaccacccacttgtcccacaagcagtcaacatctccaacaaatacctcccaccactgcagactctcaaggtcacagtggtggacactgc

SEQ ID NO: 32298 - DNA, 426 bp, Glycine max
gtcaatgagcagaggcagggagatagagcgcaaaattctacgtctccttcacggcggcaaaacccgcagccacctcaccgaaatccatggtcacttcctccgccatggcctccagcaatccaatcaaatcctcgcccacttcgtctccgtttgcgcctccctccgcagagtcccttacgccacgcgcctcttcgcccacacccacaaccccaacatcctcctcttcaacgccatcatcaaagcccattctctacacccacccttccacgcttccttctcctttttctccctcatgaaaacccgcgccatctcccccgacgagtacactctcgcgcctctcttcaagtccgcctccaacctccgctactacgttctcggcggatgcgtccacgcgcacgttgttcgactcgggttcacgcgccacgc

SEQ ID NO: 32299 - DNA, 472 bp, Glycine max
tgttgatgttctgagagcatcacttgccggctcaaagcaactgattaatttgctgttaagcaatcatccagagaacttcttgaatccagtgatcagggagtggagttacaatactttggaccacaagaaagtggtgattgtttcagaaaagttgagggatccttccgatcggctctttggaacctttggtagtcgtggggcgaggcagaatcccaaaaggaaatcattggatacattgataaaaagacttagggatgttagctgattaagcttatagctgtatgtaaggtattttctcttgttttattttcttgttttgtctctagttccattttgatgatgaattatttaatagtgagttgtcgataaaattatttgctttaggccaggctgtcactgtgttccaaatgcattttaagattttccaagatatttgtttgaaatgtataattcttatgctcttgttttttgg

SEQ ID NO: 32300 - DNA, 402 bp, Glycine max
gtatcagccaaagcatcaagacaacaacttaaagaagcaatctatgttgtcttgtttgacatgaatgttcctgctgtatgtgctctcaatcagggtactttagctctgtatgctgcaaatcaaacatctgggatagctgttaatataggctttcaagtcacatctatagttccaattttaaatggtaaagtgatgcgaaaggtgggtgtggaggttgtggggctgggagcactaaaacttactggatttcttagagaacaaatgcaacaaaacaacataagttttgaatctttgtacactgttcgcacactgaaagagtcacatggcaacagacgctatgttatgttgctgttgactatgaagctgagcttttgaaagatactcaagcatcatttgaagctg

SEQ ID NO: 32301 - DNA, 271 bp, Glycine max
ctcatgtattactctcactgcagagactgtatgaggtgccatgcgaggcttggaaacattctcccagctcgcatggggccaccccacgcacgttccagtgggcgtgcacgtgtgtgactccccactctatgcccaccgcggtgtcatggtggacaccgcgaggaactattatcccgtgaaggacttgttgaggacagtgaaagccttgagcatgaacaagctcaacgtgcttcacttgcacctcacggatgcagaatctttccctttggtg

SEQ ID NO: 32302 - DNA, 277 bp, Glycine max
aatcagccttcatttatttccccctcaaatccgaatagtttctcttgatggtcagggatattgcaccaaggctttcaatatgctcttagattgtgaacctcttgccttcatctattccatttagtattgcaaaacattattgcagctgtctcattgatacattgactgctactcagagttattgaggggcaaaaatgagtgcacatagtacgttggatattgttgtaaatgatatacttcgagtggtcacaccagtacaagaagattgggagatacg

SEQ ID NO: 32303 - DNA, 494 bp, Glycine max
  unsure (1)..(494): unsure at all n locations
cacgaaatgaattccatgcaatcttcgacttatactgatnnnaagacatnagatacatctgcggccccaataagcattaaacctcctatttntgatcgtcgcaaatcatttgatgaggatgagttttcaaacaagcccgttatagtcaataagcccactaaagtcaagaagaccgtaacagctcctgcaaatgtaaaatcatattctatagctgacctccagattgctactggatccttcagtgtggagcaacttcttggtgaggggtcttttggacgtgtataccgtgctcaatttgatgagggaaaggttcttgccgtgaagaagatagattcatctgtccttcccaatgatatgtctgatgattttgtagaactggtttcaaacatatcccaattgcatcatcccaatgtgaccgagcttgtaggttattgttcagagcatggacaacacctactagtctatgagtttcataaaaatggatcacttcatga

SEQ ID NO: 32304 - DNA, 393 bp, Glycine max
ccaaaacaaatactaccatgttgttaatctactctttttatcactcttcctctttcgggcacaagttcaattcttcactctttttttttttcctcttagttcggtgaatcatggcgaacccaatcgacggtggcgagttcgagtgcctttccgggttcggcaaccacttctcctccgaggccctcgccggagctctgccggcggcgcagaacagccccctcgtctgcccgtacggcctctacgccgagcaaatctccggcacctccttcacctcccctcgcaaccgcaacctcttcagttggttttatcggatcaagccatcggtgactcacgaaccgttcaagcctagggtacctggtaatggcagaattttgagtgagtttaacaactcca

SEQ ID NO: 32305 - DNA, 297 bp, Glycine max
cccagagacagagtagaaagtttttctacaaaatataatcagaatggttttgccaaaactagttatcaccattgcattgatattagtccttttcctcttcatatgtgaatctcagggtgcatcttatgcttctgcttcacataatgctggtcatggtgctgacattaatacatcacttgcacatcagacagttcatctatcagtgtattatgatagtctttgcgaaacttgtgcttaatgcatcattcaggatctgagggacatctatggcaacaacctcatcagcattatcaatct

SEQ ID NO: 32306 - DNA, 278 bp, Glycine max
gccagcgcagggtgtagcatataccattccttgagctccttcaaatggcagagacaccaaagaagaagaagaaggggcacgtggttatggtacccttcatggcccaaggccacatcatcccattcctggcactagcaaggccaatccaacaaagcacaagcttcaccatcaccatagccaacacacccttcaacattcaatacctccgatctgcactttcttcttcaacttctcccaatcatcaaatccgtcttgctgagttacccttcaactccact

SEQ ID NO: 32307 - DNA, 336 bp, Glycine max
gtcacaccgcccaccgtcacctgctacctctctcctacatgatgtctttcatttcactcacctctctcactctctaattcattctctttcttttctcccattttcatcaattctccaacaaaaatgagaaaatgcactgtgcaggcgttgggactcgctattgccttcttccttttactcatcctcctaaccccatccattcctcagcctcagcgataccatgacttcgctgacaagcgcgaattctttggcattcccaatgcacttaacgtgatatcaaatttcctattcatggttattggtctcattggccttgtgctttgccaccgtatgaac

SEQ ID NO: 32308 - DNA, 297 bp, Glycine max
caacttctttacttcagtgtctggaatagtggtagccttccttaatgcctttaacttatgctccattttcatgtgtttttagatcgacatgtgtcttctctggcttggtatgcatggccagttaattaatgggtttcacgggttatggctattgtgaaaatgtctcactgcatgcaggttcaacttcaagcgttctaatgggaacaactacaacaccccttgtgttggttcatctattttgctgccttgttgcggttttacaggcagattccttgaagtacaaggacccgaatgggc

SEQ ID NO: 32309 - DNA, 338 bp, Glycine max
tattattattattattctgtcttgatgacaccaaatgattgagaaataacaagaggggaggagtaggagctaaattttatgcataagaaaacaatagctggccacaagataagtagacaagatagcagggaaaaaatcaaacatatacttcagcaattagttccagatttgcacaacaattatggcggcagcttcctcatccactccatttttgggaatcagagaagaaagccctcagattacaacacaccatcaaccctccacagtttctccaaccacagccgctcaagaagaaacggaggaatacacctggaacaccatatccagatgcagaggtg

SEQ ID NO: 32310 - DNA, 752 bp, Glycine max
gcaaccatgatcatgagattcaaagcaaaaattcaagctcttgaggaacagatgaattctgttactgaaaagagttcaaaatatagacaaatagctgctgaagaagtcccaaaaagcctctattgtctaggtgtccggttgactacagaatggttcaaaaacttcaatttgcaaaagaaatttaaggacaaaaggcacgtggtgatgaagcttaaggataacagtcttcatcacttttgcattttctctgagggcattattgcaacttctgttgtggtcaattcaactgcaatgaattgtaaaaatcccaatatgattgttttccaccttgtcactgacgaaataaactatgctgcaatgaaggcatggtttgccatgaatgatttccgtggggtgactgtggaagttcagaagtttgaagactttacttggttaaatgcttcatacgttccagtgctcaagcaacttcaagactcagaaatacagagctactacttttctggcaacagtgatgagggcaggacacctatcaagttccgtaaccctaaatatttatccatgcttaatcacctgaggttttacatccctgaagtttttcctgcacttaagaaggtggtgttcctggatgatgatgttgtggttcagaaggatctttctggtcttttttccattgatttgaatgagaatgtaaatggagctgttgaaacatgcatggagacatttcacagataccataaatatttgaactactc

SEQ ID NO: 32311 - DNA, 352 bp, Glycine max
gacgagtggcacctcaggcgtcacttcttccttttcatactgttgtacttttaccaaataagatcaacaaaaaacaaatccacacactccattttccattcctttccatttctccgttccccttggaacgttttctctctgtgtgtctcgctagggcaaaaaccatgaacatcttcaggctcgccggtgatatgacccatcttttcagcattctcgtcctcctcctcaaaatctacgccaccaaatcatgctcagggatttctcgcaagactcaagagctctacgcgattgtgttcgtggcacgctatttggatctgttcacggacttcatctccgtttacaacaccttcat

SEQ ID NO: 32312 - DNA, 274 bp, Glycine max
ctttggaccacaaaatgggcagctattaggatggtcactgttatgttagctggctttggagttggttttgtttactatggagttcaactcaatgttgaaaacttgaacttcaacctctatgtctcagtggcaatcaatgcacttatggagattcctgctgtggtgattggtacctttctattgggatttactaatagacgtttgttgttatctgtgtcctcttatatagctgcagtgtcctctatattatgcacatttttttcacacagaggag

SEQ ID NO: 32313 - DNA, 531 bp, Glycine max
ggtggacattataaatttggatagggcttcgaatttgaccatggggttgttggacagcaaggatggggatggaggtgttgaagtggggctcgttatgcatcagaaggtgatggatctctttggtactatttttcatggaggactgaaagatgagtgatggattcggagctcttgtttgttaattaattcacctgagatgtgaaacattgcatctgagttcggtttatttaagttataaatgcttttgaaggcttctttgtcgaaaatagagagtttttctggtagaaaagcttttaaaaaactccaagaggaaggttgtgagtttctatttcctgtttaagggggaattgttctttcttttgtgactgtatttaaaggtttttgtttacattaattttgtccttttagtattgtaattgtagagtcatgtgtagtataataattatgagttgctctattataataaatagagtaccaactcacgtagcttgtgcacgtgttaaaataatatattcaacctcctctgttttg

SEQ ID NO: 32314 - DNA, 277 bp, Glycine max
tattaaatactcaaattctgtggtacgtagtgatagtagatgggatcagtggaaagatcaagaaagaaagtacatgtcatggaagaaagccatggtgcatttttctctctgttttgtgatggggttcttcacaggctttgctcctacaggtaaatctatatttcacagccatgttgattattcaaataggtcagagtttgcaccacaacctattgaagtgtcacagaagacaacatgtgtcaatagatcttggatagctccaacaccaaggtcttta

SEQ ID NO: 32315 - DNA, 531 bp, Glycine max
atctgagtatgtgaaacaggctgataaatcacatatcacccttgttgaagctttcagaaacatgcagatagaagaaggggatcagcctcttgagaacggggactctaaccatgagttgactgaacaaaatggagaagagcactatacagaggaacaaaatggagaaggaagccaagaggaggcagttgtagtggatgccgattctactgatggtgcagtgctcgtcaatggtaacgaggccgatgaagagtagggtaaaaataaagaaggagccccgtcagctgagaagcatttggatggggccgtgtgaaaattgaagttttgtcttcgggtggttgtttctcaagtgccattgccatatctaactcccattttgacaactagatgcttttactatcattgctactacgagtcctggcaattctagttttattttttttagtgtatcatatactttactacaactaggttgtatatttgggaaatagagaggaaattataaagattacgtccattttcagtagtgaaatc

SEQ ID NO: 32316 - DNA, 483 bp, Glycine max
gaaaacaacgcgcggcaacataatcccagaaaaacacaaagttctgattcttcattcttgtatttgtatttctactcgccaataaaaactttgtgatcattctccaacgtgaacccacccaacaacaacaaccatgatgacagacgaggaattgttgcagaaacttgatgacttaaccaaatacgcccaacaccaccacttggagactctccgctcgatccttcttcacaatggaatcgtgcactatcttcaatccttcaagaagggttctcttcttcatcttgatccatcaactttcgcacgtgtcgtgcccttgtctacgtatgaggactacgttgactacattaaccagatggcagaagggaaagatgacccttttctctccgttgaccctctccgctgcttcttttacagctcgggaacaagttcaagcaccatgaaaccgaaattgatcccttactttgattcaagcctttccaaagc

SEQ ID NO: 32317 - DNA, 507 bp, Glycine max
gatgaacctcaatctttggttacatcccaccaaatattaaggagaagtgaatcctctccagaaaaacacagcatccctttcacagtcacttgaggagagaaaagcagcttatttaattgctcgtgagcgaattttctctatgaagttggaagaggtaaaagagcctggtgaacaaaagccacggagtgtgcctgtggttgcccgcagaatgattgcccatgccctaggtcaaagaatccatacaaagaatcagaatgacttggctagtgatagtatgaaggatggagtcctcacagatgaattgagtgctcaagataagaatctggaagagtccactctcaagaaagtttctgaagagccttcacacctaagagggaattcaaacaaccgcataagaaacacgagcagttctaatgcagcctcacttaataaaaggaaggatcaaacaacagttgacaaagatttgccacaattctctgcagacagaaaacacgggctaagtgtaag

SEQ ID NO: 32318 - DNA, 345 bp, Glycine max
ggagggggcagcgccggaggtggtggtagcgaaggaggaattggaagtgctaaaggagactatcatcatggaaaaggaggaataggtgacaaagatggaggagacagaggtggcggaggaggatattgaattagtattagagaaagctatgtcatgtagaataaaggaaaaggacctgttggttgatatggaaccaaagtctagagttagacaactagtacttagttctttgttgaacttaaatgtagctttggagatgatactagatttcattctccaattttcatctaatactttacattgatctatgaatgaaaacttgacaatttacgtagagtatctaaa

SEQ ID NO: 32319 - DNA, 623 bp, Glycine max
agcctcctcaacataactttgtattaaaaactattcctctcagttgaatgctgatataaaatttcccacaggaattctctggatcataaatcagatacaactggaagtagtattattgtagcaaagtgaacatttttccctcatgaaaatgtggcttggcaagaaaattatcttccttcaaactctgctttgtttttccatagttggaaccaattcccatggattgaaggaataccattttgttctgaaagaagctcattatagaagactctgcagctcaaaacccatattgacagtgaatggacaatttccagggccaaactgttagagcctactatggtgaaacgatatatgtcaatgttcacaacaagggaaaatacaacatcaccttgcactggcatggagtgaaacaaccaaggaatccatggtcagatggccctgaatacatcacccagtgccccatcaaacctggtgggaaattcaggcagatgttgattttttctattgaggaaggaaccatatggtggcatgctcatagtgactgcgcaagagccactgtccatggagctatctatatttatccaagaaagggtgaatcctacccttttcccacacctgatgaa

SEQ ID NO: 32320 - DNA, 562 bp, Glycine max
gtagctgctgctgttgatgctgctttacaggctatttccaatgtttctgtttcctctgaattgcaagattctttattaaaggctggtgttttatggtaccttttgccgctgctgcttcagtatgattctactgctgaagagtctgatgcaacagaatcgcatggtgttggtgctagtgttcaaattgccataaacatgcatgccatatatgcatccttggctttgtcaaggctcagtggcttgtgcagtgatgagagtgcaacaccttacaatcaggcagccgctgatgccctcaaagttttgctaactcccaagttctctagcatgttaaaagatcaaatgtccaaagatttactgtccaaattaaatgcaaacctggagtcaccagagattatctggaactcttcaacacgagcagagttgctgaaatttgtggatcagcaacgtgcagctcaaggtcctgatggtttatatgatattaaggattcacatgactttgtctataaagcactatccagagaattattcattggaaatgtttacttgagagtctacaatgatc

SEQ ID NO: 32321 - DNA, 392 bp, Glycine max
gtcgcacaggactaacagcagttttcataggattcttcttctttctgtcactattcttcactccactcttggctagtgttcctccttgggctataggaccctcacttgtgatggttggggtgatgatgatgaaggtggtgaaggacatagattggaccaacacaaaggatgcagtgactgcttttgccaccatgctcctcatgcctctcacttactccattgcaaatggtatcattggtggggttgggctctacattgctcttagcctctatgactatgctgcaagcattgtaaattggtcgaggaagatgacgagaatcgtcgccaacggacaaaaccaaggttctgttgactcagcagtgggaatgatatgagatgctataattttgggt

SEQ ID NO: 32322 - DNA, 369 bp, Glycine max
cgtaattttcatatatcatattcacaacaactccatcgagaaagtactatgtacacactctcttccaatacctgaatattattattctttcttgtagccaccaccactcttctaatgtctaggttatggttttccacaccattctttgttatcattctccccgtggcggtggctgcgcttttcttccggctcgaaccgttcgatccgggttttttgccggttcagctgggccggtccaccgtggcggttccggcaagtaacggccacgtgcgagttggatcggaagctatgggcgagggacacttggagggccccgaagacttggcctacgacgccgcggcacgtgtcgtctatactgggtgtgaggat

SEQ ID NO: 32323 - DNA, 557 bp, Glycine max
atttgcacctggactaaagagaaggcagtggaagaaggtttaattactgtgaatgttagggaagaagtactgaaggtgtggtgatgggtgttccacaacctccacctccctctcaacatctctatccacaagaaattcagcttaaactttaccaagccttcatattctcaattcccatactcttttccatcattttggttcttttgttttacttgttctacctcaaaaggagggcttcttctctctcatcaccacctctccacatacttcccagtactactaattcacaaactacatatccttatccttcacaaccttgccgtttagatctggcagtgcaatttctggacaaacttccaagaattttgtttgatgaggatttaagaacaggagattcagtatgttgtgttggcctaggagaatttgagctgaaggaagagttgctacagattccttattgcacgcatgtgtttcatataagctgcataagtaactggctgcaatcaaactccacgtgtccactttgtagatgctccatcattccctctaccaagttc

SEQ ID NO: 32324 - DNA, 317 bp, Glycine max
ctcctttgctgcaacatctcaaatgcacatagcacctatggtccaaagcttctacccttcttcatacccttcttcatactcttctccctcaaaactaatcatcacacccttttaaaaaaattcaacagctttacttcatgcagacaacgttaacaacaccaaacccgcaggaacattcacaaaagaatactacatcaacatcatcttaagcagcagcaacaacaacctcggaagcaattccaatccctcacaacctccaacatcacccaaaacaccaaacaacaaaagcatgaaaattctaataatagcctccgctg

SEQ ID NO: 32325 - DNA, 464 bp, Glycine max
gcacgatgaacacaacaatccctggagatataaaaaatgtgcagacagagggattagagcagagtggcaatagaacttcagatgaaaacctgcatgataccaattcgacgatctctgttaaaactgaaaatggaggtgtggatgctggagaatcatctaatctagtagcttcgaatgtaaccgagaacgcttacagaaatgagaggtctgaatctgatatttctgaaagtggcaagtccaacggtaactctgaaacaaatgaaaatccaaatgttgatgccacagaagatgagatgttcaaaggtgacacacaaacaggtgaaactgatgaaacatcagactcttcctctgccaacgaaactatggattcagctgaacaagatgcaatcgattcttctgatactcatatcccacgaagatgtggccgaggcttcgaaccgatcttgatacactgcctgatatca

SEQ ID NO: 32326 - DNA, 326 bp, Glycine max
ctaggaagctgctacgcctgtctgaccacattgctctcctcttagtgttccacctcttcttcctcttcctcttcttcttcttcctccttctttcacctttcgattagggttttcttccaaacccctttttcgttctttgcacgcaccacacaccgaatcaaacctattcttcctcacggttcatgcaatggacatgtctgatgctgtcattgtcaaatcgagtagggttgaaatctgtggtctggaatgattttgataggattaaaaaaggcgatacctgtgtggctgtttgtaggcattgcaaaaagaaactgagcggatcaagt

SEQ ID NO: 32327 - DNA, 351 bp, Glycine max
  unsure (1)..(351): unsure at all n locations
nnnnnnnnnnnnnttttttttctccttgaaaaatattttaacatactggatcgctgatatttcaaaggaattttacaaaaattcaaacagttaaatccccgtacaatttttcatacaaaatttgtgtaaatagaataattttcgtggaagaagatataacgaccactttcactcgttacataacgcatagcaagatcgaacggctgatataatttcattcgagattagtgtggcgcgatcgaacggcttcagggctctcacccaaggcctcacccaacttgtaaacaaccatctcaaacagaacaaacagcgccccttcgtacacacttcccatcggaagcaacggtcgag

SEQ ID NO: 32328 - DNA, 499 bp, Glycine max
cttccctttccccttcttcttcctctacaaatatccaatagcagactaaaccctagcatagcagtagcagtggaaaatggatgacgaggagagagagaggcttctggagagggagagattgcaaatccaggtcattcgccagctcgatctcgaggacctcgtagtcgaagaagtcgaccactccgacgaagaagacatcgacggcgatcccgacgaggagtatgcgcttttcctttcgcaataccatttggatgcttctcttcctcctccctcatctgccgaattcaatttcgatacctatatcgcgcctttgcatacctatctcggtgatgtcgaagacacgcgccacaggactgcgttcttggacggtggcgccatattgaaccttcccctcttttgtctcggaggagttgtactttttcctggggctactcttccccttagagttattgaacctcatttggtggctgctgttgagagagctttaactcaagatgat

SEQ ID NO: 32329 - DNA, 1016 bp, Glycine max
actattaacttaatataaattattttaacattataatttaatcacgagtcgtcttgtacaataagtatattgatttttataatattatttaaaatttattataataataatgattttttattggtgggtaatgtaaaaatatttacagataaaaattaaacaattttcttataccgttgatcgacttagaaatcaacaaagttgatatgtggatatgagatttatcaatgatcttaaaacatcttaaattagatggagcaccatgaattgcttaaagaggtttgtctatctgttaccaactgaggtccaatccgccaccccatccaacgttaattagacaacattagacaacttcagaatggatcatatccatacagtatgagatactttgttctttccttttctttcagtatcctgtaatctatatattgcatcttttgaaatctccacttcatgtagttaaagtcgtttgtcaggtgagcttacgtgttattgatggaataagagggaaaaaagacaaagtaaaagttgcagaatggattaatgtaataagagtgaaaaagacaacgtaaaagttgcagaatggatatggacaaaaacgtaatcctaaatcgatcattttttgtggaacatgttttcaattttttctgttttccttataaccgttaccctcctttgttatttcttggatgggtcatctatttatcttcaaaaaatgaaaaattaaaattgactggcttacatgtacagcttaattaaaaattcaagttagtttatgaaatacaatctaaccatacattatttaaacagctaataaataaataaataaaagttctagtttgggatataattttgatatgcattgtaaattgaaaagatttttgacataaaatacctgatactacattattaaaatagtttgatagtgatcgttgcttcttgaaaagatccacaacgtaacaacgggtaattgaaatagatctaaatacatcacaagaaaacttgttttcccctat

SEQ ID NO: 32330 - DNA, 402 bp, Glycine max
gagcattgttaatagttgtgctagtacgtatcggagtgatgcaatgaccagtgatggcatgcttagtttagacaggaactgtgacagtaataaaggtagtgtaaggggggattcactagagagtgctaaaactagtgttagtcggccaagtgatagcagtggcctcagcgatgacagcaactggagcaacattactggtagtgccaataaacctcacataggagatgatcctaggtggaaggctatccttgccatccgggtacgggatgggatttcgggcatgagtcattttaggttactcaaacgactaggatgcggcgatattggaagtgtctatctctcagagctgagtggaactcggtgttattttgcaatgaaagttatggataaggcatccctagc

SEQ ID NO: 32331 - DNA, 256 bp, Glycine max
  unsure (1)..(256): unsure at all n locations
ctcgagccgcattccnaccaaacacaattaacaacagtggagtgcaatgaagatttgccttctctgttggccagttcaaggatcataaagaaaattttgattagatagaaatgttagtgaatttttaatcttgacataaacgcaattaaagccaacatggttgcctatccatgctgattaagccggtacaccggcaggccgcaaccaatgcctccaaccccctgccccattaatgccctttgttttacgttcttat

SEQ ID NO: 32332 - DNA, 264 bp, Glycine max
  unsure (1)..(264): unsure at all n locations
atgatttttanatttcaaaggataccacaaccaacaacaccagacgtagttgaagctagccaagagcgaggaatcatagttccttttctgggaacgacggttcctcctttatgctaccttcaccacctctttcttcataccataccccccctcaggttgcttttcttcaaattgaggtggtgcgtgccagacaaagctatgtgatcgatcaccttgatggcttccatgtataatcaatcgtgatctaatttcttctcagggggg

SEQ ID NO: 32333 - DNA, 526 bp, Glycine max
cgaatgctgataagtccacttcttctacatgttggaatagctccagaggtgacagcagcaacatgttctttcatggttttcttctcatccaccatgtcagccttgcaatacctattattgggcatggatcacatagagactgccctcatcctggccctaatatgttttgttgcatcacttattgggttattagtggtgcagagagcaattcaaagctatggaagaccatccttaatagtattttcggttagcatagtgatgactttaagtattgttctaatgactagcttcggagccattcgaacttggaaagactatacatcagggagatacatgggattcaaactaccctgttgaaaaacaattttgctcaatcaggtacagtttgctagagtggaaaaaaatgaaatgagatgaaagttttgaattaaaatagagtgtaaaagtgagtcacactttattttattatttatttcttctctttttctgtaaacaacggaaccttagtatatgattgcattctagt

SEQ ID NO: 32334 - DNA, 345 bp, Glycine max
gtagttttggttatggccttttgttgcctacagtggatggacctgtggaaaaatatttagcttcaaggcacttagcaagcaacaagtcttcaatcttccttatccagtaggcaccaccattgctttgtaagtaaggctaaataaaacgatcttatcgttttgaaatcaatctcgcccttattttaggttttcctaaatttgtttccaacacattcggtctgatttccttccctatagagtcggataaatagaagcaactcattatatacgtagatatattattattcattcacaaacgatcgtatataataacaacttttatattaggcaaaatatgattttaat

SEQ ID NO: 32335 - DNA, 300 bp, Glycine max
  unsure (1)..(300): unsure at all n locations
caccattcctttcccccttctcttccgccaatttcagtttgagattattttgcgtttgtttatcgggaaagccgggaacgaaggagaaagagggcttcaatttcattccggaatgtcgtgggaagacgagattgtgatgcgcgatgtcacgaatgcgggccttgttatcagcgatcgcattggtcgtgaagtttcgtctcagctcgacctcgaagaagctctagaagcttccagacacgctagccacccttattccactcaaccccgagaacagannnctttagttgaggtggtgaatac

SEQ ID NO: 32336 - DNA, 277 bp, Glycine max
tcggctcgacggaacactgctcgtggtgagtcagcgcaatgcccacagaatccgcagattctggcttgctggacctaaagcaaatacttcagaagtattcttgcagcttccaggaagaccagagatcataaagaggaactccaaaaatgagttttgggtggcaatgaactatccttttgggacacctccacccccaagacctcctgttttgcctctaggactcagagtcaatgaggatggtgaagtttagaggctgtgcctcttgtcgatgagtttg

SEQ ID NO: 32337 - DNA, 268 bp, Glycine max
caatccaacattcattctcgaaccctctccaaactgcaccccttctcgaataatagccctcgctgcctctgtggcagtggaggtggtggagatgcatatggtgcatttttgtcggtgtttccttttggttcaatcatggtggagcatgaatattatgtaataagttgaaagattgctgggaatgaaacgtgctttttctaaagggcgaattctcttcagaagggcaacttccatccttgggcaggttccaattcctcgaactcacttc

SEQ ID NO: 32338 - DNA, 211 bp, Glycine max
atccaatccatctaatctcatatcattatttttgtttattcaaaacttcgaattttgacttcagcattgcaagctcagcatgggggtgagatcagagtcatgaggtgaaattccgatctttgaggtgatacccatttggtttctgaccctgaaattgagcttggatggggaaagtttggattttgatggtgtttgtgttgggggtgtggtt

SEQ ID NO: 32339 - DNA, 153 bp, Glycine max
gcactaactgctataaaattggttatgcttccaatcgaagtaaaatacaaatcagagattctgctgataaagaggcatctgccgattattttcctgaatcatcacaatcagaaagggcatattctaccacggatggcaaggctccaccgttga

SEQ ID NO: 32340 - DNA, 452 bp, Glycine max
ctaccaattaatacaatgcaataaaatccacaagttaacgtctccgcgatgattacgccagacatttccttgaaattcaaaaacatgggagcagaacagtgcaattattgattttggcatgatttggtgcttgcatctgatctctgtgttccaaaacaatactacgatgaagagatggggcatgcaaatggttacttaactaactgtttctttctaaatacccaacaacaccaacactgcactttcagcattttaggaacaggaacccccacactccacagtttctcactcagggtgtaacaagtttcgttcgggtgtgtgtaactattgctgctgaggaaacacctctatataattttatccttttgccatttcactgtgtctctcctgttggtgagaggcagacatgcacattggaatgatggtgatgatgactcgagcattgaagacca

SEQ ID NO: 32341 - DNA, 475 bp, Glycine max
cattgaagctaattttttctctctttctattttccttctctcaatcattctctgctccttttcactctctggggtcagggccaatcatcgccaagctcatgctctgcaccctttctctccctctaaagattctccatttttctctgcttccatcacaaacactgcatcaacacactctcttgttttcttcacttttttttttttcttgcaacacgtttctctccaatttgttgcaaacccttttggttttaggtgccaaaggaccaaaacgtccttgaagcctgaagcccctcctctctctcttagggttttctcaccctttttcagaagggtgatgcaatgaggcagtcttttgatccttcatctttgggtccttccaagattccatctataaaaatacctggaaaagcagggaatggtgcatgggaggctttgtctggatctgattcctaccatgcttcgtcggatgctagcc

SEQ ID NO: 32342 - DNA, 391 bp, Glycine max
ccttggtgttgctcctttgactccccggaaccagagctgccatacgcccataaccgcttctccaacttccttaagcggttttccgacctctcttctcttctcttctcatctcatctcttatcttcaccaggcaccaccctctctccccaacttcacgtgatagttgcaaatccaaaacggtgcgtattatcaccgccgcaagagacccttttcgccggtctcattggatcctccaatttgattctgcaaagcgtctctgtgtgctctacaattacgaaacgaaacgaggctcttgatggggttccataaagtctctcgctgtttctttcaatttggtggcttaagctctgcataaagacccctttaattagaatccgattaaagagaaaga

SEQ ID NO: 32343 - DNA, 638 bp, Glycine max
ctttcgcgtccgggagttctcccaaatgggaaaggtgtcgcagacaagcagttgaaatctgagagtagacaaggggagcgtgagttccatgcagaagttgatgtcattagccgtgtgcatcacagacaccttgtttccctagttggatactgcgtctcagacagccaaaagatgcttgtctacgagtatgtggaaaatgatacactagaatttcacttgcatggaaaggacagactacctatggattggtcaacaaggatgaagattgctataggatctgcaaaaggattggcatatttgcatgaagactgtaatcccaaaatcatacaccgagacatcaaggcatctaacattcttcttgatgaaagtcttgaggctaatgtcgcagattttggacttgcaaaattttcatcagacacagacacccatgtttctacccgagtgatgggaacttttggatacatggctccagaatatgctgctagtgggaaactcactgaaaagtcagatgttttctcctttggtgttgtgcttttggagttgattactggacgaaaacctgttgataaaactcaaaccttcatagatgacagcatggttgaatgggcgaggctttactgatccagctttggaaatgg

SEQ ID NO: 32344 - DNA, 368 bp, Glycine max
  unsure (1)..(368): unsure at all n locations
gaatctncagataagaagcgaagacttgttgacattgtacaccttgcaatgctacaaagtaaaattggccgagttgatagccttgatgatgatggctttccatatgttggcgctaatctccaaagcggtgatattattattgggaagtgtgctgaatccggtgcagacaatagtgtaaagttaaagcacactgaaaggggttatgtgcaaaaggttgtgctgtcttcaaatgacgaggggaaaaattttgctgtggtttcattaagacaggttcgtagtccagttcttggagacaagttctccagtatgcatggtcaaaagggagttttgggatttctggagtctcaggaaaattttcctttcacaag

SEQ ID NO: 32345 - DNA, 293 bp, Glycine max
ctgcgtcgagacataaaggggtcaaaccttttaattgataaaaatgggatgcttaagattgcagattttggtcttgccaatttttatggtccagatcgtcaccgccctctcacaagccgggttgtgacactatggtacagagctcctgagttattgttaggcgacacagattatggagttggtgttgatctatggagtgctggatgtctcctggcagaaatgtttacaggaattccaatcatgcctggcagaaatgaggttgagcagcttcataaaattttccggctatgtgg

SEQ ID NO: 32346 - DNA, 289 bp, Glycine max
ccctcgagccgaatcggctcgagcagagattgggggaagtggaagtgcagggcataagcagcatcgatggaggatgtaacagagaggttctcctgctccaagcttctcgttccaaaaggagaacccattttcgtgaaggccacttggtttcccactcacttccatctcgccgtcaccgacggcatcaccgcctggcactgccacccatcggaggaggaggtgaagcagcgtgctgctcagtgggaccttccggtttcagagtacctgaacttgtctgagcgctatttgg

SEQ ID NO: 32347 - DNA, 250 bp, Glycine max
tgtcaactttgttcgctccgtcagcatattcttccagggtttggggcttattgtgatggggcttcatgctttggacaccgtcactcatacccaaaggttgttacatgaacgacgaggatggtcacatggtcgttagatgctcttctcacgaggcacttcaccgcgctatttcacttgtcaacatcgaattcagttggttcattatcggtgtgaccgtttttgcggttcttggaacgtggttgtgggaaaa

SEQ ID NO: 32348 - DNA, 273 bp, Glycine max
ctttctgcgagacactaaagatcatgagctcaaagatgttaaacttaagttctctcatcctgaaaatgattgtggaagattatggcattcaacaacattacatctcagatgttgaaaagatgaaaagctctagcaattcacgattgatcaaatacaaaattcctgaaaataataatgactccaatactggcctggtgtctcacacggacaaaaatgcgttaaccattatatgccaaaacgaagtccaaggactccaagtactgtccaaaacag

SEQ ID NO: 32349 - DNA, 605 bp, Glycine max
ggaacatggtgtatccgacatgatgttccatagatgaatcagctcttgaagcaacaacttcttctgttcatgtaccatattcatcactggtggcagataataagcaatcttctctgccagaacaagtatttaatctcactgaggtgtcccctgtgtgggcatcttccaccgagaaaacaaaggtcctggtaactggatattttcataataactatcaacaccttgcaaagtccaacctactgtgtgtctgtggtgatgtaagtgttcctgtagaaattgttcaggttggagtttaccggtgctgggtatcaccacactctcctggattggtcactctctatttgagctttgatggccataagcccatcagcaaagttgttaattttgagtatcgtactcctattttgcatgagccaactgctttaatagaagagaaatacaactgggatgagtttcgacttcagatgaggcttgctcattggctctttgcttcagacaagagccttaacatgttctcaagtagggtatcgactaatgctcttgaagaggctagaagattttccttcaaaacatcatatatctctaaaagttgggaacacttgatg

SEQ ID NO: 32350 - DNA, 265 bp, Glycine max
cgaagttcttaaaatttgctgcacagaggagagtgagaaggcaaggcaatggagatgacgagggtgaatgctaagagcaataactccaacgccaagactaatggcgtgaaagagaaagccaagaagatagtccgaattcaggtttccaaaaccaagaaacctttcttcttctacctcaatctcgctaagaaatacataaaacagggcaatgacgtcgagctctctgcattgggcatggctattccaactgttgaaatcatctcgg

SEQ ID NO: 32351 - DNA, 277 bp, Glycine max
caagtgatgaagacagtgaagattcagaaaagccatctgaacagagaccaagatctatctctggtgatgatcttggtgattccgtttctgttaataaacaaattatgaccaggaacggttgggttgatgagattcttaaaagaagagatgagaaagattctgcgagtgaagatgatgatggtgcagattctgacaatttgggaagctctggagatgccgatgaaggatcagatgaagatcttgatgagcatgagaaggtatcttgctttgaaagatt

SEQ ID NO: 32352 - DNA, 491 bp, Glycine max
aaagatttggttgatattattgttgttgttggtaatgtctggtgttttttggtatatactaatgctgttgtgtttcttgtctctcgtgaagttggaaagtgtataggtatgttactggctttcattgctttggggacacttcttttttttatgaaagactaatttttagtgtttttcttttcttaattgtattttttgattctagcaatgatgttgtttgttataaagttggaagtagtggaatgtggaggggaggatactgggattcccatatggcattcttcaattctatatttgttctttcttgactcttctttcccttttgattcgcagagaagcaatatcagccccatctccaaggctgcgaaggggaacgcaaccctcaaggtactaccaatgagaaacgggcaaacccaaatccagaaatgggttctacatctcaaggggaacggaagaggaagtggttagcaaccgatggagaggaggaaact

SEQ ID NO: 32353 - DNA, 308 bp, Glycine max
ttcgagccgaatcggctcgagagtgaattctagaaaagttcattgagaaatagaaactatcttcacactatgaagacacgtgtctgtagcattcttaacactgcaagttgtattagtcctgacaattatagctgcagagccagcagggaagggctacaattgtgacaaggcaaaaagctcagtcacaccatgcataaaatacctcactagtaaagttgagaccccttcagctgcatgttgcaatggtgtcaaggaagtgaaatcatcagcaccaaccaaagatgaaaaaattgctgcatgtcagtgcc

SEQ ID NO: 32354 - DNA, 427 bp, Glycine max
attcaagcttgggaggaagattgggagtggatcgtttggagagctttacttaggtgttaatgtgcaaagtggggaggaagtggctgtgaagctggaatctgtgaagaccaagcacccacagcttcactatgaatcaaaactatatatgcttcttcaagggggaactggtataccccatctaaaatggttcggagttgagggtgactacaatgtcatggttattgatctccttgggccaagtcttgaagacttgtttaactattgcaatacagaattatccctgaaaacagttctgatgctggcagatcagctagtaagtatgactttcatctcaagagaactacactttaaacagacaattgatgttcacatctataatatggctcgccaagatgatcagagttgaatacatgcactcccggggttt

SEQ ID NO: 32355 - DNA, 282 bp, Glycine max
tctcaagccgaatcggctcgagggcagaatgcgtgacagacttggctcaggctgccgcgtgccgaaacagcgcggcggcaacacacttaaaagtgatttccatctgtacaatttttgttaccagcgtgatgggcgtgtcaacacccgtcatgctggcacgatattttcaaggaaaatctctgtatgatattgccttcttattgatcaaatgctttgctgctggtgtaattcttgccacctcattggtccacgtgttacctgacgccttcgccgaactctctg

SEQ ID NO: 32356 - DNA, 669 bp, Glycine max
gagaactccatatcttagcaaaaaaatgaagtcctttgcttttttcgtagtcttttctcttctggttgtcaacctcagctatgcaagaaaagacatgggagactattggaagaatatgatgaatggccaacctatgcctgaagcaatcaaagacctccttgttcaagatccacaagtatcagatgcactgaaggatcattttattagggactttgatataaagcctaacaccatattatatcacacacatgttgtgccccacaagcagaagctgaagcagaatattcagcaggccatggccaagaaattggaaccagagtttcaaggaactgaaagacatggttgaacaaactatcaaaaattattgaagctcaaatcaaatcatttgctcgtgattagagatggaagttacacatatatctctagatagtatatgatccataaagatcacggtctttagtttatgtagagctatttgtttctaagcctctctttttctgctgaacacttgaaccctttatttatagatgtatcttctatatggttatccctttgttatattaggtgcatatatattatctttgagtcctgcagaatttttatgatcaataggcatgatgcagattgccaggattactcttcataaattcttattcaacttttgctccc

SEQ ID NO: 32357 - DNA, 586 bp, Glycine max
tcaacttatacgggacctgaagaatcttttgacctgaatgatgtgattgagaagaacagccttgatgcattggttcagaatgagagtgaagttatcccttctcctgaaaaacactctgtctctttgtttgagtgccgtgcagatttttctggaggtgatggaaaagtccatgatcaatccactcctacaactatagatcatgaagttgtaggtgaatctcatggacctgatgccacaggattatcattctcatcccctggccatacaaattcagattcatctagtgtcagatatcatcaaactgatgtttctggagcattgacttcaagtgttcaagggagtgagcccatatatgaaggagaggaatgtgtattggatacaagaactggaaattctgaggatcgtgaacctgtttatgaaggcgaggtggtacttgcagaacaggctgacagaagcaccttagttgctactgatctaagagctaaagatgaacttactccagaacaaggtgaattgatcaagagcttgttgaggaataatgccagccagttgacattttatgggctattctgtttacaagatgggc

SEQ ID NO: 32358 - DNA, 511 bp, Glycine max
gtccaccttgtgacctttattctctccatatgcgttttgcatattgttttcatttttctcttttgatcatttcttttgggttggaaggaggttctgtttttatttttagtttgggcggtagatacagacaaaagttattgaatatagctctatagtaaactgttgttaatttaggcagtgttggaatgggaccagtgtttcgtttctgagctataatgcatgaaggttttgtgatgttatgaccatatttatatcttgtaatgcatgccagttgcatctaccaatagggccattggggtgtctcatataatttgcagcaatattggaagtttcattttctgggctagtttatcgtgggtttataattctattattgtggaatggtttgaaatatttcatatactttcatcaacaagaaaacaagttttttatctaatatcgctttacctttcttcataattttcatcctacgatgtctgtttcctctctctctctttctgttttgtatata

SEQ ID NO: 32359 - DNA, 248 bp, Glycine max
gctgcttgtttttccatacgatgttggtttcttttagtacgtgataactgagggtgatggcaggacaagttactgatttcctgagcatatttatcttcatggtggttttgtaaaaatagtaagctaatatagcttcttaaattttgtcttcacgttggctactaatataggctgcttgtttttccatacgatgttggtttcttttagtactaaatattccctaagtgggactaatattattttttgtt

SEQ ID NO: 32360 - DNA, 251 bp, Glycine max
ctttcaaatcccttccaacccccaatctgatctcctcaccacaaaacatatatacacaaagagtatagaaaacctccaattaatcccatggcttctttacaaaccacatctatattctcctcttcatccttttcttcttctctaagaaaagtcaacgcttctatccatgtccctaaccctccacgagtgacttattcggttccaaaagcaccaacaagaaagttgcaggttgaggaattaattaatggatc

SEQ ID NO: 32361 - DNA, 267 bp, Glycine max
tgcagctatagccatgatggcttcttccctttgagagatttcaccacacaaaaattagtgtagagagacttgttagagattatcatcatagtaaatttcccagatagcaaaattaatggaggttcaatctcctgcagcaaaacgtcactatgacatcaccatgtcaagaagaacaaggaaacaacaacaacaacaacaacaacaatttccagtgcaaggcaatgagaaaaccaaatcagaaatggatgatgaagcaacaacaccaaa

SEQ ID NO: 32362 - DNA, 434 bp, Glycine max
gttatatattgtgattaacaacgatagggctgagattttagttcttagatcaaaatgatgacgttaaagaattcacatgttcaccaaataagcgtcctcaatagtgcatcatctttccctctatatatatgtgggaaagatactcgcaatagccatagaattagttggtttttaaatcactctaaactctctttgcctagtacttggagagagagtaagtttcacatagggccgtgtgtgctcgtggcatgaaagttgtgatggcaaccacaaccaaaaacgccaacaccatcaccacatctcaaagtgtgaaggcccttgtgactgtgaagcaaagtgggggtgggattataagaactcttgtcaatggaggtcttgatgggatcagagaaatgcttgggaaaactcttgttttggagcttgtgagcgatgag

SEQ ID NO: 32363 - DNA, 458 bp, Glycine max
gtttttattcactggcaaaggaaaaagcaaataatgtgaccgcactctctgccgatgcatccacaaacctgagaagcgtgcttcccaattcccatacaatacaattcatcttcgcttggggattgacacccctgattctccttttctgataatcaaccaggtcatggctgccatgaagataattgcaatatgtcagtcgggaggcaagtttgtgactgggaaagatggttctttgtcatataaaggtggtgatgctcatgctatagacattgatgatctaatgaagtttaatgagttcaaggaagaagtggcagaaatgtttagtattagagctgatagcatatctatcaagtattttcttcccgggaataagaagattcttattactatttctaatgacaaggatctacaacgaatgatcaaatttcatggaagttattctactgttgatatctata

SEQ ID NO: 32364 - DNA, 311 bp, Glycine max
atcgagccgaatcggctcgaggtgcctgcatgtgatttaggggatgaatagcaagaaacccagccaaggtttcttaacctagcaactcctaaacctaatattgctcaaaacctaaagcaggcaaagagaggtcatggctattttcaacggtcacaatcatttggctttaggttttggcatgctaggtaacgtcatttcattcatggtgtacttggcacccctgccaacattttaccgaatatacaaaaagaaatccacagaaggtttccaatcactgccttacctggtggcactcttcagttccatgcttt

SEQ ID NO: 32365 - DNA, 480 bp, Glycine max
tgagtcagtcatccttgctaaatttattgaagccgtgcagagctgtcccgatccaagctcccaagctgctctgaagctcgtctgtgatctttatgctctggatagaatatggaatgacattggaacctaccgaaatgttgactatgtggctcccaacaaagccaaggcaatccacaagctcgcggagtatcttagtttccaagtgaggaatattgcaagggaacttgttgatgcatttgatcttccggatcacgttacacgggcccccattgccaagcggtcaggggcctactcgcagtacacacaatatgtgggattttaaaaaaaggaacgcaaagaagattgatgtatttgcgggaattaacatgagaaaatattttcttggctcattgttgaaatttatatgctagtggttgctcctgaccaagaaactactacacacgaccagaaccataaatgaatgaaatgaagtttcagtcg

SEQ ID NO: 32366 - DNA, 256 bp, Glycine max
ggatacaccaaccccttacaagggataggaagatatgcacggactgttcatcagttgggttgtcaaaatgtagcctgtaaaaatgacaagctgtttggacctgctataaatgcggcccgtcaagcagatgcaacggttttggttatgggcttggaccagtccattgaagctgaaacggtggacaggacaggcttgcttttgcctggtcgtcaaccagaccttgtttcaaaggtggcagctgcctcaaagggaccaa

SEQ ID NO: 32367 - DNA, 261 bp, Glycine max
ctcgagccgctggtatagcattttgtgtgttccctcatcactccctcacaccttatcctatacgcattatcactttctccaaatggcgaacgaccaagaccagcaagactctccccaacaaaatgcccctttctccgattccgactccgactccgactccgactacgactccgactactcctacgacgaggcggaggacgaggccttccgccgcgcctttggccaacgcgacgatggtgacgactcgtcatcgccggagaa

SEQ ID NO: 32368 - DNA, 184 bp, Glycine max
cttgcatatattgttggtgaagtaaatcacagcaagaaaatctgttggctataccataagttgagagaagataatgcgccatatcccttatttgtttattttctgagctgatgtatactcaaagaaatcttttgacgagtgtttatggaatctccaaaatccagaaaaaaaaaaaagggcggcc

SEQ ID NO: 32369 - DNA, 238 bp, Glycine max
tatacactccatgtcccttaaatgtgcaattgacttaagcataccagacatcatacacaagtatggccaacccatgccactctcacaactcattgcttcactaccaatccacccatccaagacttgctacatccatcgcttgatgcgactctttactcattccggtttcttctctcggcacgatttggtcgaaaacgaacaagaagtgatcacgtatgagctaactgatgcatctaga

SEQ ID NO: 32370 - DNA, 262 bp, Glycine max
tccgagctcttccttctctttctctttgctttaccaaaacgcagatctggttacaccttctcaaccgcgaggccatgattaacgcggtggatcatctccgccgtttttttccaacgatcttgtttccttccccgacgacatccgcaacacgcaaaacccagtcgcgacccttcaactccgcgctggtcaccgccgccgtggtgccatcggtggtcgtgggatacggtaaagggatgattaagaaaaccaaaaggatgatatt

SEQ ID NO: 32371 - DNA, 271 bp, Glycine max
cctaaattactgtgtttttcctccctattcaagtttgagagcgaagttatatagatttgcttattcactagagagaaagatggaaagtagtgaatatcatactctacacattttcttcttccccttctttgctcatggtcatgtgataccaacccttgacatggccagattatttgctggaaagggtgtgaaggccactatagtcaccacacccctcaatgcacttttcatctccaaagccattggaaaatccaaaactaagcacaacaga

SEQ ID NO: 32372 - DNA, 313 bp, Glycine max
ccaatctgaacagatatggaagttgaaatctaatgggactctagttaatggtcattctggcatgtgtgcaacagtagaacatgtcctagctgaaggttatcctaatcggattcgatcttggattgcaactggaagaaaaggggagacctatgttgcatttttcaatctgagtaacgagaaaacaacaatatctgcaagcataatagacttggctatagtgcatccaggtagaagaaagtttatactttgttctggaaatgaaatgtggagtggaagaaccatacgaacaaataatatggtctcagcagaagta

SEQ ID NO: 32373 - DNA, 291 bp, Glycine max
ctcgagccggatcctttttcaactggttttacttttctatcaacataggtgcccttgttctcccgcacttttattgtttggattcaagaaaatgctggctggggtcttggatttggcattcctgctttatttatggcattagctattggaagtttctttttaggcactcccctttacaggtttcaaaaacctgggggaagccctattacgagaatgtgccaggttgtggtagcatctgtctggaagcgaaatctggttgtccctgaggacagtaatctcctatatgagaca

SEQ ID NO: 32374 - DNA, 262 bp, Glycine max
cttggtttgccatcaactctattaactcagcagttgttgaagttagcggggttacaccactatgattggtctaaagaagtgaacgctggtgttaaggatatgcaggaaactaataacttaatttggaagcactactacagcaactataaacaaaaggagcttgaccatagtgaagaccataacagatatttggaagctttgaggcctagcagcctttccttgttgaatcatctccgcatctatatccctgagctctttccag

SEQ ID NO: 32375 - DNA, 282 bp, Glycine max
cttacttctatccttagtgttggttctgatctcccttttagtgtcacatctccttattctagcaaggtaaggatacttgcaaaagggacttcgaatagttaatctccttagtaagagtcttaattgtatgcgtggtactggattatgataaattacctttcgtcttctaatgtattccttataacacgagtatcgtttactgcgttggtaactaccttcaagtgactttggagaacatggtgaggtccatgagggtatgtagagttgtcgggtcctatacaa

SEQ ID NO: 32376 - DNA, 272 bp, Glycine max
ctctgatcttcattcattttcaagtttcatttttttttatatagcgaaaagtttaagtgagttgagtgaacgctcacgaatttcaagtgtttcatatttgacatcatggcaagaggtggaaaactaacgaagctaaagtcagtgctgaagaaatggaactcattcggcaacaacagcaagcatagccgccaccacagcatcagcgccgtcgcagacgacgaatcctcctccagatcagacctccacgccgtctacgtcggcaagtcccgccg

SEQ ID NO: 32377 - DNA, 286 bp, Glycine max
caagcccccatcaagatttcatcatcctcttcttccatgaaacaattcaattgctctaagaaaccaaaactgatttaaccttaatttcccaacctacacagttcactccctctctctctgtctttctttctttctctatgttctctcaatggtgccgccaccagagaacatggcaacaccaaaagaccaagatgccgcacaaggccgaaaaatcaccaccacaacaacaaggccagcgccggaacaaggcgtaaagtgcccgcgatgcgactcatccaacacaaag

SEQ ID NO: 32378 - DNA, 286 bp, Glycine max
attactttctatgatgttctcttctcaaacagagtaacctctccaatggccgatccatcaaagcaatttataaccaagtctttctctaccctataatgaagacagatctatgccactacaccagcacctcttcttagaagagtctagtatggcacatcgttacccaaaaccccttctagacacgctctactgcttagacgctcacattcattgggaggtaagaagagcatgtagactataatgagcacaggcgcacatcaaccatcggcactaattcctccaatgt

SEQ ID NO: 32379 - DNA, 644 bp, Glycine max
  unsure (1)..(644): unsure at all n locations
cttgaggaaagtcgtcagttaatgcgattgccaccacgtcagtcgacagctgaagctgatcttatggtcccatttcagctggctgcattaaaaactattggtgaagaagacaaatatttctctaaagtgtccttgcggatgccatcttttggaatcacagttaaaccttccctattagatttaccaaagccaacctcttctgtagatggtagctctggtgcttcactttcaaatgctttgtcagaaatgtcagtagatggttgggatggtattgctcttgagtattctgttgattggcctttgcatttgttctttactcaagaagtcctctctaagtacctaagaatattccaatacttactacggctcanacgaacacaaatggagttggagaaattatgggcatctgtaatgcaccaatatcatagtgattttcccaacaccgaaatgatcaagaaaagtgctcagaagcacagcagaaacgacagcggtttcgaccgatgtggcgtgttagagaacatatggcattcttggtcagaaatctccaattttatattcaggttgatgtgatagagtctcaatggaatattttgcaatctcatattcaagagtctcatgattttacagaacttgtgggctttcat

SEQ ID NO: 32380 - DNA, 331 bp, Glycine max
tagtacagtggaattcggctcagctgagcgattcggctgaggccatcatagacacaagcatgagcatgaagctgatgatgctagggacattgagcttccacatgtggaccatggctatgtaaagaataggtcattgccactttctaccatcatagacatactcaagcagaaaactgggaaaaatgatatagatgttgggagattgagactctcgctttatgacatatctggggaagatgctagccctaaagtgaagaagttcatgaagggtatcttgaatagactccaacaaggggatggtggaagtggaatacaaggtggaatcttgggg

SEQ ID NO: 32381 - DNA, 293 bp, Glycine max
ctatgaagaagtttgtgcaggtactatttagtctttggttggtccttctgtttggtttgctagatggtaaacctccccacaccagtaatcgattaataatggacgcgagtgctggtcagatgttcccatctactccatactaccttatgccaaggcatcatgaattaggtggtggtggcatcaaactcatcaagactggaaactcaacttacccaaatactattttgcaatattttccaaacgacaactttggcctcccaattcatttgtacatatctgtaataagcctcctt

SEQ ID NO: 32382 - DNA, 196 bp, Glycine max
ttcagactacagctaccaacagcagccgcaacaacattcctatggctacgacccttctcaggtcccaatccaaccctacgatcaatcctatgctgcgtaccaacaatactacgcttacaatccccaatacgcgtattaccccatcgcacaccaaacccagtttcagttccaacccgaaaccgctccgcttcaccct

SEQ ID NO: 32383 - DNA, 352 bp, Glycine max
tactcgagcgaatcggctcgaggaagggggctctagatttcagtctggtattcataagatggatttctgggatcgactatgcaagactcttggagtcagaaaagtcagcgtgatggatgtttcaaagaaatatgggatagagtatcgcttgcttcatgccattatgaagggacatccatggtatggtgactggggttataaatttggctctggcagctactgtcttacacatgaatcatacaattctgctgttgaaagcctatccaatctacccttgtccaccttttcccagggaaagatgcctgactctcgtgtgcaggatatgatcaaatattaccaatctttgtcagaa

SEQ ID NO: 32384 - DNA, 405 bp, Glycine max
ctcaattagcaccaaaacaattcatgactgaatcacaaagtaaccaggaccacgagcaagtggtggtgatctcacagaaaaagctaaagaggagaagagtgtgtgtgatggtcacaggagcagtgctgttactgctcattgtgctagtcatagtggcaattatcttggcctttaccttgttcaagaccaaagaaccaagaactcagcttgtgtctgccactttagaaggtatagcacctcgtctcacacttgctgccattgacctacaaatcaatgtcacacttgacctcaaggttcgggttgaaaacagaaatcgtgctagtttgaagcatgaagggggaaagagtgtgttgctgtataaaggaatagaggttggagatgcttatataaaccctggtcttattc

SEQ ID NO: 32385 - DNA, 275 bp, Glycine max
ctcgagccgaagaaagagtggtttggttcgaaaaacgaggcacccatttacattgtgtaggctttgttgttgttgttgttgttgttctgctccgattcaatgtacaaccaaccaagaactcaactcaaacccacaactctctcttcccacttcaccccaaaatgccctctccttcagaatatccttctccttccatcctggaagcccgccaagcccaccatctcggcctccctccctccggggcccacctccggcccggcccaaaccctaatctc

SEQ ID NO: 32386 - DNA, 235 bp, Glycine max
atggactacacctacgacaccaagcatcgcacaatggaacctcatgggataaggggtgtaatggacttggagcatcaaattcactacctggaaactgaggcttatagttctattttgaaggctttcattgctcaatctgatcttcttacttggggcaaagaggggcttatgactgagctgcgaaaggaactaaatgttacagatattgaacatggagaaatctacggaaaataat

SEQ ID NO: 32387 - DNA, 262 bp, Glycine max
cactcacatagagtgagagcttcacaattctttattgtcaacagtgtttggttgtaatcttgagccttgaagtcagcacagacttggtccaagtctgaaatcaagcatggcatggctgaggttgaaatgggattctggccaaatctttggaagaggtccatgaagtctgaaccttttaagcttagaagttctaagatggagagacttcaactgggggcaatctaatatggttaacttgtgaagctttgattcagactcaatg

SEQ ID NO: 32388 - DNA, 417 bp, Glycine max
cggctcgagttatgtaggaccatttcaattcaggttgcagaatgagggcaatacgccccggaacattttggaagagattgtgtggaataaggacacagaagtctcacagcttaaagaaagaaaaccccttggcgtgctgaagaaagctcttgaaaatgcacctcctgctagggattttattggtgctctaaaggcagccaacgaacgaactggacttccagggttgattgctgaagtgaagaaggcatcaccaagtagaggtatcttgagagaagactttgacccaagttagcctatacaattctatttcattttaggactgttagggggtatgaggggggattgtgtgttggtgaatagaatgtagaagctgttgatgttggaggttgtttggagtgaagatgttgtcgttgttca

SEQ ID NO: 32389 - DNA, 427 bp, Glycine max
tcatcctctctctccctctctcttcgattttgtgaatcccagaagaaacctacacattcataaatcataacatatcttattcttaaaccacaatcattttttcatagggtaacgtttggtgtttttgagcacacgcttttgaaaaccaatgaagatggttctgtctgggtcctctgtgctgctgcacattgttctgctctcaagactctgttttgctggcgacccaactgttttcactgaacttcgtgtaccctacaccactgtttcacctctgggtgttcctcaacaggtcatagctatcaacaagaagtttccaggacctgtcatcaatgttacaaccaataaccatgtaattgtgaatgtgtacaatgaattggatgaaggccttctcctttcatggtcgggggttcaaatgcggcgtaactcg

SEQ ID NO: 32390 - DNA, 286 bp, Glycine max
agctcactgaacttcaagatggattgccaacatttcctgatgaggaggcctttgcatgcattgagagggaactaggactatctattgactctatcttctctactatatctccaacggctgtagcagcagccagtttgggtcaagtttataaagcccggttgaagtactctgggaaacttgttgctgttaaggtgcaacgccctgatattgaagaagctataggaatggacttctacctaattagaggtttagggtctctcataaatacatatgtggactttatcac

SEQ ID NO: 32391 - DNA, 638 bp, Glycine max
  unsure (1)..(638): unsure at all n locations
gcagggtcactctgtcagcagccttatgaggtgtggcaaaatatgaaggattgtttgcaaagtcaatccattctgctggagtctagtagttctgatttgctttttcgtcttcaacaaagtttagatatattggaggtaagttcaaaatcaacgaaaaggtgtgcttcgtggatctggggctatttcctgaagaccaaaggatccctgttgctgcccttattgatatgtgggcagaactgcataaccttgatgaaaatggtaggaatgcaatgaccatcatccatgatttaaccatcaggaatttgattaatgtcatagtcacaaggaaagtagcaaaggatgcagacatgtactacaataaccactttgttatgctgcatgatctncttagagagctatcaatctgtcaaagcaaagagaaaccatttgaacagagggaaagactgattattgacttaaatggagataatcgtcctgaatggtggataggacaggatgagcaaggagtcattggcccgatgtcctcattcttcctcagaatgttgtatagacagaaacagcctagagttgctgcacgcatattgtctatntcaactgatganacatttacttcaagattgtgtgacatgctacctgat

SEQ ID NO: 32392 - DNA, 266 bp, Glycine max
gtctgctcgcgcgcgcgatctccaacccagacccatcgcgcggcagccccaaacaccaccaccaaaccagatcagatccgcaatgcctccgaccagccaccgcgcacgcgatccccgttgctttcaatgttggtgtttggctcaaatctgaacttgtgggtgctgtttgggagggttaagatggtggtaatggagttggtgtggtaggtcaagggtggggttggaccgccggcgttgggggcctgggtggtgcgctgctgagtttg

SEQ ID NO: 32393 - DNA, 259 bp, Glycine max
ggaaaaactaaggttgcaatcttgttgctttgggtcttgtgtatcaaattgcagttgaatgttgaagcaagaacatcatcagctttagaaacagaaatcgaagccaaattgaagcaactcaacaagcctgccgtgaaaaccattaagagtgaagatggagatattattgattgcgtcaacatctacgatcaacctgcttttgatcatccagccttaaaaaaccacactattaagatgatgcccgattttttgctagaat

SEQ ID NO: 32394 - DNA, 349 bp, Glycine max
caacacatcgaatctcaatttcctcccattctcaaacgctacaatttccattaaaagtcagcacacacttaattatctcattagctatttcaatggacatttgatcatcattactccaatgatcgttaccacgccagtaaactaaaaccttcgttccagtcatgctgagtcgatcccatagattatgactctaattaaatttctccaacaacaaaactaaaaaaaaaaaaaagcagaacaaaattggcaatgaccataaaacaggaaggaaaagaaaaagaaattgatgagaggggaataatattcccaaaattgagcgaaagagttagttggggtagatgcccccttt

SEQ ID NO: 32395 - DNA, 461 bp, Glycine max
cccacgcgtccgggaactcgcagccacttctccctttcttctgcgctccatcagtctcagccacgctccttctcttatgttgcagacggggagaggtttgacagttgcatccaccccactgccgttgttcatcccaatgccgtcattggccagggtgtttcgattggtcctttttgttctgttagctcctctgcaaagctggggaatggttgtcaactacatcctggaagccatgtttttggaagtacagagttaggggacaattgcatgttgatgacgtgagttctgagttcagacttaagatcactgttttctcataaggttctgctctgctgaattgtatttgttttgaaaagtggtgctgctgttggtgatgattatcctggatgtactgtcattggaagcaataacacgataggatatcatgctgtgattggtgtcaaatgtcaagacatgaaata

SEQ ID NO: 32396 - DNA, 668 bp, Glycine max
tcgattctctcatcttatctctcttctccgttgaatttccaacccgtgcttgctttgcctagattctctttcttcttccacacatactcacatttctttttacccttttataatgggttttctgataatgctgcaagcttgtgtctttcacaattgacaaaagagtggtagtagcagcctggcaccaccccatctgttagaaaacttggttgctcaagtaaagaatcattttcattcactatatcccccaaaggaaacagctttctttgatttcactcctagtttaaaaacctttctatttttgcttctttttctttcactatatgtgcatggaagaggcaaatttgtgaagtggggtgtttgatatttgaagattgaggtgttgaagagtggtgagttaaggtttcaatggacaccaaagggagattagttgctgggtctcataacaggaatgagtttgttcttatcaatgctgatgaaactgcaagagtagctgtcacagaattaagtggtcaaatttgtcagatctgtggggatgagctggaagttactgtgaatggggagccatttgttgcttgcaatgaatgtgcattccctgtgtgcagaccttgttatgagtatgaaagaagagatggcaaccaagtttgtcctcagtgtaaaaccagata

SEQ ID NO: 32397 - DNA, 269 bp, Glycine max
cacatgttcttctcttatctctatctcttctgctttggaaccaatacacaaacacaataacaacatatcaagctttaagtgcaagtaaacaaacacaacacaaccaaggttgacaagaattgaaagttgaatcctgtgtcgttgctggtgcagatatggactcaaactcaaaggctgtgtgcttcataacccaccaagccattttcaacgcggttcgatgtggggaccttgaagggctgaaggagcagctgaagaacaagggtgaagag

SEQ ID NO: 32398 - DNA, 364 bp, Glycine max
gggtagaaatgttcctaaggcaggccattggtcagttcaatcttttcactggcctagaagcacctgaagaatttatgcgggaaattgttttatccaaattttgaaggcgccgctttcataaattgatcctacaacttgaaggaggctgcatgcctgcacctatcaagaaattcttgtatcacattgcataacatttttctttaaaaaaaatcccttatttttagttgggacgacaactataatgcaacataataaattgaaataataggcaaaatagcaaaagttgttgtgggcgcagctgaaagacatggttcaacttaatttgtggttttaggaataaagatgttgtgattctctgaagaag

SEQ ID NO: 32399 - DNA, 383 bp, Glycine max
ctctttgctattatcaaattcaagttctcattatcaaggtgttttgatctgttgagggggtttaatactgaaaatgggacaagtgttaggttgcgtgcaagtggatcagtcaagtttggccatcaaggaggttttcgggaagtacgatgatgttctcgaacctggttgccactgtgttccatggtgtttcggcagtcgtgtggctggtgctctttctttgcgtgtcaaacagctagatgttcgctgtgaaaccaagactaaggacaatgtctttgtgactgtggttgcttctatccaatatcgagcattggcagaaaaggcaggggatgcttactacaaactcagcaataccagatcacagattcaagcctatgtctttgatg

SEQ ID NO: 32400 - DNA, 259 bp, Glycine max
cttgattcgataaagaacacctattatggaaggtgtgctgagcagagatgtcaacgaattatggttgctcatatgtgattgtcacattattgctgggggtgggtgatgacgacattgaagacttcgttcacaatggggttaagggtcagtttcccatttgactgcaactatataacactcgtaacaatttcacaaagttcataaaactttactataatcagtagtggagagatggagaaaaaccatagaagattgacct

SEQ ID NO: 32401 - DNA, 375 bp, Glycine max
caggtgacatttggatttaggaattaggacatggccacacccattctatataacgttccctcccttggccaccaccctcgctcacatttattatttccctctttgccccaaatgtcttcaaccttctcacccctgctcaatctcattgcagtcttcctcctcctcttcttggtccggcacacgtgcgaggcacgtgacccgttcgcgtgcgacccgaaaaatggcgccacggagaacatgccgttttgcaatgcttcactggcgataccagagagggtgaaggatctggttggaaggttgacgctgcaagagaaggttaggcttctggtgaacaatgccgcggcggttccaaggcttgggatgaaagggtactag

SEQ ID NO: 32402 - DNA, 569 bp, Glycine max
aaagctgccgtcgccggtcgtcgccgacactgttgcttcactctgttcctcttcgtgcgaagtactaggatcagatggctttgcgaggggtttggcaacttaacaagctgattgtcagttattgcaactggggcggaagtagcagaggtataagggcatttatggagtctcatttgccagcatttaaggagaagaatcctcaattagaggtggttactgaactcatccgtggtcagcatccacatctgaagggttattacaagaacaagaatcagcgagtgatatctgtgaagaatatggatccagaagacatacttttgcatgcaaccaggctaagaaatgcattgggaaggaaggtagtgaaattgaggacaagacatgtaaccaaacgccctagtgtgcaaggtacttggacaactcctgtggagtattaagatagaaaaccaggtgtatgagaaagttccttttcaaatggtgaattaaccaatttgtgaacaagggggggtaagttttcatgtatctggcccaatttccagtttttcaataattccctttttttttggggggtt

SEQ ID NO: 32403 - DNA, 474 bp, Glycine max
  unsure (1)..(474): unsure at all n locations
accaggcgaagtggaagtgagaagaaaaagacatggcagtgtcagcagcaaagttcgatgtggtaatcctaggagcctcaggtttcaccggcaagcaagtcctcaaagaagccctcaaattcctcaattccaaccatttcacctccctcgccatagcgggccgcgacccctccaagctggcccaaaccctcaaatgggccgctcagcccaacccgccgccccaaatccccatcctcgccgccgacaccgccgaccctccctccctccgttccctctgcgaccagacccgcctcctcctcaactgcgtgggccccttccgccgccatggcgaacccgtcgtggcggcgtgcgtcgcgtgcggctgcgactacctcgacatcacgggcgagtcggagttcatggagcgcgtgnagcgtgagtaccacgcggaggcaacaaaaaagggttctttggtggtttcggcgtgtgggttcg

SEQ ID NO: 32404 - DNA, 1213 bp, Glycine max
ggtaaaaagcacatgcaaaaagaaagatgactctcatgcaagctttggtatttcacatagaggcagctaactataagtatagctaagttaatgcatatctgggattgatgtgctatattatgaatgaggtgcaattgcactctaacctcaaaaacttgtctctcttcaagtaggtgctggaatactaatgtatctggttataagaataaccttcatctatccaactcttccatctccaaccacaaaagtcctcaacaggatctatttacactgatcctcaccagatttagccttcaaagttagccccgcgacaaggcgatgaagcctttgagaccccggacccggtttgagtttataaatgttcccaatctcggagcatttgggtctgccggtgcaccaaccaccgagcgggaatagtccatttctcttacggagaatctttttatcaatccaatccaaggctggatcatcttgcttaaactttcttgcaaaggcagcaccactttcaaccattttgtctgtgtcgttgatgttaaggacgtgagggtgctgtttaggagggacgtcccaggcaatgtaatgcaagtcactattgacaagggttttagcccattctggcgcattgcatgcaacagtctggaagtagccttcaggggaagacagaaaattagtgtagtacatgagaagggtccttggcagattgtcccatccccatacaatatattcaacagagtcgtgtgataataccgtccatgctgagccagtgaataatttaaatgctgttggcagaggtctctttggattgacccacaatacatcagatttggttgacatgtaaagcccagggtctgcgattaacggcattgctcgttaatcaatcttccacccgaactgacatgtgtgctcaatgaaattaaggcctctatctaaatctgaaatagtatatagtagatcatcctgtgtcacaagagcatagtctatagcactaagattaatagaccagtcccagtctttacttctcgtgagcagaatggcgcaagcatcaagagtattagcaaccatcgttggtcctcggtaagtcaccatgttagccattgtgattacataaacgttcccaacctcagcgtatacatgttgtctatcaattctatgtgcaatctccatcctttcctctagcggtgattcaaggtccatatgaacaacataatggttt

SEQ ID NO: 32405 - DNA, 676 bp, Glycine max
  unsure (1)..(676): unsure at all n locations
attcaattccagaggccaagtgctaaggaacttctcaaggaccgttttattcggaatgctaggaagagttcaaagctttcagaaagaataagggagcgtccaaagtaccaaataacggaagatgaggagacacccagaaatggtccaagtgggatgggggaggcatcaggtactgtaaaggtggcaagagattcaagaggtgaagaaaataatcgacccagggatcagggtaaaaccctgaaaagtgctggatgggacttcagcattggtggatcacagggtactggaaccttccgtaatgtttctcgaccaccgcagtttagagataagaaaactgaagcttcacataatcagctgacccaacgaaaagctccagagaggggctatcaaggggtatctgtcaatagaagtgcacttaatgagtcacttgaaagttcctttggaagagatcttagagttccccaccatgatgattaggatngataatcaccttgaagatgatgaattatctgggaatggatcaggaactgttgttattcgatctccaaaaggatcaaggtcatctgcgttccgtgaccagagctctcagtctagcagcagctatgcttcttttgaagatgcttcttcaagtggaactgttgttttacgtggccagcatgatgagtctgattctcca

SEQ ID NO: 32406 - DNA, 362 bp, Glycine max
acgagaccagttgaagtgtgcgaagacatactcccttagtgaagtgaatccttgaatcttttgcaataaatcttctgaagaacatacattgctttttgcaatgtttgatgtagttttgtggaacaagatacatttatcttgtttcctaatgttattcttccatagtcatttagccacggagaatgtaatttgctaatttaatggagaactttttcatggatacatttgtattacgttttgctgtgtaagactcgtgtaatgttattgtcattttgttatggcataaatatgtttttgacattgttcttcaattgacagtttttttttttgataaaaaaaaaaaaaaaaaaaaaaggggggcc

SEQ ID NO: 32407 - DNA, 521 bp, Glycine max
ggtttcaccagcagccaaccgagtcagggaaggaaggaagcaactgtttttggtgtctccctccacactttcactggtgctccgaccaacacgactccgtctaacctctctccttcttcttcaatcaatttctcacacagttcccaaaaacccaaacttcgcttttccccctcaccactctcgatccaaatccccgatcccgatcccaccaatcaccgaaactaaaaccaaaatggagcaattgaagacgatcggtcgcgaactcgcgatgggatcgcagggcgggtttgggcaatcgaaggaatttctcgagctcgtgaagtccatcggcgaatcacgctcaaaggccgaggaggaccgcatcgtgctgcgcgagatcgaaaccctaaaacgccgcatcgctgagcctgacataccaaagcgcaagatgaaggagtacatcatccgcctcctctacgtggagatgctcggccacgacgcatcgttcggtcacattcacgccgccaagatgacgcacgacg

SEQ ID NO: 32408 - DNA, 464 bp, Glycine max
ttttctgatgcaaattctctctatgagttggacaaagcaacacaagaggtcacaaatgctatagtagaagcacaatctcaagctcttggaggaccacttaatggagtttccatagggaaagtcttgcctgtaattaacatttcaaggtcagttgggcttccagagcttcgtaggatgccccgtcccttcatatggttgccagggcaaacaagtttaagtgggccaccacctccttctgatgcagatagtgcaaaaagaatgttcattgactacttgaacagggaactgggaacatcctgaaagatatgatagtcttgcaattcatcttatatgtgtgctaaaagatgccatgtttgtgtgtttagatcctgagctgttttatatttacctagagcattattattgaatacactgcttttttgaattccctctttattctactatcatttaattttctcttccct

SEQ ID NO: 32409 - DNA, 276 bp, Glycine max
agatagcaaaaactcatcgcaagctcgatcattttcctatacttcattttttatatatgaagggtctcatcattttgttctcagacttgcatctttttgtgctaaaacaaaaagggtctttggtctaatttcttcgagctgagaagaagatgcacttcacaagggtttttataattttccttgatccaaaaccactgacacatacatgatatatgcttacaaacaaaattgttttttttttattaatatttttccttgcttcaagatctttttcaa

SEQ ID NO: 32410 - DNA, 834 bp, Glycine max
cggacgcgtgggatgcatcaaagaatgccgctttttaacagtactttgcttgaattattgtgagcgacttcgagaaattagagggattcctccaaacttgaaatatttctatgcacaagaatgcctatccttgacttcctcatgcagaagcatgttactcagtcaggaactgcatgaggctggaagaaccttcttctatttgccaggagccaagattccagagtggtttgatttccaaacatcggaatttccaatttctttctggtttcgtaacaaattccctgccattgctatttgtcatattatcaaacgggtggctgagttttcctcatcgagaggttggacatttagacccaacattagaaccaaggtgatcatcaatggcaatgcaaatttgtttatccctgtggtgttgggaagtgattgctcatgtctttttgatctgcggggtgaaagagtaacagataatttagatgaagcacttttagaaaatgaatggaaccatgcagaagttacatgtccaggttttacttttacttttgccccaacctttataaaaactggactacatgtattgaaacaggaaagtgacatggaggatattcgattctctgatccttgtagaaaaacaaaattggataatgatttcaatagttcaaaaccagaaaatcaaagatgggtgggcaatgatgttgccaagacacaagttgtgcagcagcaaaaacttatgggctcttttttgtcacgcatgtggcactgggcactagtgtttctcatttctttcctagtgtttctcatttcttgccgccgcaacaatcaatgattggataatgt

SEQ ID NO: 32411 - DNA, 287 bp, Glycine max
aaaatcttgaaatagtttgtaaagacttaaagaagagttaaggcaaagaaaaagatgaaaacttttgaagtattgattatgatcatggctatgttggctttcgcccaagctgatcactacaatcttccatatgtgcaaattgagtcaaacaatgagtctattaaagttagttgtactcgcaaatgtgaattgatatgcgcacctttaatagaaattcctcccgcttattttctatgtgttgacaattgcactaaaagatgccctgaaatgttctctactagtctcaa

SEQ ID NO: 32412 - DNA, 447 bp, Glycine max
  unsure (1)..(447): unsure at all n locations
gcagtctctgcacccctccctccttgtttgtatcatatcaggcagctcagaaggcaaagatagatccatgtccaccaccgcaactacaacctctgaagaagttagcagcaatgagtggaaagtcatacacatgagcgagcaagaggaggatctcattcgcaggatgtacaagctagtcggggacaagtggaatttgatagctggtcgcattcccggtcgtaaagcagaagaaatagagagattctggattatgagacacggcgatgctttttctgttaaaagaaacggaagtaaaacccaagactcgtgattttctctggtcatgtatcttttctgggcataattctgctaaatatataaaattgggttaaatatatttttggtgtctataaaatttctttttttttttggtctctgtgaattattttgtatattnttagtctcttg

SEQ ID NO: 32413 - DNA, 321 bp, Glycine max
gtcatgataatagatttctctcttcaacttggcatgctcccaaaccttaaccaaacatcgtttgacctgccaactgttacgtacagttttagctgcctcctatgatgggaggagtgtctggcggcggcgacgacgacgtcgttcaaatccagctaccgtacaagcccggcgaccctttcatcatcaccggcaattgccccgacaagacaggcctcgcttgtgatatctgcagaatcattctcgatttcggtctctgcatcgccaaaggagatgtttcaaccgatggcgtgtggtgttacattgtgttgtgggttattccat

SEQ ID NO: 32414 - DNA, 315 bp, Glycine max
  unsure (1)..(315): unsure at all n locations
tnttatcttcctctctcctctcatcacttcatatattcgcgatttctcttccaccgtgaaaccctagacccgactgcgagcgcggagccaagccatgtccctcaaccgcctccgccctctcctccctccgatccctctccgcctccgccgccgatgtggcccccgccgcctcctcccctcccgcccctcctccccccaccgccatgatctacgaccgcgctgccgaggccgtgaagtgcaagctccggctgctcgagaaccccgacccccgatttctcaagcacgggtgcccccggtcgaccctctcggaccaca

SEQ ID NO: 32415 - DNA, 366 bp, Glycine max
gcaaactccaatacccacgttccaagttctgaattttcgtttctgggtctcactcactcccttcgaatgttacccttagagcatcattttcgctatcaccctcccttaaccctcaccaaattgacacccttttcccgcgcagattctagggtttcccttccccatatcgacaactccttccatcgtttcaaccccaatccgtgtcgcttccgatgccctatttcatccaacgattcgcttaggtttggtttgagggtcggccaccgagcatcatgggtgtgtcgttccaccggagaacccgattccgcggcggattccggtgagaagaaaaccggaagcagcagcagcgatgaagacgccgattcg

SEQ ID NO: 32416 - DNA, 682 bp, Glycine max
tcagactacaggttggttacgataaagaaggacttccaataggcttgcaaataatgggtcgaccatgggcggaagctactattctgcgtgtagccgctgaagtggagaaactctgtggtgagtcgaagaaaaaacccgcgtcgtactatgatgttctgaaggctaaatgaagctaagatattcttgctggttacggtttataagtggcccgagcctttgctgttttatcatttggaaatcgctatccatttagcaaatgctgtgtgtgctttcatcctcggtgcatctcatttcttccaaaggatttatgatttgagaagttcttaggaaataaatctgcatagtaataattaaagacaaaatcaaaaattatttagaaaatcacgggcgaaggtaacttgctcgtcgtcaaatatgtagaaggagcttctttcttaagaacttcaaatataagattatgtgctattgaaacagaatgttcagcattgctcttaaagataataattttttgttatctattgaattatattttccatatttatcacatctgctgctcgttaagtaatatactgagtaatatacatcaataccatatgaccatatcattgtatgttgtaatgactgagattcttgtatccttagtagaatactttgttggacaagtatcccatataaaatattt

SEQ ID NO: 32417 - DNA, 263 bp, Glycine max
ctctggttcagctagtcagaactttggccttgctgcaggaattctatcagacaacactgcaagcccttgaagaagcaaagaatgagagattatggtttaagacaagtcctgagctttgtaagatcttctttgatattggggaatatgggcggatgagtaagatattgaaggaacttcacgagtcttgtcaaagggaagatggtacagatgatcacaagaatggaacccaacttttggaggtttatgcaatagaaattcaaatg

SEQ ID NO: 32418 - DNA, 385 bp, Glycine max
ttctcgcgtgcgcttattttagcaccaccactggggcttttagctcctctcattccaacggtggccggaaaacccatttgagcggtgctgccagccaacttttctcctttctctcacaatcaactgggaattgctccctttcaatccctctttttggtgttatggagatatctttgttaaaggtgctctctgatgcgatatcctcattttcgcatgtatcattttctgaaagaatgaagtcagaacctgtgtcatagtattaccaaaaggcacagaagatgcttcagtggttgaagccgattattgatactactgttttttctgatttagcttctaacaaattgcttagtaagctatttgaggaactcagtctagctgttgatga

SEQ ID NO: 32419 - DNA, 260 bp, Glycine max
catgcctgcatctcttctgcaatctcagttagatttgcttgagattgatgagtctgagggagtacttatagttgacgctactttgagaccccaagccattgtaaacaccattctaaacatgaaccagtttcagggatgtttcaatgttgattttgtggagcctcattgataaattgggatcattatttcaggtttcaaatatagtttgtacaaataaatggaagaatgggattatgcatgacagaaaggttgaagggaat

SEQ ID NO: 32420 - DNA, 355 bp, Glycine max
ttttcaaattttgataaagctaccctaggacctaggtttacactttctcttttcttttctgtgagagtgcagcgtcttttcttcttttcaaaattcattcccttgccttgcatgcgttttcactttttcagcgctacacctttctatccgcaatctaagagctggggaggaagtcgattacgttttgatgattattgctatgcttaattcttgtttggaggtttaactatgaaataaacgcttttctgaaaaatattatgttgagtggtttttttgtgccgtgccaaaaaatatctgtcatagggagagaggaagagaccgggggagtgtgtttaggagtaaggagggtagttta

SEQ ID NO: 32421 - DNA, 443 bp, Glycine max
ctcgagccgcgccgtcaccgacgactgcaggtacaaggtggtccacgctggcggttggcactccggcgccaatgctcgccggaatgtgacgcgaaccggcgccggcaggggtggtaagtccctgccgccgctggcttcggcccgcgacgatgagatcaatgacacgattccgactttgggatcggagactaattttaggaatgggaagtatttgtactactcgagaggtggggattactgcaagggaatgaatcattatttgtggagtttcttgtgtggattgggggaagctatgtttttgaacaggacttttgttatggatttgagtgtttgtttggcttcaacttataaccctagtaacaaggatgaggaggggacggattttaggtactaattcgttttcgagcatttgaaggagccggcttcaattgtggaggagggtg

SEQ ID NO: 32422 - DNA, 554 bp, Glycine max
ctctccgtctttctctcactcacatctcacaacacaaaacacattattacatactactaccactactcttgcagtcttgctttggtgtttaatggcgtctcagatctaacataacagtgcaagtggttcggcgttgttgtgagtttgtttttaaacgacggcgtttggttttgttagtatgcagaaaatggcgtacacgttttcgtttccggaggaggtgctggagcacgtgttctcgttcatatggagcgagagggacaggaacgcgatctcgctggtgtgcaagtcgtggtacgagatcgagaggtggtgcaggaggaaggtgttcgtggggaactgctacgcggtgagccctctgatggtggtcaagcgcttcccggaggtgagatccattgcgctcaaagggaagccgcactttgcggacttcaatttggtccccgatggctggggaggttacgtctgcccctggatcgccgtcatggctcgcgccttcccctgcctcgaagaaatcaggctcaagaggatggtcatcaccgacgagagcttggaactca

SEQ ID NO: 32423 - DNA, 262 bp, Glycine max
ccaaattggaaactggggttcctttcaattcaacgattccaattcacacagcaaacaactccgattctctttacaacctaattagaaacaacggtgccaggtgattaagttagaagcagatagaggatgggggcaatgatatctaggttctggtttttgttattccctgcaaaggagtataaaattgttgtagttgggttggataatgcgggaaagaccacaaccctttataaattgcacttgggtgaggttgtcacaacca

SEQ ID NO: 32424 - DNA, 374 bp, Glycine max
gatgaatgcctctcaaatatgaaggctttgacttgtagtagaggttctgaggttttgccatctgatgttagtccagaattgaaggtttcttccagctatgactgtgagtcttttgctggattgaactcaccagtcaaaagagaacagtttaatgatgtggacatgatggatgttgattcaactggtattgtgaatgagatttcttgtggtgctgttgaatcatcttatgtgcccatttctcaaacagacagtgatttgggggatgtagatatgggcagatcattagaagagacttcaggctgcaaggaagagcaagatgatactgatatggttagttctggtctttgttcgggtccaccaaatgacaattcctt

SEQ ID NO: 32425 - DNA, 337 bp, Glycine max
ctttctctctctctcttacttactaataagtaataactcagatctctctctctctctctctagcctctcagagcgggtcttgaccttaacgtgcacaattaaacggcctcaaggtgttgaaggaagcttagctcagtgatgaattgaaggaccaacttcaacaaagaatcgctcttcaatcattgcacagatcttcaacgatccataaaactactgttcaagcttcaagtattccttgaggctcttggttgaatttcgagcgagaattgtccctaaaagaatcttctttagtgatgtgatagttctggaaactaatggaggaaagcatcaatagagg

SEQ ID NO: 32426 - DNA, 401 bp, Glycine max
tgcgggtggccttcccttggttgattggattttggaggagttggtgcggcggcgatctagattccagggggttcgttcttccatgaatccatctcccagctcttctagtctttcttgcaccctcacatccctcaacaacctaatcactctctcaaaccatgttctctccctcacaccatcaccgccaaccctaaactccaaccttatacaatgccctttcaatccccaccacctccttccccctccctccctcttccttcaccacctacgttgcccttcctctcctcgccctctccccgatctaaacccctctccctctctcacttaccccaaaaccctgcacaattctccctccgatcaactctctttctatcttgattcactctccaacttcttctacc

SEQ ID NO: 32427 - DNA, 363 bp, Glycine max
caacctgctgttccaattgagtccataggacttcctgatggtggtgtcccaccgcaatcctcagctcaggctgtggtcatgccccagtctcagttacaagcttctcaggctcaaatttctagccaacctctagatcttagcatacttggagtaacaaattctgctgattcagggaagcctcctcaaactggtgctcaacaaattgctgtgcatcctggacaggttccccgtggagctcctgcttctgtatgtttcaagactggacttgctcaccttgagcaatataatctttcagatgcattgtcttgctttgatgaagcttttcttgccttggctaaggaacaatctcgtgaaattgatata

SEQ ID NO: 32428 - DNA, 274 bp, Glycine max
tctctctttccgatcagatcggacgccctgtgtctgaattccaatacacagcacacattttcgattcctttctttctctcaacgtttcacttcccaattttcatcaattcgaattttatttttttacactgtttccgttcccaatttttgcgctctgggaaattccttgtattagggttaaggttgttgtattcgggttcattgcgacggtgatggccatttgcgcgttgagaatttgaatttgtcgatattttttcgttccagatcgttcgtt

SEQ ID NO: 32429 - DNA, 399 bp, Glycine max
aatcttgctgggttgaagatcctaacttgagaccaagctttagtcagatcatccgcatgctcaacgcgtttctcttcacactctcaccaccgtctcctcctttgccagtaccacctgacaatgaacctgaggtggctacaacaagtaatggcaccattactgagttttctgcccgaaacagaggaaagtttggctttcttcgccaattgttttcttcgaagaggaccaaaaactaacattgagcgctgaattttttttaaaattcccttttgttgtagatgaaaagagttgccattctatggtatacagttttaggacatttatgagttaaccatctcaggtgaccaaaaggatgtcacatgttccataaaagaaaagaatgttgtttatagacttttg

SEQ ID NO: 32430 - DNA, 477 bp, Glycine max
ctagtttcttaatttatcactccgctccttccctccacctatttcctcccttgttcgctttccacccatcaaacaaaaacagagtccccaccccctcctcttaatttcattcatcacaacacactagctagtgtgtgtttgtgtatcattctcataaacacacatatagtaaatccatcacaccctactttgagttcccaccttggttttggatttaagctatggtgtaaggttactttgcgtgataaaaatttctgggtgtttacctcctagattaacttgatttcctaatcaacgcagacgtactgatataacaagaacatgtgcgaatcaaaatcagagcagatgcatgatacggaaaagcagacagaattaggtgggttattaacaagacgaggttcgactaggacaataatgtgggatgtgataggagaagcgaaatccctgtgggaggtggcattcccgacagcactcact

SEQ ID NO: 32431 - DNA, 667 bp, Glycine max
gctttccccatctggtcaacgcgttcctgcagctccggtatctactgcagttccaattaattcatttaggacacccactggtgctgcaaatggagacgtgggctcatcgcaaaagaatacccgaagtcgtggatgggtcacagaggaagatggctatagtaatgttgagatagaggaaattgatgcagatgaaggaactgggactgggaggtcaaagcgcaagtcaaataagaagactaaggcaagacagagtggtggttctgtttctgttgatgttgatccggatgcagtcgctgctgatattctcaaatcactcaatgcactggttttcgatgtacttagtcaaccagaaggtagcagggattcagttgcatatacactcatgatatatgaagtgatgcgaagaaagcttggacaaattgaagattcaaatagggcagctaactctggagcaaaacggcctgatttgaaggcaggtgcaattatgatgaataaagggattcggaccaacagcaagaaacgtattggagttgtgcctggtgttgagattggggatattttctttttcagatttgaattgtgcttagtgggcttacatgctccttctatggctggaattgattacattggcaaaaccagtcaagaagaagagcctttagctgtaagt

SEQ ID NO: 32432 - DNA, 554 bp, Glycine max
gttggattgggaaaggaagagaagagagtgtgttcggaaaccctaagcttcacgcatttggggaacctccttcctccactcgctcatgctcctcgcgtgactcgtcaacgacgataccccttttctttctttcactctcaaactcatcatcatcgatcatcgatcatcgatcatcgtcaccaccatcttcaatctcttctttcagtaccctttaaaccatcaagcagaaagctgttttcatcatggatatagatcttcggttaccttctggtgaacatgataaggaggatgaagaaacaactacaattgataacatgttggacagtgaagaaaaattgcataatggaggtatagatggcagaaatatagttgatgctggcattgaggtacatgctctaaatggtggagatttgaattcacccacagttgatattgtaatgtttaaggaagatacaaatcttgagccactttctggcatggaatttgagtctcatggagaagcttattcattttaccaagaatatgctcggtcgatgggattcaacactgcaata

SEQ ID NO: 32433 - DNA, 556 bp, Glycine max
agccaagcattgtgacatttttaggagagctgctgaagctggaggcttgcttgtggatgcaatgattaatacttcagacagctctaaggaaaatccttcttcagtccccttgatggttgttgagaacgggtgtggtagtccatgtatagacttaagacaggtcagctctgagctagctgctgctgcaaaagatgctgatctgataattttggaagggatggggagagcacttcatactaacctaaatgctcggtttaagcgtgatgctttaaagcttgcaatggtgaaaaaccagagattggctgaaaaattggttaaagggaacatatacgactgtatttgcaaatacgagcctgcaagttgaaagcttctatgaacgtgctcattgtctaattcattcgggcatatttgggggtacatgaaagaagaatcctctaggagaattgtgtataaaattttaccttgtactttttgtatctgggcacagcgaacatccatacagagcttggagaataatagagttcaaatctagcttttgaattccatgctatttgac

SEQ ID NO: 32434 - DNA, 501 bp, Glycine max
cgctaccacagttgcttgcgaatgatgcatgtttgaacagcgtggcctttagcagtatggtttgatgtgatgatgacttggtgggaagaatctaaccaaaatcgtttcctaaggtaattggaaatttggataatcgtcatctgaattagaaggacggtgctgcggatatgtgggggttctgtttgtttttctgagatcatttttgacttctgggaatatcacacgaaagtggaatgtaacctgcaaagcaacttctgttacatctccttatatttgtatctagcactctattgtgtgcgtatatatattttattctttcatagctttgctttgtttttcatttgtgtctagtttcccatatacagctacaagttccaaagacatgttattcttaacgtgatgaggccacgttatcaataacggaattaatgtttacacaaacattttattgaatcctcacaaaatccaggcatgtatctataatcaatgctattcttgtct

SEQ ID NO: 32435 - DNA, 440 bp, Glycine max
gcatttcggcattggggatacctgaagttctgggccgtcatcatatttttaggagttcatgatgctgacagcattctatgtgacagattgcatggtgttaattccagtatagttggaactgatcttgaccacatgttgataaggttctgtaacttgactgataagatttgtgttcttagttcttgttgataagctattagcagagaatgaagatgatgtaatagagacaactattagtttgtttgggagtggcgatgtgtttctaggtcctgcagttgttgtttgtctaactaggcacttaggttagaatgacctgtggctgtgggtattctgacacctgtaaaattctgacaataggaaagaaaatgatgtacaaggtatcttccttcaaacatgactaatgctattttatgtgtagttaatgaaatgcagtttgccgg

SEQ ID NO: 32436 - DNA, 732 bp, Glycine max
accatatccccttcaaaaagaagcacaatagaaaaaaagatggattatatcatatacactcttttcactgtccttatattgatatcttttattagttcgataggatttgttttcaagaccaaataccaaaccccaaagtggtggtatttacgacctggcaatattgaataccagtttgaccctggaaaacttggattggctgggatgagccatctgattactgcactcattctatatggatatttgatacccatctcgctttatgtttcaattgagtttgtgaaggtattacaggcaaccttcattaaccaagacattcaaatgtatgatgatgaatctggtactccagctgaagcacggacttcaaatttgaatgaagagttgggtcaggtagacactatcctatctgataaaactggcactttaacctgcaaccagatggactttttgaagtgctccattgctggtactgcgtatggtgttcgttccagtgaagttgaacttgctgcagcatagcagatggcttctgatcttgaggagcaggaattggatctctctaatttccccatgcgtaaggagagtaacgtgccatgggaaaatatcacagaagatgaagaaactgaactggggactgctgttacttccagggatgatggagctcgtacgcctgccataaagggatttgggtttgaagatgatcgccttatgaatggtaattggttgaaagaaccc

SEQ ID NO: 32437 - DNA, 458 bp, Glycine max
cgtgtttctaacgtcgtgttcgtatccgatcgaggacgacgtactctaccaccactactacgaggcctgcccttacttgaagttcgcgcatttcactgcgaaccaggctattttagaagccttcaacggccatgattgtgtccacgtgattgacttcaacctcatgcaggggctccagtggcccgcgctgattcaggccctggcgcttcggcccggtgggcctccgctgttgaggctcacgggaattgggcttccctcgtccgacaaccgcgacacgctccgcgaaattgggctcaggctcgctgagctggcgcggtccgtgaatgttaggttgcatttcgtggcgtggcggcgtggcgccttgaagacgtgaagccgtggatgctgcaggtgaatccgaacgaagccgtggcggttaactccatcatgcagttgcatcggcttcttgcttcggactc

SEQ ID NO: 32438 - DNA, 390 bp, Glycine max
gcctccctctctcgtctctgtggctgtgatttacagcaacagcagcattgcccatgtcgccttcattcctttccctctcttgtggcctccgcgcccttctcaattagaataactaacctctttctttctttctctctcttctcattcacacataaatctcaatgtctctctcacgaccaaagttggctcggcctcttcctctccatcatcacagttcttatggcagcctcaccatgtctttccacacattcactccctttcttggatccactcacaagcttcgcttcatttcccccattaagctcaatgctcctcgctttaattcctctgtcgtatctggctccgatcttttgaagaacaacatacccaaatcaaccaccaatctgctta

SEQ ID NO: 32439 - DNA, 274 bp, Glycine max
agttgttctgcataccgcattttccccaagacccagaaatatgggttatctgagcaaagcttccaaaaccctaaggcaatcgaattacctatcgttgttgtgcaattccaatttcaatttcaatccattaacgaacagaataacccatgaacgtttttctgtgacgcgtgcactgttgtgttcccagacacgccaaaacagcaccacgagagagaaaagcaccatagatttgagccaatatccaaaagagctcgttagaaacttctcaatcatt

SEQ ID NO: 32440 - DNA, 282 bp, Glycine max
ctttactacgtgaacctcaccggcgtcaccgtgggccgggttaaggtcccattacccatagaatatctggcgttcgacccgaataagggctccggaaccatcctagattctggcacggtcataacccggttcgtaggaccggtttacagtgcaataagggatgagtttagaaaccaagtgaagggaccgttcttcagcagaggtggtttcgacacgtgctttgtgaaaacctacgagaatttgacgcccttgatcaagcttcgcttcacgggcttggatgtg

SEQ ID NO: 32441 - DNA, 512 bp, Glycine max
cgcgtgacttcacttacatcgacgacgtcgtcaagggctgcctcggtgccctcgacacggcggagaagagcaccgacggcgtcgtagggaaaaagcgcggccccgcgcagctcagggtttacaatctcggcaacacctcgccggtgccggtggggaaactcgtttccgtgttggagacgttgctcggggtgaaggcgaagaagcacgtgatcaaaatgccgcgaaacggcgacgttccgttcacgcatgctaacgtgagcctggcgtggagggacttcgggtacaagcccaccacggatctcgccgctggtctcagaaagttcgtgcagtggtacgtcgggtattatggtgttcgcttaggggtagaaaaggaaaaacacgcagacttggcttgattcatcctttccgtgcccctccattcatttattataattatatgtttttttgttgaaacttgtgaatggtgctggcggcccatgtgagaatgcataatcatgatttggtattttaat

SEQ ID NO: 32442 - DNA, 318 bp, Glycine max
ctttgagtcccttgcttgaccctgaaagccacacaggacacagaaaaaccgaagaaattgaagggaaaagaaatcggggagaaaaggaaccgatcactgtgctgagaatcacgaaagctgattccgattggtgtttagagttggaaagttacttcaattttcgctttgatgagtgagagagtgaagaaagaaaagccacacgggggagaaaagggagaggatgaagaacatcttcaagaagctgcacataggtagcagccacgatcctcatcgatccaatgaggcttcaccgtctgtgccgtcgccgtcgtgcgttgc

SEQ ID NO: 32443 - DNA, 258 bp, Glycine max
gtggaaggtcacgattgttcggtttgtttgatcgagttccaagagaatgaaaacttgagattgttgccaaaatgcaaccatgcttttcatctcccttgcattgatacttggctcaagtctcatgctacttgccctttgtgtcgttcttctgtcaccgcttgtccaaatccgaatccaaattcttccatggaacccccaccaagagtcattgttaatgccttgggacaccaacttaggagtaaccatgttgttgttgtt

SEQ ID NO: 32444 - DNA, 297 bp, Glycine max
cacttttcatttggcttcctctgcctcgcttttgaaaacgcgcgtttcaggcgaagatggttggcgacaacacgaagaagttgaaagtcgccgagaatttggaggatagcatcgacggcgaactcgtcctctccatcgagaagctgcaagaagtccaagacgagctcgataagatcaatgaagaggcgagtgataaggtcctcgaagtagagcagaagtacaatgagataaggaagccagtttacgataagcgaaatgatgtcgtcaaatctattcctgatttctggttcactgctt

SEQ ID NO: 32445 - DNA, 650 bp, Glycine max
cttactttctggcctgaagacttgtatggaaatatctagttacatgcattctggaggagtgtcaatgccccatggatctattgttgctcctagttcaatcatggaagacaagggaaaatttgatgcagagtgcacagaccaggagatgccatctaggtcacggttgctgaggaaaaggggtaaaacaaggaaatttaaatattcttggaaatctgctggccacccatcaatatggaaaagaattgctgatgggaaaaaccaatcttgcaagcagtatacaccatgtggatgtcagtcaatgtgtggaaaggaatgtacttgtgttaatggtggaacttgctgtgagaaatattgcggttgttctaaaagctgcaaaaatcggttcagaggatgccattgtgccaagagtcagtgtagaagtcgacaatgcccatgttttgctgcaggacgggaatgtgatccagatgtctgtcggaattgctgggttagttgtggggatggttcgttaggggagccacctcggcgtggagaagggcaatgtggaaatatgaggcttctattgagacaacaacaaaggattctcttggcaaagtctgatgttgcaggatggggagccttcttgaagaacccggttaacaaaaatgattact

SEQ ID NO: 32446 - DNA, 444 bp, Glycine max
ctcgtccttgtttcaccattttatcatttgctaggaatgagccactgaatatttgatggattatgcaccattgctagacatgtaatctaaaagaaacaattttgcaggtcacagaattccttggcttcagctcatgtatccaatcatgtttggagtacttggaggcagtcccttggaatggagaggaagaagaagaaaaggtgatcgcaaccgtcctacgactccaaggagaaggaatcggggtaaatccggtgctaaaacgagtttctcctgatatttctaatgccccaaaagataccctctcccacattgttgaacttgttctcaaaagcaatgaggagagaggtcgccgagagatgaaatccatagttctaaagctccttagagagaataacagtcttccaagttcttcaggctcagctgacctctgtaatgacatgatta

SEQ ID NO: 32447 - DNA, 473 bp, Glycine max
gctagaactagttgattgtcttggaactatcgctcaaagtggaactgcaaagtttttgaaggctttaaaggatagcaaggatgctggtggtgacaacaacttaattggtcaatttggtgtgggattttattctgcttttctggtttctgatcgggtggttgtctcaacaaagagtccaaaatccgataagcaatatgtttgggaaggagaggcaaatgctagctcatatacaatatctgaggagacagatcccgagaagctgattccaagaggaactcgccttacactgtatcttaagagggacgacagaggttttgctcatccagagcggattgagaggcttgtgaaaaactattcacaatttgtctcattcccaatatacacatggcaggaaaagggatacaccaaggaagtggaagtcgacgacgatacaacaactgaaggcaaaaaggatgatcaagatgataagactg

SEQ ID NO: 32448 - DNA, 263 bp, Glycine max
gcacctctcaaagctgaaaaaatatttgctgtatgtttctttcttattactacgacccactatctcaaaaaccataacacatgctttccctcatcatcacctttacatctctcactcttgctcattccttgtccgtactcacaaagcacttgaagtgacagaagcagataaatgataacgttaaccgacttttaccatgtgatgaccgcaatggtgccactgtacgtggccatgatactcgcctacggctccgtgaaatggtg

SEQ ID NO: 32449 - DNA, 482 bp, Glycine max
gggaaagcttggtggtagcagtaaaagatctgctgggaagcacaagccaggaaacaggggtctgaaatcaagcgaaggtcattttagaaatggcatactcaatgtgaagcatttgttaaattcaacagcatcaagagatcgtgaaactggaaccaatatgtccaatacatggaaagggaaaggtggtaagaagaaaaatggcaacaagggtgctggtggtaagaagcaccgttcagcgcatccttgtgaataacgtgttttgggaatatggaggagtcctttttaatatgtatgacccttgggtaagcttttcagttttgacagagagtgaaatggatagaatagaaaacaggacaataatgtcttgtgtattctgataattataaaatttgaacaagaccttgtgtcttgttttgagtttttgtgcttatcaaacccactaggacattcggcgtagtacaatggaataatatatattcttg

SEQ ID NO: 32450 - DNA, 379 bp, Glycine max
ctgtttctttttccttccaaattggtttgtggtgtttctctcaacatggcgattgcgtggttacggaatctgcaaaacctatggccattcagagtggacgagttaagagattcgaagcaattggtgaagaaactgagcatcccccaagacacgaagcaattcgtattcgcgctgcgtgatccccagacccaatccatcatttacattctctcctctctggatttatcggagcgatcagcttccgatgccacgtgtctcatcaaggagatcaaacccgacgccgttttggtgcaagctggcgtttcccccttcttcgagcttcagtccgaagaagactccgttccggtcccgacctcttctttcggggtaatcaaacgct

SEQ ID NO: 32451 - DNA, 616 bp, Glycine max
ttttatttctatatccacacccttcatttcttaagagttcagagtcatggaccaaactcaaaatgagtctggttggatgcattctatcaaagtgacactaggatctctagatcacagagaggttaagtccttcataagcagcatcccttgtgtttcaagcaagcttagaaaatcaaatgaggaagcttattcaccaaagtttgtcagcattggacccttatacagaggaacaagtagccaccttctggccatggaagagcacaaatggcgttacatgctggctctccttcatagaactcaaaatccagtttcaaccttggatgaatgtggcactgtcattctaggcttggacgatgcagttcgtgcaagctatggaggtaacatcaaatatgaagctcatgagctagccaaaataatgttacttgatggctccttcttgctagaacttcttcttagatgcgcaccaccaaacatggttcctcaaattccaaaagaagataaccataataatggttcttcttcagatccaatactaggacacaaagaggtgtttttatctattctcaccgatttcactctactagagaaccaaatgcccttttttgttctcaagaca

SEQ ID NO: 32452 - DNA, 255 bp, Glycine max
atagggaggacttctgccaactcaattaatagtactttaccaaacgcgcttttcccaagaaaatattagatagtttcaaacctctatggtctctacggtttatgaaaaagaatactcaattacatgtaatgtggagattaattggggccatagtagtcagggatacgtaatagtttctccctcttagagggaaatcacggttgggaaaacatcaataaattttccaccacatgcttctactcctactaggctaat

SEQ ID NO: 32453 - DNA, 562 bp, Glycine max
caacggtccctttccttaaaaacggctactttctctctctacaattcaaactctcatttcaaaccaaaaaactctcactttcttcattctctccacaaaatcaactcatttcctcttctcagcagcgacgacgacggaaaatcattcccaacacgatgcgatccgcagatcccttgcgttgttcagatacaaagagccccaaaatgtccaaacctcaaaatgatccccttgtgcaatcggaaacaacttgtggaacacttctctatgaacttcagataatatgggacgaagttggggaggctgagtctgacagagatagaatgctgtttgagcttgaacaagagtgtctagaagtataccgaaggaaggtagatctagcaaatcggtctagagctcaggtaaggcaggcaattgctgattgtgaggcagaacttgccgccatttgttcatcaatgggagagagaccagtgcatattcgtcaggctgatcaaaatgctggaagcctgaaggaagagcatgcaagaattcttccgcagttggaggagatgcacaagaggaaaat

SEQ ID NO: 32454 - DNA, 270 bp, Glycine max
gtagggtctcctcggatctcagcattgtggaccttgatgtcccattcggctttgtttttgctgtgggagccactatgaattgctatgctaatctaaccgttttagctgttgttacttggcaagtcttgtttgtctccataccgatgatttattttgcaatccgcctgcagagatattactttgcctctgcaaaagaactgatgcggctgaatggcaccacaaaatcctttgttgctaaccatcttgctgaatctgttgctggagctgtga

SEQ ID NO: 32455 - DNA, 277 bp, Glycine max
tgcatccccaatgttaaatgaatatgtcacatgcaaaaaggactgtacaatcaaagagttgattcaactacttgatcaagagaagattcacagggtctatgtggtggacgatgatggggatttgcaaggactaatcacactaagagatatcatctcaaggctagtacacgaaccgcgtggctattttggtgatttctttgatggtgttctaccgctgcctgcaaacagcagagtttaacaggcaaggttacaagggagaataacctgctggtgcagc

SEQ ID NO: 32456 - DNA, 278 bp, Glycine max
  unsure (1)..(278): unsure at all n locations
cacaaatccgccatcgacccatcactggaaccatgctccgcctcctaaagccgcaacctttcccctccgggcaccaactccgcaccgtgagcggcaccgcaaagggaaaagccaaaatcaaagcaggccaagccctaaaacgctcccgcatcaccaccaagaaacccggctccgccatcgcagcaggcttacccatgtctcgcgagcgccaaagagcgcgagcgcctctacgaaaagtgcctncaagccccaacccctnttcggcaccttaccccaaa

SEQ ID NO: 32457 - DNA, 880 bp, Glycine max
gttcatcctctatcctccacaaatgcaattcatcttattttcttggttcagaaagaactagccgtcatcatcatcctgcaactccttccaacttccaaagtgtatcttcctgaccttggaaagggctggtatgtgtaattcaaacaagggatggaggctacttggcttccatgaaccctttggatattgctgtggctagaaaagatgctccaaagctagctatgcagatgtcaaggccttttgtgttggcatcacaccaatccttgacagggttcgagttgtttcagaaattggctggcattggatttgatgaactcagctccaaggttttgtccttaatgcccatagatgaaatgataggcaaaactgcagaacaggttgcttttgaaggcattgctaatgcaatcatacaaggtaggaacaaggaaggagccagttccagtgctgctagaatagtttcttacttgaaaagcatgggaagtgccatgagttcaggaaggagagagagaataacaacaggactttggaatgttgaagaggagccactcacagcagagaagcttctggcgtttgccatgcagaaggttgagtccatgacagtcgaagcattgaaaattcaagctgacatggctgaggaattagaagccccatttgatatttctgcaaagaaaggagagggtgggaaggatcttttggcttcagttattccacttgaggaatggatcagagaccacagctatgctaaaactgttgcaggttctgatggggaaccagaaaaagtgacactcgtgttggttggccaattgagagatccattgagacgctatgaagcagttggaggacctgtgatggtgctgattcatgcaacaagtgctgacac

SEQ ID NO: 32458 - DNA, 269 bp, Glycine max
tgggaaggtcgctcgttctcctactggatgggaccttggtgtcagaaccataacactgtcaccatctttgccatttgctttgatttctcttgatcttccatcaaggctttccattatcgaatgccacagggatgagatccgagagctacctgccaaggcagaggtgattgcttggtcggataagactggaattgaaatgtttaggtatggagatcacattatgggaatccaaggtcaccctgagtactccaaagacattctttttcacc

SEQ ID NO: 32459 - DNA, 684 bp, Glycine max
acgagtgacggttggggctattgcttccaccaatccagcgccaacccctcaatttttgacctcataagcttctcccaggtccgtctttcttttctctatctatttgcggtgggtcagctacgattgtaataaatggaagttctgttagttgatcagggttttgattatgtccgtagaaaaaagaaatggatcttgattttgtgtgcggttgggttgggtggcttcagcgcttacaagctctatcacgcgccttccgttgctcgcaagagaaagaggctttcgaagcttctcagtgcattcgtttccgttgcggaatccctatccgaatccgcagataccattggaatcgtctccagagacgtcaaggtttttctggaatccgattcagatcaaatccccaatagcttgaagcaaatttccaagatagctcgctcggaacacttgtcagagtctttggttagcgtcacccgtgctgtgaccgtgggagtcttgcgtggttatgaatccatgaaccggaccggtggtgaccaaaccggttcatccgtcgtggaccgggtccttgacaaaatgttaacaccagcagggtcaggttttgcttctgtagttcttggaagctttgctaggaaccttgttcttgccttctattcagatcaacaacataaccattcaggtggggaatctaac

SEQ ID NO: 32460 - DNA, 261 bp, Glycine max
tttgaaggcaatgatgtgcgaagaagctgataatcagcaggtaaaggttgagacttgagaattgacgtcctaatggccgtacctctacagctacgctgctactattttaacgtttcaagacggttgcacttgcatgtgattggccgtgcaagtagtaatgttttgtcctctcaggcattgcatcaaacagtttcaatacactctcagcctcaggcgccattcaacttcaacttcaatttggatgacccaactctaccgaag

SEQ ID NO: 32461 - DNA, 257 bp, Glycine max
cgctcgagccgctcgagccgctcgagccgtcagtatgcaatcccaaatcgtgtgggaacagtgcctggggagcctccctatggcgagcatccatcaaggacattatttgttcgaaacatcaatagtaatgtcgaggactctgaattacgaacactatttgagctatatggggacatttgaactttatacacagcatgcaagcttaggggctttgtgatgatatcttactatgatattcgagctgctcgcactgccat

SEQ ID NO: 32462 - DNA, 622 bp, Glycine max
tctcgagccgaatcggctcgaggggagccatatcaaaggcctgacatgggtcatgctgtcaacgtgctttcttctcttgtggcactctggaaaccatctgatcagaattctgaagatatatatggaattgaccttgacatgtccctaccacatgcacttaagaagtggcaagcttacgaaggtagaagtcaaatggagtcatctgcttcctcttcgcttcttccaagcttggataacacacagacaagtatacctactcgcccttacggatttgctgattctttcacatcagcagatggtaggtgaccatgattggttgtaaataattccaaggtgtttctttagtgtgcatgttcattctccagtccttgcttctttctggcttttcttttgtgaacttgtttttatctttttttcatggtgtagttctccacacctcctccatgattaatttcacaccatctttagcacttgttgttaaggacttttgctgacaaactgggaaagagattctcagctgaggatgtatttttcatcaactcacattcgtggtttcccccttttgagttaattttgagatgtgtaaatcaaatatcactattgaactcccagtccgtagctt

SEQ ID NO: 32463 - DNA, 512 bp, Glycine max
ctcgagccgcaacctttcacaacacggccaacataaagacacagcaacgaaggtggtggatccaacaccgccaaacgttgaacccacagtctggttctttctctctcatcaaccgatcaaccacccaatacccatcatgtaaacctttttttttctcttctgatcaaaaccaacaccaccccctcaacccattcaaagccttttccatctttctctctctattctgttttctcgcgtgagaagggttgttggggttgtggaggaggatgcaagccaattaattaatcttgcattgcagccaccactttggtgttggtgtttctctaattcattcagggttgaaattgagaagggacttggaaatggtggtgattgatgaaaagaaccgtgtgattaggagggatatggtggagctttcacaacatgatcaatctgtaactgtggcatattatggggaggagttgcatgggggcgtgcctctaccccgcttctctagaatgtctcctttaaac

SEQ ID NO: 32464 - DNA, 298 bp, Glycine max
ccatcgagccgaatcccctcgagggctcgagcaaaaaccttaaaaccctcgaaagtcacacgacccgaatgatgcagatgtagcccacccctctgtacagtacaactccctgggggggcatgcctgacccttgtcttcgcaaagcaccctctaaggtggtttccatccctgttcacttcgtgggctcagagcgcaccagaacaaattctgattctgccacagagatccagagggtgctgagaggatttctcgtgacgaacaccttgaggaaaatcgctgccatgacggtggagttgga

SEQ ID NO: 32465 - DNA, 297 bp, Glycine max
ccttggccgcatagtcacatcagatattgaaaccaaaccagaacgaaaaacctcgccgtcgacacgatgcggagcctcaggatgagaaacttgttgtcccgtgtcaaaaagaaaaccatcaaaaacagaaacagaagttgcatttccattacaaaagagttaccacatctagtggaacaagaagaagaagaagaagaagttaatgaagaaggtttcaacatcaaaagctctgccccatcacacactcacggtgttcaacccttggggaatctctatctgaacacaagttccacaaac

SEQ ID NO: 32466 - DNA, 270 bp, Glycine max
ggaagattacatgttggccaactgggtcgcttccaataccttcagattttggttgggtttcgtgcttttggaaaatccgttgagtttctgaagctatggaggcttataagagatgggtgaggcagaacaaagagtttgtgcactccatggagtctttggccaatggattgacatggcttcttcctgaacggttttctgaatcagagattggacctgaagcagtaacaaccattctgggaatcatcacagctctcaatgaacatataattg

SEQ ID NO: 32467 - DNA, 401 bp, Glycine max
agacgtccgaaataggctacgtctctacgaaagcctcttcaatcttcccactttatccgtttctatcttaatatcccaccccgccatggtggtggcaaccaaacaccacttccacctcctctgcacaatgatcatgctgctgcaaccactttagcgtactatgctgttcttcttcttattgttcctcctcagttatggaattctcaaggaccatgttctgttcttctccaccgttccctccaagaactcatcacccttggaacactcttcccttgagttcttctacttccgttttgatgcttcgcgaacaagcttcccctacagttgcctcttggtcttctaatttttcagcacagaattttcctgcctcagttcttttacaagagcagcgtgatgaatat

SEQ ID NO: 32468 - DNA, 436 bp, Glycine max
gagagactgagcaacctaataaagatattgtgtatgggagccaaaaggtgcatgaaggaaaagaaaatgcacatggggccatggaggaagcataggtacatccaagctaagtggttaggtccatgtgaaaggaacacttccacaacctcactttcagtgaggtataattctcagaggatattgccaaggccaaaggcatccatgttgactgttggtctgctagagaagccttcccaatatgcattgctcggctgttggggttgggtaatataattttaagaaagagagccccctttttttgtttattttgggaattaattaattcccccccctaaaaaggtgaatattaaatgagtggttcccaaattaatgtcctatacacatgtacgtaaaaccaaattatggaaatgaatgtgcagttcaaagctgccttttt

SEQ ID NO: 32469 - DNA, 330 bp, Glycine max
aaaaaactttgcatgagggaggatggtaatttagtaagcttgcattgtgggtttgcaagagtaccgagtatcggatgtagagaccatcaaggaactgattgagcaaggaaatgcaacaagaagtactggcaccacaggtgcaaatgaggagtcttcacggtcacatgcaatacttcagcttgctatcaagagatcagttgatggaaatgtatccaagcctcctcgtgttgttgggaagctctccttcatagatcttgctggaagtgaacgtggagcggataccacagataatgacaaacagacaagaatagaaggtgctgagatcaataa

SEQ ID NO: 32470 - DNA, 293 bp, Glycine max
ttcggctcgctgtgaatccacttcttagagtgagaaaaagcctctctgagagagaagataaatagcttgggaagtctctatcctcaagcttgagtaagtctctctgagagagaagataaatagcttgggaagtctttatcctcaagcttgagtgagccaccgtagagtgagtcaatccaagtagagagcctctctgagagagaagataaatagcttgggaagtctgtatcctcaagcttgagtaagcctctctaagagagaagatcaatagcttgagaagtctctatcctcaa

SEQ ID NO: 32471 - DNA, 294 bp, Glycine max
agtgaatccacttcttagtgtgagaaagtgcctctttgagagagaagataaatagcttgggaagtctctatcctcaagcgtgagtgagccaccatagagtgagtcaattttgtaaacacatccttgtaaccctactatcactttgtatagtggaagaatctccatattggagaattataatcgtgtgctcccattactacctttaattactaagtgcctatcttaacttcacgaagcgggtaagtccgtgttttcccaacattgccaacataaaaatcctttgcagagcaatga

SEQ ID NO: 32472 - DNA, 875 bp, Glycine max
  unsure (1)..(875): unsure at all n locations
tgctaatttaaaacccttcaaattctccacagccaaactgtttcataccatgccaccaccgtttccacacccatatctctcagcacttcgaaatttctatcctttccttcggggaactgctccgttcctgaaaccatcatctgggtcgcacattttgtgttcttaaaaaagaataatctccgatggcttcggcggccatattctcgtcgctacggcggcgccggtctccgtcgctggaggcgtttctggtgccggtcgacctctccgacgtggcgctgctggagactcttatctccgtcgccagcgacgtcgcgtcctgcttctccggccaccggttccccttccagcgccggaactcgcgtgccctcatcggaanagttgagatttnccggtcaatgttggagtgtctgagagactccgctgccgccggagctcttactccgacggcggtgctgtgcttaaaggagttctacctgcttctatatcgctcaaagattcttcttgattactgtgcccaatcgagcaagttgtggctgctgcttcagaaccattgtgtttctggtcacttccatgatctgagccaagaattttcgacccttttggatgtttttcccgttggggaagttggcctcagtgatgatgttagggaacagattgagttgttgcagagacaatccaaaagggctaagttgttcatagataagaaagatgatgttcttaggacaaggttcttttggtttctcgaagagtttgagagtgggagggttcctgattctaaggacttgaggtgtttctttgtggataaactgaggattcttgatgctaagagttgtagggtggagattgaagccttggaggagcagattgtgaaccac

SEQ ID NO: 32473 - DNA, 587 bp, Glycine max
gtttattagcagatgaaagaaatgttcccccgtcgttgcctgagcaaggacaagttccagtggataatgggagtaagaccagtagttcaagcagctccagcagtgattcaggctcttcatcaagtgattctgatagtgatagttcctcagcctctgggtctgatgcagggtcaccaaaaacctgaattctttctgtcagatctcagatatttaagattagatagtgatgcaatgcttggctagttggtttttttcccgcatccagatttagctgttggtttgtaaaggaagcattctcaagaccacctatgatccctatggatgcagtatggggtccttttctcgcgtctgttggaactgttgcactactgctttaaggcattatatgtgataacacaaacccatgtaaaatatttggtagaatgtgatgattggtagatagctctccgtagcagtgcacattgctaactactgctactctcattaggtttccattgatgactcggtttgatttcgcgctggtagattctagattcttgctgttatacaaagataatctgcaattcaagttcctgatgtcactattg

SEQ ID NO: 32474 - DNA, 358 bp, Glycine max
gtttttcgtacgatctgaatgaaggagagcatgagcatcctctgataaagtcaaagctggcaccacaaccacacggatccaacaatcactctctcttccaacgagcatgttccgcatccaagaagctatggcacatcgctgccccctccatcttcacccgcctcgccggggtctccatcaccgtcggcacccagtccttagccggccacctcggcgatctcgacctcgccgccatttccatcgcctgcaccgtcctcatctccatcaccttcggtttcttgttgggtatggcgagtgcgcttgagacactatgcgggcaggcgtacggcgccggacaacagcgcatattgggcgttta

SEQ ID NO: 32475 - DNA, 428 bp, Glycine max
cagagatataagatcgtggtcatctggcaaggaaactgacatccggctactcctttcaacgctacatcatattttatggcctgagagtggctggtatgctgttcctcttccgaacttaatagaaagttcacaagtgaagaaggcctatcagaaagcaagattatgcctccaccctgacaaactgcagcaaagaggagcgacactcctacaaaagtatattgcggagaaggctttctccattcttcaggatgcatggactgggttcatttctgaagatgtttccttataaacagtaggcgactccaattcctgataactcatttttggtttaaagctcgtggacagacatcaagatagacatttggaatgacaaaagcgattttccatgcggcaaatacatgatgtatatgaaatttgaaaatagcatg

SEQ ID NO: 32476 - DNA, 407 bp, Glycine max
caacttcttcgcctaatcaattcaattcatcttcacgacttccatgccttccaacaaaccatcttcaatgccttcaaaccctaatccaagaagttccgaaatcggtaaccctatgagaaggagtttcactggaaaccccttctccaaaccctcaattgtcccaaaccatggagccaaaacccccgccaacagcccttcagcagatttttcgagaagaggctctgttggggttcgggaaagcggagggtcgctgagggactcctttgatgacaaagaaaacgggaaagatcacattttgaaaccagcaaaggttcgatcaccagctgtttcttcaaagggctcaaagaatttcatgtctccgaccatttctgcttcctgcaagatcaatgagtctcccagaaagaaag

SEQ ID NO: 32477 - DNA, 284 bp, Glycine max
tatttacaaatttgaacttcttccctttgaaattgttacactttggccagagaaatgcagattttgcttgggaaatggcaatgtgacagttgaacttggtggaggtgaggaggaggtgtctcgatgcataaattgtgacggtgttggttcactgacatgcaccacttgtcctgggcctgcctctcaacctcgttaccttgaccgcagtatgaaattctgcagcctgttgggacaatttatatacagttctttttaagttcttttgccaaaattagagttttaac

SEQ ID NO: 32478 - DNA, 641 bp, Glycine max
cagactttggccttgcaaaggatggtccgatgggggaccaaacccatgtttcaacacgagtaatgggcacatatggatatgctgctcctgagtatgtcatgactgggcatttgacagctagaagtgatgtgtatggttttggggtggtgctgcttgaaatgcttattggtagaagagcattagacaagagcaggcccagccgagagcacaacttggttgagtgggcccgtccactactgaatcataacaaaaagcttttgaaaattctagacccaaaactagaggggcaatattcaagtaaaacggcattcaaggtggcccatttagcataccagtgtcttagccaaaacccgaaaggtagaccactaatgagccaggttgttgaaattctcgaaaactttcagtcaaagggggaaaatgaggaagatcaaatgcttcaaactggcgataccagtataaccctttatgaggttcctaagggcagcaatggcactccaacttagggctaaaaccaaactacaaatgacgacgaggtttacaggagcaaaggttggtgagaaaagaaaaaagctgaagccagccttcaaaagactctaatttatgtagttccttcacctatgtttgtgcccgagataagtctt

SEQ ID NO: 32479 - DNA, 543 bp, Glycine max
caaaattgaagcattattaatgcatacttgatgcatgtttgtttatgatgtttaatgctcaagaatttgaatgacgatgtttgattttgaccaaacagggagcaatattatcggctgcgctgccgggtcttcaggagaaggtatgcgtaaaacaatactagaaacttagcttgattatgaattctctttaccacgttgacttagctagccataaatttatatttcttactaatgcaataaaaaaacaataatatattataaaaaaattttaaaaaaaattaattgttcaagtttcatgaagttggagagggatcaagtgtccttaagttcaaccatgtagctcacctcttatcaaaatgtcatcaggtagtcttctacacatgtcttcttgacattggtccctacagcccttatgggcactctcggtcaaacatcgtatataagttatagcatattgtcattgtatgatatcatattaataatcaacataaaaaaatgttacaaaagaaacataatcagtataaaatgatttaagtatatgct

SEQ ID NO: 32480 - DNA, 542 bp, Glycine max
attcaaacattgggtacttcaaagtgtcgggaagaaaagaaataaataaacgaaaacgtgttttcccataagcaataactctataacccacgcagttacacttgcaccatttttttctccccaaacgtggtacccaccaaaccaatgaaaaaatcaagtctttttccatctgggaatttccttttccttttccttcttcttcttctcaatgtctctgcttcgttggcagcaccaacaccagaatcggtgtacacctccttcctccagtgtctcacaaactacacaaaatcacctgaccaagtttccaacatagtatttgctcaaaccaacgcttccttttcttcagttctccaagcctacatacgcaatgcccgattcaacacaacttcaaccccaaaacccttgcttgttgtcactccctcggaagaaccccatgtccaaggtgcagtaatttgcgccaaaagcattgcgattcaactcaagatcaaaaagtggtggccatgactatgagggtatctcgtatgtctccgaccaacccttta

SEQ ID NO: 32481 - DNA, 445 bp, Glycine max
aaacttatggaagggtatcctagtgatgaggaccgagatgccatcttccaagcctacattaaggcattgaaggaagatccagaacaatacagaatagacgcacgaaagttggaagagtgggctcgagttcaaaagccaacttcccttgttgagttttcatccaaagaaggagaagttgagggaattttaaaggacattgcagaaagagctggaggaaaaggagaattcagttatagtcgtttttttgcagttggactgtttcgtcttctggagttggcaaatgccaccgaaccaacgattttggacaagctttgtgtggctttgaacatcaacaaaagaagtgttgatcgggacttggatgtgtatcgcatcctgctttcaaagttggttcaagcaaaagagctgctgaaggagtatattgacagggagaaaaagaaaagggatg

SEQ ID NO: 32482 - DNA, 442 bp, Glycine max
gttctacgacgaccttcgttctcaattggagaatgacttcgtgcattctcttcgcgatgaggttgttgaaggaggtgaaacggaggctattcggccgttgctgtggtaccctgggaacttcgcttggcattcaaatttttctcggatgcagctcaggaagaaccaaacgcttgagaggttccatgaattcttaaaactagaaaatgagattggaaatatcacaagacaggaagctgtcagtatggttcctcccctcttcttggatgtgcattcagatcattttgtgcttgatatgtgtgctgcaccaggttcaaaaacgttccaattgcttgagattatacaccaatcatctaaagcaggatcactacctgatggaatggttatagcaaatgatcttgatgtccaaagatgtaatcttctgatccaccaaacaaaaagaatg

SEQ ID NO: 32483 - DNA, 668 bp, Glycine max
ctctatcggcattcatcggcacccacccgaggagaaacgcgattcccttttcccttcgcaactccttcttcaggattccaatttcatccctataagctttctttcttattttcattttagggtttctctcattattcctcttttcttatttcatcttcttcggtttcttttcgcacgcaaattctttcgttcttctcctttttccgtccttatcttatctccttttttcccttcccctttgaatcctcaggcctatcggttgttgacgagacaaaaaaaaaaaaagacaaaaaacgaagagagttgggatttcgatttggaattctattttttgttctgcggatatattcgattctatttttcgtcctctgattatattctagctgtttttctagggaaattattgtcaattgggttattcgcaagacactctgtgaagtttttgctgcgtcgttttagtttgccatccgaaatcgagggttttcttgttagatctctgctagtgccacactttttttttaaatttttttttaggtttttatatttttttttccttttcatcttgtatccttctgttattctgagaaggaaaagaaaaaaaaaaaaaagcgtctcgataaaaattagggtttgtttattgatttagggttgtgtacatagataggtag

SEQ ID NO: 32484 - DNA, 582 bp, Glycine max
ctcaaccattgcgtctgtttgatcaaagtcaaaacacacccaaaaagaccaccattcgcaataacacaacacagcacaaacccctttatctcttctctccctttcaacacaacacaagtggtttttcgttttctcatacaagaaccagttccttaagcacgcggtatttgtctctgtctcctcggtgcaacattacgtacccacacacactactactccaataggggatcgagaaaaacaaacagcatcatcccagtgacgacgacgatcacattttaatgagaatccgaatttgagattgttggaattttatctttcaagattttggatctgcgaggatgaagtcttggtcactggacgagtggaggaactacttcgggtctgcgaattcggatatattcgagataattgagcacgccataattgtggcggcttcggattgtcctaaggagtttagagtgaggagggattggattgcagagaggttgttttcttgcaggttgactcggtgtgtggggtgtgaccgtgttgagttggctgtgggtgcagatagtaaaaaagagaaacatgatggtgatgatg

SEQ ID NO: 32485 - DNA, 488 bp, Glycine max
ctcttttatatataaaaacagaaaaggatctataactttgtctacacaacacaattaatagcattcttgcaccaaccagaaagatgttgtttgaggcatgatacctgctgtaaccgttttcttgtgcaaaaagcaaattttgtggcacatatgatcatagttttggaagtttcaaaataaccatgccatgcaattcttttaagcccgtgtcaatactgctctgctttagtgtcactctatgcatgttctctgattatggaactgtatgtttgttcatcgcttcattgtgttgtgctaaatttcttgttttaatgtgtagacacaaattttttatatgattgggctgcctatgttactaaatgtactatttttagtttttgatctccgcatcttaaattaacccatttccaatctggatggtagtctcatatatcaacttcagctgtgtccagtgtcagttacatttaagttgcagatagagcattact

SEQ ID NO: 32486 - DNA, 312 bp, Glycine max
cttcatttgctaaagaaggaaatctaagtgacctatttgctagaagagaggctatttcaattctgtttaatgttgttggaattggaattggaattcaattagcatctactgtatgtgcctcaatgcagggaaagttggttgtggggcctccactatcaattatacacatatacagcgtttctgaagaaatgagagcaactcctgtcaataccttgaatccacaaaggactgcaatgattgtggctgattttctcaaggctggaagtgtatcaagcccagctgatctaagatatcgagaagatttgctatttc

SEQ ID NO: 32487 - DNA, 510 bp, Glycine max
aattcctatttttattttggtctcttctctttctgatcggcgattgtcggaagctcctattcatcgccgccaccttgcgccgaatcggacccacttcggatccgagggccacccgaatccttccttcacagtttttgtctttccagagcaaaggcttcacctctaccatttaccacacaccactgtgtccatacaaattgggttgtgtgtgttcccgtttttagcgaagtgagattcacacccaattttgcttcatctcgcaactacacgtggcgatcttgctcttcttcaactccccattatcgtctccaatctcaacatggaaacgaggttatgtatgatattggaaaagatgttgggctggtcgtagtttctgtttcaagagttcagttgtgaagtgatcttttgttcctacatggaagcaaacaaggaggaagcacttaaagcgatagagattgctgaaaagcgctttgctctgagagactttgccggtgcaaaaaactatgctgt

SEQ ID NO: 32488 - DNA, 461 bp, Glycine max
gccaagagtcttgtgcagcaatggaattttaccacaacctactgaagatcaggttggtgaatgagaaagacatctgtgtttatcagcgcgccgattggttggttgacaagttgggtacaaaagtccattcttatttctggcttgatgagtactcagaaaaagatgattttgcgcgatactggaaaaatgaatggatgagtggtttgacgtcatggcgcaaagcactgaagattccagatactgatgtcataatggaagatggatgtgctaaggtcactgatcaagataaagcttttgttgtctggaatactggttcaatgttgagcatttgtaattgtagttgggcacaagatggcaacctttgtgagcatattctgaaagttcttagtatctgccgaaagagggggtccattttaccatctgtcactttatttcaggatcaccaggcactaaataacatg

SEQ ID NO: 32489 - DNA, 685 bp, Glycine max
gcgagctccggcgactcttcggcggcaagaagcaccacaacaaccccccaccctcctcctccgacgcctccaaacccaacaaagacaacaaaaaaacatggagcttcatcaaacacagtacgaggtacaaacccaacacattaccaacaacacttaacaacaacagcaactttgactcttccacttcctctgctcctttcactgaatctttggacgctaacaagcatgccattgctgtcgccgccgccaccgccgcggtcgctgaagctgctctcgccgccgcacatgctgcggccgaggttgtcaggctgaccagcggcaccggtggcgtctccagccggcccgccccggcgccgcagccccgacgcgtggcggaggaaaccaccgccgccgctgtaaaaatccagtcggctttcagaggttacttggcaaggagagcattgagagcacttaaagcactggtgaagttgcaagcattggtgaggggtcacattgtgaggaagcaaacttcagatatgctaaggcgcatgcaaaccttggtgaccctgcagtcccgggcacgtgcaactcgtgggaacttgtcagataatatgcattctttcaagtcttcactttctcactaccctgtaagcaaagtgggaatatatgtatatctgtgtggtctctaattaatgcctgacatgat

SEQ ID NO: 32490 - DNA, 360 bp, Glycine max
ggccccaaaaaatgtcaaaatccaggggatttggtatgctcaccttaagtcaaaaagggtttttttttgtttttttttttttcaaccctttgtagcattgtaaccccatgctgttgctgcattatcatcccttgacccaactttcctagcccaatgagagtactgtcatatggttgtacattaacgacctccaattacaatgcttaaaatttcttggttctccttgctggtgcgtgtgagttttggagcccaagtttttactagttggaatggcattgtgttatgtgttttattacacctaatatgcaagtaactagggaaacactgtatttgaaatggattgcaattgatccttggaga

SEQ ID NO: 32491 - DNA, 419 bp, Glycine max
gtcaaacaatgccatgggtgaaaagggggttagagcttttcggtcactcctaaaatcacaaattaacttggaggaactttatttgatgaatgatggtatatcagaggaagctgcaaaagcagtttctgaattgcttccttccactgagaagctgagggttcttcatttccataacaacatgactggggatgaaggggcaattgctattgctgaaattgtgaaacgttccccagctttggaagattttcggtgctcatcaaccagagtaggctctgatggtggagttgcccttgctgaagcacttggggcttgtaaacatttgaggaagcttgacttgcgtgacaacatgtttggagaagaagctggagttgctctaagtaaagttatacctgcatttacagatcttacagagatatacc

SEQ ID NO: 32492 - DNA, 280 bp, Glycine max
caaaggttgctgtaggagatttgtttgcagtagtgctaagtgctaacacctgcagggaacaacggcctctgcatcagcatctctgctcaaggcttcacctgctcttgacaagtctgagtgggtgaagggacaaacccttccccaaccttctgcatcagttgtgagatgcaaccccaccaccccatcaggcctcaccatcagcgctggttcctatgctgatgagctcgttaagaccgcgaaaacagtggcttcaccacggacgggtattttggccatggat

SEQ ID NO: 32493 - DNA, 399 bp, Glycine max
cgtgtgccatctgaaaggtgtgcagagctgactattattgctgcaactcatggcttaaaggaagcttggatatcatatcagcctgtgcttgctgtcatgtatctcgttcagtacatgccaactattggttattgggtcatggacaagattggcaaaagtcgagtagaagctgctgaacagaagggaaacacctattctttgagcttactgctcggaaaaaagaaggccacttgatgcccatctgttcatgttctccaaaaatttgtatcaaatatttttagtcggaggttctctatcaaattgaataacaccctttctgacaattcacagaaaagttgtatggatttcctaattgaacaattaaggtttacaaatatccaataggcgctgccatgtgac

SEQ ID NO: 32494 - DNA, 494 bp, Glycine max
gttcaggaaggagatgattctgttattactgctcatgtccctcttaacaatatgtttggatactctacagctcttcgctcaatgacatcgtgcaaaggtgaattcaccatggaatacaaggaacatttaccagtttctcatgatgtacagacgcaactgataaacacgtacaagggtaataagctaggtgaataatcagcttttgtccaagtacatgataaagaaattttatgacaatcacttactataagacaacaaagttgtgacaataatataggatataggcttgaattgattcattttttagagggtcaaccaattttggaaatcaaataatagttactgtagtttcgataatatggtgtacgaatcatttatttatatctcaggtagttaaatggttatgggtcctaactcctgtgtaagttacacatgttcgtatttgtcgatgaagatgacttcttagattgttgattaagagctcttcgatatgt

SEQ ID NO: 32495 - DNA, 446 bp, Glycine max
ctttgctgtatgtatctctattctctatcattatcatgtgactgatagattcttcttcacactgcaaacactgagtcattactcaaaaggactaaaaacttggttctatggagaaaggagcaatggtttttccttttccaatagcagtttcttgtctttttattatcgtccatatttttgctaattctgtttcaggtagcctagttttcaacttctatgcagcttcatgccccactgcagagctcattgtgagaaacacagtcagttcatcttcttcttctgattcttcaattcctgggaagctccttcgcttggtttttcatgattgctttgtggaggaatgtggattcttcagttcttgtgctttctttgcatgatggaaaattcaaatgggtttgaagatggtgatcaataattacttcatgatatgtagggatgtgatgcat

SEQ ID NO: 32496 - DNA, 286 bp, Glycine max
cgaggtacgaggcacttaacatcgctggttttcttgacaccaatcttattataatctcacccgacaatgaacaagtttcccttcccactgcaaccattgatggaccagctccaccggttggagctcttagtagagccctcgccaggctaaatactagttctaagttccatcaactacgcgacctcgcaaagggcatcacgaagcaaattggaagccgagcatatgaatttacatctaaattggactcctaccttagagggatggtaggtggtgctggtgcatgttt

SEQ ID NO: 32497 - DNA, 304 bp, Glycine max
aacctttcgcgttctcttctctaggcgcattcatttcgctagattctcactttccaaggaatctactattgcttcgtaagctaaacaaaacaaacacaaactaattatttgttcgggatcgttctgaatatcttaagaaaaacaacacatcacccccatacgataccgtttcgttgggaaacagcaatgggagatggtaattatgatatgagggagttctgtattcctgattacatattagtgccgggatctgaggtgaaaagtgtttcgcatgtacctgcttgtccagtgattgctttcataa

SEQ ID NO: 32498 - DNA, 504 bp, Glycine max
gattatgcagttcatagacttgccttatatttcgccttactcggatttctcaggacttaggcctgggtctagggagaaggagaagcatgcttgtggagttgttcatgagattctgagcctcacacttgagaagcgaacgctggttgatcaccttacgcattttcgagaggagttcagattctctcagcagctgagggggatgctgataaggcatcctgatatgttttatgtctctcttaaaggagatagggattctgtgtttctgagggaaggctaccaagattctcagttggtggagaaggaccggttgttgcttataaaggaaaagcttcgtactctggttaatgttccacggtttcccaagggacctgctcgcaggatagttgaagatagcatgagaggaagtgatagcagagaagatgaaagtggtgaagaggaagaagaatggttagaagatgttgataatttaatgaatgatgatgggtttgtgacatgatgatggtg

SEQ ID NO: 32499 - DNA, 1088 bp, Glycine max
atattttatactccacatttatagatgctgaaaataaatcccacacttaaagatttttataattaatgattaaaaatcaggaattgaagattaatacttatgtcaataacaatagagataacagagcagggtcacagagactagaaagagaacagaagcgagcaggggctttgctagaaaatgctgaaagatgcctgaatacatgttggagaaaagtgagtgtttgtccagaggatgatataaaggattagagagaaccgaacagagcaggttgcagaggtgggtaggaaaatgctggaaatcatcagagaagaacggtgtttgtccagggagacaacacaaaattaggtcactgaaagcatagggtttcagtttgaaccttttgctttaatgaaaggggatgagaaattatgtgtctgccccctaaacagctgtaaatgatgttatttactgcggtgaaattggatttttgttgctgttacctgtcataccacctgcatcttgctacacaaaccactatagtggtggtgaccgctgcattgccaagctgtaatgcagattcttctctgtagcgtcaaattgtgtgacagtgacaccatgccatgatagtggcatgatctagcactattgacatctgtggatttgtgtgttagttatggagagtgcgtttagggaagcaccaagctcacattcatctgaatctcacgtgccttcatttattttttctttattgtttttaattttggaggtgttattttttgagtggttgtgtgcaacagtgatgtgttggggttgtttgtaagaccttcttgttagttatgtatctgatgggaaaatgcctagatacatagtttccataagacaagtttgtttccttttgtatatggtgttttttgttttttaattacgtattacactgaatacaaatggtctgcagcgagcctgagtatccatgcaagcatgttgttggtccgatctttaaaaaagttattccctttaaggtaggtatttacttggaccttggcgtgtttaaaacgcggacttgaaaaccctggtaccacttattgcttgagacatacccctttcgc

SEQ ID NO: 32500 - DNA, 474 bp, Glycine max
cccacgcgtccgttctgatcattggatctcggactaattaattcttcaatgattgatgcataatactataacacatagcaggttggccgctattctaaagttgtgaaatacacatggaataatttatactccacatttataaatgctgaaaataaaacccacacttttaagacatttatatgattataaatcaggaattgaagcttaataatactttatgtgagtgatgtcaataacaatagagagaacagagcagggtcacagactaaaaagagaccagaagtgagcaggtaccagaggtctttgctttgctagaaaatgctgaaagatgccgggatacattgttggagaaaagtgagtgtttgtccagagaatgatataaaggattagagtgaactgaacagaggttgcagaggccggtaggaaaatgctggaaatcaccagagaagaacggtggtcgtctagggagacaac

SEQ ID NO: 32501 - DNA, 442 bp, Glycine max
aacaagatgaactagagaacatgggtttaagctctttgcactcctctctctctggtatgatactcactcactttcattaattgtctcaaaaccactgttttcttcttcctttgagaccaaaatttttaagcttgtgtctctggcacccgaaaacctgcttctcgtggcaatttcaatatctgtttttgacattttggggtataaaagaatcttttttaattatttactctgacattcttcggtttagttcatttttctgttcatgttaaggtttctggttttgatttttaacgctgcctgtttctgggtcacttaaaagtttgaaactgtgagtaatttcaacactccgttgaagtggaaaaatggcgtccatgccttcgaaaaacatatgtattcggaggcaacaatgcccttgtggagattggaaatgttatattacata

SEQ ID NO: 32502 - DNA, 366 bp, Glycine max
tctcgagccgattcggctcgagatctacattcaaacagcacactctctgtttcattcacaattcaaacctcaatcgccatgtctgaccaagaaggtggcaaagggtctccaaagtcttcgtctttgggtccatatgaagaagccatggaggccttgtcgtctttgatcactagacgcactcgtgctgatgatagcaacgtgggggatcagtttagcctgttatatgattacctgaagatgctagatttggaggagccaattgctaatatgaagattatccatgtggctgggaccaaagggaagggatctacctgcaccttcacagaatctatattgcgtaactgtggttttcgcactggtctcttc

SEQ ID NO: 32503 - DNA, 571 bp, Glycine max
aatcctttaggtctgcaactagtgaaacaactagggcaattaacatagacagcacaagtcatcatgaggaaaaaataactgacataaatgatgtagctttagatggcaaggatgtagaatctaatttagaaaatgatattgaaattatattgaaagatcttcaacccggtgacatcttgcaatctgaagtcaagcaatcagatgacttatttaagagtgacagcgctggtaagagtgatgctgctggtgaaatgggtaaaaatgaacatgatagtcctgatgctcaatgcatggaaaggctcattgtgagtgatacttcattgcctaaatctgctaccagtcattttgaaagcccagctatttcagagtcttcagacattgtggatgatgggcctgtgaacaagtcaaatggtacagagtgcagaaatacaaatccactaccaggtgcccagaaagacataaaagaagatgaagtctatattaatatcagactaaatgaagaatatagcaagtctgttgatgttgatactcctaccgagtcacatcaagcagaagatgctggactattagt

SEQ ID NO: 32504 - DNA, 474 bp, Glycine max
ggtcaggtaccgggatctggtcccgattcgcggtgaagtacaaacagaccgtgcttcgaaccggctttttaggaaccggaccggttcttccagataataaatgaactgctgctggttcttcaaccgctactatgactcctagctcgctcttcaaaacgtcgccgttttggagtctcacgagcggcgaatcggaattatcgaggtcgaccgaaacggccttggagttgagcaggatcgaaccggacggcaacctcgccgccagctgttccgggatcgccgatatgcccctcgctggaagagtgttgtctccgagggcgaggcatttgaagatgaaattgaacaagcgcgacgtcgtttccaggtcagggtcgaagaagattccgccgaagaacggacggaagaatcttcggatgatggaatcggaaaaccctagtttttttagtagttcgattgtggggacttcctctgcctcgt

SEQ ID NO: 32505 - DNA, 275 bp, Glycine max
cggctcgaggaggaatctcatatgaaattgagtggagagattcccagagtgtctgctgaggaactggctgatttgaaaaaaatgcttcggaaagagactcatctaagaaaagctgctgaaggggaagtaaacaatctgaagattcaagtggctgaactaaaaaagtcagaggcatcaagaaagtcagagatcttaaaacttcataccatgttggaagataaggaacgccaaaaagagaaacttgaaggagaaatagcaatattacaaagtcaatt

SEQ ID NO: 32506 - DNA, 375 bp, Glycine max
ctgacgcgtgggcggacgcgtgggcggacgcgcgggttggaggggaagaaaggcgaagatatggattcgctatttgaagggatggcgctgtttaaccctgccgaagagaaagacaatggtagtgatgattctctcacaatctcaagttgttcgcaatcacaaccccttgatgagaatctcttctctgacctcacgcttgtggtagatcccctccaaaacctagaagtagctgaggccgcgcgcgatctccaatcgagacagggtcatgcccccgccagaaggagaaaacgatctggcttgaggataggatatggtagagacgcctttttttccaacgatccgactcacacttcttctgcgctcccccaacctatt

SEQ ID NO: 32507 - DNA, 298 bp, Glycine max
caaaaagtaaaaaaccagtcagggaccggggaaaacacacaattcacaaaggcattcgacggagaatggaacagaagcggaagaggaagcagcaggtgaagcgcgacggagagccaaagcccaaatcggttcgtgcgggttcaacccgaaccgacaatgtgaaagatccatttccatctcatgctcgacccaccccacaggaatgcgaaccgtgcgtgacactctcttagccctacacggcattcccccggaactcgccaagtaccgcaaactcccaccgtccgatgacccggtccaa

SEQ ID NO: 32508 - DNA, 539 bp, Glycine max
cagctggcgactctgtcaagttcgaaggctgtgaacgaatttcttgagcatcagaaggaaaatataacaaatttgataaaacagagtttggcagttggtgatatttataagcgtgaaaatctgcagtttgttactgaggaccttgtcaaagaggttgagaattccattgctgaattcaaacgtcaaaaccaagaatatgatgaggaacgggtgaagggacaggttcaagaaatactagaaggagctaaagtgcttgaatggttgagagaacatgcagaggttcagtatataactaaatgagagatgagcactagccaaaacaaatcaggaaaatgaaattgcaggttcatttgaatgtgttttgtttcagcggatgtaagttgtgagaaaataactattcttgattgaattttgaagaaagaatattaagaatagaataatgcattacaagtttgtatattgagactttgatgataaattaatagtagataactctaacaaaaaacagtattgaaaaacaccaatatattaatcattac

SEQ ID NO: 32509 - DNA, 390 bp, Glycine max
  unsure (1)..(390): unsure at all n locations
cggtagcgtgggctagncggctacagttagcagttttttgagtgaagtagaatactgatgtgagaccaagaaacgcgaaccgtcggatgaaagcattcacaacataaaaaaaaccggttgggttgggttcttatccacgccagtgtcatagtttagttttctcgcagacaaaaacgccaccccacgctcttccattatggaaggtgcatcagtacctaagattttcatcactaatagatttatcttcctctaaaaccaccatcacaaaaaacagaaaagcactccatcctccataaaataaaacaaaaaacgagaaaacctcttttttttttcttttttttattcttttcttgtttctggacaatgctatcaagatcttgcttggggcta

SEQ ID NO: 32510 - DNA, 464 bp, Glycine max
gagccgattcggctcgaggactacaatggctgtctcaaaatcttcctctcttggtcctgggcgttacaacgctcacagtcacaccctgttcaaccccccaaaacctcgtcacggtcttcagcggttgccgtcacagcatcagcatcagcatctgcgcgtgcaattggaatcgataacgatgtttcagttaagagtatattataccctgcactctccctttccaacattcttcacttcaagtcaacctacaacgtgcagatcgtggtgtccgaggacgagcctgaggacagaatcgtcaaccgctttaagaaggaggtcctcaaagccggtgcgcttcaggagtgcagacgcagaaggttctttgagaacaaacacgacaagatcaagaggaaggcccgcgaagcttctagaaggaaccgaaagaggttgtttactttcctttccctatctaaataaaagcaaat

SEQ ID NO: 32511 - DNA, 262 bp, Glycine max
cctcgagccgattcggctcgagataccctctctctctctctcttcacctttgtcatggcatactctcttctcttccctttcggcaggttctttctctctctctcttttttgtaatataattcttcccgaattccaatcttgttcaaccatggattcagcatctttatgcctttagctgtattatcaatagcaatatttatgtacaaagtttatgtctttttgtgccaatcctgctttagctcgtgaaataataaatttcttg

SEQ ID NO: 32512 - DNA, 326 bp, Glycine max
accaaaactattgaagaatttggtcaagtaatgaagttgtgacgtctcctcatatattgaatgttgcattgttgaagtggactatgacttttacggtctgaatggacccttatttgtttctttcaagcaggaaaagattttcactctgttttgaatttgtattacatgatgtttcaagggtttaatatgtaatgcttagtcactctaattatcttcttctactactacctactctcaattcctgaatgctaattgttgacatgacacagacaaacatgacacttgttttcttatatttagaaatttgtaatatattgtatttgttt

SEQ ID NO: 32513 - DNA, 273 bp, Glycine max
gctcgacgtcgagccgaatcggctcgagattgacttgtaggatatctagggcgaatcacgtaccaaaatgtctaagtacatttcaaacactaataatgtgcagcaagggaagactaattagcttcaaaacccaattgaattcagtgacgaacagattctggataatgtttaccgaacccattatcattgtgttgagaagtgcgctgtaacatctcttcacaccgttgcctcgtgcgttatcaaccactcattgaaatcacggacaccgtgatt

SEQ ID NO: 32514 - DNA, 554 bp, Glycine max
  unsure (1)..(554): unsure at all n locations
ctgataacgagaaagaaagaaagacagaaagacagaaagaaaaattcaaattctccttcgattcaattcaattctcctatcttccccgttttcttgctcttcttgttccagttcttgaactcacccagctagctgaattccgaaaaagcccttttcttgtcccgaaatgccgaaccccttttcttccgcttagccaccaccaacccgccgccgatccccgtttaagatgatcgtccgcacctacggccgccgcaaaggaaccctctcgggaacgtattcgggctcgtcctctctaaacgacgacgtttcggagccattcagggattccttatctcaggagattgacgaccctctctgcggcttcgcgttctcctcccaggactcgtcctcgcagcattggtccttcttcgattcggagatcggcgacttcggaaacggcaccggcgcatgcggagcaagggagtcgaagagggcgaatcgggcgccggcggaggggattccggcgacgtcgacgctgatggaggcgcangagttcggagagatgatggagcacg

SEQ ID NO: 32515 - DNA, 459 bp, Glycine max
atcgattctcatctcgcgttatgctgagtatgacttccacaagtcactgccattgaagcttatatttggactgataagtttgttcatctccataacaagcatgatggttgcatttggttgttccttcttcataacttattactatggcatgaagtgggttcctagtttcatctcagtacttgcatgtctacctatacttctctttataggtctgcaattttcgctgtggtcagttattatctactcgacctactactgcaaagctctctttaagccaggtaaaaagatgctctacgtggtagagagaaaaggatacaatgtttaagataaatgaaggatcatataatgtttcgttgaagtttgtaatatagtagttggcaacaatttgtattgtaagggtattttaaataaatttgaaatgtgaataatatatttgcacaatgattattttattgatac

SEQ ID NO: 32516 - DNA, 409 bp, Glycine max
cgatcaatgagggtgggtcaacgagtgacttggaagcaagtaagcaacaaaaacagcggtagttacaacttacaattctcgaactcacacgcagagagagtagttcagtgtggagagatgagtgcatatttgataacagccattcatctgttacttgtgttcctgtcatcatccacttccctttcgaccgtgttcggctccgaggaggaacaattctatgccaaagaaattctcggagcagcacagaaggagaaggaatggttagtttcagtaaggagaaagattcacgaacacccagaacttgctttccaagaatacgaaaccagttctcttatacgcagtgaactcgacaagcatggcatatcttacacatacccagttgccaaaaccggcatagtggctcatcttg

SEQ ID NO: 32517 - DNA, 426 bp, Glycine max
gaggagtccctttcaacaaccctaatgtctcatttttgcacaactttcacattacattggcagacacttcaccaacttcggcttttcagtacttcatttcaacagacggagtcctcaatgcaaggggaagggttttgggtggcgccacttccattaacgctggcttctacactagagcagacccttgatttataaggaaggtggggtgggatacaaagctagtgaatgtgtcatatccttgggttgagaagcagattgttcaccggccaaagttttcagattggcagagagcagttaggcacgggcttctagctgctggtgtgtctcctttcaacggcttcacctatgatcacaagtacggaaccaaagttggtggaaccatttttgacagatttggccgtcgccacacagctgctgaattgcttg

SEQ ID NO: 32518 - DNA, 297 bp, Glycine max
gaactaataaagactaaaccatcggctatgtaatggagagcttctcaagtgaggcaatatgatcttcttgaggaactttatggttcacatcgtgccacgggactcgtggaatgtattccgaggcaaattcatcaagctatggataggggcaatgtcaagtttatctaaggaaaaaggaagcagagatggcaaacaaaagacaaggcataaaacatctcaacctcaatcacctgagcccgaagcatctgaggacattgcacatatattggatcatagtctctatttctgaaaacaaaa

SEQ ID NO: 32519 - DNA, 411 bp, Glycine max
cgcccacgcgtccgcccacgcgtccgtccacgcgtccgcccacgcgtccggggaagaagaaagggctatacttcaacttcaacggtcgggtaattcaaaacttatcaacggtcaccaaattcaaatttgaaggatcccattcccatccctcgccacggttcgaagcactctgaaattttctctttgccacggaaccagctctctctctctctctagaaattccttcttgattgccaagcctccatctttcacatggatccgactcaatcgaacgacgttcagcaatacccacaaaccctaatctcagagcctaaagattctccaatgcacgacgccaacgagtccttgttcgattcgatggtttgcgactccagttcaagactggtcccaactgggcttacgagatctgac

SEQ ID NO: 32520 - DNA, 513 bp, Glycine max
gggcagtgacagacgcacctcaacctcttggaacgtggcaccttcttcattggaagttcggccagaccttcacgggcaagaatttccgcgtctgaaaaaaataacaaaatttaaacatggatgtttgtttttgtagttgcgttttggttttttagttttcccgcgttcaactttccctctattttcccgggaaagtttgaagccgtgttttggtttaagtgtgtagtaggggacagaaagtaagagaagggtagataaggtaaaatgaaagtgactttgctataaatgctagtagtgggtgtgagtagatgtttctaccaccttttgttattggagggtgaatttgtgtgatattaattattactaaagtgtattgggtgttgctggcaatatttattacccagcaatgctttttgttgacttggtgggggctgaggaggctgcaaggttcatgtagcccgcatctcctttattatgaactagaaacattatattatgtaatatctttcagtt

SEQ ID NO: 32521 - DNA, 476 bp, Glycine max
taaaattctaataaatccaccacatccaacatctctagcttgtttcaattccttccaattttgcaatggccactactctttctgaagcctatagggaccaccctctccaccttcatcatattatccccttagacttttcttcacttaggaccttacctgattcgcatgcatggcctcaatctgaagatggtgatggtgatgatgataatcatggaattggatcacccatacccatcatagacctaatggatcctaatgccatggaactcataggccttgcttgtgagaattggggtgctttccaattgaagaaccatggcatacccttgagtgttgttgaagaggttgaagaagaggcaaagaggctctttgccctccccgccgaccggaaactcaaggcgttgagatcggtcaccggtgccaccgggtacggccgagctcggatatcgccattcttccccaagcacatgtggcat

SEQ ID NO: 32522 - DNA, 539 bp, Glycine max
taggcataaacacagtgatgtactacagcccaacaattgtccaaatggctggctttcaatctaatgaggtggctcttctcctctctctcatagttgccggcatgaatgctgccggatcggttcttggcatttaccttattgaccatgcaggacggagaaaattggccctatatagcttagggggggtaatagcatctctgatcatcttggccttgtcattttttaaccaatcatctgaaagtggtttgtatggatggcttgcaattcttggtttggccctgtacattgctttcttctccccagggatgggacctgtgccttggacagttaactcagaagtataccctgaagaataccgaggaatatgtggaggcatgtctgctactgtgaattgggtctcaaatctcattgtggtacagtcatttctgtcggttgctgcagctgtaggcactggccctactttcttaattattgctattattagcgtgcctgcgtgtattgtttggtgtgtctatgttcctgaaaccaagggattgaca

SEQ ID NO: 32523 - DNA, 508 bp, Glycine max
cttcaaagggaatcactaagactaaaagaagagaattgcaaactgagaactatgttggaccaaatcaccaaaaactacaaccagttacaattgttcattgctttgcagaagcagaagcagtggcagaagatggagacaaatttaaatgggatgatgtttggtcaacattgattggacccacgaggaccattcaccaaattagacgctcaaggtgcaccatttgcagatgataaatctggtcaacggggtcatcctgagactgatcctgtagaagatgttcttgaacaatcaacctcacagagttggggctcatccaagagtcccaagtttgaagagtccaactctagtgagcttcctttaaaaaaaaccagggtttccgtgcgtgcaagatcagaagctcctctgattagcgatggatgtcaatggaggaaatatggacataaaatagccaagggtaatccttgtccccgtgcctattatcgttgcactatggccgtaggatgcccgg

SEQ ID NO: 32524 - DNA, 262 bp, Glycine max
ttcgaatttgcgctgtgtgcaagttcactaggcattcttgaattgaattactatttaaacggagtcagaatgtcttgatctgtcaggattgttcgtttctatatattgagggagtgatttattagtgtgaattgtaagcactaaggttttaaattgtggccccagttgcaattttgtcgagatccttaatattgcagagaattactgacaaatgcggttgaagttgtggtttcaatgtagtttggagactccaaaaactgac

SEQ ID NO: 32525 - DNA, 286 bp, Glycine max
ttcggatcgagggggtctatcgacactaatactaatgcaattagacatttacaccactaattaatatgtagaaaatgattttgattagtctaattctagaattatagctaattattatgtagatcttacatgttaaattttagaattttaaaaatattattactcaatcaataatttatttctttgaaaagtaatttatacattaatttagtgaaatacattttggtagagtaagacacaaagttacatcgttcaaactttctgttcagcaatgaatttgtgagaa

SEQ ID NO: 32526 - DNA, 473 bp, Glycine max
  unsure (1)..(473): unsure at all n locations
cactctacacgcacctctcccattttcaattcacattttccttcttctttgttctttccatcatcttcatatttctcaccgcctcctcatcatagattttttcattcacaccttcatcatcatgtatgaaacgaaaccttgttaaattagtagcatgtaacacttcgccaccttcactacttattatcgcatatatattacaagtgtaacgtttcaacttatcttttgaaacatgtcttcttctttttcaccttcttggttaacttctccttcatgttccgctttggacatagtttcaccttcccctactgcgttactcataattcagtggttgaggtttattcttctatctccatgtccacaaagagtccttctttctgctgatgattcaatcttcttgctctctctcttagcctttgcagcagttaaactctattcccgattcacttctaacaccacctncaacaacacca

SEQ ID NO: 32527 - DNA, 396 bp, Glycine max
gaatgaaagccattgttgatgtggcagaaggatttgtgtatcttgtgagctcagtgggggtcactggagcccgcgcatctgttagtggttctgttcagtcccttctacaggaaattaaagaggcaactactaaacctgtcgcagttggttttggaatatcaaaacctgagcatgtgaaacaggtagcgggatggggagctgatggtgtgattgttggcagtgctatagtgaaggtgcttggtgaggccaaatctcctcaagagggactgaaagaactggaagttttaacccgctccttaaaagcagcacttccttgaaaaataagcttttaagagctcgaacttataatagttgttgtcatcatagatattggattcaataaaatgtggttcaatt

SEQ ID NO: 32528 - DNA, 310 bp, Glycine max
gttcattgatgagctggatgctgttggaagggaacgtggcttgattaaaggttcaggtggacaggaacgtgatgctactcttaatcagctcctggtgtgcttagatgggtttgaagggaggggagaggtgatcactattgcatccacaaaccgaccagacattctggatccagcacttgtgaggcctggcaggtttgatcggaaaatatatatccccaagcctggccttattggccgcatagaaattcttgaggtccatgctcgtaaaaagccaatggctgaagacgtggattacatggctgttgctagt

SEQ ID NO: 32529 - DNA, 581 bp, Glycine max
attcagatccccttgaattatattttcacactctcaaaaggaaagatatttattaatactttaatgtgttatgaaaaagacgtgcggctctctgaaaaaaagaagtcccttgccgttaacaaagctcaaaacgttacatagcaatacgacgtcgtcacgaacctgccatcgcatttcaaaagttaaaaccccacaccaaccaccgaccaccgctttcagatacgacggtgaatctctctctctctctctctctctctctctccaacattttttgtgcaaatcccttttcaccaatccctgcatttgcgataccatgttccccttgaatcgcatagaccgacccaccaaacctaactccaaaaaggcctaatttttgcactcgttacagctacccaatagctttttgcaatctgggtcgaacccatttcgatttgtgctcgctggaatcttatggtggagaagcatggaggaaattgaaggggtgaattgttgcagtgaaagtgaaagtaggagctccagtgagactcgagctgccaatcccaacccaccttgatatcgccaatgcaaacttgttcgccacg

SEQ ID NO: 32530 - DNA, 490 bp, Glycine max
  unsure (1)..(490): unsure at all n locations
ctagaaccatgaaaggttgttatgacactattatgtggaaacatgaattgaataaacttgaaaatttggagatgggagaagaggtgaaggaagaagtcttcacagtactaaaacgtagctatgataatttaattgaaaaggacctgcaaaagtatttgttatattttgcacagataccaaacaattctggtttccagtcaaaaagctacttagttaaaaagcttggtgagagntgtttgttaaaaaatgtaaagaggagtttgagggaagtatttgatgaggcgtgtgccatggcgaataaactcgtagaccattctttgtttgtgggttatgattaccctacaaaaatgcatggtctggtgaggaacatggcatgccgtatcttgaatgagagtaacaattacatggtgaaatgtgaaggaaatttgagtgagatacctgacgtgaaggattggaaagtgaatttgaaggaacttccttggggggaaac

SEQ ID NO: 32531 - DNA, 1014 bp, Glycine max
cgattcggtattaattgcaatttgaagccgtcatcagagtcacagccaagcgtatcaactgaagcttgtgatgaaacagataatgtattagcacaactgaacaatgagacctctgacaatatggatgagagtagtatacccaatggaatccatgaatgttctcctcgtgaggatcgtacactcccaatattgaagaaaatccttgacttgagtactaaaattcagaatttgaagaaacaacatgtagccctatctgatcaagtgaaactcacagctgagtcatttacaggcctagatgttttaaagtctgttcagcttcttggtactgaatatgaagtgttgaaaaggaagtacctagaggagtcctctgagcgtaggcggctttacaacgaagtgattgaactaaagggaaatatcagagttttctgtagatgcagaccactaaatgaaagtgaaattgcaaatggatcagcactatctgttgtcaattttgagtcatcttctgatgggctccaagtcatttgctgctgattctgtcaaaaaagcactttaaatttgattatgtattcagacctgaagataaccaagagactgttttcgaacaaacaatacctatcgtcacatctgtattagatgggtataatgtttgcatttttgcatatgggtaaaactggaactcggaagacctttactatggaaggaacaccacagcataggggagttaactatagaaccctggaggaattatttcgaatatctgaagagagaaatgacgtaataaaatatgaattgtttgttagcatgttggaggtttacaatgagaagataagagatcttttggtggaaaattcagttgaacctactaagaagttggagataaagcaagctgcagatggaacccaagaagtcccaggactcgttgaagcttgtgtttatggaacagatgacgtgtgggaaaagctgaagtctggtaaccgagccagatctgttggatccactagtgctaatgagctt

SEQ ID NO: 32532 - DNA, 647 bp, Glycine max
gtttatagacctgccttatactgttaaagggatggatgtatcttttagtggaatattgagctatattgaagcaaccgctgctgaaaagctaaagaataatgagtgcactcctgcggacttgtgctactctctgcaggagacactgtttgccatgcttgtggagataacggagcgggctatggctcattgcgacacgaaagatgtgcttatagttggtggtgtaggctgcaatgagcggttgcaagagatgatgagaatcatgtgctctgaacgcggcggaagattgtttgccaccgatgatagatattgcattgataatggagcaatgatagcttatactggcctccttgaatttgctcatggggcatcaactccactagaggattctacgttcacccagcggttccggacagatgaagtgaaagcaatatggagagaagcaaatctggcaaaattgaatgggcttgcagagaagagcacttgatttgtcattcttgaggtgcagtcctattcttgggctgttgggcactcaattaagcctttagtgtagaatatttagcgtgtttttgggagagttcctgcacaattatttattttgttagaattgtttttgatgtgaagaatttatgtgtggaagttagtgtttt

SEQ ID NO: 32533 - DNA, 236 bp, Glycine max
caaaaatttggaaccctaatatgcaaattaacttatcatcaaggctagtacagatacaaagtcctggactcaatcccatcttcaattcccatcttagctacttctcaaaccctcttatcatcacaagtcacagctgcaaagaaagtactagtaaccattctctctctctccttccacgcaataatcaatatacaatcaacctttatgatacaaagatccccaatccccaaccgtta

SEQ ID NO: 32534 - DNA, 319 bp, Glycine max
cgtgaatcatcgttgttgtcaaagtttaatctctcattccgtgttttccccatattttgggttggctcggcattttaatggttctgtttctcgggtggctgaggaaagagaatttcttattttgatttcatggacagccagaatgggtgtatatatattagttcgtcagatgatgacttggaggagatagatgatccagggaggactcttccgcaatgggctactactactgtgaagagttcatataatggtggatggtctaggcgggatagttcttcaagaggggcaaatagttcaaacccaagctcttctaatgttt

SEQ ID NO: 32535 - DNA, 239 bp, Glycine max
atcgagccgccttgagcaactttcaagctttgagagcactgcgaataatagggttatcgactcaggggtactcaagggtataagtctagaagatataaagcgtgctggagagcgtctgatactacaagatggtgccctaacttctttcagagcattgttaagaatgaaaatttgaatgccaacgtgcatgttctttcatactgctggtgtggtgacctcttaggctatttctcttcggg

SEQ ID NO: 32536 - DNA, 250 bp, Glycine max
gaagacatttaccaaggaggtggttgaaaccatggcatccctgaatgaggttctttcttgttttctctaataatacttttgctacctcatgaaaattgagaagattctgtctctaacatttgtgatatttcttggcatgtagaaaccactcattcttgctctctccaacccaacttcacaatctgagtgcacggctgaagaagcttatacatggagcaaggtaaattttcattatatcataatgcttagc

SEQ ID NO: 32537 - DNA, 630 bp, Glycine max
tcattccctcctaaagctcgtgtttattaggatacttactgaattattactatggatgatttatacggattggttcacgaagtatgaagtatggaatggcaagtgcaggtgaaaaaggattcaataaagtgtcgtagatgcatgactttgatgataatcgttttattcatcatcaatgctgaacatgatctattccaggcaatcctcaatgatgtacgatgtctgtatttaaagctgaaaataatagccataaaatcccaataagtgttcactttgttgatcaactttgaccagtgtacaatgtgctaagggtttattttctgctccctagtagttttagtctgttttatattcatttttatttttctaaccaaagtagcaaatggaagccagctgctaaagtggcttatgggaagtaaattgtggaaaataattgaagcattattttaaattgagtttgttaaaaaaaaaaaaatgaatataaaacggactaaaactactagggaccagaaaataaacccttaccacattgtacactggtcaaagttgaccaccaaagtgaacccttattgggtttttatggccataatttccagcttaaaatacggacttcgaacatcttggggattc

SEQ ID NO: 32538 - DNA, 287 bp, Glycine max
ctatggggaaggtggaaggtcgttctggatacactgacacaggaccattggggtgcctgccatacgtgctggatcgctatcccatgaaaccaactcaaatggatgagtttgggtgtgccaaaccattcaacgaggttgcccaatattttaaccgtaagattgaaagaagttgttgagcaactgcggaaagaattgccaggagctgcaatcacctatgttgatgtgtatacggtcaagtacaccctcatcagccatgcccaaagatatggtaagcactagacaaacac

SEQ ID NO: 32539 - DNA, 346 bp, Glycine max
ggagaaacgtgaaaagcgtgagaagcatcattctcgcgaggataggaagcaagagaaacgagagaaacatgagagggggcattctcgtgattcagatggcaggaagagacacaagaaagataaggagaggagaagacatgattctgattgaatatactctatgggggattttcttatctattgtgaaatagcatgtttatttctattttcataacttaatatggatgctgtaccttggtaattgaccgtcctaaatgtctgcatgtttgtcctaacaatcaggcattctcatgtgttattttaaattttggaattcgtgaagtgaaatgaagccaattacgcttag

SEQ ID NO: 32540 - DNA, 502 bp, Glycine max
accaaataggtatttagttagcctttttagttccagacagtatgtcatatataggtatccttgttttgtttgtgttgtgtaaattgctgacaaatctcaggtgatgccactgtctggatttctcataagcacactcttaaatcttgcaccacattttgcagcaggtttaatattaattgggtgcagtccaggaggcacagctagtaacattataacatatctttcacgtggagatgtggcgctatctgtaataatgacaactgcaagtaccctaactgccatggttacagacaaaaggtgctttaatttatttccagaagctggtcgatgtacataatagagttggtcatgcagggggagtacgtggtctcatcattgttcgacatcttcagttgttttcgtagtgtgagtcctccttgcttaatatgtactcattcataaaatattaatttatttatacgatgcttaattatataataaaaaaattacatgaacttatcat

SEQ ID NO: 32541 - DNA, 472 bp, Glycine max
cttcttcccttcctccccaagcataacatagcttcctcgattcttcgttctagggtttgaaaagatgaacatttgtggttgttgggtttcatcaatgaaattgcccttcctcgggtggcgcttttcaaggccttttacctctctctgttcttcttctttttcgccacgcattatgaccattcaaagttgttcttctccttcttcttcagcctccttatcaacgtcagagtcgaaagagatgaagaaggaagcttcaccttggttaattgttggcctcggcaatccaggcaaaaagtacgctgccacccgccacaatgtgggctttgagatggttgataccatagctgaagctgaagggatatctatgaccactgtttccttcaaatccttatttggaaaaggttttatagggtgatgtaccagtcatacttgcaaaaccacagacttatatgaattcaagtggtgaatctat

SEQ ID NO: 32542 - DNA, 509 bp, Glycine max
caagatttatcagcaccaaaaagacaaaggactgtgtcacccttcttaggattgaaagctccaagcagaggagcttcttgaaggttcaaaaatgctggcgcttgctgaacaatctgccaagaagcaaaagctgagaatttgggagaactatgttgaaggggaggaagtatctaatggtgcacctgtcgagaacaaacaacaagaagtgctcaaggtgacagtaacagaagtcttgggtggaggtaaattctatgtgcagcctgttggggatcaaaggatagcatccattcatcaacagctttcttttttgaaccttcaagaagctcctctgcttggagctttcaatcctaagaagggtgacacagtcctttgtctttttggtgctgataaatcttggtaccgggcaatggtagtcaatggacctcgaggacctgttgaatctccaaacgacatgtttgaagtattctatattgattatggaaatcaagaagaagtaccttactctcagc

SEQ ID NO: 32543 - DNA, 446 bp, Glycine max
ccctacgcgttcgttccacttcagaatcagaggcagtaccagctgtaagtaatgagacttctggatattagtattgggagattccaaaactttgaaaacagaaactactgcccctgttgagaaaactgtagaagttgagggagagtcaaatgccgaaagggatgatgattatggagattcatgggaaactgaagaaataccaaaagtggtctcactagccccatcttcagcatcagatggcccagcatcattcaggagccttagtgggacaagtgatgatggagggaatagcattggaagtctttcaagattagcaggtttagggcgcggtgcaagacgtcaactagctgctattcttgatgaattctggggacaactttttcatttccatggtcaatttacccaggaagctaaggccaagaaacttgatgttttactgggagtag

SEQ ID NO: 32544 - DNA, 529 bp, Glycine max
acgagctcaagcgcatgagatcgccatctctaagaatctagtcatttctttgattcaacctgtacatgagacacaaaattcatattccatcaggaacttcattacaattttccaataaaaggaaattcttgatgtaaagatgttctttctcttcaacatttcaatgaaccttcctcttgtctgtgcatgaaaagtccgtctctgaatagtatattttatgtacagcctcaatttcttcattcatgtaaaagaaatttttgatgttggtgtacagcctaaagacattatttgctttcaacttaccatgtcataatatggagtgctacattgatttgttgtccatggctgagctttgtgagggtgtgtggtgttgtgtgcagcttttgacaaaattacggttttctttgcatagttctctttatgtgataacctctggattaatctagactatctttgctcgttgtttcttgacattacattttgttttttggattgataaaatttagaggaaggggatggtgccccaata

SEQ ID NO: 32545 - DNA, 598 bp, Glycine max
  unsure (1)..(598): unsure at all n locations
ctgatgctccacaagcgacactacattttctttcaacnagtattatttacagctatcatctaacgaagttttaacctacaattggaatggtaccatcatgttcacctgaaattagaaatctaccaggcttagagaaggtttagaatcatggtgtggattttcaccagagcataaggcctactcagatgggtctttccctcaatattgatagggcttctgctgcgttcattgaacctcttccacgttgtggaatatgttgaccagctattaggaaaagatatcctgtcgaggcaattgtccgacgctgatcgcattaaaattaagaaagtccttagaggtgttaaagttgaagtaacccacagagggagtgttagaagaaagtatcgagtttctggtttgacttctcaaccaaccagagaacttgtgtttcccgttgatgagaattcaactatgaagtccgtagttgaatacttccaagagatgtatggtttcacaattaaatattctcaccttccttgccttcaagtaggaaatcaaaagaaagcaaattatttacctatggaggcctgcaaattgttgagggacaacgatatacaaa

SEQ ID NO: 32546 - DNA, 388 bp, Glycine max
gtggtcgtcaacacctcatggaaacaagaagttggagaatgcttatgaggatgcaaagaaaatagcagctgaaaagtctgaagtgtgccctattttcctattgttttctgttaatgcaagtggacagttctgtggggttgcagagatggttggtacagttgactttagcaagaatatggacttttggcagcaagataactggagtggaagctttcctgtgcagtggcacattataaaagatgtaccaaatccaaattttaggcacattatactggagaacaatgaaaataagccagtaactaatagcagagacgcacaagagataatgtatttgaaaggtttggaaatgctgaaaatattcaaaaatcatacattgaagactctttgc

SEQ ID NO: 32547 - DNA, 284 bp, Glycine max
aaaaacaactcctccgccattgctcacccaaccctattccatttccctcactccttcactccttcactcagtccctatcaaaatgcacagtgcaacgcacgccgaagcagagcgtcttctcagcatgcaatcccatcattcgcgaccttggcttggactcctccttggagctgcacacagtctcggaggacatggtcgggcaaatcacaatctcaccggcccctttgatttaggtgtcaaatttgacggcgacatcgcaggacctacactgcagtctcatggac

SEQ ID NO: 32548 - DNA, 267 bp, Glycine max
ctaaagcctatacaaacacaaagaacaatataacactttctaatatgttctagagtctagatctactcattctccttattcactctttcttgagatataaatggaagattcagaggaagaagagcttctgaatcttactctttcagttgatgccggtagggagaggagaattaagaaaggaaggacaagggataataataataacactaattctgttattattcctatgaagtccaatgacgggtatgaagggaagatcttcaggct

SEQ ID NO: 32549 - DNA, 498 bp, Glycine max
ctgttgttctttggctttattgaactgctgtatttctcagcttcactgacaaagttttgtgagggtgcctggttacctattctgctggccctattcctcatgattataatgtttctttggcactatgcgaccatcagaaaatatgaatacgatcttcacaacaaggtgtcactagattggcttctagccttaggtccaagcttgggaattgctagagtcccaggaataggcctagtgttcactgacctcaccactggcatcccagcaaacttctcccgctttgttaccaacctccctgcatatcaccgcatccttgttttcgtgtgtgtaaaatcagtgcctgtccctcatgtccctgctgctgagaggtatctggtaggccgtgtaggacctgctgctcatcggtcctaccggtgtatagtcagatatggatatcgtgatgctcatcaagatgccgattcctttgagtctgaactagtagcaaggcttgctgatttc

SEQ ID NO: 32550 - DNA, 430 bp, Glycine max
agacggttgagctttgaatttcttgacacagcagtttcgtgcttctggccgcgtgattgcctggtactcagtgctattgctattagcattgattttcaccacaaagtgtttctagaaatggagcaaaaaggaggtgtgcttatgcaacgatatgaactggggagattattaggccaaggaacctttgcgaaggtttaccatgctagaaacatcataactggcatgagtgtggccattaagattattgataaggagaagattctgaaagttgggatgattgatcagattaagcgtgaaatttcagtgatgaggctaatcaggcatccacatgtggttgagctttatgaggtaatggccagcaaaaccaaaatttactttgtcatggagtatgtaaaaggcggtgagctcttaacaaggtgtccaaaggaaa

SEQ ID NO: 32551 - DNA, 335 bp, Glycine max
ggggaagacattttgcagcaccagcaatcaagtggtatccattcagatgccaatacattaggtggttctcaagttgtcaaagaattcgaatcaggcacgagactatcattcccttttgacacgcaagcatgtgaacccaaagacaacagcaactcttcgcaaccatgcattggcggaagagatcattcaggagtgatcataagaaatagtgagaccaacattgttggtaggtaggtatatgatgcttatgtgaatgatatgtagctaggttcgtgcatgcaatgcaacatgtcttgaaaagcttttcaccagagactgcagaagggagaaagtgg

SEQ ID NO: 32552 - DNA, 431 bp, Glycine max
  unsure (1)..(431): unsure at all n locations
cttgaatgtttgtgagctcggatctatctgaatggggcaagcgctgtcgcgaattcaccgtatgattgtttcgagcagtgtaaaagagaaaaagaaaaacacagcaatctcgcgagttcaacctttagccatggctagcaattgttcaatagaaggaccactagtggaggagttcacttaccaagcaggatcagctcccttcaagagttgtcatgcttctaccattgttgaggttgataaggatcattttttggttgcctattttgggggtacattcgagggggcacctgatgtgaaaatatgggtgcagacttacaagaatggaagatggcaagcacctgtaattgctgatgaagaanccaatgttcctatgtggaaccctgcactgttcaaacttccatcagatgagctacttctgttctataaaatag

SEQ ID NO: 32553 - DNA, 341 bp, Glycine max
tcggtaagaagttgaagccatggaggctataaggaaggtcaatttgtttgaatctgcccatgtgcgtgaagtaaagctcagaaaagaggctgacgatgcactgacagatacagtacaagaacaacaaaagctcttgaatgcgagtgaagaaattgctggcgagctacaaatgaccatgagaaatattgccctgctagatagtcgtgctcaggaagcacaccgtaggcgcgatgaagctgcagatgaactatcactaattcaagaatccatctcaaccctgtggcaagaaaggcagcaaatcaggagacagaaaatggaagccttacgttggcttgagcgtt

SEQ ID NO: 32554 - DNA, 676 bp, Glycine max
tgcagctttacttgtgggcgaagacccaacacagtcatatgcgctcatatgcggtaactgctatatgcataatggtctggctcggaaggaggatttcccagttatcacatactactgcccgcattgtcatgccctgaacaaaccgaagcaatcagatgagcatatctctggtcttacttctccaaacacgggggggactccaaacacagatgatggtgtgacggatgcagttaagaatgctagggcttctgcagccgagagtgtaatcacaagcagtagtcccggaagtgcttctagctctgagattgaggaagtatcagaaagggcaagcgtggatgagaaaattgattaaaaggacagctgttttcttttttatgattcagctgtcggaattacatgtcatggcccttgttctggacacaaactgactatatataaggggagaattgcaattggtttccttggtggctttgcaacaggaagagtgatgaaatacttagatacatagattacacgtattgcttgttaaggcagttttggctttattttttcgtttttttgtgacattatatcgtgacagtgttctagttctagttttaaaacttggattgtacctgaaagaaattttgaaaacgggatttgtatccattgtgaaaaatggaaaaaaatttgatgt

SEQ ID NO: 32555 - DNA, 283 bp, Glycine max
cttttagttagctataatgtgaggcaggacaagtttggtgattatttgctgcttcaatacagttgtcttgtgtgtttgaggtgtgtgagtatatatctaggacttgatagtggttctttttgtaggtattttttataatttaataatattgttgttttttgtttccaatcaatctggttgaatcagaccttatgtgttttctggtagttgagggatagatggaaatttgaatagatatatttccttacctgtattaagatttaatttgggataagataaaagt

SEQ ID NO: 32556 - DNA, 280 bp, Glycine max
acaaaaagacccgagtggaagaaaatgcggggtagagaccatttccttgtttcagggaggattgcttgggatttcaggagacaatacgatgatgagtcctattggggtagtaagttcaggtttctacccgaatccatgaacatgtccatgttagcagttgaagcaagttcgtggaataatgactatgcaataccctacccaacttctttccacccatcagaggacacagatgttttccagtggcagagaaaaatcagacatcaaaagcggccatacttgt

SEQ ID NO: 32557 - DNA, 477 bp, Glycine max
agccgccgcaagccatggcggactccggcggcgacctccggcggcgacctcgccggcatcatttgttcgatctcccatgagcccctcaacctcatcagcgaggatcttcaatcggtctccatctgcgtccacgtttttcacgagctctgtctgcggcaatggttggagtactcttcgaaagggaagaagcacacttgccccatttgcaagcagggttgcagggccagcgacgcttgctggctctattttcagtcagtgggagatgcgaacgatagtgtgaagcctcagaagagctgtgaattggaggaagatgctggggttcctgcgtagggaggtgaatgtttcggggcttaattctcaggttgaagggcaaacaaaggaattggaaggacttaatgagaagctttgtacttgcaaggagcaggcaaagatagagatagctttaaagaatgaggttttaaataaaaaagcatcaat

SEQ ID NO: 32558 - DNA, 756 bp, Glycine max
acacattcaaaatatttatatataattttaaaaaaagcaggggaatggaagtgcacaccctcattccttgatagaatatgtatatattcactcatacatgttatatagcgacattaccatagaacatacatgcatagttactataaaaatataaacaagctgcctggctcagaaatccaactggaaaatagggagtgcaaagtccaaagttgtcaactcaaacgcaacccactgaaactgtattccaaagaggaccttctaatgctgagtttctctttcttgatttggacaagaagagggtaaacacaccatgagaaacttagataatgatccctattcatgccttcattatagcaaccccagtaacttggatgataagtaacatggtaccaagcagaagcttttgcatacacatcactactccctgaatctacatcaccactgctgttttcattgaaccaggccctggcctctttccttagggacctcacagccatattgattgcttctgcatccctccttttgttgaaagattttgacattttcataatattcccaccgaggatttcagcttcagttttgatcccatagtagtccatcagatttcccaacttgtagtcataattggttttgtgatagaaagcatcatcaacataatccatgaagccatcaacttccatttcatggtcgtaagagtctctcgcaaccaactttgtgaaggatgtaattgagccggcacttgttgatatttctttc

SEQ ID NO: 32559 - DNA, 484 bp, Glycine max
cttatattctgcatgcacacgcctcctctctctctctctctctttctctcagtttcacccctctcttctctctctctctctccggttaccgccgtccattcaaatctctctccggtttctctccgttcagattccgacaatcttccgatcacacttcattattcctctccacaacgcgcgaatgcgaatcccaaacctcacccctcgcggcacctcctccgcttaaaaattaacttccggtgaccggaacttcccctcgtgaacttccggcgaccggaggaaccactcgagcttcgctctcccgcttaatttcgagtctgtgtggaattggagttgaaaatggagtcaaggagctgcatgaacgtggcgtgcgccacctcgacgacgattcggtggcgcaaaggctgggccctgcgatccggcgaattcgccgatctctgcgataagtgcgggtaatgatgctctagatttcgaatcgatgagc

SEQ ID NO: 32560 - DNA, 456 bp, Glycine max
ctgttactaaccggagacgaaggccagcattgttgatgcggcggtggaagctatgctcgcagcacattattccctttcctctctctgtcaaatattccatttcttcttcacgaaattaaaaagcctgaaaactgaccagatccttttcaaacactcttagtcctacgtcgtaccaaacacaaactgaaacaataaccaacgacaacaacgaaatctgcaatggcccacttaatcatacaaccggaatcctcctccgattcgttcttccccggtggtctcttcctccaccctcacacgcttccttcatccttcgcttccttcattccttcagaccctgtcacagtatcatgttttttttggaggcccaaatcaaggttgagggtcgaagagaggctttgcggcggtgcgttcttgtcgttgagtttgtcctttaacggaactggtgcggatcagagg

SEQ ID NO: 32561 - DNA, 445 bp, Glycine max
gtttgggctattggatacctgaagggttcacgtcgggtcgtgataggctatgatgaaggtactattatggtcaaacttggccgagaagaacctgtagccagcatggataacagtgggaaaataatttgggctaagcataatgaaattcaaactgtcaatataaggagtgtaggagcagatgtggagattgctgatggagaaaggttaccattggctgttaaggagttgggcacctgtgatctctatcctcaaagtctaaggcacaatccaaatgggaggttcgttgttgtttgtggagatggggaatatattatatacactgctttggcatggagaaatagatcatttggttcagcactggaatttgtttggccttcagatggggagtatgctgtaagagaaagtacatcgaaggttaaaattttcagcaaaaatttccaggaaa

SEQ ID NO: 32562 - DNA, 420 bp, Glycine max
gatactttgggcgaagaacatctcaatatagaggtgtaacaaggcataggtggactggtagatatgaagctcatctatgggacaacagctgcaagaaagagggcaaaggaaggaaaggaaggcaagtttatctagggggttatgatatggaagaaaaagctgcaagagcttatgatatggccgcactcaagtattggggaccatcctcccatataaatttccctttggaaaattatcaaaacgaacttgaggaaatgaagaacatgacgagacaagaatatgtagctcatttacgaaggaaaagcagcggattctcaagaggggcctccatgtacagaggagtaacaaggccccaccggctcggaaggtggcaagctcgaattggaagagtggctggaaacaaagatctatatcttggaa

SEQ ID NO: 32563 - DNA, 502 bp, Glycine max
tccgagaagattgaaaacctacagaggcatgactacaatgaaatatatgaaaaggctgttaaaattcttgaaacatattggttggaagaagaagatgagacactaccttcaggagatggtgctcaacctggtttcaatttcggaaacaatgagcttcccgtcccatctggtggattcaacttcagctgaagactttttcctgagaaggggcttgttggagccatgtaggggtttgtcccgggtgggcgtgtgtgttgggataaacgtctggagggtcagttattgcaccttgtgtccttcgtggttcatgaggtgccggggagggtcagtctacgctaccaagtccaagtaagaagggactggtggattcaacagcagcataatgatcttttcagccgtgtttgttgtacttaaaatacataaagctggtggaaggttgtatatgttgcagtggcagggacacgggtatatggcgaggggtttttttctttaatgcggcttt

SEQ ID NO: 32564 - DNA, 428 bp, Glycine max
cgagcttctcggatttgacatccagcgatggcaagttcaatcgggtgctatactgttgttgacactttgtgttgtcctcgtagctttagttcatgcacagcaacaaataggcttcataagcattgattgcgggagtagtccaccaaatacatgagtacacagatgacataactaaaataaggtacaccactgatggagcctatatacaaactggggttaataagaatatctcctctgagtatgcatacccaaagaatccgaatctgccactaccactctcagatctcagaagctttcctcagggagaaaggaactgctataggttagtagccggaagaagaggcagtttacatttgataagggcttccttcttgtatggaaactatgatggagtaaacaagccaccagagtttgatctctatgttgat

SEQ ID NO: 32565 - DNA, 467 bp, Glycine max
tccattatttgagataaaagagaaatttccagagacttgttttagctccaaggagatggttaaggtaactatagttggaagggtaagcgatggattgcctctagcacaaggactgagatacatgaatgaagagtatggatatctttcatgttacaggcaacaagcagagttcatactccgagaattttcaaggggagcattaacagctcccaagatgactattcatattgataatttctgcttcaagtatccttccctttttaattttttttctcttcttttaatttctttcaaattaagttttggttcttttaacgatgaagttgttgtcatgcttgcgattttctgttatgcctcatattcttcatttacttgtacccctttatcacaggctaatctttcagaaatagagtttatgttgagtctattaaaattccatttaagccatagactttaaattaatggca

SEQ ID NO: 32566 - DNA, 383 bp, Glycine max
cggctcgagcaactcacatctaccgttcttctctctaaagacaaccataataaaacacaatatctcaattaaaaaacataatttcggttaagaaggtggaacgcatgagctaacaaccaaactaacaaataccgcaccaaacaaaaactaaaaaacgaaatcaaacggaatttaattactaattccaagtttccaacccttaaaataaattatttaaatcgcttagcgcaacaattcacagcttgtgcttttatgttgtttccctaacaaaaattaaataaatagaagcatctttctgttcttttatttcaccgccattcatttcattgacgtatagggcttgcgtatcattgttgctgttcttcttcctttctctgcttgca

SEQ ID NO: 32567 - DNA, 469 bp, Glycine max
gttccctctctcttcctcctccttccacctcaccgtcgatctgaaccgcatcacgtgcttctccgaagaagcaccaacgccacgtcatctgcaaaggtcacggtttgcaattgcaataccaccaccacgcgtgccacgccagcgaggactgttgtggaaaagatagtaaagcggttcaggagtgtggttgtggttccgatcgtgcttgcgtcgtttcctataagcgctttcgtggcgccgttggttgattacgtgacgtctcctggtgtcgccgaagcggttctgtattcgccggacacgaaggttccgagaacgggggaagttgctctcaggagagccatccctgccaatgccaacatgaaggctatacaggacactcttgaagatatattttacctgttgaggattccgcagagaaaaccttatggaacaatggaggggaatgtgaagaaagctttgaagatagcag

SEQ ID NO: 32568 - DNA, 497 bp, Glycine max
ccgaatctgacaatggagtcaacgtggttggagttgttggaccaggaaaggaaacaataactcgtaaggtttatgaggtaattgccccaagttttcctgctcattgctttcttcctgatgtgggagaaaaaattagggaacatgggccggaatatctccaaaacatgcttgggccttatatgcttggaaattcccaggaaggagtgccatttataaggcatgagaaggttcttgcagttttggattgcattgactctctggattcgttgaaagctgctcttggacttactcctcgctttgctcctggaagtcaagtcttcattatagctccagatataactttgcttgaaaataatggaattgaaaaggtatatgaagtaaaggggttagacaagacatcggcttatcaagtgctttgcctagaggctttcagttccatgaatatgagtttcaaatacatggacatcataagccgtgctgaaacttgtgctgatggc

SEQ ID NO: 32569 - DNA, 502 bp, Glycine max
aaggaactgggtctggtaccaggaattcctgttgggacatcattaattgatgctcatgctggtggcgtgggggtaattgaaagtgtgccaccatcagaagctgcagatcatgacatggaagcaatttgcaaccgtatggtgttagtttgtggaacttctacatgccatatggctgtatcgcggagcaaattgttcattcctggggtttggggtccattttggtcagcaatggtaccagaatattggctaacggaaggtgggcagagtgctactggtgcattattggatcatataattgaaaaccatgctgcttctgcacgccttgcaaatcaagctgctacccaaaagatttcattgtttgagcttctgaacaagatgttggaaacaatgatagttgagctgaacctatcctttattgctgccttgactgaagatgtacatgttcttcctgacttccatgggaataggtcacccattgcagatccaaaagcaaaaggagtca

SEQ ID NO: 32570 - DNA, 443 bp, Glycine max
ctcacctcttcttgctcttccataagataccgtgatgatgtgcaagaagtgtgtcctcttaatgaatctcattggactgatctagagtattgcaaacgctataagctgtggtatacatatgcaaagacaatagcagaaagagaggcttggaggattgcaaaagaaaatggcatggatctagtggtggttaatccctcttttgttgttggtcctctgcttgcaccacaaccaactagcacactgctcttgatactaagcattgtcaaaggcttgaagggagaatatccaaatacaacagtggggtttgtacacataaacgatgtggtagctgctcacttgctggctatggaggaccccaaggcatctggaaggcttatttgttcaagcacagtagctcactggtcgcaaatcattgaaatgcttcgtgccaaatacccttccta

SEQ ID NO: 32571 - DNA, 294 bp, Glycine max
gggcacattaccagatggacaagatattgcagtcaaaaggctttcacaaacatctacacaaggattaacagaatttaagaatgaagttatattttgttctaaacttcaacatcgaaatcttgttaaagttcttggttgttgcatcaatgagcaggagaaattactcatctatgagtacatgccgaacaaaagcctagacttctttctttttgattcatctcaaagcaaacttttagattggtccaagcgattgaacataataaatggaattgctcgaggacttcattatcttca

SEQ ID NO: 32572 - DNA, 336 bp, Glycine max
gcacgattggaacgaaataaaaaccgatccttattctcgtgaaatcttagccgggagtttactcatcgtatcatagtaaacaaagttaagagttcaccaggatcactggttcatctatcatagcactgaggttatgaagttttctgaagctgtaacaagacgactttccaataaatgtgttcaatgctattctacactttgtttctttttgtctcaattcttagtttaggttccttttcctttcctttttggtgctgcagttgttctacagggccactagagcaagattcatttaagtgtgtctactcatttgttacatttagtaagaaaacataa

SEQ ID NO: 32573 - DNA, 275 bp, Glycine max
ggcgtcgagtataggcatgatggacagtgcctactttgtcggcaggaaccagattctgacctggatcaacaacaggctccacctcaatctctcacgcattgaggaggctgcatctggggctgtgcaatgccagatgatggatatgacgtttccaggggttgttccaatgcacaaggtgaactttgatgcaaagactgagtatgatatgatccagaattacaaaattctgcaggacgtgttcaataagctgaaaattgacaaacatgttgaagtta

SEQ ID NO: 32574 - DNA, 476 bp, Glycine max
gttcacactcaaacaaacatgggttagaacttggaagcagaagaaaacgagagagagagagagtgagtgaagaagattgacgatgaacgaagatggcgtaacctctgcgaatcccaatccctctcttcccaaaccaccctcttctcctccaactcctgcggccagctctgcgggggcgtcgtcgccggcgtttccggcgaacgccggcaacggggatgctcgccggcggcgcgacatatcgagcgcggattcgcacgcggttctcggtccgttgctgcgaggggcttcggttccgtcctgccggccctgggaacgcggcgatttgctccgccggctttcaacgttcaagctcgccggaaaattgcacaaggttgctgggtcgttggcctgtgccaagagaggttgggtgaatgtggggtgttgctaagattgagtgtgagatatgtgctgctcagttagattttactctgccttca

SEQ ID NO: 32575 - DNA, 305 bp, Glycine max
agcaatttgatgcggcgcggggtttagacttgagtgtgcattctgagaggagagaagagaagatggggaagaagacgaagaaacccggcaaaggcaaagagaaaaccgagagaaaaaccgcgagagccgaagagaagaaagctcgcagggaaaccaagaagctctctcccgaagacgacatcgacgccattttgttgagcattcaaaaagaggaagctaagaagaaggaggtccacgtcgacgacaacgttcccgcgccttctcctcgctccaactgctccctcaccgtcaatccattgaaggag

SEQ ID NO: 32576 - DNA, 284 bp, Glycine max
cttcggaactattgagatagattgggactctcacccagtgactctgcaattcaaagtcagggacaaggatagtgtcacagttacaggggttgatgtttcattaacggaattacaaccatcaaattcagagattttagacagggtaaaagcagagcatgataattcaaagcattgcacccttgaagttagtctgccatggattgtaagatatcgcctggcaatcttgttcttttccaccttatttggtaagtcacttctaagttccacttgctagtgatcctttg

SEQ ID NO: 32577 - DNA, 604 bp, Glycine max
ccgcaaacacaacaaaattaccctaacacctaacccctaaccccatcgatcacctccaacaacaaccttctcctatccaatcatggccaccactaatccaattccagatctcaattccccaccctcccatcctcccaatttcgattccgattccgattccgacattgacgccctcatcgacagttttttcgaacaaccctcgccctctctccctcactacggatccaacgccaacaccactctcaagagaggaattgatgtcccctccgttgattatttcgacactgccatatccatcaagcgcggcaggattagcaatgccgccacccacggctctgatgatcaacaccacgccacctttgaaattcaaaacccttctcctcctcctcctctctcccaggatcctggaggacccatcgctgatcacaatcacggaggaggaggaggagaagatcagcaagggaaacggccagtgtttgaaattgattttatatctaaggctctccgtgaagctgaattaggtttagcgctgaattctcacgataacgccgacgactttgacgacgacgacatggaacctaagaatgagaatcatgatttacac

SEQ ID NO: 32578 - DNA, 669 bp, Glycine max
accaggcataactgagcaaatatgcaattgtgccgttgaaatggccaacaaccttggtgtggatgccatctttgtgtacacaaagtatggacacatggcatcgcttctatcgcgcaaccgcccgaatcctcccatctttgctttcaccaacgatgacagtacccgcatggctctgactttgcaatggggtgttgtgcccattctggttgatttgtccgatgatgctgaatctaacatctcaaagtctgtgcaacttatgaaatctagagggttgatcagccaaggagatgttgttctagtggtctcagatgttgctccaacacgtgccactcctatggctttccagtctattcaggtgaagactattatctaaaacgcaaggctgcaaaaatattgaaggacacgtgtctgtgtattttataggcttgggataggatagtattggattattggtttcttgtcgtccctttttttttattggtttcttgtccttatgtaaaacaacaaagtttataaattccaaatggtagaactctagcaagttttgtcacctcttccaagagattcttatgaattacacttcgtgtatcgcccattgtaagtcactaatacaggtgcaccaatatatggcaattatatctgatatatcaactttgattgattgtgatg

SEQ ID NO: 32579 - DNA, 475 bp, Glycine max
aatttaaagggttgatcacccaaggaaatgttgtttaagtggtttcaaatgttgctccgacacgggcctttcctatggctttccagtctattcaggtgaagactattatttaaaacccaaggttgcaaaaatattgaagaacacgggtctgtgtattttttaggcttgggataggatagaattgtaatattgtttttttttcttcgggattgtataattggtttcttgtccttttttttaaaaattggtttcttgcccttattcaaaacaacaaaagtttataaattctaaattgtagagctctagcaagttttggaacctctttcaagagatgcttatgaattaccctttgtgaattgcccatcgtaagtcactaatacagttgcactaatatatggcaattatatttgatttatcaactttgattgattgtgatgaacccccagaatactacaatggcaaagcttttgagctt

SEQ ID NO: 32580 - DNA, 289 bp, Glycine max
attgctctgaaacacagacatggagcatgtgcagcattgctgaatctttcgtctgctgagcctcttgtatggccatcatctttgaagataatcagtgagcttaatccagacgccaaagagttattagagcgggccctgatggatgcaaacagggaaagggagaaaaacatattgaaagggagtgattactctcttccatctccatcacattctgatggggtagatgacaatatctctgaggttagtgagacagaattatgctgcatctgctttgagcaagtgtgtacaa

SEQ ID NO: 32581 - DNA, 372 bp, Glycine max
tttctcgcgtccgcgtggcacatgtttgtatcgacggtgaataggctgagggtgttgaagagttctgatcttcctgctgttacacttggtagtaagcaagactagttacaccacttgacttgacaatgagaaatgaaggatgaagcagcagcttgaggccttcttccatgctaaaaattgatgactaagagtgtttttatttgacattttggttcctttgaacattgaagattaggcaatgaaatgttcagtctataagtaatgtttgtagtgaatgaatgtatcttgttttctttagggaagctttgaattgtttctgcatttcaaaaatagggtaaggaaaactttacggatgtgtgcactcatgatttt

SEQ ID NO: 32582 - DNA, 383 bp, Glycine max
caggtgcaagtgtttgcctatgctttgcttaaaggccaggtgtgtccatgtttaaaatctgttagaaaatacatgtcagccccccctgaaagtattatgaagagagaagcaggtgcgcacggctcgaggggaaatcttttgtgcaagttaaagagcaggctgattgatagctctgctatcgctcagaatggtgtggaaggagaatccaagggaattattttcagaaattttggattggtttcagcagagttttcacaagcactttgaagagttatggttacaaatgcttaatgaagtgcttatggagaaacaagaaagccctcttcataaaagttctaaaaaaaagaaaggaaaatataaaccactatgaaggaaaagaatgc

SEQ ID NO: 32583 - DNA, 283 bp, Glycine max
attgcttggtgcttgtagcatacatggtgattctgcgatggggaaatatcctgcaattccacctgtttttggctacaccagacagccccggctccttacgttttgatggcgaacctctatcctagtgaagggaaatggaaggagagagcacgttccattccgaaaatgaaagagatgggggtagcaaaagatctgggtataagctgggttgagattgaaaagaaagtcaatagtttcgtagtaggggacaaaatgcgtcctcagtgatgctatttctggcttt

SEQ ID NO: 32584 - DNA, 375 bp, Glycine max
  unsure (1)..(375): unsure at all n locations
ttcncgttcattacagaacaaaangacaaaacaaacaaagatacatatgaatggaagagagtggtagggaggtggtggtgtagtaaaagtgaggtcaaggtcggtgaaatagagactcaaaaccaaatagtttattgctattattatttggccttagttttttcagtgtcaaattgcattattgaaataatcaaatgcactaaccacactccatcacccccatatataccccttctcctctcatactaattaacacactcatccaaacaaccttctttctttttctgtgagcctttctttcaggttcttaacttgatcagtgtgcagtgtccaaatcataagggtagttgcaaattgcaatggctaagcatgatg

SEQ ID NO: 32585 - DNA, 290 bp, Glycine max
gcgacggggcattgtaagtggcagagtggccttgctgccacgatccactgagattcaggattggatctgggtctgaaaaactcagagattgagtgttgtcatcagcttgatctcttgtttaaccacgggataggagttaaataacagcactacatcttgtttaaaaacatgttataacatttttgtggaattttttcattatgctctatttgagttcttgatagtaagttaactttcttctaaaatttattccattgtatgtccatattttgttgccttcacattagtaa

SEQ ID NO: 32586 - DNA, 283 bp, Glycine max
cgctttaacaaaatcgacggggcaattctacagaaactctacgccgaaatcgagaccgataagatcgaaatcgacggccacctcatgaacgacatcattctagggttctccaaagccggcgatccgactcgcgccatgcggtttctagcgatggctcagagcaacggactgaaccctaaaccctcgacgcttgtcgcggttatcttggcgcttgggaattcgggaaggacgcacgaggctgaagcgctgtttgaggagattagcgagaacgggtcggaaccga

SEQ ID NO: 32587 - DNA, 485 bp, Glycine max
tgagatgcaaatttttgttagatgatcatgaaatgcaacaaacaagcaacagagatctgggtcatggaaagaaagattggcatcttgagaaagccaatgcaattattgacataatgagtggagctttgtctttggtgtttcagataaatgaaacagatcgcatcaatattctaaaaatgtgcgacatactattctctcaattgtgccttagagttcctcctgctgcatctctgccctttggagatgatgtgcgacatggcagaaatttcaatcacgttaatttaagcaaaaggtttgatggtgataatcatgccaaacaagatacttttcactgggatggacacaaggaagaagcaaatagaagatccggctaccataataactaccacctggatcacgagactgcatcaatggcagcacttttccaaggacgagccgttgtcccaatgcaattaattgcacgcgtccctgctgccatactatat

SEQ ID NO: 32588 - DNA, 324 bp, Glycine max
gctttactctgcctacctcgggttaccaaaagaagttagcaaggaggacaaaatacaatttgtggaccaagtgatggatttgggagagttagataatctcaaggatgctatagtggggcttccaggagttactgggttggcaaccgaacaacgaaagaggctgaccatcgctgttgagcttgttgctaatccttcaatcattttcatggatgaacccacttctggtcttgatgcaagagcagcagctattgatatgaggactgagagaaacactgtggacacaggaagaacagttggctgcacaattcaccaggctagcattga

SEQ ID NO: 32589 - DNA, 262 bp, Glycine max
caaatggcactcattcaaatatctcagtacaaactcttttaattaatgctgttgcatttcaactaatgttatattgttatctacaaaatgcttcctcgcgcattcatttttttaattaaactcatgttgccatcttactcgcttggacttgttatgccagtagtagttttctctcggttatgattttccgcatctatcataatccattgtctcaatcaacatgttattttattgtcaggccaatctccaccctagacaaaac

SEQ ID NO: 32590 - DNA, 286 bp, Glycine max
gtcttgtttccattgatggcccaaggccacatgatccccatgatggacatcgcaaagatattggtgcaccgcaatgttattgtgactgtggtcacaacgccacataacgcagctcgtttcacaccaatctttgatcgttatattgagtctggctttcctgtaagattggttcaacttcaattcccatgtgaagaagctggagtaccaaaaggatgcgagaatctcgatatgataccttcacttgccacggccacaagtttcttcaaagcagcaaaccttctacaac

SEQ ID NO: 32591 - DNA, 247 bp, Glycine max
gcttgctgtgctgatattgcaaaatacatagcagaggttgatcagaaaaacctggaaaagccctgacttctcagttttgtttatgggatgtacattccattttttgtggctgtgctacatggatctctcttaagtcagcttagttgcatgatgcatattagttgatcgacagtttgcttcgttcgggtagttattggtagaatgcataagaaccccatgatttacatgttgagttttagatctgttg

SEQ ID NO: 32592 - DNA, 473 bp, Glycine max
agacaataccacagaggtgttaatggggatttctaaaggtataatgggacgccttcaagtaactgagttcaacctcaatggttctatgcaacgagaaaatgagctgagatcaaaagttcaaattttgatagatcaactcaaggctaaagatgctgctttagagaagcttgagaaatgtaatgttgagagtgttaaggaaaaatctgaggtgttggctttaagggaaaaggtgaaatttcttgaggaagagcgaaaaagaatttgagcttcagatgaataatgtgactgcagagaatgaagcatgtcacgaacacctaattgaaatggaaaattttggtgactctttgaaagaaagcattgacatagcagataatcgggctgagattgcagaagcaaagcgttcacagttaactgagaccgacttggaacttactgaagaggtgagttttcttaaagggagtgccagtactgca

SEQ ID NO: 32593 - DNA, 192 bp, Glycine max
gtgaaaatcagggttacagaccagtgtaatgcttatccatcagtccacaataagagctgggcatggataggaacagtatttttgtcgtgatgataaaaaaatttggagggaatcttactttgttctccttgatgagtaattacattacattgtcatcctttctaattttaaaatgtttttcttgtgagacat

SEQ ID NO: 32594 - DNA, 392 bp, Glycine max
cccacgcgtccgatgggtttctgcggcggatgaagcaaccaaatggtggattcaggatgcatgatgaaggtgaaattgatgttcgagcttgctacactgccatttctgttgcaagtgttttgaacattttggatgatgagctgatccagaatgttggagactacattataagctgtcaaacatatgagggtggcattgctggtgagcctggttctgaggctcatggtgggtacaccttttgtggattagctacaatgattctgattggtgaggttaatcacttggatctgcctcgattagttgactgggtggtattccgacaaggtaaggaatgtggattccaggggagaacaaataaactggtggatggatgctattccttttggcaggga

SEQ ID NO: 32595 - DNA, 534 bp, Glycine max
ggatgcatcactgctctgcatatggcagcattaaattggcatgttgaaagtgtacagttactcttggacttgggagcttctgtgtccgaggttactgtggaggatggaactaccattgacttaattggttctggaagcactccactccattatgctgcatgtggtggaaatcaacaatgctgtcaactgttgattgccaagggtgccaatctgactgctgagaatgcaaatggatggacccccttgatggttgctcgttcgtggcgtagagactggcttgaggacatcttaaaaacacctccagaagaccccttacaagttcttccttctccatatatatctcttccacttatgagcattgtgagaattgctaggtaagtgtgtcagtcctatcctcttatcaattcaaccaatttcttcctatcacggcgtgtgtaatatatttggtgctatctcctttgctcctcattgggagaaccaattgaaaatttatgctttcctagaaattagcatcaatttatttatcataagcac

SEQ ID NO: 32596 - DNA, 405 bp, Glycine max
tgtcttagacattaatttagcaataagtcatggggggttatttgctccattacagggtatttctgggcttggtccacggaaggctgcatccttacagagatcccttgtaagagctggtgcaatttttactcggaaggactttctgactgaacataaacttggtaaaaaggtgtttgtcaatgcggttggtttcttgcgtgtccggcgaagtggtttagctgctagcagcagccaatttatcgatttgctggatgatacacgaattcatcctgaatcttatattcttgcacaagagttggccaaagatgtgtatgaagaagatggcacaggtgatgcaaatgatgatgatgatgcactggagatggccatagagcatgtgagatgacgacctagttatttgaaaaa

SEQ ID NO: 32597 - DNA, 490 bp, Glycine max
ctcgagccggttgccgaacattccagaaggctcaaagatatgacgacacgtctcgctcacgaaaccaccaaagccacgcaaactgctcaagacttgtccaatttgcgcaggctcagacaagcctttgtagctttgaatgtgtggcaaccagaggttgtccggggtaggcaaaaacaaatggtagagcaaagtgttgtgcctgctgaatgtcggatacatgcgcttgagatcggattcaagctttgtaagcaacagattctgggattggagaagtcctataaagatgaaaagcgcagacttgatactgcaaaagaagagttggcatctatgaagtatcaccctgtacaggagcataagcccacaagtggaggggagaatgaacatgtcaagcggaagaagttgaaaatatgcaatagctgaagacgttgcattggatgatgagcaatgttctagacagatgaattttgctggtctttcttccattgaaact

SEQ ID NO: 32598 - DNA, 655 bp, Glycine max
tagcagctcacgtgaaaaaacaacgactggtcacgtgccccgtgtgcaacgctaactggaaacaactgcttcaaaacgcagacgaaaacaaaccgcacgcagaactcaaaacgacgaagtcgttcaagccccacaactacaacgacgacgagcctctcatgtcgcccacttcagtctcgcgtttcaaccccattcccgaatccaacgagaacgaagaagaagaagacgaagaagaacaaaacgatgaacaaataaagttcaatctctcatcatcattggtcaagaccagaaacatcgaagcattcttctcaccggaggctgcgattgtggcgtccaattggagctccgagacgtacgttacggtgttgaatgtgaaagttcagccgcgtaacgcggcggcgaatcggccgccggtggatctcgtcatggtgatcgacgtccgaggtagtgtcaccggtgaagagctttggatgctgaaacgttcgatgcaggttgttatctcgtcgctcggctccgccgaccgtctctccgtcgtcgcattctcaggcggatcgaagcggctatttccgctgcggaggatgacccgctgcggccagacagcggcgcggcgagtcgtcgacgcgctggcctccgttgagctccgccgagaaggaat

SEQ ID NO: 32599 - DNA, 279 bp, Glycine max
ctcgagccgcttcaacaatgctcaaaattttgatggctctgctccttttgtctctatcttttcaagcatatggacaatttgaggaatggtgcatagcagatgagcagaccccagatgacgagttacagagggccatggagtgggcttgtggaaagggtggagcagattgcagcaagatacgagtgaatcaaccctgttaccttccaaagaccttgaaggaccatgcctcttatgctttcaacaactactatcaaaggttcaaaaacaaaggaggctctt

SEQ ID NO: 32600 - DNA, 470 bp, Glycine max
gaatttctttcctaatcatcaagggggcattttatagaaggaaaaaaattcgtgtccaggaatcataattcatgagaaattgagaaccataaatcctgtgaatctaagattcttcggaatgactaaaatctgcgtagttggtcataaatattttgggaatatttatacatgtttcctcggaatcaaagaaattatttatcacatttaataagacaaggaacattcatcttcaaacatgaatcaagcaggaatgcaagaccaaaaggtcaactactcacaagtaatagtatttcttttgatagaacaaaggaatccaacaagagaaaacttcctttgccttttttttccaaggaagaactaagttgcaagaacttaatgatgaaaactaattgtcaacgcaccatggactagatctagagccatgaaaacccaaaatcaataaaatagcttctggtgagcggacgcgtagg

SEQ ID NO: 32601 - DNA, 401 bp, Glycine max
aatgaatggtagcatttactagtactgttttgtgccctacacggataacttgaaaccttcttcatagcttcttggcacgtttggttcttcactacccaatccatcccaacggggaacgttgtcttgtcgaagttgacgaggtccgtgaggaacgcgtgcccgcacaagttgaagtcgaccacgctccctgaaccgtaggagaaacccgacaaaccgcgcgggatcgaagtctcgtaacaaccggtgccggaacaagacccgttcgtttcgatgtcttggagcctgttgcacagggacacgcatcccgtggtgtagttccttccctttgaatcgattcccaccactactcccagcgtgtcgcacccgattacagtaaacttgtttcggttcgaagagacttg

SEQ ID NO: 32602 - DNA, 675 bp, Glycine max
attttggcttcaggtttacttctctttctcagggagtgaagagtacaccgcttacctcatgagagatatttgcgtgttctagtgattttttgcattcctgggatgcatctttcagagagtttcaagcatggagttgttttcctcttgtggttctgctgctatttgctgcatgctgctgggcagaataacatcactgatcccgctgatgttgacgcattgagagccattaagacgcgtccgattgatcctaatggaaatttgagcaattgggaagatagagacccgtgtacatcacggtggaaaggagctttgtgcttcaatgaaacaaacgaggatggctatctgcatgttgaagaattgcaattactgagattgaacttgctcggaactctggcaccagatcttggcacattaacttatatgaaaagattgaactttatgtggaacaacataagtgggagtattccaaatgaagttggcaatatcacatctttggaactcttgcttctgaatggaaataaattaacaggttcactaccagaggagattggctatcttccaaacttggacagaatacaaattgatcagaaccaaatatcaggacctatacctacgtcatttgcaaacctgaacaaaacatcactttcacatgaacaataattcacttagtggaca

SEQ ID NO: 32603 - DNA, 334 bp, Glycine max
gcactctcattcatcttccttcaacaaccccttccaaatcttcttcttcttattcttctctcaatccaacatgttcaactaccttctctccctctaacgatggaccactcagatccattgatttgatagttgcaaaggaaaagatacgaccatgcagattcattaccattggtttgattctgaagctaaaatacggttgttatctaattgtatatccagtctctattgcaattgataagccactttcaaggtgttatcatcttgctgacactggagactttggtctgagtgaatagataaattggtcacaagtttgcaagatgccatattatat

SEQ ID NO: 32604 - DNA, 270 bp, Glycine max
cctcgagccgaatcggctcgaggaaattctggatttgtgctgatgctcaagagggacgtccagctcaagttccagcaaggtggaaactgcctttgagcaatggcggcaagcacgttcgtgccagtcatgaggaacggaatgtaggttctgctgccggccgtttgcctcctaaatcaggatccagttacgagaccagtgatcctagtatggcagcagcagattctagaaagcagcttggtaacaacagtgataatggaccaggctggccag

SEQ ID NO: 32605 - DNA, 310 bp, Glycine max
cggctcgagagctattagcaatctatctatttatctaactatccatcttcaaatctttctctcaagggaagaagtagcaacaacaatggtggtgaagaagccacggattgtgataattggagcaggaatggcaggtctcacagctgccaacaagctctacactgccactgcctcaaaggacttgtttgagctgtgtgtcgtggagggtggaacaaggattggtggcagaatcaacacctcagagtttggtggtgaccgcattgagatgggagctacactgatccatggaattggtggcagccctattcac

SEQ ID NO: 32606 - DNA, 280 bp, Glycine max
ttttgccatctaacctgccatggccacagtccttttcccttcaaaatcgtttatctgatcgacttagagacctatctgccagaggttggagtcagctagctggatcaggtcctgtaccatggaagcaagcacccagtctgttcaattctgcttcttcatctgacctgatcccagaagtgccttctttagttgagctatccaatagctttgacaaaatgtattgcaatgaaaggttacctgcctcagccttggaaaagaaaaatgaggacttgtctggaat

SEQ ID NO: 32607 - DNA, 549 bp, Glycine max
tgttgttgttgttgttgttgttgttgctgctgctgctgcaatgaagggtggtggtgggaagagaaaggcttctacctcggaggctccgaacgatgttgttgttgttgttgctgctgcttctgctccttctgatgatgctgatttgggtgttggagatgtcgggggtgtgaaagttcaaaactttgagggaaacgagggtacccagttgcggaatactgaagaacaggaagaagaaccccaccacgtggagggtgatgaaggaggagaagacgaagaagattatgccgagggagaggaagaatatgaagaagaaaatggtggtgctgttgctgggggacaacaaggttttcctgctcttggtgaaaatttctttgaagttgaagccatacgtcgtaagaggttgcgcaagggtgaggtgcaatacttaatcagatggaatgggtggcccgagacagccaacacttgggagcctctggaaaatctagagtctgttcctgatgttgttgaagcttttgaggagagcttgaagtccggaaaacatcgtaagcg

SEQ ID NO: 32608 - DNA, 523 bp, Glycine max
gtttaaatcggccagacagatcaaggaccacctgagtccgctcggggcgtggagctggcagctgttgttgctgagacctcatgccaactgaccactgaaggactgcatgatgataacaacatgctgaagaaaggatgctcaaagtgcttgacagatgaaagatgcttgtgcagttcaggagaaaatgaagcttctgattgcactactgttatacttccaggtggtgtacatggttcaccaaacaaaggtgaacctacacctttgatctatcgatggaaaaccgggggatcatgtgattgcgggggttgggacattggttgcagactgcttgtgctctccaaccagaaccagaattcaagtattccaaagagctataaaccttacaatgatcgttttcaactttttgttaaggaaggagctgagcaagacacaccacttttcactttgttaccactgaaggatggtttctactcggttgaattcgactcaacaatcactcatttacaggcatttttcatttcag

SEQ ID NO: 32609 - DNA, 313 bp, Glycine max
ctatgttccttcttccttctgcttcgtcctcctgacctaatgaagcaccagagtcacaatgctctctggtttcgaggactcccttatggtagtggcaagctaatacggcacatccggtgtgcgaagagaaccggaaaacagaggtacccatcggagaagaagaggctgtggacaaagcagaaagagctcttatcggattccaaggagaagagcaagtttgagggcacatggaggctcttcaagctcgccgttcctctcgatcaagaccctggcaaagactctttccatgtttccgatgcccttctacaacaaa

SEQ ID NO: 32610 - DNA, 280 bp, Glycine max
agaaggtccaccttaggatattgtatgctttttgggagggaaatttcagcgacatagaggaatatgatgtaaattgtagttgcaaggtcaagtgccaagtagagttttgagctatggctcatggagtttgaggtgttattcttgtaattacaccttgatttaatatctctatgtctgtaattattcaccactttaaacattcagaagaaggtaaacttactgtcctatttgtgtatgtggatgatatcgttatatcaggtgatgagttgattgagaaact

SEQ ID NO: 32611 - DNA, 413 bp, Glycine max
ctcaaaaggttgatgcagaatatgatggcacctctgaaaaatgccccctgtttctcactggttaccttggttctggtaacctctcagtcaatcaattggttcatgtttcaggtgcaggagatttccaattgtctaaaattgaagttcttaaagatccttgtcctttgaattcaaggaaaaatcaggccctaatggatgctgatgaaatgcatgatgcagaggtcattggttctctggctccggatcctcaaaaccaggaagccttagtggttgagaatatacctgatcctcttgctggagagcagacatggccaacagaggctgaaattgctaaggctgatgaagatcaaaagaaaaagaagataaaaaagaggagtcttcctcatggcacttcagaatatcaggctgcttgg

SEQ ID NO: 32612 - DNA, 569 bp, Glycine max
acggaatcaatagtggtgaagcaatattgtctcgtggagatgcaagttaagacaaatcacacgcatcccaaggcaaaaccatctcttaagtcttaacttatggaatagtcttttaatattgcaataactataagtctggttttcttgaacagcataaggataataacatggtaatgcaaagcaaaaggaactgtttccttttggattcaattgctttcttactatcataagcaagctcttcctttgttagtgagacttcactttgaagcaaccaattctgaattctgagtgtgcaatgcaatgcatgcataaaaggcgcgcataaagctagctataattggtattcgtctgcctgtgttattggcgtttcgcacacataaagctgacagttgccatggattctaagaatgttgttgcttttcaagttgtaacattttgcatatgcttggctgtggcaaattcggttgagttcagttaccctgcagttttcaactttggtgattcaaactcagacacaggtgaacttgctgcagggatgggatttctagtcgtcccgccttatggaaaaa

SEQ ID NO: 32613 - DNA, 273 bp, Glycine max
gcagtcatagaggcagttgatcaccaacaagctggtggctggtctgctaatgttactggcaacgtcactggatcagttgatgtgggtgaggccaaggcagctagctctattgtgatgcagaaagctgaagtacctgcaggacgagcttggaaacctgctcctggtgtcaaaccaaaatctttcttagaaattcaacaggaagaacagaggaaggcagagactgaaatgcttgtatctaatattgctgtttctgtcaattcaatgagtctggta

SEQ ID NO: 32614 - DNA, 436 bp, Glycine max
gaagctttcaataggcatattacctaaaaacagtctcttggagaagtacaatctacttgagtatagtaaaatcgtacaagctcttagaaggggcgatcttcggcttcttcggtgtgcactgcaagatcatgaggaccggttcttgaggtcaggtgtatatcttgtcttagagaagttagaacttcaggtataccagagattagtaaagaagatttacatcattcaaaagcagagggacccaggcagagctcatcaggtgaagttagaagttattgttaaagcattgaaatggcttgaaattgatatggacgtggatgaggtagagtgtatagtggccatactgatatataagaatcttatgaaaggttactttgcccacaaaagcaaagttgttgtattgagcaagcaagaccccttccctaaattaaatggaaaa

SEQ ID NO: 32615 - DNA, 272 bp, Glycine max
attggactcgaacaatacataaccctaacgaaacgtctttgagcggcaagttagatagcaacgagttcggaaattgatgcgctgatgagctgccatgtgcgttagggtttgcgttttgcattcaaattccaaattccaaattccatgttccaagttccatacactctctttccgtgtttgacgatgagcattgttcccaaagagacgattgatgttatcgcgcagagcattgggatcaacaatctgtctcatgatgtcgctcttgccgtcgc

SEQ ID NO: 32616 - DNA, 411 bp, Glycine max
acgccacacacactgcatcattcttcttctttcaatcatcattttcaaaaccatttctacttttcctttcatgcttttcttgtattcctattcctattcctattagggttccaccgcatctcttcttcccaccatgtcgccggcggcgcctgatgctgccgagtactctttcgccgtcgagtacgacggcccgccgctcacctgcgacctccctcggccggtgccgatcagcgtcgacaacattccggtcgccgccgtcgtttcccaggttcctctctccgactccttatctctaccggtcgtgcagccgctcctgccgccgcaacaacaccaccaacccctccgaaccgaagctagggtttccaagttagcgtccgaaacaacggtctctcccaccttggtgatcgcctt

SEQ ID NO: 32617 - DNA, 486 bp, Glycine max
caagatatgaagaagctttctctttacgcttgtttactcactttgagtctgctgatttttcttccccatatcaaagcaagtcaagctaataaacttgatgagttgatcctatctaggagctcacataatcctcctgtgaccctttcttgggcagaggaagatgcattgaaaatgcattctgctgcttatgttgcgccccaagagggactaaggcaagctgacaagattgtcacactgcctggccagccacatggggtgaactttgaccaatattcaggccatgtcacagttgatccaaagactggaagatcacttttctattattttgatgagtctccacataactcttcagctaaacctttagtattgtggctcaatggaagaccaggttgctcctcattggggtatggggcatttgaggagctgggaccctttagagtcaactctgatggcaaaacactatttcataacaaatatgcttggaat

SEQ ID NO: 32618 - DNA, 439 bp, Glycine max
gaaatcctgacaatttttccatcattgggaagttaatttgcttttggttaacaactgtatatcatgaatgtttttgataagcatatgcttgggccctagcatatgcattcttggatactgtacgagaaaacttgagtgtggattggtggttgaacagtcccttgcagttgacacaagcaggagtactattacgtcaaaagatgcacttgtgattttcattcttttgtagtcttctttgaattttgaaaacagaaggttttcatattagaagttcacttggcaaggttagaagcaaagtttgatatttgtggaagaagccaggaagctgttacaatagaatttgtgacaagtgaccaactttcacccagtgtttgaataaagaattttaaaatgccatgtaattctaaaattcaaaataaattttgctgtgatttccttc

SEQ ID NO: 32619 - DNA, 363 bp, Glycine max
  unsure (1)..(363): unsure at all n locations
ctctactgagaaggtatccttaaaggaagtggcttaagggtatctacctatgctggcacctggaaacctgcaaagagggcaggtctcccacaatatgttatacccttatgtacatgtgtacaaaatgagcttattagcaaattttggaatgtatttttaattgctcaggttcttatttgtgaataggagcacaattctctcacccttaaattttatgggttagattgttagaaagagggaagtgattccttcttgttaagtaactgaggatggatataatgtaattgntctgtgctacattctttgctccacggatttggagccccacaaaagaagaaaataaaatctggaatgttagtcaac

SEQ ID NO: 32620 - DNA, 422 bp, Glycine max
aaaaaatacaagaaagaaactggaatttcagcccatggaccttcaccattcagtttccttcttcttttttgccgggaatttgtttaattaggcaaaacttgcaaagttcatagttggaccctgtcaccgcaggaatcaacgttttcttccactatctcgagaaatttcaagctttatattcttgaactgaagccgcttttcctattttccgttacgcgttcgatatcgagtccatgagacgaattcagcttccggagccgccgagccccaccgcccggagtggcactccggacatcttcgaatccggagttcacacgttcgtgcggcgcgccgtcgtaatcggcaacggtttcgccgcatcggagaatcagagcgtcggatggtccgcgcccttggcctctccgataagcacgtcttatatc

SEQ ID NO: 32621 - DNA, 392 bp, Glycine max
accagctcctaatttttctatttcagtttgcttatcaacatcactgaaggaaataatggtgtctaaagtggaagaagcaatgaagaggaacaagcaaatgcaaccacaagcccagaatcagcaacaacagctgcagaaacaaattcagtgcaacaaaggaaaagctggcaagttcaagaggagcagctccaatctggaagaggatggtgcctcttctgccattctctttctagcttgcatagcttatgccccttcctatgcgtacgcgcataattcatatatatatatatatatatatatatatatatatatatatatatatatatattatcaaatagaaatatatagatatgttctgttctgttctgttcttcctatgtctctctgtatct

SEQ ID NO: 32622 - DNA, 507 bp, Glycine max
ttaagccatcgaagcacagcgacgctgtctctcctgctattctccgccggcgttgtgagcatgcagcatgtgaattattggaagaggaggcgaatttgttaatttattgttgtgtgttcaaaatgggtgaaatttggtggtcccttttggggtcggcgatccccgtggtggtggctgggcaagcgtttcgcctgaagaaacggcgtgcagaggagcagaggctgcagagtggtcgtgggagggaaaggaattccgatgaaatcttcgtgtgtgagagggtctgcacttcaaagaggatgctcaagaagcttggttccttctccaaggaccccattcctgatacctgcgtcaccgtttgcggcgtttccgatgtagatgcctgtgctgatgcctgtgcccgcaccgtgtgtatcaaccaacatcaagtccctaattggaacgacatttgcctcaggaggtgccagagtgaatgcctcaaactctcttctcagagtcagtcctcgtagc

SEQ ID NO: 32623 - DNA, 608 bp, Glycine max
tctcgagccgaatcggctcgagggggtgcttctttgctggacaccttgttcaaggcccttgatgaggtggtgaagttagtggattgtgatatttacggttatgtccctgattttgaagcagatccattactagagagtggaggaacaatatggtcctttaatttcttgttttacaatagaaagcttaagcggattgtatcttttcgattcagttgttttagtaacttgattgctgacggactgcttattgatgatataccccaatgagtacgatgaagagatatttgctgacatggatatatgagtcgcttctacctcgattagttagcatatgaagacttctgatcctcccatgtgtagttctgtaatataagatggtttcagatgcgtagttctgtatatcaaagaccgtttcagtgtggcctgagtcgtagatatagcatatgtatccgatccgtatcaatatagtagatttaacatctgtatcttcctcctatgcacatcgtaggtttggattctgtatcatactcgactgttaggacacacctctggtgtaatattatcaaaaaacatatttgaaattggtagagtattgttacattcatctg

SEQ ID NO: 32624 - DNA, 743 bp, Glycine max
gttgccacagtgatttggacttgaaagcgcccatcttttcatgtctattgatattgattgttgatacatcacttggcttgttgatgtcctctttgaatcaatctctctttccatacgactcttcgtccttgactgtttcttcatctgtgttcaacccttatgcttttttaagcaaccgtcatcacactctcacactcacacttcacacttcacaacatagaagacagatgagttctttgctacctcaagttgccaagaacaaagcaatgtggctgaatcctaaggttttgggttttaatcctcctgaaagatggggccactctgcttgcttctccaaggggcttatgtatgtctttgggggttgctgtggtggactgcatttttgcgatgttctgactttggaccttaacaaaatggtttggagcaagcttactaccacaggtgaaaagccggggccaagagatagccatagtgctgtttttgtggggcataaaatgatagtgtttggtggcacaaatggcttcaagaagatgaatcacattcatgtacttgatctcgttaccaaagagtgggttcgacctgagtgtaaagggactcctccttctccacgtgaaagccatactgccacacttgttggtgatgaaagaatagtgatatttggtggtagtggagaaggtcatgctaactatttaaacgatttgcatattcttgatcttcgaaccatgagttggacttcctctgag

SEQ ID NO: 32625 - DNA, 299 bp, Glycine max
agacagttgggtatatagctccagaagtgtggaacagaaactttggaggggtgtcatataagtctgatgtctatagttatggaatgatgattttggaaatggtcggaggaaggcaaagtatcagtattgaagcaagtcattcaagtgagacatattttcctgattggatatacaagcatgttgagttgggaagcaatttagcatgggatgaaggtatgaccacagatgaaaatgaaatttgtaagaaaatgattattgtgggattgtggtgcatacaaacaatcccatctgacaggcct

SEQ ID NO: 32626 - DNA, 461 bp, Glycine max
accaggagaaagctgcaagagcctatgatctcgcggcccttaagtactggggaccttcaacgcatataaacttttcgatagagaattaccaagttcaacttgaggaaatgaagaacatgagcagacaggaatacgttgcacacttgagaagaaaaagcagcgggttttctagaggtgcttcaatatacagaggggtcacaaggcatcaccaacatggaagatggcaagcgaggataggcagagttgctgggaacaaagacctttcaccttgggacgttcagcacccaagaggaagcagcagaagcatacgatgtagcggcgatcaaatttcgcggcgcaacatgcagtcacaaactttgacatttcaagattacgatgtggagagaatcatggccagtagcaatctcctcgctggggagcttgcaaggcgtaagaaagataacgatcctagaaacaaggac

SEQ ID NO: 32627 - DNA, 287 bp, Glycine max
cttgagtgaaaatcttcattcattcattcaccttaaaagaaaatgccttcaccagtgcagccaagtcactctccatcatctgctgaaggtgagaaacatgcacgcaagcaattggatagagagattagggacatggtctctgccatcactgacagggtcacagattttcacaaaccaggctcaaccaaccatatggagaatgatggtgaacatggtttgagcatggtcacccttgtaggaaacaacaacggcgccactatgaaaagtgaattcgacgaaaaatcagg

SEQ ID NO: 32628 - DNA, 455 bp, Glycine max
  unsure (1)..(455): unsure at all n locations
ttgattccaaaanngngaaaaacccaaatgctgaatattcaatggccgataagccaagccgatccctggtcttattcggtgatgggttagctcgttccatcgattcatcgcactcccactttcactctctcgcttctctatcttcctgcggttttttgagtctcccaaattctgccccatcagaaagcgaggatgagaggacagttagagaatttgcagtgctgctggatgcatgccacacttattcaaatatgaaggggcaaatcagtgatcgtgacaaccaagaggatccaccaaaacaaaccttgcctgataggtttatcggaatgaaagctgctattttgaccaacaattcaagcttgaagtcttttagtgccaaacttggatttagtgttcttaaattggatgagttagtgggaggaggttctgctgaggttgtggcccttgagctgctc

SEQ ID NO: 32629 - DNA, 473 bp, Glycine max
ctcgagccgctcgagcttaactggattagacctttcaattaacaaactctctggaaccattccgggagacatatccactcttagaccattgtggacgtctattgatctatctacaaatgagttttctggggcaattcccgtgagtcttgcgaattgtacctttcttaatacccttaaacttgatcagaatcgactcactggccaaattcctccacaatttggtgttctctcacgaattaaggtattttctgtatccaacaatcttttgacggggcaagttccaatctttagggatggggttgagttacattatgcaaataatcaaggcctatgtggaggaaatacattggcgccttgccaagccacgccttccaagagtaacatggctgttattgctggagctgctgctggcggggtgactcttgcggcattaggattgggtattggaatgttcttctttgtgcgacgtgttt

SEQ ID NO: 32630 - DNA, 542 bp, Glycine max
tgacatcatcatggcaagaggtggaaaactaatgaagctaaaatcagtgctgaagaaatggaactcattcggcaatggcagcaagcatagccgccaccacagcagcagcgccgtcgccgatgacgagtcctcctccagatcagacctccacgccgtctacgtcggcaagtcccgccgcctctatcgcgtctcctccgacgttgtcgaccaccccgtcttccgggaactcgtcgagagatcccgcgattctgaccaacaacaaaacgaagacactactacgatcaatgtcgtcgcatgcgaggttgtccttttcgaacacttgctctggatgctcgataacgccgacccacaacccgagtcactcaacgaactcgtcgacttctacgcttgctaatgctacctcataatttcaagccttccacgtgtcactttcaccctacattattaaaaaaaaaacacgtatattatattatattacatcatatatcatattatatcatgtaatactcgcatctatttgtgactgtaatttaattagttgt

SEQ ID NO: 32631 - DNA, 371 bp, Glycine max
agaaccttgttaaaaagtgcgagcaaatcatgctctcagagttctcctaaatgcaaggacagcttgaagttctttgtcaagagcgatctaatttgctcgatacaataaggcagttagaggcagctaatactgagcctgaggccgctgccatacacgatggtgaataccaattaacatagaatgagttttcaagtcttggacgtggaaaatatagtgaatgtagtacaactgaatcatctgatgatattgagaaacaagagatggaggaagtgtcagatgaagatgaaatctcatattatgataccagagagtgttttacagagcctgattgcaagtgtgagtcagcgggagctatgaatcaagtggacagg

SEQ ID NO: 32632 - DNA, 463 bp, Glycine max
gaagcaagtgttagttaaatagaagacgttgaagacatttctggtcactgggggattcttgtttcagatccatggcttcagaatcagttcacacaagtggagcttcgtagcttaaagtcccatttcatgagcatgaggagggaaagtgggaggcttgtgattgcggatttggcttccaagatgtcaagggtgaaggtggtgggagagaacctgagtgaggaagagagagcttcttgcgtgaaggatgtgtatcagaacactgaagaggaggctgattttgaattgtttctcaaggtctacttgaaactccaaacatttgtgaattctagaaccggaagtagtccaaagaactcgtcggcgttcctcaaggcagctacaaccacattgcttcacacaataagtgaatctgagaaagcgtcatatgtagcacatataaatcactatctagcacaagatgagttcc

SEQ ID NO: 32633 - DNA, 172 bp, Glycine max
cgcgcatacaagaacattactttggttttaggtccaaacatgctgaaatggttatgtcccacggcagtaagccatctgaaggatggggttagcttccccacgttacgtgataattcttacaactttctggtctggccaagtcatgaaccaaagcaggtcatgcatatggatc

SEQ ID NO: 32634 - DNA, 482 bp, Glycine max
ttattagtcactctctcacacagtcacaaactgtttctctaaacaatatctatctacacctgcccccttaagaacaaaaaaaaaaaaaaaaaaacatgtttagcccttcgcatctcaaaaccttgtaccctcttcaacaagccttctcagtaaaaccatcttcaaccataagctccatgaagctaaagagaatcgtgcacaccctcatagtttcccacttgtgccgaatcattcgtgcactctccaaagtcaaagatgttatggttgagattcttaaagaaaactcaaccatgatccacaaaaagcactacaacaactacagacgcaagaataagatcatcctaggctccttcaggctccactacaactggtgctcctccaaatcctcgcatgtgttgccggttcccgaaccggtttacgccacgtgccgcgactcgggggagccgccgcgagacgaagaagattgcccctacctaaggtgg

SEQ ID NO: 32635 - DNA, 497 bp, Glycine max
  unsure (1)..(497): unsure at all n locations
cagtcctttccatgtacaaagacataactgttaagattaacggaaatgtctcaaaggaggaagtatttgctcaaattgatagtgcactgacaagtcttatagaggaaaggaaggctgcttcaggatctgtggcagcatagaagacccatcttttgacattttgatctagcatggtgcgttgctggtggtagtggattttaaatgatttatttatagagttaaacaaaagagtcttcactcaaactaagctgcattttctcgtgaagattgtctcacggcttatatcctcccatttggaaagcaatgtgatgattggcttggaccatgcatgaggacctgtgatagtgtagtgcgcagtatattttacaaatttattttttatgagaaaatgattaccttaaattaaaatcgtttttatgtaatgactagcttgtaaatgcaggattttgtgaattatcgtttgttggtttcctgttnnnnnnnnnnnnnnnnnnnnn

SEQ ID NO: 32636 - DNA, 278 bp, Glycine max
  unsure (1)..(278): unsure at all n locations
gaagacttgcaggcgctctgttacagcctgtgagttcaaaacttgtgcgaaatcgcatatcatcctgtttccatttcagatcttcttgatgtgcatgtcttgagggttttatgcagaatgatgaacattctctaaccaacccattaatgatttatttctatttattttgcaaagggaactatttttgcaagtgaaacttgtccctttgaggattttgtttgatatacatgctgtgcttatggacggtcttgtactgattcgttatctnctcagcacaa

SEQ ID NO: 32637 - DNA, 421 bp, Glycine max
aattcactaccatttactaagatcatcatcatgcatcaagcaattccctatagatcatggcgccatctccataaccccaccacccacttcaccccactcccattaattactcattcccacaacgatgatgataagaagaccaagaatattattgttaacaacaataatactattaatattcattcttcttcagttcttgtttcaccaaaagagaaggaggggatgaaaatggtgctcaacatggtttctgagaacgccgttatagtgattgcgagaagagggtgttgcatgagccacgtggtgaagcgtttgcttcttggtcttggtgttaaccctgcggtttatgaggtagaggagaaagatgaagagggtgttgccacgcaactggaagcaacaattcgtagtgatgatgggaacacac

SEQ ID NO: 32638 - DNA, 371 bp, Glycine max
tgggtttaatgcacacaatcgaaagaggaacaaggtgcttcgctgctattgctttctgcaatgcaccttttttcatttccataactctttacagttacaccacgcctcctcctcctcctttagccattcccctatccacaacagctattccaattagatctagggtttcctcttcctcactattcaccatccctcgccggagaacaacaccgattttccggcgccggcttcacggatctcgcatcagcgtctgatacattggcaaaatgcacaccaaatcggcgcagtcatcgtttcgggatcggacgcacgaattccagagcattgcggagaggttgaagaaaacagggccagcgccgaatggacaaagc

SEQ ID NO: 32639 - DNA, 457 bp, Glycine max
tctttctgcactcttgagtccttcccaagctcgtttcgttggaaattggaattcattctctccccgagtcagagtcatgtatggcggtgacgaagtatcagcaatagtgattcgccccggttcccacacttgcaaagccgggtacgcctggcgaagcatgctcccacggccgtcttcccctctgttgttggtgcaattgatcaaatggacattgatggaactgctgatattaatgatgagaactctgacaaaaccaagggaaaatgcaaactttatgtaggatctcagtcactaggataccgcagagaccatatggaggtgctgtcacccttgaagaatggagttgttgttgactggaatattgcagattacatatgggatcatgctatgagggaatgcctcctagtcgaccctaaagaacgttcaatgctacttgccgaaccatgcttcaacactc

SEQ ID NO: 32640 - DNA, 893 bp, Glycine max
tctgaaatctgatgtctatagttttggtgttgtcttccttgaactcattactgggcgcaaggctattgataacacccgtgcccgcgcggggcataatcttgttgcctgggcacggccgcttttcaaagaccgtaggaagttccccaaaatggctgaccctctacttcaaggccgttacccgatgcgaggactataccaagcacttgcagttgctgcaatgtgtctgcaggaacaagctgctacaaggcctcttattggggatgtggtgactgctctcacatatctggcttcacagacatatgatccaaatgcagccaatcaatccaacagggttggtccatcaacccctaggagcagggatgacagaaggagcatggcagacagtgtggacagccccgaccatggccggctcggctccccttccacccacagaaattcacccgacttcaggaagagagacagcagggatccaagcaccgcgaccgagttaggcaggattgacaccggtggggggtcagggagaaaatggggattggatgattacgaaaggcaggattctcagagagacagccctgtaaatactgcaagagccagagagactccgtggaaccgcgacctggacagagagcgtgcggttgcagaagcgaaagtgtggggcgagaactggagagagaagaagaaggcaaacgctgtgggtagcttcgatgctacgaatgactaaacagacacggggaacaccaaaccaacttactattcatgtatgatcgagtcagaggagagaatgtgttggttttcatgtctatgcgcgtcttgaatccaactatgactgttctcccacgtcattctggtagtttgttagtcatcatcatgtgaaggaaaacaatacacatttg

SEQ ID NO: 32641 - DNA, 596 bp, Glycine max
ggttgctgtccttttccttgcacttatgatagacagactacatcattacataagagaactgcggattcgaagaaaaggcatggaagctgtgaagaaacaaaccagagggactgaagatgggaaagttgcaaattcagaagaaattaagtctgtggaggaagaaagagccagattgagagctgaacttagccgccttgaatctgaactacagtcaaaaacaaaagacgtagatggtgctgaagccaatatagctgctctgagaaaacaatctgaggggttccttcttgagtatgatcgcttacttgaggaaaaccagaacctccgcaaccaactacaatccttggacaggaaattgtcacattcaggttccaagaagaatatgtaagaaaattgcaggtaagaatggcttcttttgtatactcttaaggaattccatggcagtttgttgataacagcttgtcaatccctgtaagcttgctcctaaaggaatacgattttcacttttgagttgaatttggttcaattttgtcctgacaaattgtgaatttttttttagtgatgacagaaaatatagtgctgatttgttttttctgcac

SEQ ID NO: 32642 - DNA, 283 bp, Glycine max
tgagacaggtgtggaaggcaaatatacctcatacccatcttgcaactggaaaatctgaccagaactggatggttgtgaaaggcgaaacaatagtgtttcctggtggaggaacccacttccataatggtgctgatacatacattgcttcaattgctaatatgcttaattttccaaacaacaatataaataatgggggaagagtcaggtctgtctctgatgttggctatgaggttgctagctttggaggatacctcctttcctccaatgtgatagctatgtcatt

SEQ ID NO: 32643 - DNA, 509 bp, Glycine max
cggtcgcgtgggatccatcctttgttctgcaatctgcgttacgggtgcagttgggtaagctgagcgaaaacgtggctgaatgcctctctcagccccacccaaagccctcaattccccaatccatcatccccatggaccctccttctcttccatttccaaaccaaagccaaaacccaatgggttaacccttttgcctctgaatcgcgcattcagaggcctcgaaatctccgtccctagcccctcctcgctccattcaaacgttgccccatacacgtcgacgttgccactctgagcaacctctgcgtcgacatcgtgctcaatgtcccccagttgccccctccttcccctcttcaacgcaaggccttcatggaccgcttggcccaatctcctcctgacaagaaatattgggaagcaggtggaaactgcaatatggctatagcagctgcaaggttaggactcaactgcatatcaattggtcatgtgggtaatgaaatctatgggaaatttct

SEQ ID NO: 32644 - DNA, 463 bp, Glycine max
ttcctatcgtccggcaaaaccttataagagaaaaagaaagattcttcacactcgatcttgtgtggtcgtatattaattattcccttttggtatctttcttatctgctatcaatggcgactagagaattatttcactcatcagatcaagaagatgcagtaaatgaagaaagcactctactgcagcatgaggtagatccatacgaagaagaagaaactctatctctttctgaccttccaatttacagtggcgcctcaatttcagctagatggggtggtgatttctccaaagaagatggaaaaaactttgttgacgatgacgacgataatttgttcgagttcttcagtgaagaattcaccgcatcatcaaccaattatgcaaccgcagagaatataatcttctgcggcaaactcatccccttcaaagatattaatcctccacgtggtgatcagagcaatatcaatg

SEQ ID NO: 32645 - DNA, 257 bp, Glycine max
caaacccaacgccacaaagaaagtcatatcgaggacgcttaagcttttccttttgggactgttacttcaaggtgggtatgtccatgggcacggcaaattaacgtatggagttgatttcagcaagatacgctggcttggcgtacttcaggatgttttccatcttactttgctcagtgtacctttgtttgctctacggtctgtatgttccgaattggaaattcaagcattctagtttgctttcgtccagtgactccagt

SEQ ID NO: 32646 - DNA, 570 bp, Glycine max
ccgtgattcggctttattaactgaggagtggcgttgtgcagttccacagtgtggccagccttatgatcgtgaggtgatggaaaatgctcttcttcaaactgtaagacaaagagaacggctataccagctgcaagatctggtgtgtaccaggtgccatcaggtgaaagctgcacatttggctgagcaatgtgtatgtgcaggctcatttaggtgcaaggaagatgcaagtgaatttcgtgaaaaaatgcaaattttcttgaacatagcttctcatcagaaattccaacttctcgaagaatgcacctcttggattttagaacttagatagtttaaatttaagtgagggcctaggatcagagcaatactatctatgtatacagcgggtccctgcaagtgtagatatgaaagtgtccaaacctacttgtgaccaacagttgatatttatgcatccctgtgcggtgtgcttgtttgacactgctctaagcaattcttttattgtatttatcatctgcatgatgtaaattgcatgtacatgaaatgtttatcgtgatcaatgaaatatttatcctg

SEQ ID NO: 32647 - DNA, 463 bp, Glycine max
tctatttacttgattccaatttccttatatgtatccattgaaattgtaaaggttcttcaaagcgtgttcatcaaccaagatgtgcacatgtattatgaggaaactgacaagccggcacatgctcgtacatcaaatatgaatgaagaacttggtcaagttgatactatactttcagataagacaggaactttgacttgcaattctatggaattcatcaagcgttctatagctggggttgcttatggacgaggagttactgaagttgagagagctctatctgggagacatgaatcacatccaggccaagtgttggaaaagatcagtgaatcaaagtcatccattaaagggtttaactttatggatgaaagggtcatgaatggaaattggatcaaagaacccaatgccaatgtaatccagaatttcctacagttgctggctgtatgccatactgcaatacctgaag

SEQ ID NO: 32648 - DNA, 288 bp, Glycine max
tgggaaaaccgttgcagcaatgagcttccaactcttaaccaaggcgagaaagcgaactgtgttttcatatctactctcacgcgcattctctcaccgatcggaacgagcttgcaggcctacatttggcatcgctttcgacatcgacggtgtccttttgctcggaaactcccccgtcggtggctctcccggagcactgaatagattatacgacgccgatggtaaattgacaatcccttacgttttcctcactaatggtggtggctatcctgaagctaaaagagcttttga

SEQ ID NO: 32649 - DNA, 436 bp, Glycine max
ataagaaatcagatattggctctcataccgacatagtgacgactctttcctcctctgtaaatctgcaatactcaggtatttggctggttcaactcttgctggtgtgatctctatggaggctcgtgagacatacctacctccactggggcctagatatttcctattaacatttgagagagggggcactatttataaactgtttatacaattgtagccggaagaaaagggaaggttatatatcttactcttttcagatgtacatatttttaaagatcaattcatagtgagggactagcatgtagcatgtcctattcagaaccagtaatgtgtattatgtcatcatgttaaatgccgtaaagtttatgtatgctattgccaaatgttaacaggctgattagtgtacattcccaaactgcaattgtaatctttatatttt

SEQ ID NO: 32650 - DNA, 521 bp, Glycine max
tctcgagccgattcggctcgagatggcttaacacgacgtctcttaatgctcactctgacacagttctgtataaaactgttgatacaaatctgtactctccaaaacaagcacaataaagtgatggacatggaccagtgtttgcatcatccatcttcatttcttggtgataatacaatcatagctattcatagggagattaaaaactttggtcaaattccttgtatatttttaccttaaagttcccgaattaaacaacatgtagataatgttttcaactttaaacagccccgttaaaaatgtggcggattttttttaaaaataaataaatcacgtgacaatatttaatttgagaacttgatggtaaaaatataaggaatttgatgttttgttatgtaaacccaaacatcataggagaagatagggaaatgtattattgtatgtcaaacagctcaaagtttttttgttttttgtgtagtttgattttaatgttttctcttacagaaattccaacatgttttttt

SEQ ID NO: 32651 - DNA, 270 bp, Glycine max
cggttcccctggcatctctcatcatctcgctctttaatttctttctgcctccttcgtggggtttcgttttgtttcgattctcgctctgtagggttttgtcatcccttttcgatccccaattacccttttctttgatcattcagtgttttcttctctttcacttcctatttcgatttcctcgttaggtttttccttggaacccttaatctcgcaaaaccagcggttcaattcagtgttccctacaatctagggtttcgtttcgaaaatgcc

SEQ ID NO: 32652 - DNA, 277 bp, Glycine max
ctttgatgactacatcaacgactctagacagagcaggggatcctcttctagcccagcaaacttctgaatcagaagctatgaggctggtcaaacctactccttttgattatgggagtggtcatgttgatccaactgctgcattggaccctgggctcatctttgatgcagggtacgaggattatataggcttcttgtgcacaacacctagcattgatgttcatgagataaggaactacactcacaccccatgtaacacctccatgggcaaaccatcaaa

SEQ ID NO: 32653 - DNA, 276 bp, Glycine max
ctcgagccgcttgtgatcatggacgtctcttattcatgcaatgaacaacaagcccccgagatccgttttctttgatttggaaactacagtgcccaaaaagggtggagagcgtttctgggttctggagtttggtgcaattgtggtcacaccccacaaactcaccgagattgagacctacaccacgctgataagacccaaagacccatctgtggtgtcagtgaaatccagcagaagtgatggaataactcgtaaagctgttgaaaatgcaccatcttt

SEQ ID NO: 32654 - DNA, 301 bp, Glycine max
caggtgctcgcttggtctagtgcccatttactctggactccggatggctgccgcacgcctctgcctctccctgctgctcctgtccacctgcgtggctctgttactacagccactgctgggtgcccagggagccccactggagccagtgtacccaggggacaatgccacaccagagcagatggcccagtatgcagctgatctccgtagatacatcaacatgctgaccaggcctaggtatgggaaaagacacaaagaggacacgctggccttctcggagtgggggtccccgcatgctgctgtc

SEQ ID NO: 32655 - DNA, 308 bp, Glycine max
ggcaccaccactgacctgggacagtgaatcgacaatgccgtcttctgtctcgtggggcatcctcctgctggcaggcctgtgctgcctggtccctgtctccctggctgaggatccccagggagatgctgcccagaagacagatacatcccaccatgatcaggatcacccaaccttcaacaagatcacccccaacctggctgagttcgccttcagcctataccgccagctggcacaccagtccaacagcaccaatatcttcttctccccagtgagcatcgctacagcctttgcaatgctctccctgggga

SEQ ID NO: 32656 - DNA, 471 bp, Glycine max
ctcggttcgctaccagtgtaagaactactacaaactgcgcacagatggagatggggaggcgatgccatgcagcctacctcatgtacatctcagagtcagatttacatctccagcagatgtgggaaaagaaggaatgctgatgatgatgtcaccctcacctagagtgtacaccttaaacaatgagaagcagtggataaataaggctgttggagataaacttcctgaatgtgaagcagtatgtgggaagcccaagaatccggcaaacccagtgcagcggatcctgggtggacacctggatgccaaaggcagctttccctggcaggctaagatggtttcccaccataatctcaccacaggtgccacgctgatcaatgaacaatggctgctgaccacggctaaaaatctcttcctgaaccattcagaaaatgcaacagcgaaagacattgcccctactttaacactctatgtggg

SEQ ID NO: 32657 - DNA, 622 bp, Glycine max
ggaaattatcaggaaaggaggtgaaacatctgaactgtatctcattcaacctgacagttctgtcaaaccgtatagagtatactgtgacatgaatacagaaaatggaggatggacagtgattcagaaccgtcaagacggtagtgttgactttggcaggaaatgggatccatataaacagggatttggaaatgttgcaaccaacacagatgggaagaattactgtggcctaccaggtgaatattggcttggaaatgataaaattagccagcttaccaggatgggacccacagaacttttgatagaaatggaggactggaaaggagacaaagtaaaggctcactatggaggattcactgtacagaatgaagccaacaaataccagatctcagtgaacaaatacagaggaacagccggtaatgccctcatggatggagcatctcagctgatgggagaacacaggaccatgaccattcacaacggcatgttcttcagcacgtatgacagagacaatgacggctggttaacatcagatcccagaaaacagtgttctaaagaagacggtggtggatggtggtataatagatgtcatgcagccaatccaaacggcagatactactggggt

SEQ ID NO: 32658 - DNA, 460 bp, Glycine max
gtaagttcttatttggaaggcgaagttgccaaggaattcattgcttggctggtgaaatgccgaggaaggcgtgatttcccagaagaggtcgccattgttgaagaacttggccgcagacatgctgatggttctttcactgatgagatgaacaccattcttgataatcttgccgccagggactttataaactggttgattcagaccaaaatcactgacaggaaataactatatcactattcaagatcatcttcacaacatcacctgctagccacgtgggatgtttgaaatgttaagtcctgtaaatttaagaggtgtattctgaggccacattgctttgcatgccaataaataaattttctcgtagtgttgtgtagccaaaaattacaaatggaataaagttttatcaaaatattgctaaaatttcagctttaaaatatgacagtgctagattctgttattt

SEQ ID NO: 32659 - DNA, 286 bp, Glycine max
gacacagagcacatcaaaagttcccaaagagggcttgctctctcttcacctgctctgttctacagcacactaccagaagacagcagaaatgaaaagcatttactttgtggctggattatttgtaatgctggtacaaggcagctggcaacgttcccttcaagacacagaggagaaatccagatcattctcagcttcccaggcagacccactcagtgatcctgatcagatgaacgaggacaagcgccattcacagggcacattcaccagtgactacagcaagtatctg

SEQ ID NO: 32660 - DNA, 281 bp, Glycine max
attcttggcaggatggcttctcatcgtctgctcctcctctgccttgctggactggtatgtgtgtctgaggctgagccctacgggcaccggtgaatccaagtgtcctctgatggtcaaagttctagatgctgtccgaggcagtcctgccatcaatgtggccgtgcatgtgttcagaaaggctgctgatgacacctgggagccatttgcctctgggaaaaccagtgagtctggagagctgcatgggctcacaactgaggaggaatttgtagaagggatataca

SEQ ID NO: 32661 - DNA, 252 bp, Glycine max
ctgaaccagttatgtgtgttgcatgagaaaacgccagtaagtgacagagtcaccaaatgctgcacagaatccttggtgaacaggcgaccatgcttttcagctctggaagtcgatgaaacatacgttcccaaagagtttaatgctgaaacattcaccttccatgcagatatatgcaagctttctgagaaggagagacgaatcaagaaacaaactgcacttgttgagcttgtgaacacaagcccaaggcaacaa

SEQ ID NO: 32662 - DNA, 230 bp, Glycine max
ctttagtttgatcgctattgtggaaacccactgtcctgcagcgtaggtcacagctgcactgcagggctgtggtctgcgagggtccccagctctggccgtgtgtcgcccctcattctccagggcgaaccttcagcatcaccctcagaagctgtcccttagcacctcgacgcagtcaggacccctggatataccttcccagagtcccctctgatccctgctaatgaacactg

SEQ ID NO: 32663 - DNA, 284 bp, Glycine max
agcccagtgacaccatcgaaaatgtgaaggccaagatccaggataaggaaggcattccccccgaccagcagaggctcatctttgcaggcaagcagctggaagatggccgcactctttctgactacaacatccagaaggagtcgaccctgcacctggtcctgcgtctgagaggtggtatgcagatcttcgtgaagaccctgaccggcaagaccatcaccctggaggtggagcccagtgacaccatcgaaaatgtgaaggccaagatccaggatacagaaggcatc

SEQ ID NO: 32664 - DNA, 285 bp, Glycine max
cacgtgcctcctggtctcagtatggcgctgtcctgggttcttacagtcctgagcctcctacctctgctggaagcccagatcccattgtgtgccaacctagtaccggtgcccatcaccaacgccaccctggaccggatcactggcaagtggttttatatcgcatcggcctttcgaaacgaggagtacaataagtcggttcaggagatccaagcaaccttcttttacttcacccccaacaagacagaggacacgatctttctcagagagtaccagacccgacaggac

SEQ ID NO: 32665 - DNA, 302 bp, Glycine max
aggaggtttgactaagatcaatcatgacgacttacagtgacaaaggggcaaagcctgagagaggccgattcctccacttccactctgtgaccttctcggttggcaacgccaagcaggccgcgtcattctactgcagcaagatgggctttgaacctctagcctacaggggcctggagaccggttcccgggaggtggtcagccatgtaatcaaacaagggaagattgtgtttgtcctctcctcagcgctcaacccctggaacaaagagatgggcgatcacctggtgaaacacggtgacggagtg

SEQ ID NO: 32666 - DNA, 281 bp, Glycine max
tggccagcctgctacgcatggtcaaacgaaaacccacaggagacctggagctgttgcaactggtgatattggcagagtctggcctggaactaaaatgcctggaaaaatgggaaacatatacaggacagaatatggactgaaagtgtggagaataaacacaaagcacaacataatctatgtaaatggctctgtacctggacataaaaattgcttagtaaaggtcaaagattctaaactgtctgcatataaggatctcggtaaaaatctaccattccctacat

SEQ ID NO: 32667 - DNA, 281 bp, Glycine max
ctggcagctatattccctctctgttctacttgctttaacgcagggctagcacctggcaaagtgtacattattggaggactcaaatctgtatgtgacatgtcccaactactgtccgctaactagttatccaaattgttaagctacagaagcccagttgaggggtaagtgtgcctggctcacacagcctgcaccctgtcacctcggcaatgagccagtgtggggctctggggacttctaacccttggattgctctttctgacctgtgcataccttctaattgt

SEQ ID NO: 32668 - DNA, 503 bp, Glycine max
caaactcaaacagaaggtgtctgttaatgagagagtgatgcccatctgcctaccttcaaaggattatgcagaagtagggcgtgtgggttatgtactcggctgggggcgaaatgccaattttaaatttactgaccatctgaagtatgtcatgctgcctgtggctgaccaagaccaatgcataaggcattatgaaggcagcacagtccccgaaaagaagacaccgaagagccctgtaggggtgcagcccatactgaatgaacacaccttctgtgctggcatgtctaagtaccaagaagacacctgctatggcgatgcgggcagtgcctttgccgttcacgacctggaggaggacacctggtatgcgactgggatcttaagctttgataagagctgtgctgtggctgagtatggtgtgtatgtgaaggtgacttccatccaggactgggttcagaagaccatagctgagaactaatgcaaggctggccggaagcccttgcctgaaa

SEQ ID NO: 32669 - DNA, 300 bp, Glycine max
attttaacacatgactcaagtattcgatatttgcaggaaatatataattcaaataatcaaaagattgttaacctgaaagagaaggtagcccagcttgaagcacagtgccaggaaccttgcaaagacacggtgcaaatccatgatatcactgggaaagattgtcaagacattgccaataagggagctaaacagagcgggctttactttattaaacctctgaaagctaaccagcaattcttagtctactgtgaaatcgatgggtctggaaatggatggactgtgtttcagaagagacttgat

SEQ ID NO: 32670 - DNA, 296 bp, Glycine max
ggaagataagtggttttcccaaaaaccgtgttattggaagcggttgcaatctggattcagcccgattccgttacctaatgggggaaaggctgggagttcacccattaagctgtcatgggtgggtccttggggaacatggagattccagtgtgcctgtatggagtggaatgaatgttgctggtgtctctctgaagactctgcacccagatttagggactgataaagataaggaacagtggaaagaggttcacaagcaggtggttgagagtgcttatgaggtgatcaaactcaaaggc

SEQ ID NO: 32671 - DNA, 261 bp, Glycine max
gacatgtacaacttcttctctcctctcaaccctgtgagagcccatatggagattggcccagatggaacagtgacgggtgaagcagatgctgagcttgctacccagggagaagctgtggcggctatgtccaaagacagggccaatatgcagcacaggtatatagtacgtcttcttgcattcaaccacaggggccagcactggggcgtatagcagccaggtgatgcaaggcatgggggtgtctgctgcccaggacacttacag

SEQ ID NO: 32672 - DNA, 563 bp, Glycine max
ctgcaactggcacacgtctgcctataggtcctccggccctcgaggccaagaattcaagccaaagaatagggtatagagattaattagcagcaatttactagtaagatatatcacgacgctaacaagttctatgcctatgaaaagaatgcccgattctgtggaaatcaacctcgaacatgtagatgaggccaaagcagcagacaaagtgtccaactccaaccataataaggaagctagtaatggcaaaaaaaaaaggcgaccagaaaatcaatgataccacaaaaggtcaaaatagtacttacactaacaatcaatgtgattacagggtcaacggctctatatacggtggcaccatcaacctcggtggaagtcaaggtgaatagatagatatctgtatttgaaatatgcggcgcagtaacatggtttactactataagtatatgatgcattaattaccaataatgaaagtgtgctctataagtaaatgctatggtttactactataagtatatgatgcactaattaccaataatgaaagtttgctctataagtaaatgttatgg

SEQ ID NO: 32673 - DNA, 585 bp, Glycine max
tgcattttcccgccacaacgcgagcaagaggctccatgttcccgccaaatgcaaagccctagttagcggcaaaaaaaaggaaccaccagcctccttttcttctattcttctaaatctctctctttctgtttgttatcagaggcttcgatacgacaatggatttgagcgaggaaggtagggcagctcacaagcgagaattctccgatttcttagatcaagatgttggaaagggcatatacatggacgaaatctaaaccctaatcaaccacaagcgtcaccgactcatcgtcaacatctccgatctccacaacttccgcgacttgggtaacaggattctgaggagtccaagtgagtacatgcagccgttctgtgacgcggtcacggaggctactcgtgctatcgatcccaagtatttgaaggaaggggaacaagtgcttgttggatttgaaggcccttttgtttctcgccgtgtcacgcccagggaacttctctctgaattcataggttccatggtctgtattgagggcattgacactaaatgttctcttgtaaggccgaaggttgttaaaagtgatcatttttgcc

SEQ ID NO: 32674 - DNA, 518 bp, Glycine max
cttcttcttcccttctaactctcatcccatactcctcttttccaaaggaaagtaacaccaaactaagcaaaactaataatgccatcaccaacaccaataccaacggcagtgtttggtggggtagaaactcctaatggagactcttctaacaccaagcctcatcccaaacaagaatcgcgtgacctctctccttttttgtcttgctcttaccccatcactcttaagttcattgacgcggcataccgattgaagatagaggacaaacaaaaaaacggaggcagcatcaagagattttttactccgcacgaatcatcaccgtcagatcaaggatcaagggcgggagcgtcgcacgagcgaactattttaaagggagtaacggggatagcacatccaggggagatcttagcggtgctgggcccatcggggagcggaaaatcaacgctccttaacgcgctcgcagggagactccacggacacggtctcaccggaacaatcctcgcaaactcgagcaaactcac

SEQ ID NO: 32675 - DNA, 360 bp, Glycine max
cccacgtgatcgatcccgtttttccttgggtcttgggtgacctctcatcagaggttgtggattttaacaaatcatctacatttcgagatctctcaaagcctgttggagcacttgatactaaacgatttgaggtatttgaagatagataccgcaacttctgtgatcctgatatacccagtttctactatggatctcattactcaagtatgggcattgtgctttattaccttcttagattggagccctttacctctcttcaccgtaatctgcagggtggtaaatttgatcatgctgaccgtctttttcaaggtgttgagggtacctacagaaattgccttacaaatactagtgatgtgaagg

SEQ ID NO: 32676 - DNA, 417 bp, Glycine max
ctcttccctcaccctcaccctttcctcctctccatctttacccattttattttataatattatctacatcacattattttctcttcttttctttcctttttaccattttcagttcacagggttaggtcttgctcccttgtctggtctggtgtgcaattcccataccaataacaatacacccattttaccattcaatatacctatagtcatcctctccttcgttctgaaaatcgtagatttttgttttagggtttctcttatataatcttttcgtaacacaaaaaaaaatcacataaatcttcctttatatttattactatttcgttttttctttggattaattaactaggcttgagctatccgaataataataataatagtttcggagaatggaaaagaaaaaggtagcagttcccc

SEQ ID NO: 32677 - DNA, 622 bp, Glycine max
atgcttagaagcaaatgctggcatggtatcccagattcgtgtggcaagaccacctgctgaaggacggggaaggaatcaattgcttccacgttattggcctaggattaccgatcaagagttgcaacaaatatcaggagattcaaattctacgatcgtgccactctttgaaaagatgcttagtgcaagtgatgctggtcgaattggtcgcttggttttaccaaaagcatgtgctgaagcatatttccctccaatctctcaaccagagggccttcctttacgaatccaagatgtgaaaggaaaagaatggatgtttcaatttagattttggccaaataataacagcaggatgtatgttttagaaggtgtaaccccctgcattcagtctatgcaattgcaagctggagatactgtaacatttagccgtatggaccctgaggggaaacttataatggggtttagaaaggcaacaaattctactgcagtacagtcacaaaagggttgttcagaaacccacctaaatgcgctgtctaagaaatggaactcagctggtggtgacatgaattggcatagcattgacatgcctgatcgcagataaagagatggggccattgccacctgtgat

SEQ ID NO: 32678 - DNA, 512 bp, Glycine max
tttatcctcaacaacaacaataataaatcccgggggcctaaccctaaccccaaccgtaaccctgaagaaccaaaacaacatcacaatcacaaagacagcaccaaagaacgaataattctccagagaccctttcgcgccttgcgacaacaacttaccgtctcagagattctcatcttcggcgaccgccaaaaggtcacagtccgccgggaggaataagagtgttattactacggcggcggagagggatccctctcccgcggggaaggggaagaggtccgcgtctccggtgccgtccaagtgtgtggttccgagcctcgtctcggcgcgcgaggagaaccggaaggtgtcgagggagccggcgattatcgtgccgtcgaggtaccggcagccttctccgaccgggaggaagcagccgtcgtcgagtccgcggcggacatcactttctcccgggaggaggttgtctgggggacttaaggtttcgccgctggtggcggacctccgtgaagaagaag

SEQ ID NO: 32679 - DNA, 379 bp, Glycine max
gcggctctctcatgtctcaacccaaccacccggattctttctgaatttttgggcttggagacaatgcttgcatttgtgtgcagttcttatgaaggcattaatgcactggagaagtatgatcctgaaggcttgataaactgtaatggtggattgcatggtatagggtcttcaattggaaagagaataaatggccgatttgttgtcatatctcttgaagatataagaccctttgttggaggttttgtagccaatgatccacaaaagaaattggctctcccaaagccaagattacctaatggggagtgcccacctgggtttcttgattatgcggtgaacatgatccatttggattcaaaatatttatcttttcttactgaca

SEQ ID NO: 32680 - DNA, 533 bp, Glycine max
  unsure (1)..(533): unsure at all n locations
gattanattcttatggggcgtatttagggggaggaggatcaatcattcagattctgcggaaaagattagtattcccagtttgaatgtaatgccagatgaggagaaatcctcaactgctgttttgactatgcctgaaacacattgatcgccacagtgcaaggatgaagaatcaagtgattgtgataaagcatgcaatgcacttctcccatccacttccatagaccaacatcagactactggaagtaggaatgttgatgtcaatgaccagacacatttgggttcacaagtaagcttagagaagctagatagtaggattgactcaaaatctacatcaagggttccaacaagcagtactctgttatgtcaagaaatgaactccactggttcatccctgaaagttagtgtccttgaacatgaacagtgcagagagtctaaacctcctgaagcaatgggaaggagtgcaactactaggattgtggaaacaaactgattctgatatttctgtcaagcaagagaacactttgtctttgatt

SEQ ID NO: 32681 - DNA, 612 bp, Glycine max
tttccttttcgtacgggaagacactgttcactgggcgacaaacataacatgtgtgacatgtatgggaaaggatggatcatagagatgtacggatactcttttggtgctgcagaagttggactacggcacagaatcaaggttaacttaatgatctacccaggttatgttcctcgcgagggaattgagccaattcttcttcactatgggttgccatttagtgttgggaattggtcattcaataaactggctcaccatgatgacggaattgtatatgaatgtaaccagctctttccagaacctccttacccaaaagaggtaagacagttggaacttgatcctaatcgaaggcgaggactatttctaagtttagagtgcataaacattataaatgagggtcttttattacaacatgcagcaaatggttgccctaaaccaacatggtctaaatacttgagctttttgaaaagcaaagcttatgcagaactaactcagccaaaatatgtgaatcctgctactttacaaatgatggaggatatcaaagaagaacatgtcgatgatggtgctggaaagccacatcccaaaatccataccattttttccacggaatgcacc

SEQ ID NO: 32682 - DNA, 454 bp, Glycine max
ccatcatccatccactttccttaatcttgcattccagatctctcaccttcttgttcctcctttgtgccacctttttgttccatggttgtttttgtgcctgtatcagcttgatcttttttgttgtttgttttccctgttgtaaagcatttcaatctcaaaggtatgtactgggttcttgtgtgaattgttcttccttcttgtcatgccacaaagtttttgactttattggtagtggattgcgttgcagttttccatttcctcctctcgtgaccatcaaaacacatgtccctgaacatcaagatagctttttgttgtcatgttctgttctgtatctcaccatttaattagttttattaatctgagtgaaatttttgagtgctttcatatttacaaatttatatatcataagaattaagatcttcatcttgttattttgcatacatgttagttttga

SEQ ID NO: 32683 - DNA, 286 bp, Glycine max
gaaagacaagaatttacaggtttcttcacactggggggtgaaaataaaacaatgaattgtaagtttctgcaacaacaatcaagattgggatttggaaagttccaacttctaagagctctttacttctcggacaccatcattcctggacttcaaattcctccatagatatcccccgctggccatgtcaacgaatacccagaatccattctgaatcatctgaaacgaaagcaacaatttagtcaggatcaaaatctagaaaatcaagaatgatggtgaattgtataaa

SEQ ID NO: 32684 - DNA, 508 bp, Glycine max
  unsure (1)..(508): unsure at all n locations
acgaggttgaggtgtctggcttcgtatagtatcccttcctccctcccactgcgcagcacacagatcgcacagacaccacctcgccctaaaatctccaacaacactcagaaccacacattttagggttacagaggagaatccttagcctagttcctctctgacctctgtcgtgaattgtagctacccttgcttgatttctgtatccaagtgcaatcgcctcatgtcgaggatatgcgtgaagaatttgccgaaagatgtcgccgaggatgaactgcgggaattcttttctggaaaaggaggaataatcaccgatgccaagcttatgcgcaccaaagatggtaagagtcgccaatttgcttttattggatatcgtactgaagatgaagctcaggaagccattcgatatttcaataaaaatttccttcggacatctagaattatttgtgaggtggctcgaaaacatggngatgaaaatcttcctcgtccatggagtcgacattcgaagaag

SEQ ID NO: 32685 - DNA, 621 bp, Glycine max
  unsure (1)..(621): unsure at all n locations
gcacgaggtggcgctgaggccgcccgcaccgagctcctccaggtccgctccgacgtcaaggagctcaccgccgtccgccaggacctgtccggacaggtgcaggccatgacgcaggacttggcccgcatgaccgcagacgcgaaacgggttccggcgctgagggctgatgttgaggccatgaaacaagagttgcagtgtgcaagggctgccattgagtatgagaagaagggatttgcagaaaactatgaacatggtcaagtgatggagaagaaattggttgcgatggctcgggagatggagaagcttcgtgcggagattgccaatgcagagaaaagagcacgggctgctgcagcggctgggaatccaggtcaagggtataatgcaaattatggcactgctgatgttggatatgctggaaatccttaccctggcatttatggcatgaatccaggttatgaattttgggcccaaacattgtgcctcggactctggttccatcgttcacatctgcagaagagcatggttgaaaattgtaatccccggatttggcttctctgaagtgagaaggtgctttttagaggatanagtgcaattactatcattgattagaaatcaatggtg

SEQ ID NO: 32686 - DNA, 439 bp, Glycine max
gtaaaggcaaagacttcttgtgcattgtctcttggttttggggaggataccatcaacgcatcatcggttcttgtgatgccaatgatgtcatcgagaatgactggattcagaggtaatgggcttgagagagcaagaattttgtccatgagaaatggttggagcaagatcccaatggatgaagatgctggcaaattgcttgaaactagttcggttgttcctcctagcccttagcagtggttgttagtgtcataggaatgtcccacggtatcattttttaccccttgatttcccatttttttaatgattggagtagctgagatatgaaaccgccacaattcaaatttatttgctttgttagcatcatgttattgggaaaaagaggataaaaaaattgttgtatattgtatatacatactgtcactttttacttgcacaattg

SEQ ID NO: 32687 - DNA, 504 bp, Glycine max
tctgtttttttagtgcatctctaggacctattgcttggaaaattgcttcccacaggattcaacacgcactgccagctggatgtaaatttggtcgtggttgggttggagagtatgaaccgctttctaccccaatattaatggttaataatcgtgtccaaaaagaaaatagtttggttatgaagttgcattccactactgaattaccaaagggtaaccaaaattgtaagaatgtggaatccagcatcatgcatcctgtaaatggacagatgcttgagggaaaacgtccttcaatgcctgatttcgaaggaaaacctttctttggttctgctggagtaaggctcagtgctcccttcaacatccgtaatcaggagcagaacgcccaatccaggatgttaggcaagtctgagaaaaatggtttgaaacaagtggaattgaattctttaccctcaagtaatcaaaataataatggtctggttgcaaagtttacaagtcatgctcctgcag

SEQ ID NO: 32688 - DNA, 442 bp, Glycine max
agagccttcagacttaggtttgagtagagacagtggcgttggtccttctaaaattcctaattcagggactcctaaccaactagaaaatttgccagccttgtctggtactactctgtacaaagggactcttggaatgaatacagttggtgatgggacaagattgaatgtcaatgttgtaccatatactaatatcagccccaatgactctcggaacctttttgcagatcttaacccattccagataaaaggaatggggaaagcccctgtgcataacaaacctgtggaaaataaacctcctgagcttaaaagtactaaaaacaatactgtttctggtagacccccagtgccactgatgtggaagaatcgtcctgcattcaatgaagaacccaggacaactaatcataaacctaatgattacaacctcccttatgtgtttccaatg

SEQ ID NO: 32689 - DNA, 261 bp, Glycine max
cggaacctactgagctcacacccccacttctgcagcttattcaagtcagctttagctacccaaaccgggaggacctcaggctctcaaatgttgatgttggaattgatatggggactcgtgttgcgattgctgggcctaatggagctggaaaatctacattgctgaatcttccagctggtgatttggttccttccgagggtgaaattcgaaggagtcagaagttgaggataggaagatattcccaacactttgtggaccttc

SEQ ID NO: 32690 - DNA, 268 bp, Glycine max
aactccctcctcttgtctaattgaggaaattaaaatggcagcctcttcattgaaccacaaattccataaccatgctcgttctaatagcttgccctctaagccacaccctctcatcctacaatgcaatgaacgcttatctagactaggggcctatgataccatctcttcttcattgctaaggcaaaatcttactaaccttctagatttgcatgggtgcattgaaaagttggttcaactacccttaactcaacaagcacttgttcaggaa

SEQ ID NO: 32691 - DNA, 357 bp, Glycine max
gttataacagaggctctgcttccaagggcaaggtgagaaagaaaatggaaacatacataatcaaggtgttaaatttcttgaccaaaaaaggtgaagtctacaaggcagagccacccttggaccttaaggaagccttttccaagtttgctggaggagagaatcaaatgaagaaggatcagcttcttcggttcatggtggaacaccagggagaaaataatattagcaccatggaggatttggataaaatagttgaaaagtttttgcaactaagaaattcttgttctagcaccaaaactagctccacaagaattgtagatgtttataggaaacaaggattgagtctcaatgacttcatcg

SEQ ID NO: 32692 - DNA, 491 bp, Glycine max
  unsure (1)..(491): unsure at all n locations
atggtttacgacacaaaaagaaagatttatttttaaaataaataaataaaggcgttgaacagatgcactgcattcgatttcgtttttggaccacggtggtggcagatcagctgccaaagcaaagaatagagatattgagttttagtttgagtgtgagaggatgatgcgatacaaagaggaaaaagaagcacagaaggaagcttttagaaaatatctggagccaggtggagctgtcgacgctctcaccaaagttctggtttctttgtacgagcaaaacgacaagccttcttctgccgtcgagttcattcaacagaaattgagctgtccttccatctcagaatatgaaaagttgcaagccgatttctccgatctgcaaatcaaagacaatgccctcttagcggcccaccagaaaacctgcaaagagaattgcaatggaatggattttcaatgatttttttnnnnnnnnnnnnnnnnnnnnnnnnnnnnnnnnn

SEQ ID NO: 32693 - DNA, 250 bp, Glycine max
aacaacaacagagatgttgcagaattcgaaccgagctcggtgtgcttggcgaaaatggtgcagaatttcatggaggagcagccaccggccccaccgaaatgtggtcgcaaccgctgcagctgctgtcaacgccaatagctccgacgacgacggtttcgacctcttcggtgctgcaccggcaccggaatcatccaacgccgacgccactgaatcactcaagagcttgatcgcctgcgcgagtgtcggcgag

SEQ ID NO: 32694 - DNA, 373 bp, Glycine max
atttgtctgggtttacaaattagtgcacaactggctggacaagatggtcaaatattttatagtttgttgtttgagaacaactctcaggttccacttgatggcttcatgattcaatttaacaagaacacatttggtcttgcagctgctggaccccttcaggtttcacagttgcaacccagaatgtcagctaggacactcctccctatggttatgttccagaatatgtcgcaaggtcctcctagctcagctttacaggtcgctgtgaaaaacaatcaacaacctgtgtggtatttcagtgataaaatctcattacttgtattcttcaccgaggatggtagaatggaacgttccagttttctagagacatggaggt

SEQ ID NO: 32695 - DNA, 295 bp, Glycine max
ggccatgaagaaggccaacaaggatgtggaactttatgttagcaaagggatgacacatagtttttatctgaataagattgctgtggatatggaccccaatgttagtgctcaaaccgatgctctcatttctaggatcaaggagttcattgagaagcactgaatggatcggttatccggagttgctatagtattcagagaagcttaattaagggttttgatatatatagtttatttgttgcactaataattaatcgagtttgtttcagcttaaataataattttgagttcgagtttt

SEQ ID NO: 32696 - DNA, 474 bp, Glycine max
ggtaaatccatctggtgatgaaaataattcagacatctcaccaataaagagaattgaatcgcaatctcagggagatctgagccagtcaattggtaagataattgagcttgttgaagggatcagcctgcctgctgtggattatgatagttcagatcccttggacagaggagatggggatatccgttcgcacaagaatctaggaatgccaacaggctacatggtccgtgttttccagtggaaaacatctgaactcagtaatgtcttgcggcaatttctccatgtgtgttacgatttactcagtggcaagactgattatgaaaattttgccaaagaactaacaacagcattggattggattatgaatcactgcttttcacttcaggatgtttctagcatgaaggatgccatcaagaaacaatttgattgggatgagacacggagtgaaggtgaaacagagaatgagataagtcattt

SEQ ID NO: 32697 - DNA, 454 bp, Glycine max
ttcgtggaaactgccagacgaacacgcgcgcgctgagaaaggtcacagctgaccatcatatttcagtaaggagaaggaccgtcagaaggaagctgaaaagaagctgtcaggaaaaaagaaacgagaaagataaggggtctagtaagagcaactctgatgttgaagaattggcaagaagagctggcaaggaaagtgaacggaagcgggatttcgacaaaaagagtgaaacggatcgcaggcagcatcagaaatctgggttagagagtggcaagggacacaataccaacaatgcacaaaataaaaatgtcactgcatacaattataaccgaggaggtactggaacaaggtatcttgaccgcatgcggggcacaattttgtcctcttcaaaagcatttggttttggtaggggtattaatgttcctagcactgtggtgaaagacaacaagtttaatag

SEQ ID NO: 32698 - DNA, 509 bp, Glycine max
tataacattgccaaccttaacaaaattaggatttgattgatcagtgtcaaagagagggttatgtgcaaagggtaaaggatgaagaaggtgaaggatgcaatcttcaaggatctcttgaagttaataaagtagcaggaaattttcattttgcaactgggaaaagctttcttcagtctgctatatttctggctgatgtgcttgctttacaggataatcattataatattagccatcggatcaacaaattaagttttggtcaccatttccctggattggtaaatcctcttgatggggtaaggtgggtgcaaggacctactcatggcatgtaccagtatttcataaaggtggtccctacaatatacacagacattagaggtcgtgttatccattcaaatcagtattctgtgacggagcatttcaagagttcacagctgggtgttgcagttcctggagttctcttcttttatgacatatctccaatcaaggtcaactgtaaagaggaacatact

SEQ ID NO: 32699 - DNA, 266 bp, Glycine max
tatcctttaacaattcaggattggttcttaaagagctttttgatccaggagctactgcaggagcaatgttgggacagtgtcaatcttttgaccagcgttcatctgattatcgtttcagtggttcaatattttcaattgaggaagacacggatcttgggaaccagtttatgtacttgcctacagatcccaacttccagcaagtgactggaattacacctccaacatgttctttgccatatctccctagggattgtggagatgagaca

SEQ ID NO: 32700 - DNA, 382 bp, Glycine max
cggctcgagttaagtgccacagtcatgatggagaggaaggttatcctggggatatcactgttactgccacttacacactcacctcaagcacaactctgaggcttgacatggaaggagtgccaaagggcaagcccaccatagttaacttagctcagcatacctactggaacttagctggccacaactcagggaatatacttgaccattcaattcagttatgggctaatcatatcacacctgtgaacgagaataccgtgccaaccggtgaaatcatgccagtgaagggtaccccttttgattttacatcttttaatagaataggcagcaccatgagtcaggttggactgggatatgatcacaattattttgttgattgtgggga

SEQ ID NO: 32701 - DNA, 289 bp, Glycine max
ataccctctatcatttcttccaagaaaagccttcgaggtcccaaaagagtcataatttgcctcaaagccatgtcttgctggtctgcagaaaatgccacaaaggcttatctcaacacattgaaaatgggtccccacgccaaagaacccgcggttgcagagttcatatcagcactagccgctggcaacactgcacaactaatggttgtggcatgtgctggtgcagcagactcaaccacactagcattggtcactgctgcacaccaaactggtggccatgttgtttgcattg

SEQ ID NO: 32702 - DNA, 287 bp, Glycine max
agcgatccgagaaaaactctgtaaacatgttggtttaccaggacctccttacaggtgatgagcctctctctgactccttccgttacaaggaaattgcgaatggaatgctgtgggaagttgaggggaagtgggttgttaaaggagcagttgatgtagacattggtgcaaacccttctgctgagggtggaggagaagatgagggagttgatgatgcagctgttcaggttgttgacattgctcacacattcagacttcaggagcaacccgcattcgataagtagcagttt

SEQ ID NO: 32703 - DNA, 480 bp, Glycine max
aaagcgtataaagacaactgtgtcgcagagtaccctgtttgaacatttgataaacatatgggagtttaaccctggccctgttccaggaagttgcgatctttattttttggtggattttaagtttcagtctccactttacagacagattgcatcgatgttctttaaggaggtagcctctaggatggttggttcatttactgagcgttgccgcttggtatatggaccggaagtgcgggtccttgaaaactcgtatggaaaaagggcataaaattctgcaccagtttcttgtcttgaagaacatagttgacgtcaatttacagtctctgcatcaattgggcgtgtttttattgtttgccgctcaatgctaaatgattgatcatttctactttctaatccctagtgatttttgtaatttatatgtagatgaattctacaaaatactgcgaacaatctcgaagttgacatgaagttaagatgaag

SEQ ID NO: 32704 - DNA, 489 bp, Glycine max
caaaccaaaagctgagttggtagtagtagctatggcgagcccagaagaagcaaagctcgaaactttcatgcaggggctacaggcaaatggggtggagctaccaggttgcaagctcaagtggtgtgattccaaacgagggtttggcatcttttctgataaagatgtttctgatggggttatgttggttgttccactagatttagcaattactccaatgagggtgttgcaagatcctcttctaggaccagcatgtagagcaatgtttgaagaaggagatgtagacgacaggttattaatgatgctgttactgactgtggagcgtttgcgtaagaattctctatggaagccgtatcttgatatacttccaaccacttttgggaatccactttggtttagtgatgatgaacttcaagagctaagaggaacaacattatatcgtgcaactgagttgcagaagaaaagcctgctttctttgtatgaatctaaagt

SEQ ID NO: 32705 - DNA, 420 bp, Glycine max
cctcgagccgaatcggctcgagctgtttcaaacccccttaatcttagtcattggttcgcatacgagttgcattcaaagtaggactcgccatagtcttctcctttttgtcgttctttcaacttttgtctagacagggtttgatgtcaatgcccttcaaaacacaagcaaaacccccatcttgataaatttcatgtaaagggaaagaaattgtcgaagttcacttgatatgctcttcctttatgtgtcaattggtgggggttagtggaacgtgatggaagcgcttttatggtagggcttggttttttgtagtgggcagtgggaccttctaaaaggttagggtggtgtgtatatttttattagtgatgtaactcttccagaactctgaaatgcagaggtgaaatggataatggttgctttacc

SEQ ID NO: 32706 - DNA, 395 bp, Glycine max
agtgaaagaaaaaaaaatatatatatgtggggcgaaagctacaatctagaacagttctgaagtctcgacacatttcagtagataacattgtttggtttgccatcagtgaacctctacagagaatggttgtttgagcatgttacatacaattgaaagggcatctagccgagtcggtgcataacctaatcatcattttcaacagtaccatctttgaggtgaaaatgtttttctctcttctggaactctgtcaaacctttcccacttcccgtcacaccaacctttccctgaggatcatcaggagatttaaaaatactctcccgttttcttccagagaagaaaccaatcttctttgcctttcctttggttgactgaaactgctgccaagcattttgccg

SEQ ID NO: 32707 - DNA, 490 bp, Glycine max
ctcacgcgttcgcccacgcgtccgccacactactgctattgggacattcttctcagttcactgaactaaagtgaagaagtgcgataaaataacaatagatgagcatagtgaaaacctgaaactctttctgtattccttatcattgtcaaaacatgaattctcaattcgcaaacactagcgatattaagctccaactcccaaaacccttcttccctcgcaaaacccctttcccccaatttccccactcttcacctcgctttctcaccaccagattcttccctcgcaacttcacgaatcgatgcaaactcagaatcaccgcatccaattctccttccgacacagcctctcccaagcaagagcaagaacaagaacaagacgccgaatccgctcaactattcgagaaactgaaggagacggagaggaagcggatgaatgagttggaggaatttgacaagaaggcgaatgtgcagttagagaggcagcttgtgat

SEQ ID NO: 32708 - DNA, 379 bp, Glycine max
ctctcagacttctccctcgtgccacccctactacctccgtccagagccgccgtgccccgcctccgctgcgcgccaccaccggcgtcgtccagcgcgtgcatcccatgtgaaacctggtcaagtcatccatagcaaatcatattgctattaatagtgatccaaaacaaatagaaaccccttcaaaattggcatagtagtagaagcattctttttccttgacatgattgattgaacaatgatgtgtgagtttttgcaaatttcttaataatatctttgatttatatgaaccaaaaaaaatattccacctttctctcatttacacaattgaccttggtcgtgcacgaccggggtcaatgtagaaattctcaaatttccatta

SEQ ID NO: 32709 - DNA, 659 bp, Glycine max
  unsure (1)..(659): unsure at all n locations
acacaaagttttggggttgttcgtttggtgatcctttctctgagcctgaggcattttctctgtcactacattagtgtgtgtctgagtcgtagaaataaaagtgtttctgtgaagtttgaagattaagccacaacatatattgcttaaaagaaggattggagagttgagaacaaggctgttttgtggatcattcaatggctatcaaaaggataatctcttggaatatcaagcaagtcaacttgatttgagctaatcatcgtcggttctacgactaccaaactgaaatcatggtggaagatggcgatgaggttgcggtagatgctcgttccacagaagactggttgttgcatgcacaagaacttgttcctgttgtcattgataaggcaagagaggtcaagggatttgccggtagatggaagatgattgtcgcaaaactggaacagatccctttgcggttatcggatttgtcaagccatccatgcttctcgaagaatgctctttgcaaggagcagttgcaggctgtgtcaaagacactttgggaagcgattgaattggctgagttatgtntgaaggagaagtatgagggtaagcttcggatgcagagcgatctagattcattgtctgngaagcttgatttgaatttgacggattgtgggctc

SEQ ID NO: 32710 - DNA, 607 bp, Glycine max
cagaaggatatgagaagttagcccaggcaaattatgatatgtttgctgatgatgacgagcatgataccagtaagccatctacagatgaaaataatgcagtcagtcaatcttcttcagttgccataaattctggtcctgagggtggagcatcacaaaacgattatgtgtatgatgaatcttctgggtactattacagcagcactttgggctattattatgatccaaatacagggctttattgctcagcagcatcagggcaatggtactcatataatgaggagactagcgcatatgaagaagttcacgaggttgcatccaatgtgagttgagtgcctagtttaaggggagaataggctatttagcatagccacaatccctgtctcagtggctcatgtacagactgaagcactcttgatctttttgtacgttatgggggattttcttcttaggtgcaactgctaacagttgtgtgtttatctctttaaggttcctgttttaaagctccttaaacttttcgcctaaaaattacttagaatgatcccttgaagttaggagctgtacaatgtttactcttatcaatttgtgagttatatgcagttttgccttc

SEQ ID NO: 32711 - DNA, 510 bp, Glycine max
cagcgccaatcaaggtcacggtgacgcctccgccgcgtgttggagggactgagcaagaagggatgctgaaggatattggggatcgaacttatactgtgacttatgtggtgcctaagagagggaactatatggttagtgttgagtgtaatgggaggcctatcatggggagtccctttcctgtgtttttcagtgcagcaggtaatagtactggagggctgttgggtttagctcctgcatcttcatttccaaatcttgttaatcaaactatgcccaacatgccgaattactctgggtcagtttcaggggcattccctggattgttgggaatgattccaggggttgttgctggagcttctggcggtgctattttgcctggaattggggcctcacttggggaagtttgtcgtgattaccttaatgggcgttgtgcgaaagttgattgtaagttgaatcacccacctcataatttgttaatgactgccttggctgcaacaacctctatgggaacac

SEQ ID NO: 32712 - DNA, 476 bp, Glycine max
gattcctggaaagacagtggttgatgtgataaggcagtacaaggagttggaagtggatgttagcaatatagaagctggtttgattccagttcctggctatagtagcactgctatctcacccttcaccttagattgggtgaacactcctggctatgatgggtttaaaggatgtggaaagagaccttcctcagtgagacccattgagcatgaaaggaagaaaggagtgccttggactgaagaggaacataaattgtttctattgggtctgaagaagtatgggaaaggcgattggagaaatatttctcgcaatttcgtgattactagaactccaacacaggttgctagccatgctcagaagtacttcataaggcaactttcaggaggcaaagacaagaggagggccagcatacatgacataacaacagtgaatctcacagaaaccatcacaacttcttgttcagaagacaccaatagat

SEQ ID NO: 32713 - DNA, 582 bp, Glycine max
cagtcaatcaagtcggtcacatgcttgattcacaatcactatggagcaaaagaatggtgatgatgtcttgtgtgcaaaactacatttggtcgaccttgctggttctgagcgtgcaaaaagaaccggtgcagatggcatgcgtttaaaagaaggcattcatatcaataagggtttattagctcttgggaatgttataagtgcactgggagatgaaagaaagcgaaaagaaggtggccatgtgccatatcgcgatagcaaattaacaaggctactacaggattctcttggaggaaacagcacaaccgtcatgatagcatgtgttagtactgctgacaccaatgctgaagacacattgcacactctgaagtatgctaaccgtgctcgcaacattcagaacaaggcagttatcaatcgtgatccagtgggagctcagatgcagagaatgcgaagtcagattgagcaattgcagtctgagcttctgttatacagaggtgatgctggtggggcatttgaggaacttcagattcttaaacaaaaaatatccttacttgaagcaagcaatgaagagctacagcaggagct

SEQ ID NO: 32714 - DNA, 532 bp, Glycine max
cagagttacacactctctctctctctgtcggtcaatttttcgatccgggtctattttattaagttctgaaccttgtggagcgttgtcacattccttgatgggaattgctgaattggggtgctcctgattctgtctcttcctctctctcactcagctttcttggttttgtgatccagttattggcttcattggccaggaatttcatctggggttgtcacaatctgagtgatccatctactttggtggcaaagattgctcttttaaggtcttattcagatccgagcttcaatttctataccaagagaaggagctgattctgaagtttgacttggagtggattagaagagagaaatcttccaaactgatctgagcaattggaaagtgcacaaggcttttaagtaacgtgtgtatcttgttgagcttaaagtatcttttgatccgttattggcatctgaatagagcttagttagagtctatgatggagtcagaaggagaagctggggcaaagccaatgaaaacattgggtggcaaa

SEQ ID NO: 32715 - DNA, 276 bp, Glycine max
gggagtctgggtcaccatttaaacctgctgcagctttcaaaggtgcatatgaaaatttgggcattgatgctagtggtggaaagtcagtaacgatgcgaaagatatggcaccttgttcagatgctgatgggtgaggaatcagccgtgcaacgtgtttcataaaggatgtcattgattattggtgcaagacgccaccttgaatggggacatgagaaatacatcatggataccatacaaagtcatcctgcacaagctgctcttggtggtggtgttggga

SEQ ID NO: 32716 - DNA, 410 bp, Glycine max
cctttgcgttcgcccacgcgtccgtccaattccaattctcgatttaccaccaaaaacagccacccgaggtttcaatttcgctaagaaacaaagagaggttctatctcttctctgcgacgacgccgtctctctcgcttgaggtaaagacctttttgttcaagcatgggagatagcgaagcgctcggttacggaagcatctgctgctgaggcatatgcttcggctggttatgctgagcaccgggtcgaatcctgctcccgaggcaggtgctactgttgatcaatctgctggagaagctgctcaggccagttcaacttatggttatggttattctaatgttggtgacgtgaattcgtatgctggggatccgaattccatcctacagcaagctcaattcagtgcaactggtgag

SEQ ID NO: 32717 - DNA, 415 bp, Glycine max
tcacttttaaagaaacaagtgaagttgagtcgaaagatctagaagatggaacacacaaagccaaagcaggaactgcagcttttcttatagagcttgagaaaaaaagatccattaaggtgttagggaagagcactttcattggattggctataactttctttgctggagtttgcttctctctattctctccagcattcaatttggcaacaaatgaccaatggcacactttgaagaaaggggttcaccacttgagtgtttacactgccttcttttacttttcagtctcatgctttgttattgccatcattcttaacatcaccttcctctaccaccctgtcttaaacttacccaagtcatcactgaaggcttatttgagtgactggatggaagaggttgggctttcttggctggtcta

SEQ ID NO: 32718 - DNA, 283 bp, Glycine max
cgtttccctcaatttggcactgtctttctgcactcgattgtcccccaccaaattctcatcctcatcatcatcctacttctcctcagcctgttgtatggtctactgggtcgaaccctaagccagtccagaacacaaattgggggtgttgggtccaagtttacagcaatggggctgtttatgagggtgaatttcaaaaagggaagtgttgggggactggggtttatcactatcacatgcatgggcggtatgaggcgagatgggttgatggaaagtatgatgggta

SEQ ID NO: 32719 - DNA, 561 bp, Glycine max
  unsure (1)..(561): unsure at all n locations
acgagcactcgctctacaaaatatatctgctaaatcacccttcatagattctgatgtcattcaacacttgtttctattctttttctcattgtggtttcttcatattgttattttcccgggttctgttggcaattgcagtaatgatggtggtgatactgccacaaaccctaagacatttattgaactttgtatcggaaactctaatgccttctttttcgttgcatcaccttttcccccaatcactcgataattccatggagatatatgtgctgcatcatgcacactctatatttcgtggtatcattataattttactttttcagtatttatctttagatttacatgtcagtttcttccagattttcaggtgaagatgtatctgcacagaaccaagtgaaggcatctgttcaacgaaaaatacggcaaagtattgctgaagagtatccgggtcttgaacctgtgttggatgatatacttcccaagaagtcccctcttatagttgctanatgtcagaaccatctcaatctggttcttgtgaacaacgtgccactgttttttcag

SEQ ID NO: 32720 - DNA, 503 bp, Glycine max
  unsure (1)..(503): unsure at all n locations
ctcgagccgggtgtggatgcaaattacagggacaagcaaggactgtctttattacatttggctgcagtcttcaatcaaactgatatagttttcattcttatggattcgggggcaagcctggagtacanaaatgcacaaggagaaacacctatagattgtgcacccgctacattgcaatacaaaatgcgaaagaagatggaagaaggtggaacagtggaccaaagcatttgaacaatctattacttttatctgtcttctttttatgcagtgcccccaatactgccactgtctaaaggttctccgttaccagaacaaaaatgtccggcttctgtataattgtgacagagatggagttcaattcatctttctgaaatggcagactaagtatgcagacctttattagacgaatctttgtcagccacgcaacttaggcagtattactattcagtttgtaaatgtctttggtctatgacataataagagcatttttaagtatgcgtcta

SEQ ID NO: 32721 - DNA, 603 bp, Glycine max
ggtctttggggaaagttctgaatactccagaagttgtgcgtgtatatattggctcatttaatgttaagcctataaacgaaggctttgttggcccattaggacaggaactttttgagaaggaacagaatgatctgcttggctgacttgggtggatattccaaagaaggcatgcgatcgtcggatcaatgaatttgtgaaacgtgcaagatctgctaaaattcatgcatatataattagtcatcttaagaaggagatgcctgctataatgggcaaagccaaggctcaacaaagacttcttgataatcttgaggaagaatttgcaaaggttcaaagggagtttcatctaccagccggtgattttcccaatgttgaacacttcagagaggttctgagtggctatagcattgacaaatttgagaaactaaagcccaaaatgattcaagccgtcgatgacatgcttgggtatgaaataccagagctattgaagaaattcagaaatccttacgattgaattaaaagaatgttgtcatttttttatgtatgtttcaccaagtttgagatcttaatgtttaagttcattattaatggattgtggatggtttc

SEQ ID NO: 32722 - DNA, 591 bp, Glycine max
ctatattcttatatatcatcaccaaacaaccaaaccatataccaacaaattaaattgcctttctcccacatcaaattaacatcattccctatgacagatcctcagtccaatttgttccatgaatggttcaacttcatgctcctccaccctcactactcctcttctcaatccaattacccttttgctaataattactcaaacaacaacaggtttggaattcaattacaacaaggagcaccctcatcttcatcttcatcttcatctttctatgcagctcctccttcttcccctcctcttagagtggcccttcctctgatcaacaagataagcctcaaaagtagtgagcagcaccaacaaaatgaaacctcctcaaatgttttagaggagaaagaagaggatgagaagaaagtggacaacaacaacaaacatcatgagagtggtgaagatgctgatgaagaaactgtgactgttgccctacacatagggcttcctagaatggatacttcctcttcttctgatctggggccaccaaaggtggtctcgacaacttgtatggaaattggtgaaaaggggaagtgaacatgatttctg

SEQ ID NO: 32723 - DNA, 271 bp, Glycine max
aggatttaaaatcactgggaggatcagatgattcatccaaacagacagtgatcatgtcttcatgtcaagatagtatgattaaatctccaggacaagatcttgacacggttaaaaatcctgatgctcatgattcttctgtaaaggttgtttaatcttctgataattacctcatcgaaaattgatgaagtttgcagataactcggggaatgaaactttacttggcacaacagtgcctgttactggggtgatacaggatcaacattcaggtggt

SEQ ID NO: 32724 - DNA, 360 bp, Glycine max
atcactgccggcgccaagagagctgctgctgattctcttgttgccaataaccgtcccaggatcaaatggtgaggattatggcattattatcggaggagaaagacattcaaaattgttggatggatcttccaagttcgtgctcacttatgaagacaaggaaggagattggatgcttgttggggatgttccctgggggatgttccttagctcggtgaggaggctaagaatcatgaggacatctgaggctaatggacttgcaccaagattggaagaaaacatcaaacagagatgcaagcccatatagatactgttttcatggctaaggacacgaagaacctgtcaaatagatgaagagaaaaa

SEQ ID NO: 32725 - DNA, 286 bp, Glycine max
aagctattatataaggttgtacacagttttcgaattcattcattcatattccatacacattatacttcgccccaaaaataatagtgaaaggaaaccgaatagaaaacgcagcaacgcaaggtagagagggaaggaaagctcatacggcgagagagatatcacccaactcaagctcaagcagcaatatcctcaagctgctttctcacactcatgtcaatcaatttggagccggaatacctgacagtgaaacccgcgaccaaactagggtcaagtagcgtcttaatcc

SEQ ID NO: 32726 - DNA, 428 bp, Glycine max
acgaggcacattgaggtcttcaatcaccaaaaatggtaaccactgtggcttcttacaacgtcactccatatcaaccaactcccaatgatcctttatggctatcagatagcgaccaacttggggccctaggccatgtagccaccatctacatttacaaagcaaaacccaacagcgacaccattgagaggttgagaaactctcttagaaagcttttagtgtactactacccagtagctggcaggttgagcttgacaaaaagtggtcgaatggaagtgaattgcaacgcaaagggagtgacgttgattgaagctgaaacaacaaaaacatttggtgattatggagacttttcagcatccaagtcgaccgatgaacttattccaaaagttgatgatactcaacctacagaagagattcccttactgctactg

SEQ ID NO: 32727 - DNA, 490 bp, Glycine max
  unsure (1)..(490): unsure at all n locations
caaaggttggcatgccgatgaagtcattggatatatttagggaaatgcagtcaaaactaggtagaacagatgttgccgcatataatcaaataatagagatactatgcaaagcacaagaatcagaattggcagaatcaatcatggaagattttgtcaggagtggtctgaagcctgttacgccatcatatgtttatttactaagcatgtacttcactttggaattacatgataaattggaagaggcattctaccagtgcttggagaaatgtcgtccaaattgtactttatacagtatatatctgaattctttggtgaaaataggtaatattgacaaggccgaggatatatttaaccaaatgaatcgtgatgcgactatcggtgttaatgctcgatcatgtaacatcatcttaagtggatacctctcttcgggaaaccacttaaaggcagagaaggtctatgactttatgtgtctaanaaagtatgaaattaa

SEQ ID NO: 32728 - DNA, 447 bp, Glycine max
gttgtcagcgaaaccaaccaaccaaccaacaaagaaagaaggattaagcatatattcatcagaaagattaagcataatcatcagaaaaatggcatgcaatggattctgcctcagactcattgctttagttcttgtgattagcatatcaagtgttaattgcatagaaactgatgcagttgaacccattattgatattgcttcgctgaatcgagatagtttcccaccagacttcatctttggggctgggtcgtcatcataccagtttgaaggtgcagcaaatgagggtggtaggggactaagtatatgggataccttcacccataaatatccagaaaagatacaggacaaaagcaatggagatgttgccattgatgcttatcatcgttacaaggaagatgttaagattgtgaaggatatgaactcggattcatatagattctcgatttc

SEQ ID NO: 32729 - DNA, 506 bp, Glycine max
aattattgctattatagccgtgcttgcgtttatgtttgtggttgtctatgttcctgaaaccaagggattgacatttgatgaagtggagctgttatggaaggagagagcttggggcaagaaccctgatgctcaaagccttcttgttcggactgaaaatcattcctaggaatgcaaagcattttagtgcggctcatgtctatatcatgttctgctatgattgatattatgctataaagtgatataaactaatttttttttttagtcactattattagtttggctgccacaagtttgcactcaaacttggcgtacacctcttttatttcagaccattgtgaatgtggagtgtgacaagattgcaacgcggacattatgctaaaaatgtaatcttgtaaagtattcattttttctttttctattccaacatgaagaaaagagggttattttcatgttttcttcagtatctaatcaattgtgccaaaatcgacatgaagtgatttaccttt

SEQ ID NO: 32730 - DNA, 441 bp, Glycine max
ctggtcttcagttcctgctgacacatcaacagaggtgcttgagaaagaaaagctgattctacaaacaacttctagaaccaagcactttggtatccagaggaaacccctgcctcttgaacctactgttcttctacgagaggccaacaggcggagggcttcactttcagctggaaatgtgtctgaaatatttgacagtcgccagggtccaatggatggatcaggttttgatgcatccactagaatgtcaccacaaaaagcacttgcaagttccatgtcacgtacaaattcttcaccaggaaactttgatagctcaattgaccgaccaatgaggcttgctgagatttttgttgctgctgagcatgctttgaagcaaacaatttctaatccagaactggggaaatcattatcatcatccgaggagtttgagcaaaaatatttaga

SEQ ID NO: 32731 - DNA, 464 bp, Glycine max
ctttatatccataataaccagaaagtggcatcaagttataggtatgtttgacatattgttcggttggtccaaagcttccaaatgtaagaaggcgatcaaacgagcccggtgccggctcaggctactcaagaacaagaggcaggcaatagcaaggcaactgagaaaggacttggctgagctaatacaaagtggccatgaagaaactgcatttaaccgggtggaacagcttatgggagatgaaagcttaacagctgcgtatgaattgttagatcacttctgcgaatttatccttacgcaactctcctacatccagaggcacaaggactgtccaaatgatattaatgaagcagtctctagtcttatatttgcttctgcaagatgtggggatcttcctgagctcggtgtcatcagaaagctctttggacagcgttatggtgagaggtttgcaactgcagctgtagagc

SEQ ID NO: 32732 - DNA, 348 bp, Glycine max
agtggagattggatgtgctcaaattgcaacaatcataattatgcttcaagactacagtgtaacaggtgcaaaactcaaaggatggcccccatgcaacctgttaacgttgtgtagtgatgaattcattagttatattgactgtcacgtgcccctagtttggctgagttttgtttttgattctctagcgtgtattttgccagcaaaacacagttgatattctcgtcacgctcattatatatgcgtaacaacgtaagacataagtggtttatgcttagtggcatcgtatttttcagtttctgaaaggtgtattgcttactataaatagaggattgtgggtgagttgtgagt

SEQ ID NO: 32733 - DNA, 506 bp, Glycine max
  unsure (1)..(506): unsure at all n locations
catgaggcaaaaaataaggatggaaaaattaagttgcaggagaagtttgggttcaagcctgacctaaatgggattacatatgctggcaagaatgattatacaggaaaaaaggagagcaggaaaaaggagaatcactcatatcggggtcatgactttcaagatgttagtacagataccccatgcaaacaggaggtatttcatgctcctattcagaatcagttgccggactgtgatactgaaagatccacaaagagatctcttttggaaagaactgatcaagaagtacatggaaaagggaagccattgccatcattgccatctgaaggatctcaagttgagacattaggtcgttgcccacgaccagttggcttacttaaaggaaatggagatatggaagtcgatccttccagagtggatgatgtgtcgtagttgcgggagaagcaattgaaaaagaccggccatcanaatggaaatcagcaaattggttcacgaaatcccatacttaa

SEQ ID NO: 32734 - DNA, 466 bp, Glycine max
gaaaggttgaattttccattggcggagagtcctttcattgtacagggcagcatgttgtcaccaaaggatttactgctattatgccttggttggccataaatgataaaaatatcccatcatttataaaagggcagaaaatagaagtatcaaaattggagctctatgaggggagcaccagtcctccagatttccttactgaaagtgagctgatatccctgatggagaagaatggaataggaacagatgcatcgattcctgttcatattaacaacatatgtgagcggaattatgtgcaggtacaagcaggcagaaagcttgtcccaaccacattaggcataacattagtaagaggttatcaaacaatagatccagatctctgcctgcctgatattcgtagcttcattgagcaacaaattactcttattgccaagggtcaagtggatcatcgtcatgtggtgcagcatgt

SEQ ID NO: 32735 - DNA, 429 bp, Glycine max
aaattaatggaggaggaagacaaccactcccacctccaaccactcataccctattattccactctctccttctcctcccattcactccagcaacactttgccgacaaaaatgcaaaacacttcacctccgacagcaacaacatcgttctccgaatcctctcaattctcttactagctctcatctcactatgggccaactacgaggcatccaaaaccttccacatcaccgtggtaaacgacgccaaggactcccccgcgggacgccgtttcgccctctcctatgtctcaaacgacgaagcctctcgcatactcctcaacacaagctcctacgtagaacactttctttatccaaatagtaataacaatgataacaattaccccaagaagcacatagatagtgtcacactccagctacctcgccggaatctc

SEQ ID NO: 32736 - DNA, 454 bp, Glycine max
ttcaaattttcacaatatgtaaaaaaaaaaaaaaaacacaacacaacaccatctctctccaaaagacaaaatgacactagctgtcgaattccctgcacaagttacttcattacttcactaatcactatcccctccacccccactcttcaccttcaaaccctagaaaacttctaaatcttcccaaccccacccaccctcttgaaaaaagatcccatcttcgtgctcggtttcctaatgggtgcaaccaatgcgaatgggtcgtgaccctcttcttctttttattcttcttcttcttcttcttctacaatgggaaagtccgaggaagaacagcagcaacctctgcccctgtacgaggatccgccgcggaatgcggcgtgtcggtgccgctgttttcggattcggaaacttgtcggcgtcagatgcgtactcgtactggttgtgtcggtggcagtgt

SEQ ID NO: 32737 - DNA, 374 bp, Glycine max
accagaattgtgatttggccttgtgggatctgagtcaccatcatcgttatggaagtggagaagaggaagaacaagagggtcatgggagaggaagaagagagtgaaagagtgaagaataagagattaaagggtgtagaagaagaagatggtagtgatggtgttcccacggaggaggaggtggaagagttttttgccatactaagaaggatgaggatggccgtcaagtactttgacgacaaagggaggggcggcagggagtggagggaggccctcgagacggcggagctcacggtggaccaccgccacgacgtcgccgccggcgaagaggatgacaagccaaagaaaaagggtggagaggtaattatcaatgaggg

SEQ ID NO: 32738 - DNA, 533 bp, Glycine max
gtggattctgcggagcctgtgattatcattccccgcacgcgcccgcgttttcaggcgcatgccgaatcggacgctgcttcggcctctgattccgatgagaatgcgtgcaacggcgctgctgaggaggttgcgatacgcataattggggtcggcgagcaggagagcggttcgtcgccctcatcgtcgaggggccggggcggggagctgggcggtgaggaggcggtggttgggaggagcgggatgctgtcgtctcgccggcgaatggcggaggagagggtgccgttggtgtctttggatgatgggattgttggcgctagggattcttcttcttcatcatcgtcctctacttaccagaggtatgatattcagcaggttgcgaagtggattgagcagattctaccggtttctctcttgttgccgagtgttttcagtcgccagcagtttgcaaggctttctttgtcacaatttgtatatcagctgtgatgttcaagtcaaatgaaattgttaagaagcagactgccctgaagggagat

SEQ ID NO: 32739 - DNA, 421 bp, Glycine max
gaaacaatgggactgttgcactgactgtaggggttactgtatgctagctagagaggaagaacgaacaaaacttggcgacaagcctgtcaagtatcatggaaaatggccattccgtcgtgtttatggaattcaggaacctgtggctgttgctctgtctgccgtctatcttgctatgcagtttcatggttgggtatcttttttcattcttgtgtactataagttgactttgaggccagataagaagacttactatcagtacactggattgtggcatatttatgggattttatccatgaacgcatggctgtggagtgctgttttccatagtagagccgtggaattaacagagaagctggatttttcttctgctgtggcattacttggattcagcctcattctagcaatattgcgagcttttaac

SEQ ID NO: 32740 - DNA, 626 bp, Glycine max
ggtaacactcacttgtggactagtgggaggtgacacccttctatcttctacacccgctagcggagtagtttgtatcgctcagatcatgcagaatgaaagggcgtacatatcactcaagttcctaaaggaattgttggggaaaattcctcttgtacacgttgatgatgtctgtgaagctcatattttctgcatggaaagcacctcgatcagtggaagattcttgtgtgcaagttcatatatttcattagaagagatggctaatcattacgctcttcattatccagaattcaatgtgaaacaagaatatgaagatgggctgaagaaggatatcaagtgggcctcaacaaagctgtgtgacaaaggctttgtatacaaatatgacgccaagatgctattggatgattgtatcaaatgtgcaagaaggatgggtgatatctagtctccatctacacccttgattgctatatctgcttgtaatacaatatgcaccaggcgtctgcctcatttcttcttgctccctatcttactgttgttactattgttttcgcaattatgattaaaaaataaactcggcttcaaatcaattagaaaagtgaattgactgcgactatgagagtttccaatag

SEQ ID NO: 32741 - DNA, 453 bp, Glycine max
ccccccttgtaattatgagttttttctaccttgtattataagtgttatttcaacagtaaaatctaccttgttatattggtaagttagtaatgattcataccttgtggtatgaatcatttatataattttgtttcatcagtccaaggcatttttttatttgcctctgtgagacgcaagttttagcttacattataattattatagattccatggctgccgtctcaaagtgtttgagatgctaattggttgtatttgatggacagacattcagacaattactgagaactccaattgcattttgtctatggacactggcctcgtgaacaggacaatatgtgaatctaccctcattatgtaatataatacaggagactccaatgtatattgctagatttacctcaaaagaatccaatgtagtgtccaagatactataaaataaaaatgtttttgtct

SEQ ID NO: 32742 - DNA, 277 bp, Glycine max
agcgtcacaatcactgtgcacagaacgtgaagtgcccggttttgattgttaagaagccaaaaccaaccaccggagaaacataataatgataataataataaattaatcgttactagctttgtttttatgtaaaaaatagacaaccagtttgcttctgtcgcttatgtgttatttgggctctgtgtgttttgtttgtttctcctctaaaggaatatctcgccaaatattaaatgttaaaggctaagtgaagatgaggatgcacgccttttggttttga

SEQ ID NO: 32743 - DNA, 412 bp, Glycine max
gcacgccctatggtcaccgccgttggtgtctcgtggtagagccttgttgatgtccctctctagtcattgtcgttctcgccgttgccgatcacgttctctagttgctagagccaccaaaaaagggtgcagtaagcaacttggaggttcaggaagtaacaaccttgtagatactgctatattgcgttccgtatctgtgtgtctgagcgtgaaaggagcatgcagtgccacactcttcctctggagttgattcgagaaattcttcggagattgcgggtgaaatctctcttgcaattgaattgtgtgtaagactccttcgcaggtcaaatcctttttttgtcgaatccattgatgtagagaattccagtgcagtgaatttacctctccctcttccatcatccccacgcaattgggg

SEQ ID NO: 32744 - DNA, 292 bp, Glycine max
agtaggggggaagaggacatgtcaaaccccagctccagcggcggcggcggtggtggcggttttagtggcggtggtggtggtagcgggagtggaacgaagaagaggtttagaacaaaattcacgcaggagcagaaggataagatgctggcatttgcggagaagctagggtggagaattcagaagcatgacgaagctgctgtggaacaattctgcgctgaaacttgcgtcaagagacatgtgctcaaggtttggatgcacaataacaaacacatcttgctattctgagcaacgt

SEQ ID NO: 32745 - DNA, 547 bp, Glycine max
  unsure (1)..(547): unsure at all n locations
gcgaactgttaactgcctatggctatggagcgccagaatttgagtctggaatttacacataccaaagtgatgtgtacagctttggagtgatcatgttagaacttttgactggccgtcaatcgcacgatagggcacgagcacgaggggagcaatttctggtcagatgggcagttccccaacttcatgatatcgatgcattatcaaggatggttgatccttcattaaatggaaattacccagcaaaatcattgtcaaattttgcagacattatctctagatgccttcagtctgagccagaatttaggccagcaatgtccgaggtcgtcctatacttactaaatatgatgaggaaggagtctcagcaaagtgaatcaaatgaaaaatgagaaaggtagtgatatttgtatgtgaatttatcataatgtgcagagatgagagatccacttgctgaatatcaacttgtagagatatcatgttatctgaggggagcccaattagttgtctccatgcttcattatttnctactaacctattcaacattcacatg

SEQ ID NO: 32746 - DNA, 267 bp, Glycine max
cctcgagccgaatcggctcgagtttctctcccccaaaaacaagagctaacgttcgtttgattctttcaaggaggtttgaagactgccaaaggtgtagttttcttttaagttgcttcgacatggttttcatgtctgagatattgttccccgaagaaaaaattgaggcaggagagtgggagaaggagagataagacgaagagatgaatacctacccagcaagcagaattagagaattttttttcacaaactgttgatttgattcatttt

SEQ ID NO: 32747 - DNA, 505 bp, Glycine max
agacccttctcttccaacaaaatcagtgaggatctgagaagaagaagcattggccagacgcatgactgcaaggcgcagccaccccataaggcgtcctcttcggccgcaaatggccctggccttggccattgctttgatttctatcactttggtttccgctaatgctgatggttacccttactattcccctcctccaccttaccagcacacctcaccacctcctcctccttacctctacaagtctcctcccccaccctctccttcacctcctcctccataccatccccatctccaccacctccttattattataaatcccctccaccaccatccccttctcctcctcccccctactactatcactctccaccaccaccatctccttctcctcctcctccctactactaccactctccaccaccaccatccccatcaccgtcgtctccatattattacaaatcccctccacctccatctccatctgcaccacctccttactactatc

SEQ ID NO: 32748 - DNA, 479 bp, Glycine max
gctctctgcatccaaacccgtcaacctttgctcattatgccataaataaatcaattataacagattagtttgtaggtttacgaggtggagatttttagtgatcaactatttggtctgctcagctaaagaatcattcaaggatccagctgagcaagtacgaggaagatgggatctttcataggtcatatattgccagggaccttgtttcttctagttgggacatggcatatatggggctctgtgatgagatatgtgtcaaaccctaagacattcagagtccaggtgtggaatcctgtaccggggtttaatgggaggctcaagcacttggagctctatgtcatttcaattggtgctttcatagatttgtgtgtggagctcttacttgcaacccgcctcaggttttttgttgggggagccttgaacaccacttacttcaacaactttgagcactcgggaatgcttctgatgtttcttatctt

SEQ ID NO: 32749 - DNA, 389 bp, Glycine max
cagttcccatttggagcaaagttaagcctttaatttgttgtacaagttctttgaataagagtttgaatatatcgtctctaagctacaatcttcacgactcaaatgaggttgcttcgatttatttggtagccatctttcacatcttgttggtactaagttcaagggagcaacaaaccaaaatgaggaagcaagatttgaaatgttgatgccaatgcaggcttttagagatttcttatttgtttctttgtagattaatatggttgatagtgtatgattgcattcaaattattgtgaaaattcttttaattatatcttcttgtttgtttgcaataaaattttcaatatttgacataaaaaagcataataatatgcatatacatattatgcat

SEQ ID NO: 32750 - DNA, 496 bp, Glycine max
ctgggattcagggatttaccacagcttgtggccttacctcaatggcttcaagaaactgccaactccttgcagtccttgcgtatttcaggctgcgacaatcttgaaatgcttccggagtggctgtcaactatgactaatctgaaagcacttcttatatcagattgtccagagcttatatctctcccggataacatccatcacctcgccgcacttgaatggttgagaattgcctattgtcctgaactatgtagaaaataccagccccatgtcggtgagttttggtccaaaatatcacatatcaaagaagtcttcattgaagaaccagaaaagctggaggaagaagaagacgaataggaatgatttgttgacacatataagtgttgaagctcctttggcaacccctggacgtggatcaggaatggtcaaaggtgaaaaaaggggagaccatgatgtttgattattgtgttggacgtgattgacgtattgaaaattgatt

SEQ ID NO: 32751 - DNA, 433 bp, Glycine max
acgaggagagagagagagagagagagagagagagagagagagagagagagagagagagagagagagagagagagagagagagagagagagagtttactatttgtccacggcaatattgttttggtgctgtgccaacattgtgcacgctattgaattaccaaactacacagtgatactgcctgaagaatcagattttcagctcagactctacaatgaatcatcgtggatctcagcccgagtttcaggaacttccttcgagcagtcctacaagcttggattttccaggttgtatcaatatattcacggtgccaattctaactcttcaaaaatcgcattcactgctccagtcctaacgagtgtcccctcgtcacccccccgggatggctacatcgtaagaaatgtcgtatcgactcactttcaagggaagcccccg

SEQ ID NO: 32752 - DNA, 427 bp, Glycine max
cttggtaaagaaagaaatatccaagcgctttgctaattgtgaacttcgctccatggtcattgtggataaaggtatgataggattggaacaatcaaccactaactatccaggcaagataccttcagggctggacctccctagtgatgttgcacatgagaagtctgagaaataatggatttggcttcttctacttgtttgtatgtgttcaggaccattcaagcattggttcttctatttgaagttcactattacaaaatctaacatgattatgtcagattatacaaactgtgctgattctgtcttgaaatttatcaattattgtctgcagaaaatatttgttaacaattataaccttgttggaaatcagatgacccatgtgtggcaacacagtcacaaaacaaacaaaaaaaaaaggggcggccgccga

SEQ ID NO: 32753 - DNA, 463 bp, Glycine max
gttctctttggtgtatcaaggagctttggagttggccctcagttgatatgggatagggctcttggaatgccacttgaaaggcccaaaagtgtcacactagagaagctcgagcaattggttgccaaatcatcgtgaaatttgaagcgccatttctctgttaataattgctaaaatacacactgcggtagatgtgtgtggtggtgttgagttgaaaatgtggtaccattgtaatgagaaatattgattaccctcccctatggtttctattttagaagattttggtatttaggtaaagggtggcttttcaccctcaatggtctttcccactttttttgaattgcataaattaggtttgagggagcataagaataaaggcattattgtatttgggtataagtttacccccttgtattctttatgaaatcggaattaccccttttgactaaaaaacaataaaagaaaa

SEQ ID NO: 32754 - DNA, 391 bp, Glycine max
tgttttatgatagttgatgactacacagattggcaaagatggattagcaaccgtggaggcattggtgtatctcctgaaaaaagttgggaatcctggtgggaaaaggaacatgagcatctccggcactccggaaagcgtggtatcgctactgagataatattatccctccgctttttcatttatcaatatggccttgtttatcacctttcaatcactgataagactcaaagtgttttggtttatggcctttcttggatgataatctttgtaatattgggtttaatgaagggtgtatctgttggcaggcgccgcctcagtgcagactaccaacttctatttcgattgatcgtgggttctattttcttaacattccttgccatcttcataatcc

SEQ ID NO: 32755 - DNA, 589 bp, Glycine max
  unsure (1)..(589): unsure at all n locations
ctcgagccgtttcggtaacagtctctctcatcgcaatctttcgaagaccctactctctctcgctctctcttctgaagctgctcggaagaaggatcgagcagtttcgcattcgattccagcatgaatttcagtgagctcaattcggcgctgtgatccgcacaaccatgtggttttccttctggagatccagagatcgtttcaccttggatcatctcaggtacttaactgatcaattggcgaaagttcaaatagttaatgaggttaataaggattttgttattgaggcactgagatctattgcggagttgataacatatggcgaccaacatgacccaagcttttttgaattcttcatggaaaaacaagttgtggcagagtttgtacgtgttcttaaacttagcagaactgttagtattccacttcagttgctacagacagtgagcattatgatccagaacctaagaagtgaacacgctatatattatatgtttagtaatgaacatatgaactacctaattacatattcattcgactntcgcaacgaagagctattgtcatactacatatcctttgtaagagcaataagtgg

SEQ ID NO: 32756 - DNA, 486 bp, Glycine max
accagacaaaataccacaccacaccagttaagcgccgccgtctagccggaagcaccgtatctgtggtgatcgcacgttaaaattctcgaaatctaaaacccttcgttctcttcatttcttagagtagaaagaacaaagaggagaaaatgaacaaggataagatcttcaagctagcgaaggggttcaggggtagagccaagaattgcataaggatagcaagggagagggttgagaaggccttgcaatattcctacagagaccgccgtaacaaaaagagggacatgcgatccctttggatccaaaggatcaatgctggtacccgcattcatggggtcaactatgggaacttcatgcatgggctgatgaaggagaatatccaacttaacagaaaggttctgtcagagatatctatgcacgaaccctatagcttcaagtctttggtagatatatcacgaaatgcatttcccggaaacaagaatgtggtga

SEQ ID NO: 32757 - DNA, 444 bp, Glycine max
agaagtactagtagggagagtagattgcatggtttttagctgtacgagaagacgtagagagagaccaagaagaacatttgaggagattattaagagggatctcatagtgagtaatatccttgagaatttggtttttaatcaagtccaatgatgtcatgcaatccaagtagctaacctcatctagtgagatgaaatttttgttattggttggaatgttggacacgtaaatgttgaatgcagtgcttaatgtatcttcctattttccacatgtagtgatttagtgcagcttatatagccacccctttggggtaattcttatttgctgacctttgggggcctcagtaggtatgatagatagattagataaatttgaatactatgaggtaatcatggcccacatatgagtcatgacaattttttttatgatttatgtttcttttgggg

SEQ ID NO: 32758 - DNA, 424 bp, Glycine max
attttaattggcatcttagagttcccttttaagattccaagttgaacaatttttattttttccttcaggaatacaacattcctttctcatgctatcttctacaaatggtcttgtcttcactttcataaacaatattcctcttttaagtgcctcttaccttttctgtgttaacattgtgagaacaattatggctgtttccattctcatactatttacttgatattattaattatgatcacatcaccaacccacgtagccaacctcaaggacccttctttttccatgttgtgctcttgtgatacttatcatatttgattactcagtgttctaatggaattttgcaactagtacaattcaaccctttaattagtctcatgtgttgccttcatatgtatgctctagtgcttttctacatttctcacat

SEQ ID NO: 32759 - DNA, 481 bp, Glycine max
tgcaattatgaagtcttttgatacctctccggggtcttccgtttcctctccacagcacgatgactatttactacacaaaagcatttctgttgatgcctatacttacaccaacacagataaggaaattgccgccaagggcacaggaaaaagcagcagttttacacataggattcatgaccatgtaaaaatgggtcctaatctgtctgagattctgaagggtaagttgagtttgggggcaaggattatacaagaaggaggaagagggagcatcttcaagagtgtttttgggatgcaagaaaaagagcaattgttaaaggcctctcagtgttatttatataccacagctggtcctattgctggaattctctttgtctcaactgaaaaggttgcattttatagtgaaaggcccataaccttctcttctgcgacaggagagttagtcagggcaccttacaaggttttgataccaatagggagaata

SEQ ID NO: 32760 - DNA, 393 bp, Glycine max
gcttatatcttccattgtttcaattgtataatttcatctaaacaatattcagaaaaaatgaaagaaaatatcctcataaatcatgtttgctatctcccctactaaataattagactccatctatacctcaaaccccacgtaggatttatgtacaaacagacgaaagagggggcaaaaaataagtgaaatttaaagaggaccttggacaactttcaataaccaagtttagtcccactctgcctatctacccatgcatcgttaagctaagctatgtactcattcaccttttggctttactttgtattgtttggacctgaagtgacgattgtgatccaccactgagtgcagcagcagcagattcaacatgtgtaagaagatattcatatatcttct

SEQ ID NO: 32761 - DNA, 390 bp, Glycine max
cggattcgctggctcgttacaagtcttatagtaaatgcagaccggtaccatccatgaagaaaaaaaattggctgccgtgccgacgctgtttatggactgctgttgcggctcgacctgccgaagtcatctttcatcccatgcactgaacgcctaatgctcgtcgtaatccgtcgcttaaaagaccatctggtgtggcctgtctgagctgcggaggctgaagctggcaccgaggtagtcggcaaggggggcctccttcttgatgggggctagaagtgccttgtcgacagacttttggtcctcaatacgggcctttgcggtctccttcttctcgggcttctcgccctgcttgaagaacgagtccttaccgggcttgcgggcggccttgtcctt

SEQ ID NO: 32762 - DNA, 549 bp, Glycine max
agttggttggatttatggatcggtgatgtttattttaaactgcgttatctatccgaatcttcccaaaggaattgaagataaccatatattgctgagatccattgatgttcttattggatttatgttttttttttttaataaaccacgttatttcaatgtgatgtgaatctatatgattgagcctgataaacatcctttgcccctactatgactgcattttttttatttgatatggtttggtttcttccactggtagagcttcagttcgaggttctaaattatggttgttgcgattttgttgtacaaacattgacattgtggcctaaatcaaggtcgcacaccattttttaaaaaaacttgttttaagctttgaatgggtattgaatattgtttgtatcagctatggattttaccagctgcagagttctgttgtgtattttgtatatttattctatttagatttgtgttcctatgtgtttagttttttttgagcctattagtgcttaaagcatgtatcgtgggaaatatatgggatctgtgatggtgttc

SEQ ID NO: 32763 - DNA, 835 bp, Glycine max
ggaaaaatccttatcagatggggatgcaaatgtaatattatcgagggaggagaatgacagtcattcaagtgttgagagctgtaacagtgctggctttttttcaacaggtaagaagagacgtaactttcaacaacagttgataattgggagttaaagagtcaaaaagcatattgaagaatcttctggtttcaaatcctatgttaaacaggatagctcattcatgaactggatttcaaacatggtgaaaggactccaacaatcaattcaaaatgattcaaacactttggctcttacccttacaaatccagatcatcataatctactgcctgacgagaaacttttcacatgcaatatgaatcaagatcccgagccaaaaaatacaggattcaagtccttttttcagtccatatgttgtccaagcttgaagaatggaggaacgagaatgtctcatcaagaagggaagagtagtcaggatttagtgccaggtaacatggaacatggaatagatgctactccaataacctgttgggcagaaaacaatagcctttccaaactgtgtttgcaatcaaataagtttgaagtatctactgggggaaatgatgccggtctgtcctcgcagcctaagattaaacctctaaatttttttaactgtcatgaaagcagcaaaaacaacccagtggagactaaaaattattccatcttgggccatagtaaggacaaggaagaagtggcatcacattcatcttcaaccaaacaaaatacagataataatgataacatcgattctaatgtgctatgtgatagaaaggaagaagagaatatctgtcacagaaga

SEQ ID NO: 32764 - DNA, 499 bp, Glycine max
aaaatcagaatatttcttcggagtggatataataattgttgaagcgtacaaaatttaacaaatccaaaaaagataagatgatttgggtgagctttcactgtgacttacgtctatagtgaagagagctacactgaaagcttaggccatagaaatagagctacagaatacacttatacacctaggcattagtaacttatataagtgaatattatggcactattctgagaccttaatgctttcacttgtgagccacatcttcttttgaattataagcactacttcatcatcatcatcatctttaccttgatctacatcatatatggtcacagcattccagtgtaatgctgacaggtatttctttatgtactccaccatggaacgcttatcatggatgatgatgaaaccctttggccttaggattctgtcaatctcaattaataaatcctctggactgcattctttcttaataatatcagaaaacacagtccatgcatggagt

SEQ ID NO: 32765 - DNA, 441 bp, Glycine max
caacaacaaaaaaaaaaaaaccatcccttctctcctaaacgaccaaccaaaggcaaaacgcacaacaacgatgaagaagcagaagcgctcggaccctcaaaacgacaccactaaccccttcgaggttctcacggaggagctaatgttcgtgatcctggacttcctcgaaacggcggcgccgttggataaaaaatccttctcgctgacgtgtaagtggttttactcccttgaggcaaaacaccgtcgtttgcttcggccgttacgggcagagcacctgcccgcgctcgcagcccgctacccgagcgtaacggaactagatctctcgctgtgcccgcgcgtgggcgacgacgcgctcgcgctcgtcgccggcgcgtacgcggagacgctgcggcggctggacctgtcacagtcgcggcgggttacagggagcgggcttatgag

SEQ ID NO: 32766 - DNA, 404 bp, Glycine max
cttcgtcctttttttttaacaatttgtcaatttatgaaaatttgatctattttcaccttttaagagattgagttgagacaaagagatgattctcattaaggtcctagagtcctatcttatccaaaaattaggacatgttaacatgcacactagcagtcttataggatttacaaatgggacaaatgtggagtgaagacccacacacagtacacaagcacaaatgacggcacggcaaaatcagcacacaagactcttccttcctacagttcctgcacaacctcccattaccaccaccctccttatccttcacccctgcgcaccccgctaacgtgcgccaaccccccgtttccttttctaaaccgtcctcctcggtgctcccgcagcaggactcggcgtcgtccatc

SEQ ID NO: 32767 - DNA, 535 bp, Glycine max
ggccgcccttttttttttttttttaatccaaaaacttaaatttgaatatttctagttctactttctggataggaaaactcagtatacaaacattggttttaatgcatcacttatttctggaatttcagaaactagtccgtcgacaaagataaatacttgctgtcaaaattctgttacaagtgtaaataaaaaggtttgagtagtaatgttttccatcatcttcatcatcctttttctatatttgccagcaacattttaattgcacattgaaaaattaagcaaatggagaataataaattaataatactaccacttttcagctaccttcattttctttattaattggatctgagctcacagttggaagattccttctgtactgctgagacgtcaatctcctttccaatggtgttttcctcttgcttacaacaaatctgttcacccctttgcgcataggcattattgaaggaaaatcttcgtctggaatctgactgagctcagaaatatccttaatctgtgcgacgcgacggaacca

SEQ ID NO: 32768 - DNA, 412 bp, Glycine max
  unsure (1)..(412): unsure at all n locations
nnnnnnnnnnnnnnnnnnnnnnnnnnnnnnnnnnncatttgttcctctttataatactctatttgtattatttggtacattaataacttttaagcaaataacaacataccctaagatacctgtcaaaccttttgttttcctgaatcgcgccctcaaaccttatgttaacacttcctataagaaagacaaaagtaatggttaaaaaagtaagatttgcttgcataattacactatatataggagaaggaatttgctcatttttttctataatactcttaattaattactattttttttctataacatttaaatcttatttttataaaaatatatatatatataaatttgaagttaattaattattgtttttatagggtattttattgatgttgtttgctgaatggggtgatag

SEQ ID NO: 32769 - DNA, 517 bp, Glycine max
atgtgaggataaatgaatatatctcttatttaagaaaattataaatatttatcttaaaattttatatttatacctcttacttttgtgtgttaattttttcttttctcactcttttatcttattagattaatttttgaaaataaattatctccaccagcctggtgggtgacatgccaatttcttaatgaaagcatgcaatgcaattcatgggtaagtaggatggcaattttcttaatgaaaacatgcaatgagtgtatcatgatacgtatatgaattctggaattctcgagcctcagtttggacggttctacttgcaagttgcaaattgcaatgtggcatccttagtgtatatcggccttttccacttatctctagttcttgggcctaatgcgtcacatttgcccacttgagaaggttcttttattttcaatttttagcggccctccttaaaacagctaagaaattgatgtcataaataaaatcactctttaaatgtttttgattcatataaatgtga

SEQ ID NO: 32770 - DNA, 486 bp, Glycine max
gtgcagcaaaaactaatttctcttataattatttatacagaaacttttcctatgagaacttgtaatagagttgaaacaaacagttacaacttaaaaggactagaatttcactccggaactcctgagattgcagatgatgatgactttgagtagcgttcaagcaatgatagtaccttggcagcttttctcctaaggtgtccatccccatatatattcatgccagtgagaccaattaaacgtgatctagctgttgttccatagtattctaccatttcctttgacacaaacaccttctccaacagtcctagagcttctgcctttagagaatcagttccccagttcaaaatgtccattatggaccttattgcattatattcatgcaagacacgagctcccctttgaggaaaatcttccaaaaccaatgtggagagtgtttgtattgcttcacaagcagttgcatgaacctccccatgtaacagctttatc

SEQ ID NO: 32771 - DNA, 502 bp, Glycine max
gccggcggcgtcgccatgccgccgacgctggcgaccgaggcgctcgacacggacgccggcagcgtggccgcgtggctgagcggcgaggcgagcggcgaagtgcgtggcgagacgcgcggcgaagaggaggcggcggcggcggcggcggcgtcgagcgaggcgcgcgcagagagctccaaggcctcgagcggcggcagcctaggactggcgagcgccgcggcggcactgctgcgcgctggggcagtgaggggcgcagacagcggcgaggcggagccggcgggctcgacgatcagtggagcgtcgtgcagcgtgctgttgttgcacacctgcggactctgctcggcagactcgaagccggacacgccatggctcgtcgagctcgacaccgtcgattcgcgtctctgctcgccgagcgcgcgcggcggcgcgtccgcaacagctggagacgcagcggcgctgctgctgggcgcgtcttgcggcggcgcaagcgccttctcgctga

SEQ ID NO: 32772 - DNA, 495 bp, Glycine max
tcgcgatctagactaaaaaagggtatcctgagcaatttcaataatagggttcattgatattcctagtatagtagatgctatcacacatacaatcatacttaattcgatggaattgtctgatcttaagggggcccttcgataatttcgcacgtgaggagttatttcttggtttcgtccagtcattaataacttgattatttttaaataatagtagatagaaacaacactcgtaaggagtcctattgaaactaagaaatataagcctgcctgccatccacaccagaataaataaagttttccgaaaaaacctgatagtggaggaagacctcctaaggataagagacatagggctaaagagagagccaaataaggatctttcgcgtataatcctgcataatctcgaatgttatcagttccggtacgtagaccaaatgatacaatgcaagcaaaagttcctagattcatcgagatatagaacagcatataagttatcat

SEQ ID NO: 32773 - DNA, 478 bp, Glycine max
ggccgccctttttttttttttttttcaaataaattactttcctcaattaaaattctcaatccaaacacaatcttagtgtcacttacaaaattgacaagtaaaaatataccattactctgaaaatacaggatcaaaactggcaaaattgcaaatgacttgatatgccatatatgcttatatcccaaccaataccctacaggctatactttcaccgttgtaataagtaaacaagatacttccatctacgtaaatgattcaaacttggataattttggaaatatattgtaaagctaataacaatatcagctcttgaatctaatgcttctactgatagccgcattaattccagaggattctccaccataaggagcggtcggcctcttgatactctgaacctgccccttgcgattcttaacagctttttgatgcttgagcttgtaattctttctgggatacttttttgctttgttgcgattgc

SEQ ID NO: 32774 - DNA, 497 bp, Glycine max
gagatggattgtttggtgatgccagtttcattgatccgtcgtcgttccacgggtgcacggatgggttacatggcactccctaaggaggagcccgtaaaggtggtggtgggaaaagagaagagggtgtttctggtggagcctttcatattgcaagagaacccgtttcagattctgatggatatctctatgaagaaggacccagccgggctcttcacgtcgaattcatagtcagagtgagaggagagtgatctttgtggatgtggatgacattttgttcgaacacatgctgtggctcatgcacaacgatgcttcttctttgttccagctcaatttgaaggagattattgacttctacactcacgatatctaaatgtaatcacaggtactctggtttataaatttcagatacggaaagaacacttactaatatatatatatatatatatatatatatatgtatatatatactattattatacgcacaccatggttgattt

SEQ ID NO: 32775 - DNA, 439 bp, Glycine max
ggccgcccgttgtctttttttttttttttttttatttttttctaatctttgaaatgatgcattttcccactcaacaccatgaccatggccaaacccagcgactcctcgtctattcatctcacctcaacctgcatccctctcaccccgatcttcacttcttccgccagatttaagcggagaagtcagaaacgtgagcgccaatgatcttcttcatttcctcctcaatctcctttggcaagacaccgccggtgagcttctcgaggaaggccgaatgggtagatttcaattgctcggtgaatgacctttcccaagcgccaatcttgtcaacagggacattgtcgagcataccgttaacaccagcgtaaatcaaaggggccataacctcggtaggcataaggttgtactggggctgcttgagcaactcggtcaacctagaacc

SEQ ID NO: 32776 - DNA, 473 bp, Glycine max
aagaaactcgagggatacgttcttttagcgttttcaaattttccttaactaattcccccacatcatatgcacaaatacatgtcaaaataactacctatttgaattacagggtagatgaatgcactgaagccccttttaagctttggctgagatgaagcaccttaaaaaaatcctttctattcctcgtcatcatcgtcttcttcaggtgcctcttttagccattgaattaacttttgggcctgcttaacaaaaactttatctgcctcgtcagcatcttttaactcggcttcccaactcaaaatagcatcttcttctacaacatcttcattgtacaagtagtgcaaaatccttgtgaacaatggagcaaattccttagcagattcctcacatatttcttcaaatttaagtattacttcgatctgctcatctatgtcagtcagataggatgtaagagcctttttccggacgcgtaa

SEQ ID NO: 32777 - DNA, 602 bp, Glycine max
gttgaatgttgtctggggtaaagtcacaggcatatagtagtatatagtacatacaagagagaaacatttagcgcggtaacaaatacatgatgagattcatagtatgatactattacacatgcggagggatgaagtggttggttctggatcaagaataataaaaagtagttagaagaaattttagaaaatgtcgagaatctcgaggatggagcgattgcaaaggggacaagagcctcgattaagccacagttccctggaacacaccctgcaaaaagtgtgtccacatgggatgaacgctgcgcctttcttccttcccatgcacacgcagcacaccgaatcattccccacaacattctcctctttctctttctccttctccttctccgcctcggtctcctccagcagcctcatcagcgacaccctccacggcgtccccggcgctctcactgcctcctcctgcggcccccggagctgtctctccgccgctaacgccgccgcgagattcatacccgaacccaaacctgctggacccacgcactctggatccgtttcctgctgttgctgttctccttgggtgacacttaaccgcgtcgaacggaagc

SEQ ID NO: 32778 - DNA, 478 bp, Glycine max
agcataaaaagttcaacatttactgaggtaagatggtttcacaaggatatttctcatagtacatggtgccttcctttgctgatcttaccattctttcctcagacatagtcactgaggtaagatggtttcacaattcttctgttgggctttgcttcctcttgtatccctggtttgctatttcgacccctacccctgctattatcttttgttccttattacttccctaacatgactagtggtaaagtagtcatttcaacacataccaaaatactaacaaactaggaaagttaaatcaaccacaaatatatattacatatataggaaattgcatatattaaatataaaacttgagcaggacaaagctgatgatgaagactgttcagatgaatgatatgaatatatcatatattctcgtagaagtatttcttgaagagttgcatatgtgctatttggaagtgcatggacacaataacggatc

SEQ ID NO: 32779 - DNA, 440 bp, Glycine max
aaaaagtcaaatttcaatactttttttagtgtaaaacaacaaacttaagacctcatataaattacttaaactcgtctctagactgaccttagtagattcaaaattaatacaataattcccagcagaaattaatggagacatatatttccctttttgctgattgccatccgatactcagcgttgctagtaataagcatcaattaagaatctttgcagcagcaatttgagacgtgaattgcacaggtcccccaaaaaattgaaaatatcgataggatattatttttcatgaacgagaggagaatacacaggataccacatattgcttcgcacatactccacagcctgatcttttgacatatgggaaagttccttgggccccacatcaccatgtccttctgccagttcttcttcaactgctgctcgaagcacagcagccccga

SEQ ID NO: 32780 - DNA, 519 bp, Glycine max
gcggccgcccttttttttttttttttttaaatttataacattaactttaatttccatttaactgtaaagtaccgtgtgaagtattcatgccataatgtttttcttcttttgagggtcaagtcattatctatcctaattctgatgccggacgtcacattccacaaatatatattcacgccactgccattcatcatttcaattttcatccagtctatggcatggaatggaaacgggtctctatcgtcattaccagagactccatcagcaataatggtgcatcattatatgattatattgatgatgataaacattgtgtcttgcactctaatcttaacaaagctttatcctgttcttggagttggatccaaccaatcccgttatgcgttatcgtgtcccgtgttggcccccccacttgccagttgccaccaaagatatattccctgcaaaacatacactagaaacaattattaatagcataaaaacaacacataattaaatcaaactaaaaagaattaatac

SEQ ID NO: 32781 - DNA, 416 bp, Glycine max
ggagacaaaaagtgagtatcgccattataattgctactgatataggttacaatatgagatgccaggaactaccatgacatatacttgtaagatatatcattgcatatctgccaacatagtataacttacttctgccagaaattcgctttcctgctttagaattggcttaaaataaaaataaccgtagaagttaaatttcaattaaactaactacttctaccagaaattaaagaaataaaaaacattgcaaatgccctacttctattgaacacggttctattaccaaccattttttttaaatcatgacattaaaaacatttagcacttgcctatgtacctgagatggtactcactaaccttttctattacaaaagatattctaaggagaaaaaaagaaagatggaagttataacaag

SEQ ID NO: 32782 - DNA, 413 bp, Glycine max
gaaagccaattttgactgcagaaaaaagttattattttctctatttgaactgcctattcaacagttaaagttacaacgtacaggaaaaccaattcaatttaatttctatctcctatttttctaattgatgaacgaattaaatgtaactcgagtcccctaacagtaagtcgagcatgtcattggaagtgaggagagttgttccaccaacaagcaactctatatcaggtcttccactttcacccaatgccttatgagcttcacgcacctcgagtccattaatgcccccaataacaaacaccaaaatgacattttgatcggcaagacttggtttggcctgaccaaggccaaatcttccaaacccacttttaaacaagcgccccacagtggaagaatgatattctaacccaggcaca

SEQ ID NO: 32783 - DNA, 430 bp, Glycine max
gtcgactagacggcggccgccctttttttttttttttatacaaggtgtagtacaatataacaagtaagctaaatgttatacaattctgttgataggaggattataatgaaatcgggatttaatgcagatcaaaaagaaggaaagcaatggcatgatcatccccatcaatgaaacctgtatagaaggatacttcaatcaattatggtcatgaaagggtcacgtaggaggaatttctggtttttcggttaacatctttgagggtttcaacttccataccaacggatccttatcaaaaaggaactaagtatcttaagcaatgaactaatcaatatctggcaatggtgttttccaataattccatgagttgtagtcctcctgctcgaccaaagaagttggaggaaacatgtcattgacgagggtatgtaatgac

SEQ ID NO: 32784 - DNA, 467 bp, Glycine max
gggaaaaattaattgtgtttcattgaacatgttgcaataccatagttggcattagcggtcaaaacagccactatcacattgcgctttagaaatgttgcaataccatagtggtcggataattgtttccatttcttttgctatcacggcctctattgcgcataccccaaagtggtcatgtatcattattcttctcacaaataataaaacgaaatcctggtatatggtgcttcagcgttggaagatcttgacaacaatatacaaagagacaatcaactcaccagttgcttgctataagaaatatcataaaacctatcttgacttttcttttcttacgtgccatagaaattgtagaccaagatgtcactgttggttcaaaagggaatccatggcctctgccacttttttcctaagagcgttaagagactctgtgaaatgaaatacttccgtttggtccatttctagagaca

SEQ ID NO: 32785 - DNA, 843 bp, Glycine max
  unsure (1)..(843): unsure at all n locations
ctactcgtccggtgctttttactcaggcacagacggatcattgaatttagaagtggtgtctcccactctgttagtagcagaaaaggaagaagccaaggctgtgttgaccttgtttttaaagaaacaaggtttgagcaatgctattgccactagaaccagcaagaagtcagatcattttattgatcaccttgtgtcaaggcttcactctaaacacaaatcttggtatctcgcagggagagagcttacgactctagagatcagggacgcacttatcccttatcttgaatctcttttcgaagagcatggagacatcctagtggatgtagtggaaaactatccaaatcctcctggtaaggataaatcggctgtgctggttcctccttctaatccagtgttagactctaagaagcttaaagctgtgtctcgagtgagtgagacagaccccgatggtggaaatcttcgccctcatattgtctatctcatggaacttggtatggatattgagcagattaggagtatcacacgacgattcccatcttttgcctactatagcttggagggtaaaattaacccagtggttgagttttttcttgaacttggagtgccaaaagagaacattcccactatcctcactaaaagacctcaattatgtggaatcagtctatctgaaaatcttaaacccaccatgaagttcttcgaatctttgggtgttgacaaaaaccaatggccaaaggtgatctatcgcttcccagcactgctaacttatagcaggccgaaagtgatggaaagcatagattttctccttgaattaggcctctcagaagagggtataggtaagattnt

SEQ ID NO: 32786 - DNA, 781 bp, Glycine max
tttggtcatatgttagggaagaggcttctcatggaaggaaagcacctattgatcctttcactcgagaaagttgcaagccatctgcatctcaaggagtcccactcggagggatggggagtggcagcatatcaagaggatttaaaagtgagttccgacaatggcaaattattcctagcttatgtgaagcgtcaccagtcatggccaatcagttctctatttttataagtagagagggaggaaacaaaaattttgcatcagttttggctcctggccagcatgaaggtttaggatctagcaggaaacctgatgatcagggcatatcatcatggggttggaatctaagtggccagcactcaacctaccacgctttgtttccaagagcttggacagtttatgatggtgagccagacccagaactaaaaatatcgtgtcggcagatatcgccgttcataccacataattatagagaaagcagtctacctgctgctgttttcgtttatacgttggtgaatactggtaaggaaagagctaaagtcagccttctgtttacttgggcgaattccattggtggaagctcacactcgtcaggagatcatgtgaatgaaccattcaaagctgaagatggagtctctggtgtacttctatatcacaagacagcgaaaggaaaccctcctgttacctttgccattgctgcatgtgagacacagaatgttaatgtttctgttttgccaagttttgggctgtctgaagaaagtagtatgactgcaaaacacatgtggag

SEQ ID NO: 32787 - DNA, 787 bp, Glycine max
ggctatctcatcttaccacttccaggttttgcaaaggcttcagagcttgaacaacttcactcatcataggtctggagcctttgcaaaaccttaaagatatggctatctcatcttaccacttccaggttgcgcgagtagatcgtactatggccatgcctaaaaatggtatgcaagcacagttagcatctttatcaaggaagggtcaaccagtgaggatcttgtcaagtccaaaaggtcctcatggttctccatatcatcactatatcaagtcaccgaaacctaatggataagaatcatgtttctctctttgatttgcttctctattcattcagttccctcacaacttaggctatcaacagaacagaaactgtttgtgttttgaaaattgctctgaaacatgaggaattactagagttttctgaccttatctcatctcaaataaggttggggggaccatgagacagttcactggattttaaagtttagcggggaccaagttgaccaaacttgaatagaaaactagaacacagttttcacatgtggaatttgttactgtggagttgctatactttttctaccatttcacaagctttcttcttcctttcagaatgtacttttgtaaagaaaatagttggtggtgttaactcatgttattcatagatatttttacatactcatctgtcaatgtacttttcaattaatacctgtcaatgtaattaaatgttgtacgagaaacatgctagagtttggaatttgagagacttcaaaagttctggatatttttact

SEQ ID NO: 32788 - DNA, 459 bp, Glycine max
ctttgcaccatactcagtgtttaacaaactactccttgtttatgcctctttatgactacatgctatggcaccacagacaaggcttgcgataaattacacgagtcagcattaaaacaagaggaagaaatccctaatgttgtacacctaacacatctcacgacccctgaatccatatatcatctcaggcttggatttgcttacttggcttctaagccttacacgtcaaaatggtacctttgtttgatgtggccagtaacagcttggtccatgatcctcacatgggtttatggccgtacatttattgaggaggggaatcgttttgacaaactgaagttgcaaacttgggcaatacccaagtacagtctccaatacttcatgcaatcacaaaaagtggctatcaacacaatgatagaggaagcaatactcgatgctgacagaaaaggcatataagttttgagc

SEQ ID NO: 32789 - DNA, 457 bp, Glycine max
gatcaatgatatttgtataattcacaaaatttatattgtaaattttttcttagttggacttagacctttcaacaatagacctaacatccaccttgattatcaacaccaattgtatttaccatgccttgtcatctaacaataaccttccaaatcctgctatccaaaaaaatgtggggttttaggaaaagcaattatgtgtcatttttgtgatgaccatgacctggctgaaaatttgtgtcacccctttaaacgaaagttttatttgctagtgttagcagccttgtacattcttggttaacgacgataataaggaagattttccgtcttcatctcctttgttcatcccattcttgggattcaacattgttggggggatattatgcaaccccataagtcctctgttagatgatttaatttcaatctgtgtagagaaaagtgctgaaacggggcgatgatc

SEQ ID NO: 32790 - DNA, 473 bp, Glycine max
aaatggataactcgcgtaataagtcttaatagatagtggaacataaccgcgtagacaagtttgtatttacatgctcagatgtggaccttaagcttcgcccaattaaacgaaaaatatgttacacgcaaatgttgcagccataaacactagagatatacacatacaaaaagctgaaactgacaggaactactttcaagaagacctgaatgaaactgaatctccatgaataagagaaggcagaaaaaatctgcttattgtattctcacactatttgcatcaggtatcttccatgcaaaagtagaaacaaatccatgtagcagcaaaatgttgtgtacaacaactcacgtgatcaacatatcttgcattaagtgatatccaattggatttctatggcatgccatgatgccaaaagatagctttttgcaaatcataatatgggcttcactaagtctatccacccaacatagtaaaac

SEQ ID NO: 32791 - DNA, 436 bp, Glycine max
aaactgtcattaatcaaatttcatattcaaaagcgcatacatactataaacactttttacattgccaattaatattagctgccaagccaacaacaaaagcaaactaaactaaaaaaatcatgggtgctcaagcaatggcaacttcaacagtttttgatttttggggaggaggatgcttctcaacaaccacagtgagaaccccattttcgcatttagctgtaatggctgacacattagcattctcaggcaaacgaaacttcctctgcaaattctgaggccctctcctctccaacctaagatacttgcacccttcatcctctccatcttgacgcttcctcttcccattgcttcttataacaagtgtgttctcatcttcaaccgtcacctacaaaacaaatacacacatgccaatgcaccataacattaatggagggga

SEQ ID NO: 32792 - DNA, 450 bp, Glycine max
cattaaaaaaatatttcttataatgccgtgttcaactcaaggcaattacacctctcatgccacggtcatactattcaaaacaatttttacaagacaccaatatgtatatatatagctgaagaccccacaccctaaactaaattactgtgtgacttgcacttcagcaatttcattaattgatcgtcgccatatccttctaggagacgtacttctcttcacagaataaaattttggttcttccaactgaatttctagattggacaaatctaatgttagcttttgcttaatgaaagcatccaaatcaaagtcactttttccatttgcatcatcatcatcctcgtcttcactagaagaatcaactctgtttttatttgttcccgcaatgttcctcaaagaatccagtggcatgttgtacgaatttgggttcagcttgaggattctctttaaact

SEQ ID NO: 32793 - DNA, 379 bp, Glycine max
  unsure (1)..(379): unsure at all n locations
gtttgtggccctggaccagtactaccctgccttctccagttcgagttctatacttctctcgctaggcagcaatgcatatgagagaataaggactttgagaaactcttctggaaatggaatttcttttgaactgtgattgcaatcatagagggcaccattgagcttaaattgctgattatgtatggcggtgattgcaaatatttctttcatggaggggaatatttagtgtcaagcattgattttggatcttttatatgtatttaagggaaggggaaaaccaaacaagtagtattgttgaccactgtgtaaccccctcttgtcacctcttatctgtctgataaaattaatttattctctttacaaaacnnnnnnnnnnnnn

SEQ ID NO: 32794 - DNA, 356 bp, Glycine max
cgaaaatatgaatttaatctaaattaaaattctggcgacaaaataagatattcaggattcctccatatggaagtttgaatttgcattgtacattaaaaaaaaaaaaaaaaaactttcagaaaggagaaagggagacagaaagggaacgggtcaatcgaagtcgcacaacgaagtgccttgttccttgccagcctttagtttcgttgccaaggagggaaggcgcccctcctttatattgtggtgaatgccagccagcagaacgataagcctttggcctaatacaaataatgaatgcctccattcagcttactgaccttggatacctcgggaatgttaattcttcccacccttatgtg

SEQ ID NO: 32795 - DNA, 420 bp, Glycine max
agagtaatcatgaacgattaaaattaactattaaggagggtcataaggagaatagataatgaagcatacaaagtatcatctcacatacacatctcgtctcatcataaaaggatcgtgatttttagctccagttcatatctcaggtctgggctcataatttccgcagctcaagccaccaagggcgagtgcaagacaaacttcttccacattgcggatgcttcgtgcgccaaagaaagtgagcaccgcttatgccttcttccccttgacaacaatcttgccgtgctcgcacttgagactgatctcctcgccgaaggtgtagtagccgtactcgtgctctggctctggctctggtttgggcgtaggcttgggctcgggctggtgctcgacgggtgggggtgggtgaggagcacgggtaggctt

SEQ ID NO: 32796 - DNA, 664 bp, Glycine max
gtgctgcttctgatgggaaaacagagatctcttacatgcagcaaactgctcaatctgttgcaggaactttagctgaatccggcacaactaaaaatgtatctagctggagtcaggtttcagaagggaataatgggtatccagagcatatgatttttgatcctcagtatcctggttggtattatgacacaattgcccaagaatggcgttcattggaaacttacaattcaaccatccagtcttctggtcttggacttgaaaatgggcatgcttctgccaatactttctcgcccaatgatcatagtttgtatagcgaatacagccaagctgataattatggactacagggcttcgatagtcagcctgtagatggcagctggagtggtttgtatggcactaaccatcagcagggttttgacatgtacacaactgggtctgccactacacgaggggatagtataacttctggtggcaaccaacagattaatcattcttatggttcaagcatctctgtgaacgaacatcaacaaaatacttctagctcttttggatccgttgcattgtacaatagagtaaaccatgatcgtggcttggctaatggaacttttgaaccacaaagctttggccctactggggacactgctcaacagcttaattattcaaccac

SEQ ID NO: 32797 - DNA, 390 bp, Glycine max
gccttaaaatgtaagattattgaaacggtcactttctggttgaaacttgcaacagaaggaccagagagcaccaaaagttggtggaaaggatttaaacacgtcaatacattttttggtgaccaaccaccataccatcttcatctattaaaaatatacaatactgctatatactaataagctacagttaaaaataaagaatacttacagtaatgtacctatactatcatttctttgtacttaaattatatgatttgtatatatcaagcggatataccattataccccccgtgtcaaaattctgcttcgcatgaaggtttcttaagtttctaggctatgctcagaataatgaatgattggaacatgaatcagttttgctcagaaaaactttga

SEQ ID NO: 32798 - DNA, 508 bp, Glycine max
cttcctgtcctgaatcagaattaactttgggaacgataaagcatgctgacgttgatttcattacagtgcttctacaagaccatataggtggcctccaagttcttcatcaggacacgtggatcgatgtaacccctgtgcctggggctctagttgttaacattggtgattttctacagctaatctcaaatgacaaattcaagagtgctcaacacagagtactggccaaaactggtggtccaagagtctctattgcatgcttttttagtccagcattccatccatcttcaaggacttatgctcccattaaggaacttttatctgaagacaatcctgcaaaatacagagaattttcaattccagaatttacagctcactacagaacaaaatgcatggagggtacttctcctctactacatttcaagatttgacaagtacaatgttgtaaaagtgactatgtccttgatccattgctcttcgttaacggagctgaatgtagcaaattttggaa

SEQ ID NO: 32799 - DNA, 806 bp, Glycine max
cttcgaaggaagatatccgttggaaaccaaaaccaaaagcaagatcaagatgagaaatgggtagagagggatttcttgagtttgagtgagacaagggagaattcttcaaagagatccatggaggaagagtgtgaaagggagacgaatggtggcagcaagatgcagaagcttgagactcttagcctctctcttgctttgcctgatgtgtcgctctctctcacagcctccaacgctttgcaaaatggcgaccaactcgttaggccaaagcctagtaagccatccacaaggaccacaactactatcaattcatgttcaaatgattacacagcagcttctgtgtctcactcttactctcaccctttctcacacaaccaaagttgctcactcacccgaaattcgaccgagaatttcgagtactcacacagcaaagatgatcaaatttggcattgtggggaggggactaatggctcggttcatagcaggttcaagccaattggagatggggttgctttggtcaatcattccttcatgcaagggaatagtcagtataaggctactagctcagaaaaccaatctgttttcccttcagaattgcctgcaagaatgagatttgaagccaagtcagagggctcaagaggaaagaattctgggaatttaagagggttggaaggtgtggatggtgggaaaatgaaattttctacatcagagagagttctaagagagattgtgtctgagtctatcccagccatggcattgacatttcaggagttcactgaagaagtcataacttcaattaaggaatacct

SEQ ID NO: 32800 - DNA, 428 bp, Glycine max
gctgaaatgtaatttcctccttcacaacaaataatatcgttaggttacagtttagaaagcacccacatgcactcatttcaaacatatatcctacatctaactgctacaactcagtaaacaatattagataacaccaaagagaaacaaggaaagcctaaaaagtagatttcctaacactaataacacctaacacaaagcgaacaatttctcaagtcaaaaccaacctgacactcatccatcccactataagtgtcatgttaattgtcagcatcagtcaagcatgagcccaaaaggggtttgacactgtagaacaccaaatacttggcagggagcatgtttagcatgcaactccagcatctgcatggctggggttggactcattttcagggaaagaggctgaatcatcagaagctgagttcccagagctt

SEQ ID NO: 32801 - DNA, 447 bp, Glycine max
aatgaccttatcaatatttcatttggtgaccaaaattgctaaacttagcaaccaagaaaaagaagattctaaaactctactcatacccttttcttcaagttaatcacctagctggtgcagagaagaccctgttgtaccaaacagaatgaagtatcatatgaaatatgtcatacttgacagggttcttgtgccaaaggaaatgctgctgcacctttttttaccctcatctgcaaccgaagatactgcttttctgggatggaaaggagtatatttttcaggttaggaatgtccttctccagaacaataaccgcaaaggattcccaattcagaacctcgagaaagggaggcacaaaattgtcggatattataaccggaacacattcgtagaaaatggcttccaccactcttggactgttcacttcatagcctttggcacaaatctggtgc

SEQ ID NO: 32802 - DNA, 363 bp, Glycine max
tttttatcaaatgacaaccccaccgtttcaacggtgttcacaatcacatcttctaaaaggagctacagggcaaagaatgcaagatagccatacaaaagtattcagaggaagacaaactgttagtcagcactagaaaaatacacattttattttatttacaaacaaacctcaaaagctgtacacaacaaatgaccttatcaatatttcatttggtgaccaaaattgctaaacttagcaaccaagaaaaagaagattctaaaactctactcatacccttttcttcaagttaatcacctagctggtacaacagggtcttctctgcaccagctaggtgattaacttgaagaaaactctactcatacc

SEQ ID NO: 32803 - DNA, 409 bp, Glycine max
gattgaaaattttattagccattttaagaaatgggcaaaaatgcaaaagggtcagcgttgtttcaaaaaaccatttttacttactattggaagtaaaaaaattcttaccgcttcagacgtacgaaaaccacggcatcaccgaaggctttacaaacgtgtcgaggtaatgcttctttgtatcggatgcgctcatcgatgtttccatggctagcatggcttggtggaattgggtgatggcatcggtcaggatggcctcgttggagaatggagccgttgtgtagccattcagcaaggactgggacagcgggatcgggcggtagaattgtactaccgtggaggacagcaacgggaacaggtcggacggaatgacgtattcgaacgggttgacgttcaccccttttttagtcgg

SEQ ID NO: 32804 - DNA, 426 bp, Glycine max
gaacaaacattattatcaaccctaagctactatacacttgtgaaaaacgctaaaaaatgcatcgctcgaaagcacatacaactattatacaacaaaggaaaacccggctggtctagccaaagatgcgtacacacctcttatctttcaagcggggtagcatgatcaggaattatttttgggatacaacctctctgaactcatcgtctctcagggataatatcggagaggaccaataccgatgccttccagccccccgactttctagctttgtcttggatccccccaagtataactcggtgttgctgatgccgaatgggtatcccgttggatatcaaaatgcaatgctcaatcaatcggatcaatctttttcccacaagtgaaacttcggcttgttcgttcaacttccacctcacgatcaatccttac

SEQ ID NO: 32805 - DNA, 454 bp, Glycine max
agtagctagttgataaattcacacttaaattccaagcaaaatatcaaggggtacaacacctaagaatgctgaagtgaccctacctctgcaaattgctggttgatcaattcaatcatttgcactccaaggaacatatcatgggtacaagtgcaacacacaagaatcctgaagtgaccccagttttgctacttgctacagttgatcaattccatcatttgcactccaagaaaaatatcatagtgttcaaaacctaagaatcctgaactgaccctatctttgctaacttctagttgatcaattcaatcatttacattccaatcaaaatcaagatgtagcttgatggatactgctagaccttggatagaagcttcagaacaaataattcaagtacaaaagcatatatatacgtaagatcacaggagccaaaattgtcagatatccttacctcttttat

SEQ ID NO: 32806 - DNA, 416 bp, Glycine max
gggggaaatgtagggactaatgatagtataacacgttaaatccaaataatgccactggctggtagcaaattatgtcctgtataagtactaactactaactaactagcactatccctttccttacctagtcaataattttctatacaaccatcttcagtggttggaaagatgcacattatggaactgtgaaaattgaaatgtgtatgatatgatatgatacgtcacctctccaatgaaactattaggccaaaagctcatgtcaatggtctctctatgtatcaacaaccaccaccatcagctggctcaattgaacttagaaggccgtttcctcttaactgcatgcagtggtcttcagcatccacttgagcacatactatcaccactgctagtccattataatgtgcctcctgcatgat

SEQ ID NO: 32807 - DNA, 465 bp, Glycine max
aaacaacagaaaactctagagttcattcaaacccaacataaaagataaaactatccaatataaacaccatgtccatgtaaattgaacccaaaggagtaagtcacataaaaaatatgaatcaatggcctcagacattgtagacgcggatcaattcacagaacaaaagaagaaccatttctcgagcaataattaaacaaaaaccaatgctcaagaggcagtaatatttacactcccgcgtccaccataacaacaaattcaacctgaaaaatcgcatacaccattcaccaatctttctttaaccaatcaagaattcttcgagtcacgaattttctttgccacggcagccaaattgtcacgcaaagccaaagccttggaagacacagcctcaccatccaacatagcattacaaggctcgccataacaaccttgattacaatcctcaaactccgaagccagagcggaaaa

SEQ ID NO: 32808 - DNA, 417 bp, Glycine max
acagagtcaaaatgactgtattcaatattcatatactcactaggttacgtgagataagaaaatatatttgagtggaaaatgtaacccgtaacgtcatattacaggaagagagggaaaaaaaaagtcgaaagtattacataactataggaatgttgttgaaaaagtctatctattactattactgttagctagaaatccgtttagctctgcaataactgtccttctttctgatggaggttcctcgtggcaccacgaaccttcatgcttataagcaatagcatggccatcacgaaaacacagatgctagagcctataactgcacaaaatcgtcaagaaaattgtaaagccaacccccacaatctaaatatttacgaaaaagaactactaatgtatctaaagaaacagtaatgtcaaaac

SEQ ID NO: 32809 - DNA, 492 bp, Glycine max
ctgctctctttctcttctcaccggctggtcaccggcttctctcattctccgaccggccccacccccttcattcccgattcgttcgtcttcgctgcttcgcgtcaacacttttcttctcttctaggtcatttatgatttcgatcttttcctttaatttctcctccatttgttttgatttgatttgaatttccacggttaagttaaggtagtgttcgggaagatgtcgagtcacggtggttcttctttaaggaacggttccttgtccaatagccccacgcgggccaagaagaaagcctttggctctgagcattcaacgcctgactttattgctcgtaaaacctttacctcaccgcgcaccatgggagagagaactgtgaaatcattgcggctttcaaaggcattgacagttcctgaaacaacaaccgtctatgaagcttgccgtaggatggctgctcgcaaagttgatgctctattactaactgattctaatgc

SEQ ID NO: 32810 - DNA, 631 bp, Glycine max
aggtatctttctatttagtacctgtattagataaatcaataaatagatgaatatcttctttttttgtacaatgccagcaatggggatcgaacataagtcctcatgcatctacccccaaccccaccactaggccgaccctaatgggtttaaatagatgaatatctgataagaacagcagtaggcccagctgattacaaaccttcaaggacaaaagagccaacaagatctacttcaggtgactcgaggggctgtttggaatcaagttgactgactggcggagcttcaattgtctgatcaacttgttcagaattgagctcctcaagttttaaatgaggtttgctgtggtcaatagggctttcaagttgctggtatttgggcttgtttttctcgaggagaaggtaggtggtgcaataccaaaatagcagtattctattttgtgctatcaccgtatccctaatcctactttttccaaaggaaatacgctctagtgcctgttctccagtttgaatatcaaatgaatgctgatggtcaaattgaagaccactaaattcattgatagaaagtccctgaaaagcccatctaatcagagaaacattaggaatccaacggaagatgattggggtattctcag

SEQ ID NO: 32811 - DNA, 404 bp, Glycine max
catggatgatttccacagaatctctgatcatttaatgaaaatagtcactataatcaaaggaaccaccatgagacagtccaagattatccaccatgactgtttattattacatataacaatctgtaattcgaccaaaaaactaacaacctgtaagcataagctgatgttttcgttgtccaatatcacattgggtttgttgtcctgttctataggaaacggcttactgtctcagtatttgttggtcatcctttgcaaaggtatctttctatttagtaccttcaaggacaaaagagccaacaagatctacttcaggtgactcgaggggctgtttggaatcaagttgactgactggcggagcttcaattgtctgatcaacttgttcagaattgagctcctcaagtttt

SEQ ID NO: 32812 - DNA, 460 bp, Glycine max
cccaaaagtcagacatatatttcctctataacattggtcctatattcctagaccatatattaacggatccgttaacttaatcaattccagaaaatttcatacgaacaaatgttgaaatgcctatgcatacatctttcagaaactataatgctgtgtagccaattagattcaggatcgggtctaattgcgtgctctatgacaatatcattgagttgcgcatgctgatcttctcggtggtttgatatgaaggagctatcatattcttccttgatcagcctgtggtccaatgtatctagggccattagtgattcacacaggcgtaaggaatacccccaaatcgcatgatccttgaccttcaacttcgtgaggcaaattcctcagattggaggatacatattatcactttcaacttcactttcaatttcactatcattttcgctattataggtcttgagatatg

SEQ ID NO: 32813 - DNA, 434 bp, Glycine max
ctcattttcgttttacatgttttgagaaagtgtgtctctcagaaaattattaatgtttgatgaaaagtgagaatctggacaaatactactgaattaagttttgatgctccagaatggagtgttttagcttattactttttatggtcttgttctatctgctccaatccatgatatacataacaacaacaacaacaacaaccaagccttatcccactaggtgaggttggctacatggaccacacgacgccatatgatatgcataacccctgattggaatttatatatatgtttatatttatatttattttctctcggaacacttgtcttcctgattgcttgtgaagttgataaataagttgtgttttcccaggttggtagtggaggagtccagaaataagtttgctaaccacgaaaaagaacttgcatccttgtct

SEQ ID NO: 32814 - DNA, 475 bp, Glycine max
aggaaccaaaatgctggaaaaacttaattattttgcatcacattcttatataacagtatatctgagtacagaacaaaccattcaccattatggctatgataatctttccttagcaaacctattataaaacaagggtgaacatatgtgaattgtggaaggcttgtacaatatagtccttgagaagcaaggtcaacctgtattcttcatccctgcagcaatcccatttatggtgataagcaaagcatctctgatcttacggttgtcatcatcacgtcttaacctcttgagtatctccacctgcaacatgttcaagggattaaggaagggaagtctattctcaattagcctcctcaagctcctattattctgctgaagtttctcgtgcccactaataaccatgacaaacttttcagctgtcatgagctcacttcttagttcatggccaagctcttgcctctcctttgacacaaggact

SEQ ID NO: 32815 - DNA, 569 bp, Glycine max
cttcaaaattcacattcctcagtgtattcttgtaaaaggggattactgtaaagttaaaaaggaaagaagtaattttgaacaaattacatcagggtaatttgctctttcgtgtatatttacaaataataatataatatagaaagcatagactatcatagaggattcgttgttattttttgaggaacaaggaatttagaggtatgggatgatagccaactacagtaaatgcatcctttccacataagagtggttcaaccattggcaaagaggctccccacatcccacaaaacaccctgaatttcccttttcagccaaaaatgggaaactgaatgtgtgcaacaggtcctgcactgcctgtctcaccagagaagatcctgtcaccttgctccgacgaccccatcctgtgataatgtctacccgactagggcgaatcccggataccagcatacgttggcgaaaccaagcaagtgtcctagacaatgctggcactagcagttccatcagacatgacatgaagatttattagccaatagcgagagcttttttccttaacagcatctggatacaca

SEQ ID NO: 32816 - DNA, 434 bp, Glycine max
actaaaatcacttttcatataaacaaaactcatacaaatttttacatgaaactcaattttttattatgaaaattagttctagaaaatcaaattgatttatttgattttctttacatgcactagtgttgaaagacatgcaccacaacaaatttatatctacttctaggagtacttccccacatccaaaatttcaacttccttcacattctttcccttccccaattgctgtaaaatatatagcaaattcgacatctcatatttcagttagttggacaaaatccagccacagagaatacgagctcgacttgctacactaaaaaaaggaaaaaaaaaaaactaccttttaaaagcataaacaacaaaacttgtaaaaagtgtaaaattttcacacccacaaaataatcctagtattttggaataaactcaattttgat

SEQ ID NO: 32817 - DNA, 284 bp, Glycine max
gggtccaaatcacacggggcagtaaccattattaggaaataattgggaaacacatgaaggaccaaagtctacttcataaccaaacttgacccccaagatgcctttcttttgccccacactatgttgcgctatcctccaattcatctcatccataatccccagcaacccttttccttcacctctttaattacactcaatatatcagcaaagattcaaaatcttgtctttcacacactacaagatcccacctttagatcaatgactacttggagggggtatgaaat

SEQ ID NO: 32818 - DNA, 456 bp, Glycine max
ggatcactaactatcgatacatgattcgctgattataacgtgctatatacagacaaccgacgcgccgcactgacctaactcgtcctgttcttcttgagcaacttgccatgggctagcaggaggtacagcctgaaacacaacttggcaaagtcattctcatacaggtccttggggtaatccgctccaagcttgtacgccgcggccgttccggagatgacggcgacttcgtgggcgttgacgagggtccaagcggcggcatatgtcgtatgcttgctgttcctgttcaaagcccagacgaatggcacaacgaaagcgtagtgcgtccaggaatgcatcaactgatgccaccagtcttcccggatgatcttgtccttcttgatctcatccttttgccaagtgtccttgtgcttgttgttaaggaagatggtctggaagatgtggtcctcgagtggcttg

SEQ ID NO: 32819 - DNA, 568 bp, Glycine max
gcaaaatatatagaaagtgttgattgattaatttgacttgtttaagtgttcaatatagctgatgaagccatcgctctctctctctcccaccctttccttatacttctgcttatattctcctatagccaattctataaagaaaaagatggctatttggagcagcaattattgagacaaggatgcctatatatacatgattggccaaatgtatttgtccaattgatacaatcaattatcagtcagaagcggggtctcttggcttccctctatgtcattactcgaactagtatcagctggcttcagcaagcaagcaaaacaaagagaaattatcatgcatatggatgcacatataatgctaaaacctttgcattcaaaaggagcattgctagataaaaaccatgaagtcaatggactcatagcaataggagatagcaaatcagatatagattgtgtcccagcaataaatgtttgtgcttttccctgattggttgagcttgacgcatttgaaataatagcataagtggcaggtttcacaaggacatagatgataccaaaagaggcacttaag

SEQ ID NO: 32820 - DNA, 459 bp, Glycine max
aaatagtcttgcatgtcatctttaaagtaattattacaggaggtgagattttcaattatataacaatctaggatcatataacaaagtaaaaaatacacacttttgggtcttggaaaaggaacacagatattactaagccaattcgtcttccattctttccttcttctcttctcttggtccaacaactataagaaactaaatcaagctagtaaaaatctcccatgttcatcagcaaaaacccctaatttaacagaacatcttatttgccaaatatgtcactgcttctacttgcaagttgcaacactctactctagaagaacatgggcttcattttctcctcactctatggttaagaccttccctacgagttgaggaagatgaggaagacaccgtagatgaaaaaccagaatggttattttcagccatatccttgtgaaatgccttctgcacatcatcttt

SEQ ID NO: 32821 - DNA, 466 bp, Glycine max
ccgccctttttttttttttttaacatgcatctcaaaagaaatatttttttaattctttaattaatgtctaaagacattaattaacatttcccttataatataagaaatctctagccattgaaactttttagcttataaaaaaataaaagaaaaaattaaaggaaattttcacacataagaactagttgaattgacctactaggctccactccagccttgaacaaatcaatcatcacctcaaaaccattgccattcatgtaaaactatcatcatctatcaaatattaattgccacaagtcaaattccctctacaatctcttgaagcctcatgcagaaactgtcaacataagatgactccaaatctttgttaagcagcaactctctgatcctagcatgattagccctaacccttttgctggtttcattctcacaatccatcacaatgctcacagctttacacacactc

SEQ ID NO: 32822 - DNA, 623 bp, Glycine max
ataagactaagcaaaaccaaaggagaagagcattgtagagaaaataaaaaaaataaaaaatggaagggtgagtagagatagagagagcaaacgcaaacgctggttgtttcgtttttgttttgttgctgttttttttttatccacatatattacttgttaatattattaatttttgtttaacaaaaaatttccaactgatgatttttactttatatctctcttgtttttgctactttattgggtgttggagagagagagtcagagataagaccttcaagttgagttgagtttttttattgcaatctgtttttgtctgtctaataaaatatttttatttatttatgagccttctagagagaaagggagatgaatgttgttacttgttattagtggaggcttctgaagagagtgaagagtagtagcgtgtgttgtgttgttgttgctgctgctgctgcaatgggaactccaccaacggatgagcttgtgaagaagatccaacagctggaggaaggacacgcgcacctgaagcaagaaatgtcgaaactaaaactctccgatgtgagacacggccaccatcgccagaggtcgcactccgtctctccgcagcgttctagattgggagc

SEQ ID NO: 32823 - DNA, 408 bp, Glycine max
aataataataaatagtgaatccagttgcgatatggacaaactgcataagagtactttgcaatattcaacagtttaatacagatttacaacggttgatgattcccacatttgtgaaaaatgggccttagaagaaaaaaacaaaagaggaaaaaaaaacacacggaaaacctgtgtagggcaagatattggcgccctctatcaggaagttcaaatactgagaagggttatataatgtagtataatatgaatgataacccctcaccggcacttggatattctggcagaaactttgaaaataaatgagctggaagaggtaaattttggagaaggggaaaatacagaattatttctcaggaatgtcatacaaaaacaacaactactaagctcaaaagcccaaaatagcaaact

SEQ ID NO: 32824 - DNA, 777 bp, Glycine max
ggatggcatataaaaaaaatattgtgcaattgaatggaatttaaacatcacataataaagtttgaataacatctacagaatatacattgttgagtattacaattacatacttttttttttttaatagatgacatcaatagcaaaacactctacaacaccatcttcctttaaaccattagaaaaggtaacataaccactcacagtttatttaggactaaaaaaattgacacaattttttgacaacatatcaattatgtactctaacaggaacgtggcttcaagagaagagcaaactccaaactgatattcacataaataaccataaccatacacaatcaaatcgtcaacttgaaactttcaagatagataaataaccatcaaactctgaattagtgcctttaagttcaagtcccttttacttaactttctaatgggcctagtctataaaagaacatatgctaataacttgctgccatttcttcttcactcctgcaaaagaaaacattaaaggcttacatttgcatcacaagcaaaaatcaccagagaagaaatagagaacaaattattgaccagtttagttagttttatttatttttttaaaatagtacatcaaactactctaaacaagttaaaggaaactgtttcaaaagcagactatattattttaaattattttcaggcaacaaattcttcacaccatatctgttcttggctttccaataagcagaaaaaattatttgactagtttctgaccaattactaagtctatttttaaaa

SEQ ID NO: 32825 - DNA, 528 bp, Glycine max
gcttaagggatacaaagttagaggttgcaacttcccgctccgttgctctaaatcctaaactaaaataaaaccctagccagtggccggtgatcaccatggcgatgaaaactgcagaagaacacgaagtgggtatctcctgcttcatttccgaccttcctggcttccgcggaattttaaagcaaagtggacagagatggagcagttgttcaattgtcctcatttgatgcccctctagaggagccagaggaaaatcgaaccaacacacacgacactgtcgttagttatgcctctcagattgaatctttcaagtctcttgctgaggagtatgatgcaattcttttggaagaatttattaataagattaatgccggtggagaagatagtgtttctcccattgttctttctccagattctgataaatctcatagaaaggcaatgcataacttctttaaggaaaactttaagttcctggtcactgatgtggtcaatggacccgatgcttcatcgaaatgtatccgtgtgagattg

SEQ ID NO: 32826 - DNA, 617 bp, Glycine max
gtgtagggaaaaaaaatgaaaaaggttaatttaattagacctctaccaaacacttagggaatgtgtttctctaaaaaaaaattggactaaaagttcttagaaaatcttagacctctcccaatcagaatacacatagtccctcagagaaaacagaaattgccagattgagttccccaccgaaacagggataaagaaccaaagtaaactcagtactccaggtagccagccaggcacgagtagtagtagtagtagtagtaactttgattagagattataagccattttcatgctcaaaagaaagcagttttcagtactaaatacaatatgtaagaagcaatgaaaatccctcctttagccaaaaatttaaaaaataaaatacaattcccttcctttcttttcacaatattctggccataaggaaaggatattgagctgtgaaccgccaaaaaccataaaatatcaattgccagttacagtgcttgacttcatctcttgaacacgcaacatattcaagttgtgttgggttcgagaattagggacctcgggttggggcaaaacaaaagcaacctgaactctgatcttcaggtatcataccaccacctttgctagtatcaagt

SEQ ID NO: 32827 - DNA, 494 bp, Glycine max
gatagaagtgtagatcagattaaaattaaaaataaaactcttagatgcaaaccagtgcttgatattttacattcagaacataccaactcgctatcctattggatgtttttcgaaagtaaaagcactactgaaacaacgaacatagactacagttatgcctgaaataattattacagctgggtcacactagctagggtgaacccttccaaaagcttaaaggatgcaatgctatacaggttagactttaattataaggtggcacacatgatatgctatgaacaaaatattgatttggaaaaaaagaataatattagccggttaaaaaaacgctgccttgtgcatagcaggaaaaatatggttcactcaaagggcaaaacaaactttcctcatccatcacccatagagggtcagaagaatattcccatgatgatggagaaggcactcgtggtgggcaagagaagttgcaaccctcttcactgttcccttcataaact

SEQ ID NO: 32828 - DNA, 472 bp, Glycine max
catcacaaagtttgtcactactcatgtttcacttgagactgagactaggttatttaaatgaaacatcgttaaaaaaacaatatatatacatggttcctgatttgaatggtatattataccttgtatgaacataaaacagtgataaagaattcagccacccaatctgaaaactgtacaattgagcagtaccacaccgcttgcatagatgcaaacctttatctattttagtgtggtcaaacctctgcacgtatccaaagaaatgaaagccagttatgtccagacgcaaacaatcccattcttatcagctgaagctaggggttttgcaattccgctccacctacaacacagaacagaggaagtgtgttccttcagagtactgactatatcacctttagatattgaccaaatatagacagatccatcagcagacccagcagcaacatgattgtcatctgggctgatacaggagcga

SEQ ID NO: 32829 - DNA, 715 bp, Glycine max
gaggaatagagagctatcaattaagtagcctctttctcttttctcagagggatgacacgaactaccttggatttttcttcaacctttcaacgccctcacccaacagcaatcatcatgccctcaccctccctgcccttctctctgaccgtccataaccatcatcatcattaccccctcaaggctcccatcccttattcctttatcagaaacatcatcatcatcatccaccaaccttttgctcctcatgctgctgcttctgatgatgatcatcaccttcaccatcacaaacaccacactacagcacaagcccaagaagaagacgacgaagaacacagccaaggaagatccaaagttgctgctgcttcgctcatgcgcatgagaaaaaccctactttggtatctagctagctagcttcggcaacttacacacacacacacacacacacatatattgagttgtgagttaagggtcttggctcttttgctacgaggatcccaactactcacactcttggggaatcaagcgtctcggtccgatccattttctgttttgtttttgctacaagtatattaatttcatgttataaactaattaagtagccttttttttttcttttcaattttataccaatttttagtttcaaggattgtgttagtttgctttaccaccgtcttgcttctctatttctaagtgtgcaactgttctttgtgattga

SEQ ID NO: 32830 - DNA, 479 bp, Glycine max
accgaaaactggttcttgcttatcattcaagttttgcttccactttctgtaaatactaaataccagaaactgtggatacaaaattacaacacaacacaagacataactctggattatcccaaccactcatacgagttatatcctcgagttttattcattcattcattccatataatgatataaattacagggaaatacaaacaaagacgcacatgagaaattaaacagaagcagcaagaagagaatgaattaaattcaaggcacaatcttataagccttggtcttgtctatccaacttatgaacgaattcttggagttcctgaatcccaaaaacccatgttccttggccttgttcatgctatccaacattccctcccctgagaaaataagatccacaaaccaccaatcagcaacctcgtcaagcttggtaggcagaagctgattctcactcacaatctcatcccaaacaggacccttat

SEQ ID NO: 32831 - DNA, 238 bp, Glycine max
aaagacaaaaacacccatttaatcataataataattgaagtaaacaaatgactaaacaaaactaaaaaataatcaaaaaaaaaaattttcgcttatattccacccctacccaattgctaagctatctttggtatttgatgacacaaacatgactttttctaattaataaaaatttacaatgcagatacggagggaaccatttctagatttcattgggagcctttcccctgtgttcctc

SEQ ID NO: 32832 - DNA, 591 bp, Glycine max
aaaaaacaatttctgatttattctgcaaaagaaggtagcttgctgtaatcaattgtttattcaaatgtacaacgcaagaaaaagaaaaagaaatccatgaattgtaaattaatttatttaattaattatttctttacttttccaactttttttaatagcccacgattttcaggcggctaatataatataaccactacgcaacaacgcgggactacagaaaaagggtccacccgcgttatcctgtgatgccgccgcaccggatcgcgctggtcgccggaatattcctccgccggaaaactgccgagcactccggcaactcgccgagatcggcgaagagcgactcgtcctcttctctcatcggcaccgccacgtcatctacctcgccgcagatcgggctctctaggacgccggtggacgctacgtcatcgaaccagccgaagtggtggtggtggtggctgagaagaaccgccgcgtcgccggcgagttcgaggtcggagtctgtcgcgaacaccgtcatctcctcctccggcggaaacctggcggcggactctatcggcaagacggatgcgccgtcgcttacggcggcggaag

SEQ ID NO: 32833 - DNA, 508 bp, Glycine max
  unsure (1)..(508): unsure at all n locations
aatcaactctncggggattttttgggaacctatctctgtgttagatggagttcctgttgctatcaaggatgaaatggattgtttgccatatccaactacaggaggtacgacgtggctgcacagagaaaggccttgtaccgatgatgcctgctgcgttaagcgtctgagattatgtggcgccatacttgttgggaagaccaatatgcatgaacttggggctggaaccagtgggatcaatccacattatgggcctgctagaaacccatatgataccaataagattgcaggaggttcttctagtggatctgcttctctcgtgtctgctggactgtgccctgttgcccttggtgttgacgggggaggttctgtgagggtgcctgcatctctttgtggtgtagttggtctaaaaccaacttttggccgtgtacctcattccggagtccttcctctaaactggacagttgggatggttggaatactagcccgcactgttgaggatgcattgatc

SEQ ID NO: 32834 - DNA, 295 bp, Glycine max
agttgggaggccttttgcattgaaaaggggaaaaaagggaaagggccctatttacctggatcactctactttgggagatggataaaaatcatctacaattcagttgactaaaaatttaaatagaaataattttctaaactgaatcaagggccggaatcaccaaactcaataaacaagaacttcaaattttgagaacaaaaaatgtcactcagacctccataatctggttctatatggacaaacttgctggcaataactacactacactgcacaacattttcctgatcaagtaaaa

SEQ ID NO: 32835 - DNA, 409 bp, Glycine max
ataattaaggttttataataatatcaatgggccaaagttagcagaaataatccaccgcatacaggtggctaagggcatgcttagttaaccatttaaaaatacttttggtacacccaagacaccaagcctcttggaaacaagattctaggaccctttaaatccaagccatgtttagcgggtaatctgccacaaaattagtctccagcaaactcttgcaccaataccagagtaacaatgagagggaggacaacttacattgaggatactgcgagctttcaacaaataaactctacaaaatgcacagttccaaagtgaggactgatgtaattcctatgctgcgacaatgaatatggcttcatttatgggcatcgcatatatatttgcaactgttaattttgaacagaaaaat

SEQ ID NO: 32836 - DNA, 545 bp, Glycine max
gagagatcgagagtttttcaaaaaataaaaaaaagcattcctttttttcccacactcacactcactccactccattgagaaagttggttgcagcagcatgatggaggaagaagaagaccagcagaagcttccagatctggtgaaggaactagtccaccgcctcctctcccaaaacctccccccaaattcccctcccctaaaccctaactcccccgaattccgcaactccctccgctacgccctccgcatcctctccagccgcctcaccccctccgtcgcccccgacgccgccgccatcgccgactccatcaagcgccgcctcgctacccacggccactcctccgaagccctctccttcgccgacctcttctccaaattctcctccaaagcccaaagcgtcaacaacaaattcgccgtcatctacctcctcaaaatcgtctccgaagatcgccacaccaccaccgcaaccaccacccctctcctccccaacctcagtttctccgaacctacctccaacaaaaaaccctggaacgacaacggcgccc

SEQ ID NO: 32837 - DNA, 361 bp, Glycine max
aaaaaaaaaaacccaaccaaccatcagcttcttgattgctcattttctccgtgcttggtaaattaaactcatcggatccctcttttgctggacataaaagaattcggtcgaaagaaagtcttcacacactcacatagatcgtcacacattgcattgtagaaacaacacaaggaaccattttgttgcatagctaatcaagttaattactagataatagagagaaaagggccgggaaaaagaagccgcacatagcattggggtgagtgaagcaccagcaagcggcgttacaaaaaccctcagacgatgttggctgggtgttctagttcgacattgctgtcaccgaggcacagattgaggagcg

SEQ ID NO: 32838 - DNA, 489 bp, Glycine max
ttgggcctggtaccagaccttgaagaacaaaataaagaaggttaaggtagagagcaatagggggcttgttggagggtggcaaaagcgccaaggccaaggttttcaccaaggttcagtgtagggttgggcctggtaccagaccttgaagaacaaaataaagaaggttaaggtagagagcaatagggggcttgttggagggtggcaaaagcgccaaggccaaggttttcaccaaggttcagtgtagggttggccctggtaccagaccttgaagaacaaaataaagaaggttaaggtagagagcaatagggggcttgttggagggtggcaaaagcgccaaggccaaggttttcaccccagttgtgacacgtcattgctagctagctaactggcgtgtgtttgggacgcacccggactggcctatgccttcgtcggggataatcgtcgcatgcccaaaatttgcctcggatttaatggaagtcttggctacta

SEQ ID NO: 32839 - DNA, 622 bp, Glycine max
  unsure (1)..(622): unsure at all n locations
nnnnnnnnnnnnnnnnnnnnnnnnnnnnnnnnnnaataaaggggagtgaagctaggtagatgaaaagaaaccaggagagatcggaataaagattaaggcgtggacagaaaaggagacaatgcgcatactgcgtggtggctgaattgaatagcgtagatttaaagagggagaacctggcaacccaaacgcctgtggagtacgccgccgctgactccgagaccgcaccttatgctaacatgtggtgtgaactagccactatatcggcgcagactgcagaggtaacatcagggcccgtgtgtgtgggctaaatatggccaagttctggttgagcgttaggctcagcgtataaatcaaaatcatcggtaaaatcttcggaatatactcagggtttgtcactttctgtgacaccagttaactgtccaaggttcacgtggatcgatctcgctagctcatcggtagactgtggtgagacagcgtattgaaaggtaaggtatgccttcgtcggggataatcgtcgcatgcccaaaatttgcgtgggatttaatggaagtcttggctactatagtttttgggtcttactgctcgaagactcaacacgtttgtattcagtctttggtttaat

SEQ ID NO: 32840 - DNA, 510 bp, Glycine max
tccaaggaaggtttcccgtcatcactgtatgacgtcctccttctttgggggggggggggggacaattggaggggggagggagggaggctcgaactgctgcgctgaaggcggggggtgttggcaagggcagaaaagaaggaggcaggtggatacgcgataacgtacacccgaggggagacgataaatagaaggtgcgcatggctcgcgagcaggagctaatagagaaggtcctggggttagtaagcaagccatgtagcaatgtggtattagttatacgggtgggggtgagcacaacggcactacctggcgcaaccagagtaagcgcacggcacagaagagcgcggcgtttgacaagacctgtgtgtgattacggtttgtatggtcctagttatgatagttctacggcttagccacgaagttggggctcagcatagtgcggcatttaacaagccagggttattagcgttattaagcctaatggcgttaagggggggctgcaagttaaagtgt

SEQ ID NO: 32841 - DNA, 626 bp, Glycine max
tcgctacgcgttctcatcgatggtggaagggtctcttgttacagaaattgatgacaaagtctgccattgttattcagtcttgtgctcgtgggtggatagccaggcgaaaggctactattcagaaacatcgtattattgtcatccaatcccactggaaaggttaccttgtacgtaaagagtcaaaagaacagttattggatttgcgtttgaggatgcagaagtctgctagaaatgtggatgacagcaagcgtctcataaacagactcttggcagcgctttcagagcttcttaatatgaagagtcttagtaacatccttcatacttgttcaacattggatatggctacaggacattctaagaaatgttgtgaagaacttgtggctgcaggggctatcaacaccttgttgcagctaattcaaacagtcagccggagtatacctgaccaggaggttctaaagcatgctttgtcaactctccgaaatctcgctcgctatcctcatctactacaagtgttgatccagagtcgtagttctgttcagataattgtcttggagttattgaggaataaaaatgaaggctatttcgttgcttctgaacttttgaagaagatatgttcaactcgggta

SEQ ID NO: 32842 - DNA, 513 bp, Glycine max
  unsure (1)..(513): unsure at all n locations
gtaaacatcacatgtaagtatccaatcaccattacatatccttactctgtggctcaatgcgcaaacaaatcccgatttagttacaggatttacaattaattatacatcaataaggtatagcgtgcttgtaaactcttgagaagtaagaaaatacaattcagacataaaaatcatatataactattaatttcttaaaattacatccaaacatgttgtataaatgtgaaaccaatcacgataatagtgacttactatttgatggacataaaatgtaagcaataaaagcctatgagagaatggatcatctgggagactttaaagattcaatttgagatttgcctcgaggtcctctcattctaatgaagagtctgtattcatcgcaggtcattgctgggtagagtgagggccttttcggtgttacaagctcttttattggttctatgggtatgtcacttttggggttgtagaaaaacgcaagagagactctctctttatctgaatntactatcactc

SEQ ID NO: 32843 - DNA, 618 bp, Glycine max
ccctcgcttccgatcttgtcaagttcattaggctgggtcaagccaaaggcatgttggtcactctcagggttggtcccttcatccaagccgagtggaaccacggaggtcttccttattggcttagagaggtccctggcatcatattccgctctgacaatgagccctacaagtttcacatgaaagccttcgtgtctaagattatacagatgatgaaggatgagaagctctttgctccccaaggaggtcccatcatcttggctcaaattgagaacgagtacaatcatatccaacttgcatacgaagagaagggagacagttacgtccaatgggctgccaatatggccgtggccaccgatattggtgttccatggctcatgtgcaagcagagggatgcccctgatcccgtcatcaacgcatgcaatggtagacactgtggtgataccttcgcagggccaaacaaaccatacaaaccagccatatggaccgagaattggactgctcagtacagagtacatggagatccaccatcccagagatccgcagaagacatcgcattctcagttgcccgtttctttctccaagaatggaaatttggtcaactactatatgtaccatggt

SEQ ID NO: 32844 - DNA, 747 bp, Glycine max
tttggttggtaacatatagctacctttctcacgaacaaattttgactcactgaggtttgttatttttatttcttctttccatctccatggggaattgcttgttcagctcgtacgaaacgacgacgacgacggtgaaggttgtagttcacgacgggaggatggaggagttctcatacccggtgaaggtgtcgtatctgctgcagctctatccggcgtgtttcatatgcgactccgacgagatgggattcgacgacgtcgtaacggcggttcacgaggacgaggagttgaggcccggtcaactctacttcgcgctcccgttgagccgcctcaagcgtcacctcccgccgcaggagatggccgctctcgccgtcgtcgccacctccgcgctcgccaaatgcggctcccgccggaagcagattgtgtttctctcctcctgcgatgtaaatacgaagcctggccggaaagttgcgccggaaggtacggtcggtaataatgacgtggcgaggaaaggaaggagtaaaattggaggtaggggtatgggcaagttcacggctacgttgagttccataccggaacaagggtagttttggaaagagataaaaatatgtgttcgctggtaattttttgtatggttgtatatattaaaaaataaaaaagaggaaaaatatatattaatttttgaacattgtagatctgtttcattaaaagtttagaacaacaattgaattgaagtatacgcgtttgatt

SEQ ID NO: 32845 - DNA, 537 bp, Glycine max
caacaaatattagtcaatagtagggggggttattatcatttctcttctaacaaaagccacagcttttggcaaagatcccaactgcttacgaataaactgtctaccaatttgcttaagtgcaagtaaaacaaattttgtatgttggtatgctatcatcactgtcatatacaatccttgaaagcaaaaatagtgtaagttcatgaatagtttttacaaggtggcatctgaagttaacaaacatttcatccaaaatgtgtgagccagaagcaatgaatgatcaccaaaatgtcatgccctctgatgaagcgccactataatatacagaattggccttggcagacggattagaaagcaacttaatgcttagaaatcctggggatgaaggaacattatccagctcatgtcaactcaagctttttctttggaagatgatgatagtaaatgatttaatgttgctgcttgaatgacagcacttggacttggttctctcacacgggaagaagtggctcctctaaggccaaaattcttctccacatt

SEQ ID NO: 32846 - DNA, 345 bp, Glycine max
gagcagttggtttctcatgcagctggttctcaaatgctacagcagatgacaaggttttaatgaacctctgattttggtcttcatgctgctaggtttgattgcctgtatgcaggtctgtgaagagatcgcttgctgaatctgctgtccctgcaagcgaactgtaattacttagtatttagacatgaaaaatagttgttaaaaggatcccagttattgactacctcttgttatttgccccaacccctatatagtcatctcgtttcgctgtttgagcctaattaattaattaattaattatggatttttaatgtacattggtgcctgaatcgagtttatttgttgtct

SEQ ID NO: 32847 - DNA, 628 bp, Glycine max
atttattttatcctggatgggcatggtctttggccacttggattcttggtgtaccttattcccttgttgaagctgttatatggtcttgtgttgtatactacactgttggatttgcccctgctcctggaagatttttccgctacatgcttttgctatttatgcttcaccaaatggcattaggtctcttccggtttatggctgctcttgcacgcgatatggccattgctaatacatttggaacagctgcattgatgattatcttcttgctgggaggatttattatcccaaaaggtatgattaagccatggtggatttggggttactggttgtcacctcttacctatggtcaaagagcaatttcagtcaatgaatttactgccacaagatggatgcagcattcggcttttgggagcaacacagttggccttaatattctcaagggattcgatataccagctgaggattactggtattgggttggtttgggagttttaacactctacgctcttattttcaactgcttggtcactttgggcttgtcctatctgaatccacttcaaaaagcacgtgccattctttttggtgatgaagacgattcaaaagagagttctaataaaaatggatctaa

SEQ ID NO: 32848 - DNA, 552 bp, Glycine max
ctctgaatgggggcttctcttctttgttcgattttgacatgaactatgataatgaagcagatggtggctatgatgcttctgctgcttctgagcagtggaacttttctgaaggtgtcaagtcgtcatccttcttgcaagatgatctgcaggaggagcatccagttgaatctcaggatgttaggagcaaacagagggctcaaatgctagaagacttggaaacagaagccttgatgcgtcaatggggtttgaatgagaatgcttttcatcattctccaccgaaagattttgctggttttggaagtccaattcatttaccacctgaagagcctcccacattgcctcctcttgatgatgggttgggcccttttcttcagacaaaagatgggggttttctacgcactatgagtccctcaattttcaagaattctaaaagttgtgggagcttaatcatgcacgtatccaaccctgttgcggtacccgcagaaatgggttctgggataatggaggttttgcagtgtttggcatcagtgggtattgaaaagctctcaatgc

SEQ ID NO: 32849 - DNA, 607 bp, Glycine max
caacattgatatttcattacaatattgtttcactaaacatataaggatttaatagttaagattcacctcttatagaagaatagctatatgatttaatgatatctctctctctacacacaaacacaattaaatattatctactaaaaaagaaaaatgtaaatacttataatataatcaatcttataaaaactaatattgaaatcttcattaaggagaacacattaactacatatattccaatccagtacacaagaggggtacagaaggattattatctaaatcatgattgaggttgaggtgtgggaaaactacatataataagggtattagaaatggaaggaatgactttattgcttgtagacctagagtgttatcattttatggagttggaattgccttgtgaattggaaatggtggtagaagtggtttcttaaatttgggattaagaggaaattttggaagaggctttttgaagaaaggctttggttttaaaaatttctctggctagatagcagggatgggtttttgcactataaatggttttgatataggcttaacaatggaaattggctttggaattggctctaaaatgggaattggctttggt

SEQ ID NO: 32850 - DNA, 410 bp, Glycine max
gcaaattaatgagattgtacatttgcaacatcattttgctgacaaattaagaaattgttttattgaacaacctctatgcaggattcctaggacagaagtgtttcactatggcttctctagctaggtaccatcttgagcctgttaaattgaacaggtgtttttgttgcagtattagatgatatctgctgagtaaatatcttggtgtacaggtgtgtgtatatatatatatatatatatatgtacacatttgtatgtgtgagacgagaaaaattaggagagaaaggagaaaggaaaggagattcttagactaaaatccaatgggtttagaataagcttggaagtctttattggaattctgttgttattttttgttttaagatttttttactttaatcatgttaattctcaag

SEQ ID NO: 32851 - DNA, 461 bp, Glycine max
acaaaaacctgaaaaagcctttgatttcacaatttcaccacaaagtttggtgcattctaaccgatcgacaaaaaggatcaatcataataattctttcaacccaaagtaagagaaaaaaaaacagattgaatgaaagaacatacaagaaaagtctaaattatttacaaacgatataaataggggaaccggaattcctttggctttatcctctatgatataactataatataagggtacattatatcatatgtaattaaaaaaccagccaaaaaaaatgtcttctgatgacaaatcatgaagaagctatttgatgagcttgggcctgtccattggggaagggcaatattctgggcttgctgaaagacaattccactgggatttgagaagcattgttgttaacggtggtagtttggttagttgtggtggaatttgtggcaaccctttcacaagagggacacatg

SEQ ID NO: 32852 - DNA, 519 bp, Glycine max
agaaaaagcagagaaactcatgttgactcatcacaattcccttaaccttccctctctctttcctcttctgcattctaacacgcctacatcgtgtctgctaccgaatggaaactaagttgtgaaatcatgggcatattcagatgtggggccttgtttttccatgtgctccttttgtttagaacctgcctggccaaagatcaacatgttagtcagatatatcctggcttcagtgcatctcagccagattggagcgaccataatggttttttcttgctatccaacagctcagctttcgcttttggattcttcactactcttgatgtttcatcgtttgttttagttgtcatgcacttaagcagctacaaagtggtttggactgccaacagaggcttactcgttgggacttctgataaatttgtgcttgaccatgatgggaatgcatatttggaaggtgggaatggtgtagtttgggcaacaaatacaagaggacaaaaaataagatccatggaattgcttaac

SEQ ID NO: 32853 - DNA, 489 bp, Glycine max
ataaatagggaactgcaaagccatttatttatttttgaaatacttgtacaaatctttgtaacaccacgcacgtcgcaatacaagttaatgaagaatatgcatgttttcaaccacagtcaagtcctttatattcttgccatttacttttgatttcgatttataggtttctgttctatttatgcaatttttattccttcctacaattttttctccaaatgacaacaatacgaaataaaaggaatggccatggcccaaaaagtttaccttttcgtatgcacaaatgcactacaaccctttttgaacaaaatggaaagtacaatgcatgaaatgaaatcagctgcaacaagtcccagtttaaatcttgaaatatttgtaaccatactcagggcttgtcatcccctcttcccaatcacccatgcggcgaccaccaaaaacaatttgttggattccatgatattccgagctcaggacagttaggcagttgaggag

SEQ ID NO: 32854 - DNA, 176 bp, Glycine max
aaggttacgtgctttgctataatatctttggatttaagtaaggaggaaaattgttattatttgtgccatatttgttggctgaccaagttgaagtgcttgtgtattaacggtttgctcatgggcaatatgacctgtaaaagatgcatactcgaagtaaaaactattgctgtaatctt

SEQ ID NO: 32855 - DNA, 400 bp, Glycine max
ggagattctgaatgacatccatgtataatataaacccaacgagttcaaatatacaaccaaccaataaattctcacccgggaagaatgcctagattttgtatctgttaatatattgagtatcctttaaaagctacagctaaagccaacagatgcatccaattgcccccaccaaccaataaaaaccaatcactctaatcccctgtgctccgtttctgagacctaaagctgctaccaatattctttacaatcaaaagtcagacttaaagctatttccttaaatccttcttttatgcatcttttcaaaaacaaccatcaaaattgtgcctttatcccatgctggtgcctatagtgtactttttaaacatcattctcaaaacatacttctcttttctcaaaaggg

SEQ ID NO: 32856 - DNA, 300 bp, Glycine max
aagccctaagcaatctaaaaacgttaattgggtggatagacactagtaagtagtcattagtcaacctgtcagcatcagggagtgccaaagcattcgctaaattaagaatgctagcacaatattttcaggtgtataccttaaaatagcattcatctagtctactagagaagatggaagagtaactagagatactaacccatactacaactaaactagcctaactgataactggagaaaataatgctagcaacatgaagatgattaccacaaacgacacagctccttgatacacggcctaaa

SEQ ID NO: 32857 - DNA, 440 bp, Glycine max
tctgaatcgaatatcgttgaagattcaacattatactcagaaattgagtgttgcgaccttatgaggcggatacatgaaggaaacaagtcaacaggggggcttaaatttgtaacaacttgctatggaatcatcgggtttatcaaatttcttgagccattttacatgctgcttataacaaaacgaagaaagatcggcacaatctgtgggcacactatatatgctatcacaaagagcgaaatggtcccaattcctcatgctactgtgcgatccaaaatggcttattctaaggatgagaacaggtctttagtcaatcttgcatgtaatcgtaatgcgtctatggtacatttaaagagacatgtagacagtagcattgagagctataccttgtccattgtacttagatgttatgaattacaattttttaatttgagttcattata

SEQ ID NO: 32858 - DNA, 461 bp, Glycine max
gaataaattaatttggtttagcatctattcatccatttcaatctcgttcctgtattcgtctgtcattcccttggtaacattcataaagacaagattacattcttgaataggaagagaaagggggggtagggatgatacacaaactatactatggtcaaaacaaaaatgccaataattaatgggtatatatatggcttataatcctgtagctggtaatttcatttgaatggctagccttctctttcatcatcttttggtcttgttgaagagcttgaacctgaggccattccaatgacttggctggtgtgtgaacctttgtaactgaatcatgcgcgcataaatcccatccgggtgatttttcaacaactgtgaatgggagccttgctcggctactttcccatcatcaatcacagcaatcagattggcattcctgactgttgatagcctatgtgcaacgatga

SEQ ID NO: 32859 - DNA, 376 bp, Glycine max
caaagaatggtattactaataccagaatgtacttttataattatttatatacaaagagaacagttgtggattccacgtcccataataaggggcttttcttagcatccaataaggtgaggcataaggaagacaggcctagccttaaaaccttttcctcaatcagaaacatatatgtttctcttcttctgatgaatgaaatcaattctacaaaaatcagcaatatacaaacatatttcctatttgacaattcagctaataaatgaatgaactggctctttggatcttatcttcctaacataagctcaatctatacgtcattgccacatggattgatgctggaatgtgactaatggcggggtaagtgaatgaaaagtgt

SEQ ID NO: 32860 - DNA, 328 bp, Glycine max
aagctaaaaaaaattcttaaatttaacagattaaacaaacgggtgcaaactataatgtactaattcacattatataaaaaatgggtatagacactgaattaactgtactagaactaccacaagtcctctgtcttgaagggactctgttgtttctaaagggtttaagggcttttcaatactaggaagctttccaccacataccaaaccatttttaccgggatggtttctttgctctgaagacaccccacaagtagtacttttcttgaaatcttcggcattgaatagggggtaatatagaaggaaaaattagaagctctgcattttcaac

SEQ ID NO: 32861 - DNA, 415 bp, Glycine max
tgcagtttttgctttatcaaaaactgcactattaggaaataaaacagactttttactaaggtgatataaccagaaatgctgccgacggaaatcaatgagggtgaccgacaaatctagtcaacataagaaatgctgctgctatccgcttactcaggcaaaaacaaaaagtcacatagcaaccctgcaaagaacaggcaatcgacatgagaactattatagatatattggggaatgcgaacatggcaagactgtgtttgcgctttcttactaacatcatccaaaactgctactggagacattatcactgttagaccaccttctgaaggcacccggtactaaatttctaccagccaaaaacccaaaccttgatcttaacattgtcattcggttgttattattacttgaagaagcctca

SEQ ID NO: 32862 - DNA, 492 bp, Glycine max
ctttgaagttcacacacacttgttcacccctgaaatggaacacaacctcacaatgaagtgtcgtagaaatgaaaaccttctaaccagtggcactcatttgccagaaagccctcgagtaccaatggagtttctgtcaagatcatggagtgcctcttctcttgaggtctctaaagcccttacacttccaccacctccacctctttcttcttacataccttccaagcctcctaatgcaccctcttctgtgactaactccatttccgaagaaacttcagaggaattctcaaccatgtgtggcaaccagttctcttttgcttcctctgccacctcacaacttgtccttgaccgcataatgtcacagtccgcaagagaggaagtgtctccattaacgtcaggtagattgtctcatagtagtgaacctttgaacggtggtgcttctttaaccggaacggatagtccaccaatttctccttctgacgagtttgacgatgt

SEQ ID NO: 32863 - DNA, 482 bp, Glycine max
aaaaggagattttttttttattattttcactctaggacgatttttttttttttttaatgcaagtcatttttacattaaaaaaatggaacgggtacttagcaaaattgttaaataattagcatttacaaatcacgagatagcacagattttcttcaatgaggtgaatttgctctatcattaaccaaaagaagaaaagaatatatataattattggaacgttctgttgaagttgctggtctatctggtagtgtctccataatgattggcattactcagctcccatcaacttggatatatctccaaacattcccatgggggtccttcgctgtactccaaagaacctctccgcaatatcatctagcatctcattgaacgcaggctccctctcaatacttggcttaaaatttgctctcaacatactaaaaagaggcaaagcatctttttccaacgtttgcaaaagatatgcgataaattgcatcaac

SEQ ID NO: 32864 - DNA, 439 bp, Glycine max
aaaataaaaagtcatccaaattattcattgatttcatgcctgggaaacctgtgttttaattacaaagcgacattgcagttgtagagtacaataggcacttttttttggtaactaaacatttattgctacattgtacaatagaagtgtcctttctcatacttgagtatgttttgacaagctatgaaagggggagcaactgaaccgaatcagaggtattgccatacccttccataggttctaaccgccactcacttccatcataataggaattaggcaaacccagccaaaacttaaacgcctcagcagcccttttcctctctactcttctgtcttggctagcccttgaagcatgcttactagtaaacattcttgaatgcattcccacatacattctagtaaacttggacttgttgggaggtatcccattgtacttcatgca

SEQ ID NO: 32865 - DNA, 446 bp, Glycine max
cctggaaatacaaaaagttaaaacaagtcattacaataactttttcgtcccaaaatagccataactttgttgactaccaataaatcaccctttactagaaattactaccaactacattcattttcaatcctaccactagcgcttttttttctcttgatgtgcaacagtgcttctcttatcttccttttacacaccttttttcaagatttgccttgatcttcacacaaggcattcctccttatataccagccaatttccccaacctatctctcaaaatcttcagccccatgtacctgcccatcatcatgacagttgcttgaggatttgttcctggtgattcgtcaaatgttgagccgtctaccacacgaagtctgtcaacgccaagaaccttgtaatcagggctgactaccttccccacatggcaccctccatggtagtgccaaatt

SEQ ID NO: 32866 - DNA, 581 bp, Glycine max
cttaatgatatggtattgcagggaataataaaggaagagcaattggatacttttaacatccctttctacactccatccccatctgaagtgaaattggaagttcttaaagaaggttcatttgccattaattgtttagaggtgtctgtagtgcactggagcgcttgggatgaatggagtgttcttgactttgaatctgaaagcggatacaatttgacacagagcatgagggctgtggcagaatctatgctggttagccactttggtgaagctatcattgatgagcttttcagccgttaccaagaaatcttggctgatcgtatgtccaaggagaaaactaagttcatcaatgttcccatattattgactagaaacccataagcaagaagtttgcatctaaagtttctcaaaaggtttgtcgttgtaattattgtgactgtttgcttgatttgttcttctttttctagcaaattataactacgagtattctggtgtccctttggtagtagagctttcttttatatattttctccattctgttataaaatattttattacgtgaaattacgatacgtgattcgtct

SEQ ID NO: 32867 - DNA, 607 bp, Glycine max
cggcggccgcccttttttttttttttttgaaaacaacatatatatgttttcccatatttataagcacaatggtgttttgttgtaaggtccatataagggctaacaaagtgtagtaatgtgacaaatatttgaattctggtatgcttatctgaggaaaacaaaatgacagtaactataagaggacttgcagtgatttgaaacacaatattatataaaattaatcgcgtttgattggagtagcttgaactcgaagaggctgaaccttctttaatgttatcgcatattgctcctccatgttcatgtgttctggaattaacccatcagctagcttccattcaaagttgtgtacaagggatgctactattaaatgcattgtcctgtgagctaatggcaatcctgggcatatccttttaccagctccaaagggtatgagcttaaaatcgtgacctttaaaatcaatctcacatttcaaaaatctttcgggcataaaaattgttggattctcccaaatggttggatctcgtcccatggcccacacatcttggcaaaatgtgtgcatttttaggcacattgaagccagatatgtttaccatttcatcacacttat

SEQ ID NO: 32868 - DNA, 531 bp, Glycine max
cggccgctttttttttatagcaaatggtgtgacatatcttcattacatgttaatcagggggtctacaaggatgcatgggacactagccaaataaaaataccaatatctaaagttctaaactaaactttggaaaatagttgctatgtattaatgctttgaagtacaacgtgattcatgtttaggcaataatgtcttacaaagcaattacttttcagcatgcattgttgtggttgtggtgcaatcaccattgcgtcctttctcagtttcataatgtgtcaaccgtccttcatcttgttctagccgaaaagtatgaccaaaattgcaatttttcctttccaagcgggaatcaataacacaaaccataacaatggtcatagaattcaaattaaactaaaatccccaattatttacacaattacactttctgatccttcacttcactccctaaccccgaacccaacttgctgacccataataaacccaaacccgaatgggtcacctgagcccggtaacaatcgggtatctggattc

SEQ ID NO: 32869 - DNA, 422 bp, Glycine max
ccaaaactgctcgactatcattttcatttttgtaaaaacaaagtcaaaacttcaaaggttttaccttgggaaaacagatagaaaacagagaatgaaattgaactacaataaatgttccttatgcttctatggataaaaataaattacaaaatcttcccttattcggaatcagaatctgggtctccatccacaatatcaggaaaatcatcttcatccgccagtgccttgtcatgttccaattgaaaagcaaattcctcaaaaatatttttacagcctgaggttctatgccataaactaccactcggagaagcgaatttgaagtctttattagccgagcttccatgtcttgattccatatgactggcttcattatgaggaatggagttgtctgaaacaatcttctcagacactttatcatcagc

SEQ ID NO: 32870 - DNA, 511 bp, Glycine max
aaaaaaaaataatcttattggtgtgaattactttttaaaaaaatcagatgactttcttaaatgatcatatgtttttttaaaagaaaaattgtaatcttgaccaatgacaattcatgttctacagtacagcccagattcctcctctcaatacttttttagcaaacattgaaccttggaacaggctacaagcttgtggacttgtggtcattaacgtctataggggtgttgagtcaatactttcattatttacaaattccatagcggagaagtgggcgggggctgcatgtctgaaactcgttttggtcaccaaattatgtacgtgtgaattaatcaacaattaacctttgaaatgatgaaccacaatgtataatggaacctacactcgagggattagttgctgttggtagtttatgattggacttgccatttaaaaaattgggatcggtatacgaagtaacttaaccagaacggcaaaacatgatcctgaaaatttcaaagatcattattggcg

SEQ ID NO: 32871 - DNA, 468 bp, Glycine max
  unsure (1)..(468): unsure at all n locations
gagaaggacaatggttttatttattttntgagttttctccaactcgcattctcaatttctcacacaatgcaaacaataatatttagaacacatatatacacaaacccagataattacatgctgtagcaacgacaattcacattctccctggcttcatccggagattatataatcaacaattggcgaaattaaaaagacattaattaaacatgacaaacaaataactaaaaccaatatgtacaataaatcagcacccatttacatcttcgagttcaggcaagggaaacctgagaattgccgcaacacccgtgagttgagcgagttgcggtgcagaaacatgcatcgacgaatacaccaaagcctttcctccaccctctttcaccgacttcaccaaactcgcggacttttttctcgtctcaacatcttcgttcctataaagatcatcggttatcagaagtgtctcaatgg

SEQ ID NO: 32872 - DNA, 504 bp, Glycine max
gatttttctggaatgtacaaggttgggtttggactccaaagtaacaatacaacaactaatgctgtgctttgttctgtgcctaatttcactaatcaatcagttagcaatcacatgaatctagaaggctctggtcagaaaagtctttccattgatttaaagcaagtgtgggatgcctttgcgtcaactgatcaaaggatagatgatgatttgcttcaggccgcccttaagattccatctcttcatctggaggagcatgtgcctatgggtgatcacatctctggttttgttcaagattgcctcagtaaagatcttactagtcaacatatgatgaaaatgaatgttaagcatgcagaagccgatgctcaacttccatcaggtgatgacctcttcgatgttttgggcgtggatttgaaaaggagactactcaatggaaaccggaatgagttgctcgccactgattcagatgccatcacagaacatctagataaaaaggcaacacacatg

SEQ ID NO: 32873 - DNA, 481 bp, Glycine max
ggtaaggggctatctcaaacaatgatttctatatatgcacaactaagcttctatcttaattagctgggttgacacaaacctaggaaaacgcatcccagtattaaacaaagagtaaagtttgtaaggagaactggtaatggtaactcaagaaatcatttttcgggtatatccattaggaaaacaattgtaagtgccatgttatagagctgccatcattgtccctctcgcagcctcacgctttaaaactgcagccttgccactgccacggaagtacatatatacttgctgtataacccagatgctcagcactgactcgagacagaaaaggccaaatccaatgaagtagaatatcccaaccaatgcattgtctcccaacacatcaatcgcagccaaaatgcctgtgagagattttcctttgaagataattggtggagcaactgcagctaaaatgcaaaaggcaatgtgcaacatgtaaagcaag

SEQ ID NO: 32874 - DNA, 655 bp, Glycine max
ctaaaattatagggctaaggctatcaagttcaaaggcaatggaatttctcaggtgccctgtttctgcatttttattcccagcgttttgctttattattttctttatcttctttccttggaaagaacaaaactatgctacacacttccctcctcctttggtcctttccactattatcaaagacttaaacaaccacacaaatattataacctctccctctccctctccctctccctctccttcactacaaccaccacctctcctcccacttgagcttctttccaattttactcctgcaaatgaaagctacaataacactactgttttaagtagcactattatgaaatatccaagtttggagaaaatagaagaaggtttagcacgagcacgggcctcaattcaggaatctatccgatcaaggaactatacttcagccaacagagtaaattttgtccccaaaggatccatttacctgaatccacacgcttttcatcagagtcatgaagagatgttgaagagattcaaggtgtgggtgtatgaggagggagagcaaccattagtgcatgatgggccagcaaatgatatatactccattgagggtcaattcattgatgaaatagacaacgatgctaagtggagccacttcagggctgaaca

SEQ ID NO: 32875 - DNA, 363 bp, Glycine max
aatccttagaaaacatgtatcaatattttcccactctacaaaatttgacaaaaaacaaaacaaaggaaaggagagaagttccacgcataagcatcaatcaaatgatcaaagctaaacatgtgaaagatcagaaacaatcaataaaaagaagctaccaaactaccatcaagcaagtccagcttccagtccaccaaatgtatcatagagaggttggtttagagtctcgggaagattaaacgcaaacatccctcccactatcccacatgctgcaaacaccgcaaacggcaaataccctcccaaaacgaccacaaacggcgccaatatcgctcccatttgcgccgcttgagtagtacacccgagcgc

SEQ ID NO: 32876 - DNA, 462 bp, Glycine max
cccacacacagaacaagaacaactacaggaagaaggagaaagaaaaaaaaaaattccgtgattgcattttcagaggagtggataacaattgaggtgtggtgcagaatttgctggagtgaggggggtcccacctacccttcacattcattatcttcttcatcagagtctctttttaatcctcttctctattctgcaccatcccaagtattgtcctttgccttggttccattgtttttgtgaatcttgagggccttgtgtgggcctcttgctgctcaagttccaactagctagatctactttattctagctacacaccaattatatatacataagatttggagattctgcacaccaattatatacatcagaatctcttattatatagactcatcttccatctttttttttcttccatttttcaattccatttctaggtgctataaaacctgttatcagatcttg

SEQ ID NO: 32877 - DNA, 431 bp, Glycine max
agaggaacaattttcttgatactatatatccagcattaaagccgtcccaattattcatgcaagatgtttcgacaaattacattagaaaggttagtcattatcaagctgaaaaaaaaatgcataataataaaaccaattgtttgcaacagcaacgctgccacatgctggtataataatgcttatacctaacaatcgctcaaaattgatagtaaccccccaaaaaaaggaagaaaaaaattaagcgctcacacaaagttttgttctcatcatataggcacgtagcgtttcaaagcctgcttcgccgtgacagcgactccaaccacgacgccgccgacggcgcccgccaccgccgccgaacgcacccctctcgcggcgcgatacagcgcgccagtgccgagtccggaggagttgaggacgcggttgactcggag

SEQ ID NO: 32878 - DNA, 492 bp, Glycine max
ctcgaggtctctctaatcacttcatcataaatcaaaaaccctaacccgcgcgcgtgctcacttgtcatccctctctcttcttcttcttcttctttatcgtggccgccatggattccgaggtgcagcaatcgcaagtcgccgccatcctcggcgcggatccctcccccttcgagacgttgatctcgcacctcatgtcctcctccaacgagcaacgctcccacgcggaggccctgtttaacctctgcaagcaaaccgatcccgatagcctctccttgaagctcgcgcacctcctccactcctcgccgcacgaggaggcgcgtgccatgtccgccatcctcctccggaaacagctcacgcgcgacgactcctacctctggccgcgcctctcccctcacacgcagtcttccctcaaatcgctccttctctcctcgattcagaaggagaacatcaaatccatctccaagaagctctgcgacaccatctccgaactcg

SEQ ID NO: 32879 - DNA, 500 bp, Glycine max
tttttttttttttttttttgtaaagcttttaaacttaggaaatcaaattagaaataaaagatgaaggaaaaaagtaaattttagttacataacataacatgaaaaatggaccgtgcctatctccatttaagtatcagtccaagaagcaaaaactggcaagtgagacaaagagatagcaggagaaggcctcatttgaaccgttggtgagggtagccaagaggtaacactggtaccaatggggttcacaatctttgtttccattggaggcattgggaacagaagcgagggaccccttttctcaggactagcctctcttgagctgcttaaacttgtcaccagcgatgacgtgtttgaaaaatgagtcccaattttgctagactcgtccagcatattatgctgcccagaacccaccgaatcaatcccaataagatcttgtagggccatagaaaatgcactgtttctgtaatttccacagttcattattttttggtcactgccat

SEQ ID NO: 32880 - DNA, 752 bp, Glycine max
ttgattctggtgggacctgctggattctcatcagaatcagaaagaattacaaagttcttatcaacatggaaaggatcaatcctgaaccacatatgggaatctaattgtacacctcagaaaatcatcagaggtttaggtccttggggtcctgatatggtcctcaagtataccagtgccaggtttgttacatatacaactggggaaacgctgacagaatctgaatcgagattactgacagattatgtttaccatactttagcagccaaagctagtggcgagctgtgcttaaaatatatattttcatttggaggactcccgaggtcacctcttcttcacagtgcttcagagtggaaggtgcctaccaccttcatatatggttttcaggactggatgaattatgaaggagcccaagaagcacgcaaacaaatgaaggttccatgtgaaatccttagggttccccaggccgggcactttgtgttcattgacaacccaagtggcttccattcagcagtgttttatgcttgtaaaaggtttcttaggcctgatccagacagtgaatcccttcctgaagggctaacctctgcatagagtataatcttgtgtaatgctgtctatgattatatatttcttttacaaattaaactcctttatttattcaagccatgtcctattcatgcttaaatggaatttgcaattgtaacttgtaatggcaattcaaaaaataatgacgtctaatataaatttcattactg

SEQ ID NO: 32881 - DNA, 600 bp, Glycine max
ttttataacacaatacgacgtcgataagaaaaacgaaccctatcatcgccattggaatttggaagctacgaagtaggaaccatgacagcgctggtgagaagtggagtgatgaagctcactctccaattccaaaccccttctccttctctgtctctcttctcttcttctctctccattaccaaaacaccatcaccaccctctctcttctccttccgccaccctctttcccattcgacccacgcttccaaaacccccaccaccagccctcctccttcttcttcctttgaatcccagctattcatccctccgggcattgaacccgacgaggtcgacgactccacggtccttcccggctccaacatcgccgtcggaccctacgccggccattcccgcatcaaggacgtccagttcgtaaagagtagcgcccggttcgtaaagagtagcgcccgcgccagggattgcccaaaagacaaccgacctgaattcgccgttcttggtcgctccaacgtcggaaaatcctccctcatcaattccctcgtccgcaagaaagagattgctctcacttctaagaaaccagggaagacgcagctcatcaatcac

SEQ ID NO: 32882 - DNA, 453 bp, Glycine max
ggcgtgcccatcatatctacgggctgcactgtgcactgcttgctggtgatttacaaaattgcttttaaaaatgacattttctgatcaaaagagtgtaccagaggaaatcataaaaagagcagcagctgtgttggatgccatttcaaataataaccatgttgagcggttatgcaatgagaacgtctctgctcaagatcgtcaatacaaggatgccatggagaaattgttggaatttgatattgacaaaggcgacttaaaacttttctttgaggatgtattttctctagttcttaatgcttcgtgtctgaactgaagtcttctgttggtggttttcgtaggcattattgagacgccatttgtgatcatatgacatttgtttcaagatgagttgcatacctatcgaattctattgtattcagcaatccttttatggagaactaattgaaaaagaga

SEQ ID NO: 32883 - DNA, 419 bp, Glycine max
acccaccaacaaccataggttttttctgttcatatatctataatgaaatcataggcaatatttataaatatgacttactaaaatttgactttatttagacagaatatgaatacagaaagcaacatactacatatccatgcccgaatgaaataaacaaaatttgctggatgtgaaggaaactatccatgtccttccaccaaagcattcccaaatcccaaagcaataaagatagtgagtgacccttggattcaaaaacatttatttagtaccatgagaatataagagagagaacaaagcggctatgccatttaccaatataccccactacaccacaccactatgtattctatagcccctctttcattgcctaaaactaaggttttataatctgaccttgttgagctttatttctctagttc

SEQ ID NO: 32884 - DNA, 560 bp, Glycine max
gacagaaattaagcatttattctttaaaattaaattgaatcaaacacatgtttagtacacgaagaagacagcatgttcaataaataataagaataggagaggggagaacgaatgtgtgatacaaaattgtactcaattaatgtgtcactcaataaattgattagcattttcacatgaagccgtatatatgaggaatcatagcaatacagtggtttaaggggcattggagctatgatatattcaaagattactatgtaaagattgtagttgagacataacttcctttctgacttgatctctttttattttccctattgtagtgagtggaaatggctttctccatacaataaacatttttggtatcttaaacctgcttaaatgattttctatacagtattgctgaatattctttctagataggagaaactcttcatttgaagcagacaactgctctgaccattgccaattttctcttagttggatacatgctgctaccatctctgtcaggtgagcatctgggattcccacaacaacaacacttgcaatccctggatgttgct

SEQ ID NO: 32885 - DNA, 504 bp, Glycine max
gacaaaaaatatataacttattgaatattattcactttcaccaaaatctgtcattaccaaccagtaatctgatttcatgtctaacagaaaccctataaaccaatagtacgtcactttacaacaatttgtccctgaattatgtaaaacaaaaataatttggataatgtattcttattagtttacaaaccctaaaagcacactagtgctatgctataatcatatcgctatacagatgtcacgcttatttttatgaggtatcgaagatctaacatacaatttggttacaatgtctctagtggctagcaagtctcatcccatcatctcctttggaaattgaaggatttaattgcaaaggcaaatataattgcaaaaaatatgcagaagccagccaccataacagcagtaacgcacaagaaatcatgcctgtacccaaacacgtgtttgagtacctctcttatagtcatcgagtttccattagagagcttcactaaatgagtttcacca

SEQ ID NO: 32886 - DNA, 334 bp, Glycine max
aggaaatagaaaggcaatcttatatatgctcttgcacaaggctttcgtattgaataaatgcccttaaacattgacaacgtaagtatatacaaatgcttattcactatagacttcaaataggcctcatcctcaccttacatatctacaaaagaaaaatctggtcaaggagaatgtgtcaacccaagtcttttaagctggacatgggcaagcaggagcttttcctggaactatgggcttgacattagcacatttagcaactattggagctccattgaatgtaagagcaacgttatttagttccacattctcacatggtacacccttgctacatata

SEQ ID NO: 32887 - DNA, 459 bp, Glycine max
gattaaaaggccggacttatggctgccatttactttcttggtagtagattgatgagctttttcgtgaaagtgtgttctgagccagcgtcactcactattttcatttttttaaaatattgtatgttacgtgcttgtacctttgagtcttcataatttccatgtttttttactttaggtttgaggtctctccaagttattagcatgtaatatctcctgccattgttgtttatcttatataaaaatcttttgcagatttatgttgttgcatgagaataattgatgaaacaaatcaccaaatcgccatggctgttaacatttttgaggaaaatgtagaaagacttccccgtgttgctgctgttggggatgtaattgtgctttgttgtgttgaggtatttctgatagtaacctctgtatgtagagatatgtttgtttgctgtggttttctggtcctttcttgac

SEQ ID NO: 32888 - DNA, 733 bp, Glycine max
tcttgataagataaaactatcctcaaaagcgcacagatatagattacaatgctattacactgaacaaggttggttagatgacatattcaatatatcgcaatattggagatctctaaagtacaatcagccaaactgttggcttgaaaattggttaagaagagaaattcaagctcttatccaggaggaggatgttgacatcattttgcaccatatccttgctgtggtcaaagcagcattatggactaggagagagcagaagtcacacatgaatgcacctgaaaagaaacaggaggagttcaagatgtcagtctctgaagccgcaaggccttttctggcagcaagaacggacagatttgtatatgagattcaactatttcttgcttcgggaatgaatattgaagcttatgatgctgcttacatacaacggttaggttggagctcacctggggtaaacactgaggtttctcatagtgaattggttgatcgctcaactgtgattccatacatgcacctatttgatggtgactttgatgaaaatgagtagattctttgttctgtttttctcatgtatttgctgtaattgctacccgaatgaattgtataggagaaatttgctcacacaccaatgagtgctattgattctttccagctactgcagaagttgcaaattctccacccaagggtgtaaagttgtttaacatatgtttgttatcaatatcatattatattggtt

SEQ ID NO: 32889 - DNA, 446 bp, Glycine max
  unsure (1)..(446): unsure at all n locations
nnnnnnnnnnnnnnnnnnnnnnnnnnnnnnnnnnnnnnnnncagcacggcccacaaagccccacgaacaactgagaggtggatggcagaaaaggacagaagttatcgacaaagcgtatcagaacagttaaccgggttctaaagaatcaaattttacataaagggtttattgtattctgggtgggtccagcagcccagaagtaaaggcagagcaataaagcataaaaatactgctattgaaaggaggaatggaggtctgcagagggttatgggtggaatgttagggttggcctaatggtacaaggggtacaacttaagtgtgttggtaaggcagctaggggactgcacccgcgggtacgccaaaaacagttagtattaggggttatgcccatagtagtagagggagggctatgcttagagttaggctgagaagggctaaacttaggg

SEQ ID NO: 32890 - DNA, 471 bp, Glycine max
gtacgcaacgccacacctgactaacagtgtggtaaggctttcaccagcgcccggatatggcgcaaatgctcccagatgcggccggctggtagcgggaggtatctgcccactaccggtggctgctggcgctgcacaagaaacacaacgtaatagggcggtcacagtcggggtttggttaacacggtggtgagcaggtattacagttgcgagcgataccgcacgtggggcacaaacatagctacctgctgatccccgctgggtcgtagtggaacaatagcgggtaacaatggcaacacgcgtccctaggtcaaggatggaacgtaatactgcagaccctgaatgatggaagcattaactacctgaacaggcgcctaagcatggctatttagctactgtgaaacaacaaacagggttgttacggaccgggtaacgagcataatggctgaagccaacaaacgctttaaaggggac

SEQ ID NO: 32891 - DNA, 449 bp, Glycine max
tgggggggggggggggaaattagaaatacgggagaaaatggtcggagaaaggaaagctaatggaaaatagtttgtactactaaaccaaagccatgaaaatttgagactgctggcgcaaaggtcaaagagtgtacatgtgggattagtaaaataaaaaatacgatgtagtaaaaataaatactaagcaaaaggcattattcttcagtaacaattgacggggcaaacggatcctgatagcaaagtcctacaaatggaaaaagagaatggaaataaaatattgaacatgtgctaaccagaaaatgatgagaaaccacgaattatcagcagcagtatagcgctgactaaaaggctttaaagctaagtatggtggtggcctactccttggccgcattggcctgttccaccccgtgggtggtgtaatatgtggcagcatgttcatacttatacgg

SEQ ID NO: 32892 - DNA, 429 bp, Glycine max
  unsure (1)..(429): unsure at all n locations
nnnnnnnnnnnnnnnnnnnnnnnnnnnnnnnnnnnnnnnacatcatgaaaagcgcgagggaggaggcatgtagggtgcgagtaggcggcgtaggcttggcggtacacgtgggagaacaatataagagggggaaagataagggggcaacgaggataggctgggccaggcggtttggaaatggccctaggttggggataggtagaaaggttggtgcgaacgctatcgggcaattggcagagtggtcagccctaaatgggtggtgcccaaccgatagcttttaagtggtgtggtgtttgccgtgcctaatacattataaccactaccacgtataggatggcaaaggttactaagagtacgctaacgttagccaatgggtggacttggtgggcttacggcaagccggataggccagagctacaggttacgcaa

SEQ ID NO: 32893 - DNA, 485 bp, Glycine max
  unsure (1)..(485): unsure at all n locations
nnnnnnnnnnnnnnnnnnnnnnnnnaatgctttaaggaaagccaggcaaacaggaaaggaaacggggccataagaggtcaggctgaccaagcgaaggaatagttcatggcaaccgagccgtgtgaagcgaaaaataagaaagataatgagaataactgattggggtgttataactggctaacgggaaaaggagggaacagttggcacatgacaatgaaaaatgtgaaagagggtattagcgtacagagggattgatgggagcatacagaaagtgctacctataagaaagacttataaagcagacaaagggagaaggtaccgaggtaagctgtacaaacctgggctgcaggcaatacggttattagtggtaacgttacgggtgaaaggttggagagtagttaatggcgggttacagttgactgtactgctgagccaccagcttgcaggtgttcggggcggagctgctaaaattgctaaaactgtag

SEQ ID NO: 32894 - DNA, 441 bp, Glycine max
acatgaagaaagaatctgaacattaatactgatacacacaacactaacactaacaagaagggaggaagaagctgaaaaccctaatctgcagagatgagatgagatgaaaatgaaaaggcgtggaatcagcgcggcaaggaacatcgtagatgcttgtcttgggagtgtgggatctcaaatggctcctccaattcgtattctccgcgttcgtcttggcgattggactgcacgcgctgctcaagaacaccgcctccaagtacttcgagattgaagccactttccacgctatgcctggccctctcaccgaccattctctctgcgccgtttgtcgcaaccccgccaacaagaaatgttcgcgatgcatatccgttcgatactgttcacaagcatgtcagcaggcgcactggaaatccgagcataagatgagatgcaaggagtttc

SEQ ID NO: 32895 - DNA, 502 bp, Glycine max
gaaacggtacagtgcataaggctcgaggcatagacaaatgatcctcaatttgtcgctctggcgcggcaaggatcattgcggcctacaactgtcggttcaacagctcgcttagcggccaaggattatgactttagagacagcggcactaaccatagatagcatatcttgacatattcttgtttcaacagtcaatggtgtgtgccagctttattgtgcctatagttatggaattgcttactggctcctctcaaccagaaatatgatgttgcttacatccacttacatggtaatggcatggtgcacacaaccaaaccatcatttggcagtgaaggtggccagtcgaataaaaatgtataccctattttttggcctatttgaggctgtatagcgttaatttatagtctgctttttgtatcatagatagtagccgttactgggtatagcttgaattctttgtaggattatatagcatagcttcatattatagaaatcagttccttcc

SEQ ID NO: 32896 - DNA, 506 bp, Glycine max
ctttgtgtgcgcgggagaccccttagtaggccatgggagcttttaagactggagagtggccacccaagagggcacccgcataaccaacccagtaaactactgctattttagcgggggtgtggcgtgactttacgtggtagccaaccccgcctaggtgtgcctagcggtgtaatgttaagcacactggggcgcttgcgtggggataatgtaaccaccaggggtattaggcgccaggcctggaccacgcacagtaataaccggaagcaacactatacgcccgtgcagaccaccagtgggcggcccacacgatggctgcgactgaatagccttggtgccgctggtaagggcgggccagggggcggcttgcgggagtggttaaaacgggggaccggcgaggatctgccgtataaacatgcagtaaccataaccacgtagcgacggggtggggcagcgagaaccgtggcaattagaagggatgcggccggacgcgagcagaggggtagacg

SEQ ID NO: 32897 - DNA, 502 bp, Glycine max
ggttgggcgaggaatggatttgggatgttcagacgcaagcgtgtggaaggaagcactctctttatacccttctcgaatacaaactctctctgtgaaaaagaacaaacccgatttggtttctctggatgacttctattgcaaccaactccctctcctccttcaccagcgaaaccctaaccccttcatcaccactcccgagctctccaccctcatgcaatggaagctcacgcgcggcaaatggaggccgcgtctgttggatttcgtgtcgtccctagacgacgccgttgtgaaatccgcttctcagaaggcgtttcagagccttcccgatgtatccaaagccgtttccgagctcactgtgttgaaaggcgttggtcccgccaccgcctctgccgttttggctaccttcgcccctcacttaacccctttcatgtctgatgaagctatggaagcagctcttggaagctcaaaagattattcactgaagcaatatataaaatttgtg

SEQ ID NO: 32898 - DNA, 761 bp, Glycine max
gccggatatacaagaagaccaaacatgctgtatctccaaccacagaggcagcatcatcaacactgcacgtgatcaatgagcaattagatcaagcagaagaagaggagcaaatcaaagacaaccttttaccaattttgaagaacaacactactcttgtccctcctcaacaaaccacactgctcatgtctcagaaatctttatccttttccaacctcttggatgccacagattactccatgctcagcaccatcttatctgagaataaccactccaataattaccttactccaagtgaagccttattcaataattgcgagaatctggatcaggaaattaccccccaaaattactactacaacaacaacaccaatagctacttgtttcagaagaacccttcccacatggaaaacatggctaggccaaaacgccacctttcaaacatggatcatgaggacaacatgatattatacccttcaaagaaatatcaaagttcctcttgcaattttcctaactctaatccacaatggaacttcatgttcaagcagccactcatgagtcctcaatatcttccatttcagtgataaatagccaaaaattatacgagtcacataaagaaaagaaaagaacaaaaaaaggttagggagaaaataaaaatgaaaaaaagaagtgaaatatctactagttgaatgtgccgtatggtatccacaacctgttcactaggtaaggattagcacacagaaatatagcaatcattttctttt

SEQ ID NO: 32899 - DNA, 505 bp, Glycine max
aaatgaaagctgattttattagaaaaattaaatgtatgtacaaaaggcttttctctgatttataagagctacaaccaggatacagtgtttgctaacatacaatcactaggaatactaacttgtacctagaacaaaaagactttacagtggaagtcgtgaacgtcaatactagcaaaatccaaaacagttggatctgtcattagaaacagtttggagaaggaagtctaccaaagaatatatattaacctaattgagagcaggattagccataaaaccatcctacgtaactagtcatttcttaaaggtactttgtttcctttgtcattggtataatgaacagtactatacaaagaaagcagtttcaaaccatcatattcaagtctgaaaggtcatccatgggaatttcaaggcccataaagtcatcatgatcttgcaatccatcatcctcaatattcaaccatgaaccaagatcagcaccttggtcatcaagatcaccaggaacacc

SEQ ID NO: 32900 - DNA, 444 bp, Glycine max
gggagaggaagaagaaggtgcgagtcaacaagagtctcatgttgatgttagtttggctgagacataagaagctagattccgaggagtttacaaggtattcgcatctacaatatttgcagcaatatgtctgattcgggtgtaccgagtggcaaacatccccacagttgctagtgggagatggacttggattagtgctatggtgtcagagttatgttttggaatatactggatcatcactcaatctgttcgttggaaaatcgtatatcaaacgcctttcaaacacaggctcttacagagatatgatgaggagagtttaccagcagtggacatttttgtgtgcacggctgacccaacacttgagccaccatgcatggtgatgaatacggtattatcagcaatggcgtacaattatcctgcgaataaattgagtgtgtatctctctga

SEQ ID NO: 32901 - DNA, 296 bp, Glycine max
aaaaaaaaaaaaaaacctttccatgattcacttaaaaatgccttactaaaacaaactggtcaagggattaatttccaattctacactttttgcaagactttccgcttaaaacttttccaaagacttccctgatttcaagccccaaacttttaatgcagtttttttaacccataagcgttttaaaaaaattcccccttttttatggaatataaaatccagccctgcccaaaatcaattgaacttgggcattccatggaagaatttcaaggaatcttgcaaatatttccagcttggtc

SEQ ID NO: 32902 - DNA, 167 bp, Glycine max
cgtatggccatcaagcttaatttctctttccttcaggagattctctaggttctctgtctcagctctaaccttttgtgccagttcacgcaatttctgacattcctcaaaattgtgtttattttcttccctgagctgcatgttactctcacgaagtaagttcatttctc

SEQ ID NO: 32903 - DNA, 501 bp, Glycine max
agagagagtccacttagatgagaagtatccacagagaggttctgatggaccatcatatttcctcttgccattcccttcagaagttttgcctgctgttgagactgtacattatgccgttgattaggatgttgcctaccgggctgttgatactgctgctgcggccgctgtggcggatggcgtgggtgttgctttgctgcttgattagtcaacccactggcagtggaattcctgctgaacccaggttgtgcatggtgaagtttctgctgttggagctgggatgacaatggagttaaaggggatgatggcgttataggtgaaagaggcacttgctgaggagaattttgtggttgaacctgagaactgttctgcagtggtgatgatgagatgggaagttgagacttagcctggacatgtggcattaatgcatttgatgcagcaagctgctgctggtgctgcagatatcgttgctgcagttgtctttcctttgccaaccgaacagca

SEQ ID NO: 32904 - DNA, 484 bp, Glycine max
gatggagtcaaagaactgtattgatctaaccaacaaaatttacacttggtgttgccttgaggcttcatgttggacagttcaacacaaacaacaaaaacgaatcttgaatcagtattttgctttccactatctgtgcatttcacaagtattacaataacagaacaacaattcacagaggccctccaccaccacttgcagcagcagcagcagttcagcacccatcattgatacatgacaacaggaggaaccttaaacctatcctcaagaaagggtataggccttttcccatccacaaggtccctataaaacgcatactcagcctcatagtcatgcaagtgaagctcagccttctggttagtgtggtaatggtgcttagcagaagtcgatttcccaaacccaaaaatgctaaccctatcacaaatccccaaagccagcatcacagcctgcatccctgaagagtagtgaaaaagagaaccatcatgag

SEQ ID NO: 32905 - DNA, 562 bp, Glycine max
atggtaaaaacagagaagagactttcattattttgaaccggtttcactaatgaaagggtctacaactttgatatttctgcccttccggaagtgaagaacgttaaagatctatacgtacacattaattatgatatcaatatcataattgatattgagaaatattaaaagggcataatatgataggaatagagggtgcacacggcaagaggaatttttttaaaacttaaatgtagccattcttgatcatccattccaaactccaatgattattgacgttcttgagtgtccaataacaccacccaaatgttgctcgcccaaaaacatctaattcagccttgacaaatctttgataatcctttttgggagccccttcaaccttccactcagcagtccattcacccacgaaagtgagaggaccatctacggttgtaatattatccaactgtgatgaacggactttgtagatgaaatcaatgttctcttgcgcattcatgtcttcgaatatatcataatagagattgtagtagtggacatcaatcacacatcgcataaggcctgtggc

SEQ ID NO: 32906 - DNA, 594 bp, Glycine max
ggggagaatacaagggaacttgtaatcacaaaagattttaccattattttcaaagtagacttctttgtacaatatgtttctgcactcactagacatttcccatttgttatgtccctaccgtacacataaatacatgcagcatttaattagaagaagaaagtacgtacgtactgtgccattttgatgatgatttggttttgctttgctatcaattttgtgttttggttggcgaggaacctcacaagaggaaacgttcaccttccaccttccgagagaaacatttttgtaaaatactaggtagataaaattcaacaccaagaacctaaatttgagcccgtggtattttgtcacatttatagatttgatatcttacccttaattttctttcatagacaattaaattcccgtgctaatgcccctcttccttcattcctatcgtttgcagtgcatgtgactctatctcgttgaaacaggtaaacccaaaatcatgaataccaaagtcttgacagtccaataaccaagcacaattatcctcccaagatggtaacaaacccatgttattactagtattctcaaggttaggtgttgtgtccc

SEQ ID NO: 32907 - DNA, 394 bp, Glycine max
gggcatggaaaaaaggtggcaaagcaactaccatcattcaataagtaaatgttttacacaaatcaactcatgaacaatgtacataactaattcagccaaacgtcgtttcttgccactggcacagatccgaccaatcatatgcttgtcttgaactactgcagcattttgcaataaatctattagcagagaatcacaatgcaattctttttttcttcttcctttttttggtttggagatctgtacaaatactgagctgtcaggagaatatgggcttcattcacaaaggttcttggcttctgaaattctataattcgttcttgcttattagtggtgggtgtgactgaaactacaccaatgaggaacaatgtagcaattgagttgaaatcataaagat

SEQ ID NO: 32908 - DNA, 434 bp, Glycine max
aatcattaagcttaacaactttattcaaaaaaataacaagcagcgtgtacaagagatcattattaacttactgtggcacctaatttctgtgtttaaaagtgtctatctgattgtatcaagctgacttcatgaaatagagattaacaatccatttgctgcagtcacttcttaagcagcattttttgattcaagtgttctgtgaataataattgcactctactttctataaaaacttcgatcacctaaatgaatccaacacttcgacacgtacagaagaaagaatatttttcatggagatccctcatttccatttgtgaggcatgatatcagggtgaagtcccaaaacatgctctggcataaaatcatggcgtgttagaatcccaacaactggaggtctcccttggctctttggaacaacacacatgtgccctcgt

SEQ ID NO: 32909 - DNA, 444 bp, Glycine max
gaacttaatagactgtttactttttatcaataaatcaacaattttcatgtaataaagaaattatacaagtgccatcattttacagaaaatgaaaaataaatacaaatggtaattccttgaaaaagaaaaaaaaaaagtcttacaattatatcctggttaattgtgctaaggggaataaaaaaaaatccaaaacttgcacttgctttgttgctctgatagcacattgcttgcacccgcgcccctttcctgagtatttacctgtggggcgggtcacagctgagaccaggtatcagcagcctgctgataggatcgacagaacatgagcatgagctcctgatttacaattttttaagcaagaacatgagctcttgataggatcaaatgagtacaagcaacgtggcccgacaactttgtgccagatgactgacaactgttcaccatggc

SEQ ID NO: 32910 - DNA, 606 bp, Glycine max
  unsure (1)..(606): unsure at all n locations
gccgaagaatcctcccttcaaacctaacccatcacttccgctccttcgaatccgatgatgtctccgacaatctcctcgtgcggcgaggatcctcgccttcggtctcaaacttgtaccaacagcaacaacacacaccaaagctaacgcaacaaaacaagatatcttcactcatacgctcgttcttgaacatcttcacgttcccaacaatgatcccaacatgcaagtggctcacgattccgtcgcagctctccgtgactccttcccttggccgaaaagtcaccggaaccctcttcgggcaccgccctggacacatctctttcgccgtgcagctccacccccgcgccgatcccgtcctcctactcgagctcgccatgtccacctcctcgctcgtcaaggagatgtcctctggcctcgtgcgcatcgcgcttgagagccagaaactgtctgcctccactattacgcgtacaatgcgtagcaatagtggcagacagcagcagtgcaagctctttcaggagccttcgtggaccatgtattgcaacgggaggaactgtggctatgacgtgtcccgtacgtgcggngacctcgactggcacgtgctgagcacca

SEQ ID NO: 32911 - DNA, 527 bp, Glycine max
ccctgttccaatctaattgcatttttaccaaccctgacaatacaacaaactcaaaactcaagaacttaaaataataaataaatgagtgataatatgttgccagtgtgacaaataaattaaaacttgccttcatacaaattccttctatctctctatattatctagggaaagaatgaaaccctaacaataacaaaaattatttgaacaccgggcagacccaatcttaacttctgttgagcaagcaccgggtcaattataaggaaaagttggtccttagggcttcctcagggcagatgctgcacccattacaattgccaggacaaggccaagaccagcaccaacggatgctcccacagcagcagaattcaatgaatttgccttaacttgagcatctctacttgcctcaatcgacattgcttgttctcgtgccaactccatcagaagcctatctcttgcaaattccctgaaaaattccccacctgaaaggaagactcctcacgactgcggagtatacagtggatttgctg

SEQ ID NO: 32912 - DNA, 454 bp, Glycine max
ctgcaaatgtcaattttcctttcaccaaagggtgcaaaatttaagttacattatggacaagtaaggtccacacataagctcctattcaaaatacaaaaaagagagaaaaaaaaaataagccttagttaattttccgaagaaagttggtgagtacacaaaacacaacccctttcaatttctctgttctcaattaacgacccattttttcattgcagcctctattattattcatccctttctaatctgtaccactttaagcttttggagcactaatgactacccttaactctctcgaggcttcacccttttgcatctcaatgtcgttgtttgtttcagcatcttctaccacagtctccaacctcccattttctgaacaacacttcatcacctccatggttgtctctgcctctttctctttgttctccttgtgtttgccccatagaaaggagaaagg

SEQ ID NO: 32913 - DNA, 276 bp, Glycine max
ttttatataacaagatttacttaacaaagccaaccacgatggatgcaattaattctctcctatttctgccccccaccaaaatcgttgagccatccaccatatgatatcaagcatagcctctcctcggttatagacactcatctctgtacacactcgtcaacgccaaaagggctttaaaaatgtaaatctattacacctattgtaaaaaacagatgtattgagatattatcagctatgctctagcggactgtacatcattaatccctttacccaccc

SEQ ID NO: 32914 - DNA, 762 bp, Glycine max
gaaatcacccatgaggggcgatgtttttcatcttcccaaaatgacaaaataatggagaatacataaataatgacaaagaaaaaacacaagactaaaataccacatccttgatacatttgctttagatgatgatgggaccgacacacaacacatacatatggtgaaaacaagtttttcatcaaaagaccaaaaactaaaaaaagaagagtagcaaaattaaactaaagtcttattcatgttctgtacacatcagaagcagataaaacactcgtataaagtgactagacattaatgaagtactctaattgcaggtcatctcccaccaacacgaattaattgtccttctgaagctaataattatacaattgcattgcattctttgcttttactattgatgatacaattttaagttcttgtccaagctagctagctagcttaattaggatccaattttggtgatatccttgctagatctgttgtatttcatgtggctattaacaagttggcctgctgcaattgcagacatgagtgagagctcccctgcaaggactgaacctgctactatggttgctagtaacctagaatttgcacctggggactctttgctcgcaccctttactcctagtaaattaaggcatgctgattgagacgcagttgtgtgccccctccaactgtacccacctcaagggaaggcatagtaacagagatgtgaaggtccttgccatcattcacagcttccatcatggttatgcagtgagaact

SEQ ID NO: 32915 - DNA, 630 bp, Glycine max
aaccaagttgggaaagcaatgatgggtattctttacctgttggttttattgaaaggacatctaaccgaggaagagtttgtcagggatggataccacaactagaaatattggcacattcatctattggaggatctttgtttcactctggctggggttctgtcattgaaaaccttcagtttgggaatacacttgttttattaccctttaatatagagcaacctcttaatgcaaggtttttggtggaaaagagattcgccattgaagtgaaaagaaatgaagatggatcattcactagaaatgacattgccgcatcccttagacaagccatggtattggaggaaggaaagaagatcagaaataatacaagagaagctgctgcaattgtaggaaacttgaagctgcaccaggatcactacgtagctgcatttgtacagtttcttaagaatggaatcaggaaaccaatatgatgttgaagaggatcattactgtgtcttattttaggtttatcatcagtttgttgaataaagtcctactctttaagtcgtggttcaataattgcatctgttttctatcttgtaagggtaactaaagccaactcctgtttttgaattcaataagacactctctctg

SEQ ID NO: 32916 - DNA, 486 bp, Glycine max
cacatggtttcttcttccttagcagaattttgattttgttttatattttctcttttggatcatcttgcgaaattccttagcttacctaagcctgaaacttctgcttcctgagttgtatatataacctgtgcttctgatagtgcgtaataacttcaaaggtctaggcctagcatggaaaacaaccttaaccgtgaaacagaagggcatggcttgcctaaaattccatcactagttcaacatatatcatcaaatgatgaaggaaactttgacaatggtgacttgaaaaatctaagctcatctttcaaagagaatgaaacaatcttagcaggaagccaaggtgatgaacatgcagccattaatcatcggaataagcattcggtatctatcaacataccattctcttgtgaagaggttcagctgcataacaccgtaagagttctctatagtggcgaagatgatttctcttctcaatcaactactacagac

SEQ ID NO: 32917 - DNA, 356 bp, Glycine max
gtaaatacatggactaaagtgaagatttcataaaattaggaactaaaataatcagcatttacaatgtcagggactagaatggggtttactcaagaaaaatctaaaacttttcactcatgcccctcccatgtctgaccactgaaggttttcagtaaagatgttggttgcctcattattttcttcctcatttgagacgtctatgtattaacatacatgatgtattccttgaactattggagtgtgtgattctcgaataagctcctaaactaaatcatttttatccgagttcacaaactttcaagttatttattttcagtcttttcggcgtgatcatggctcccaagtcttaaatggga

SEQ ID NO: 32918 - DNA, 414 bp, Glycine max
ttcaaacaggacagttcctttacgcttgtattaggacatgtggtaggccttcatttgactcagattcaaaatgctaactcactagatgtttaggtacttgcatgttcttaaaaactgtagtggatctccattgactatctgcaatcatatttccttgctcaagtgtcaaggcaaccacaggtagatgatttcagtaaaacctggctctgacaaaatcatattatgtatgctacagcaacagcagcttgcttatctttgtaatgagcaagcctgcaccagattcagtttggtccccagtgacctctacctgtactgttgcacagattttctgcacctctcctgtaactaattattacactttgatttgcttgtctcttgttcttcatcgataacatttcttaatcagttatggtg

SEQ ID NO: 32919 - DNA, 549 bp, Glycine max
caaatgttgaagctatgggacttgtttatatatactgccaggttcaagaaacacacagacaaatgaaagtggagtgattgatagcgacgatgatgagatggatgttgctgggaacaagacaaagaatgggcatgctgtaggcggctcgaacaacttctttgcagatttataggattgttcacaagtgtgatgaccctattagtacatttgcgtgatttccttcctaatcaatatattcagacagacgctggagccacatgatgaactacctgaagtctcgttaaagcaggagatgatggacttgggccaatgatgcaacaaaatacagcttgtgttttttaagaaatttaaatgaaaattatcaagttcaggtcaaatatatgcttgatattcaattttgttgttaccctttcgaaaaagtaatttactataacaattcttgatcttgatctcaaattgataccttggtgcggcattacaaaggcaaagtcttcaccgcctttttcttttcacactagaaatggaacagttgactgctgttgccgggtc

SEQ ID NO: 32920 - DNA, 421 bp, Glycine max
  unsure (1)..(421): unsure at all n locations
nnnnnnnnnnnnnnnnnnnnnnnnnnnnnnnnnnnnnnnnnnnnnnnnnnnnnnnnnnnnnnnnnncgccatgtaccaccaaaattcctttgagtaaaagctaacttcaggatacagctgtagttacctcattggcattttgccagcataagttaatgtaaaggcatagtaactaaaataaaattaaaactcaacagaaacaagaacaacaaattgattattaaatggtcaaactaaagtaaacctcaaagcattgttgacctccactactttctgtcatccgaacaggatttgaactacgtgtccaatctccgcattaagcactttattatgaggctattggtttactgtacccattgtcatttgtgaatgagatgggctgaaaataaaattgccttttgtaaacaaccaactgcggtaa

SEQ ID NO: 32921 - DNA, 452 bp, Glycine max
aaagaagaaaaaggaaaatatttttagtagtcatacggataatttgtgaagtacatgcccaaggaagaagagaaaaaaaattgttttttcttaattaaggcggtgaagagtgagaggtttactctctaaattatacattttaatttatactatatataattaaatgttatagatttttgcaatgtgcaaaataataataaaaaaaacgatttcctcttatacaacgattaacaaacatactatagaacgcgcaacatgttccttgctgaaaagataagttggggcagaaaatacaacctattcttcttcaccaaccgacatgttgcccatagtcgtgtcacctgaaccaaaaaaaccatagaaattcccatttgatgataggcaccgcacaatataaatgcaaagccagagtttgaacatcaatgcaagcctcaaactaaaacgagatgatt

SEQ ID NO: 32922 - DNA, 525 bp, Glycine max
cacacacaaattaacttctttatatgaagcacttaaatatatcaaatacaattaattcctagcttgcaaccagttcaatgaaaacaaaataagggggataaaatacaacagatgaatattcgtagcttcaacatctacgtgtcatagaatataaatgatcacaccataatctgaactttgaccataattcacccctcattgaacagtgaacacattcctcaactgttacaccatggtggtcattattttcacaatcaacaaatttcataaacatccacaaagcagtcacatgaaaaatatgattaaacttttaaaacacgccacaaaagaaaagaaaagaaatcaaagggacaatagagaaaattaaaactccttggctttttgctcctcaggggccacctccactcttgaatctctctaacactcttcaccctcaactccatgtcttcttcatctacaccactctctctgtgaaacacaaattcttaaaacaccctcttacatgtttctaccaaaataatcaat

SEQ ID NO: 32923 - DNA, 674 bp, Glycine max
tgaatcaacaatgatggcgacagataaaagaaaactaggtataccgaatatttacatatttgcaagtaagcaaaacttgacctaagctttcttggccctaagcttaatctgccaggccgtaaacagggcaccttcagacgtcagtagaattagtctgcacaagtatccattgaccatacctctggtctaaacatccaagaaaacagcatcagccatctaatgatggccgactactagataatgatattggcatcagaggaggagaagcaatattctcagatatagatgatctatgagaggattctagtgttcttggcatatgtaatgctgccactctcgcgcccctagagggtatggagaaactacgagcccatggcctgaggtggcattggcagtggagatgctgcacttgatgcaaccaaattatttgcagtcaccttttgacctctagacaccaatggcccagaatgacccactaaacctaaaagccttgaattggaggggaaactggttggaggcctaggaagttcatgaagctcacttattttgggtgaagtcataagagtaggagaagcactaggagatgcttttggagatgatgacggaggctgagggattggagccggcaaaagaggtccagagaacagttgaacactttctatggagacaggctt

SEQ ID NO: 32924 - DNA, 480 bp, Glycine max
ctcactaccaaaaagtaatatcttctgaaaaggaaaggaagaagaaaactcccaagtatcattgtctgattgacaaattgtatctggaactgtttttatcaaacatttacatgctctgagtagaatgaacatcctatattttctcttttcacacctacggctctcatttatgctaatccagctattatggatggattaggttcgccatcccagtggctgagggagctgagatgggactcccagggcttaaatccaataagccttcttattgactgtgccaaatgtgttgcatctggaagcatcaagaatgcagatattggccttgagtacatatctcagatttcatctcctgatggtaatgcagtgcaaaggatggtcacttatttcagtgaagcacttggttacaggataataaaaaatttgcctggtgtatataaagtctctcaatccatcaaaaacatcattatcttctgaagatat

SEQ ID NO: 32925 - DNA, 673 bp, Glycine max
atataaaaaacaaatgaatttaataaatgaatttacattaccatacatgaatttaatcaatggaaaggaactaatgattttaataacatgcccgaccatcccttcatcactgaagatttgaatgtgccagtttggaagcccaaggtacctacatttgaatgggcaacaaatactacacaaagctgcagttagtaataactgagattttggatataaacattgcatgaagcgtgacaaaacttgcagcaatatgttatatacaagatttgtccaaagatgtacctcgcactgaactccaacaaaccatacaagtgagaatgctcgtatgtcacatcatatccaagtttcaccaaatcaaccaacaaattacactcatttttcacgtaaatagcaataaaagaacactgcacaatacaccaattttaacgatccatggggaaaaatcaaaatctcatcgtaggagtgttactaaaattcagttgttgctcccacatttgactagggaattgaagagttaatcccacacttgcgtacttgaaatgcatctccatggccttgcacgcgttcccttgtccaggagcatcagcaagccgacactctcaagcggtagcccgaacatatacttgctttggtgagctctctttctccagaaaacaattgatgagatccactt

SEQ ID NO: 32926 - DNA, 519 bp, Glycine max
gaagctcaatccattttttatattagaaaatgcatggttcaattttcaagctgtaatttggtatgtttgcccccaccaatagactacaatttttgtgacatagtatgacttgcaaaccaattgctacacaatgcgtgtgttcttgctatacttccatcagttgtctaaggcaatacaattgatcttaaaatctatgcaaaacttctaccattcagtaccactgtcatggaaagtttttccagaacctcaagtttaggtccatagggaagaaaaaaaagtcaccagctccataattcaagtgctcactagcaatcttacaaacctggcaggaagtctttgcatgtcccaaaatgacaggtactttgaagttcatcagtggacccaaattggctgcttcaacttgagagatggaaagaatgtgatgtgatctatgcaattgcatttgacaaacaagtgggccatttctccatctgaaaggcagcaaaactatcttggaccttgaccatattcaagtcagac

SEQ ID NO: 32927 - DNA, 277 bp, Glycine max
gaaaggaatgtgaactttcatatgactttggcctttctatagtcagtttattgtgtatggttcttatgccaaaagcaacatacaacacagttgtacttgaaaatctgatatctgctaaaggaatgaaaccgtgccaactaacctgcaaaacttgtgttacaagtccaacactcctcccaaaacgaaagtattcaaattacaacaaaaggctcaccaaaggcccaataaaatcgcactcaggaaaaacaaaggctcaatccagaaacatacaaaacac

SEQ ID NO: 32928 - DNA, 472 bp, Glycine max
acagcatgaagttttcattctctggtattttgtgataaaattaataaccaagaatgacatactctgaaatttactcctctcagccagttaatatacatgagttcctgacccaactgttcgaaacaacacacaacctctctagattcactctaagaagatctggcggcagttgaatggctggtctaaagggaaatgcttatatttacactttgagtacatactacataaggctagaaaaagtgcttaattcacttattctatatacaattgctggtttttctatattcagaaaaactaggcatggaagtcgattcaattggttcaaattgttgaaaacctttccccctactcctgtatatatatgctacatgtggtcctcatttggtttgattgtccaaaacattactgtcccttccctctttattgccagagctgcaaaatgcttgaaatttcaagtacttataggcaagct

SEQ ID NO: 32929 - DNA, 424 bp, Glycine max
  unsure (1)..(424): unsure at all n locations
nnnnnnnnnnnnnnnnnnnnnnnnnnnnnnnnnnnnnnnnaagttgaatcaaagacttttaattacacgtacattttggggccattttacaacaaataattatttttttgtacaaacaaacaattatttaaagctatacaggatattcttcgcgtcctaaaaaaaagaaagaaagtagaggatatccaatcaatattccttcgatcctatctaccatctatcatcgaatcatcgatcggatccagctccttcgaagttggatccctggacaaaaggaatgcagacagtggacaaaggaagaggaaagtacagcaacttgggtaccctctgttcaaggaaacacccaacatgacaatttaatttcgctatcttttatcaacaacctgttatcccgttttggaaacaaccaagaaaccacaattcc

SEQ ID NO: 32930 - DNA, 275 bp, Glycine max
tttcgttttttttttttttttttaaagtaaattcgttaataacatttccgaaaaattattagagaagtaaggattctgcctgattgcagtcaagattcacacagcggaaatgtttcccacgtattctttatggtggatcacgtcacacgtgcactcaaaccagggttctagtttaaagatggaaatgtaacacagtgagttgatttctgtgctacattactagaaaaataattgtgattgtacagcctcaattagcttaaaatgctcaagtctcc

SEQ ID NO: 32931 - DNA, 646 bp, Glycine max
ttttttttgaagattataaaacaagagtttattgaagattaccaacttttttcataagcaaaattttaatagattttggagagtacaaggagtactctaatccattaacaagatacaaagtaggtcaacactaagagatacaatagaaaggttcaatataccaatctgaatagtaagaaccctctaatttttctcaaaaccaaaaccataactagaccctaataagatccaagatagaagtagtatcaattgaccctcccctaaatacattctcattcctcaaaatcacacaaaagaactcacttattctgcggtttctctttgcttcaatggagaagaaggcacatgtcattattcgaaggagcggaaaaacatatataattcttcactttctggacattccaatacggaaatatcacacaaataaattaacaaacgctgcttttctgcaactgtagcgtatggaagatgtatgactagtatttcttggaatccaaggccaaaatagtgctgagattcattgggtgcatgtactttgaggttcctgacataatctgctgaacgatcaacctgttggctttttccgatggatggaatggatcccaaaacgcgaattcgtgacggtttggacataagttggacacta

SEQ ID NO: 32932 - DNA, 406 bp, Glycine max
ttgggggggggggggggcgaaaaactaacgaataggaacggccaggtccagatataacagacggtataggagtgcaacgatggtattaaatataaagtgaaaaatgtgtaaaacgtagggtcggtgggcatctgtatgggttccccatcaacggccgcctagacctttacctcggcggcggcatacccgtactaaccgcagtcctcaccggtgttaagccatttgggttccgcataagccttgcaataaacaacttaaatagacacaatagccttaagtcgttcggtggcacggttggtattggaactgtactaaaacttgtgcccgtagtactaacctttaagcccgtcaactgcttattgcccgacaggcccgtacgcattgtattcacccccttattactaag

SEQ ID NO: 32933 - DNA, 444 bp, Glycine max
cgcggcgcgtttgtggggaactgagggttggtgtggaatataaggccggcgcttaaggcttagacgtattaattaaggaataaaccgagagagagtagtagagtagtattaaagcaaaaagaggcccggcggggggtggcaccgccgcctgatggggcgccgcctacttatactgccgactggggattaacatgggcaaagaatcgccccgccgcactcgcttaaaagtgagcacaagccaaattggtgtatatgtgtttggcatacacttgtgcctgtgcctgggtcggttaaaaaacacgatggcggtccaaaaaggcatagctactgtaactggcgcttgccgaatgtgctgccaatacgaatgcttgaggagggagtggtgtgccccttgatgtagcatcaaagacatgagcacgggggcccgaatggcacgccgcagtt

SEQ ID NO: 32934 - DNA, 528 bp, Glycine max
cctgtcacgggcacgtggtggcagttggtgggggtgttggcaatgtaaatagcctacagcaccgccggtgctgacagggtgccttaacgttagggcccagcacccgtaccaggctatggctgcaaaacccgagtaaagagcacgataaacaacaccatggcaccaataacacgttgtggtgttgttaaagcaatttccggtataacaacaggttccggtgtagttataagcctaaatttagggcgcaagtttgtaggctgcggtacgataggcaccaccgggccaagcatacaaagtttggcggcttggtgcatttggattacacactgtacctgacaggtgccctgcaggagcggcagaacaaccgatttggtgcgctggtaagctggaggcaggagggtaggcgaaggttgggattaggcaggggaacggggctggggacgagacaagcagctaagggccggcgggtaggattagcggctgcttgaggaggaaggtggatttggagggacagctaagtgccaagag

SEQ ID NO: 32935 - DNA, 480 bp, Glycine max
  unsure (1)..(480): unsure at all n locations
nnnnnnnnnnnnnnnnnnnnnnnnnnnnagatttaaactaacattgggaagggtctgggaggtaataaatagggaaggaagaataaccataacgggatagggggggggttattggatagagcgataaggctaactaagtctatcctggcacacgtagagaggtattttgttaggtggtggtagctgataaatgagaggagagggaaggtttatagggggcggggttggggggggtgaggcttatgcggatcgatatgggctaagaaaaccaataataagaaggagcaaacttgacacttaaggaacaggcagggggtgtgaatgactttaaactagagcgggaagtggaagtatggctacttattactattaaatttaaggtggttattattaatagtagatataattgtgaggcggggtgctgctatcggtttagagagacgaatagtatgagtcgtattagggctactaaaacttaac

SEQ ID NO: 32936 - DNA, 499 bp, Glycine max
ctggtctccaagatggttttcaacaaagagtagacctggtgggtgggtactatgatgcaggagatcatgtgaagtttgggttgccaatggcctacagtgtcacaatgcttgcatggggggccattgagttcaacaaggaaatcacggacttgaaccaaatgggacacgcattatgggcaattaaatggggaactgactactttatcaaagcacacactcagcctaatgttctttggggacaggtgggagatggagtttctgatcattactgctgggagcgtgctgaagacatgacaacttcaagaggtgcctacaaaattgatgaacaacaccctggctcagatctggcaggtgaaactgcagctgcattggctgctgcagctatagctttcaggccctacaactcttcttactctaatctcctcctagttcatgcaaaacagctcttcacattcgcagataggttcagaggtctctatgataactccatatcaagtgc

SEQ ID NO: 32937 - DNA, 428 bp, Glycine max
gctgagactacgaactgagaatgtagggcacctgtgcgcacaaggcacaaagcctgaaacagcggcaccggtaacactaaccaccacacgatgtgcttaaacatgattagcatttgttgttactattgggcggtcatttacaccactgtatatacgccgttggtgagacactttgtagtctgcacggtagactaatttggtgtggttgggagcgtatgcgctgtattaggaggcctgataaaacctacatgcagataatccgaccgcctattcatgcgcagccccggcctaggggccctagtctggcccttgggccgcctagcagtggtagttggcgggatgctattcttccgagggtaccaccatatagaaatttcctccgcataggtaccggcggttgaccatctaaccgcgtcggcagaaccctc

SEQ ID NO: 32938 - DNA, 409 bp, Glycine max
ctgtacacccaagacggccgcgaagtatgctgggtaatgggttagctctgcggtgaccagccaagctggctaggctgggacgtgcgccgaatgcgcggcgcgccaacccgctgttaataatgttgggcagaatgaggctgcgcataaactgacgactgcaacggtggcacaccaataaaggattgccgctaagaggtattgtgcgtgcgccaccgctgcataggccgtacctaagactgaaacatatttctaggttttgccggctagggatgccaacggtaaaccggcctggcagccgttactaaatacggaagcacacagggcctaaagctggctggcacggaacgccgaataagctaagaagacgtagccagcagctacagagtaaaggcctgcgatcagtgagggg

SEQ ID NO: 32939 - DNA, 483 bp, Glycine max
aacggctagcggtaagttgctagaggcagctgaggggagtgtcggtgaagccagaaaggacggttgggcataaaaaaaaaaaaaaaaaaaaaacaaacggcaatggtaaaaaaaaaaaaaaaaaaaaaaaaaaaccctccttcttcatgacgcactgtcgtcatttcccaaggaaggttccattccgattgctacctcgattactgggtttgagacccacgtcgaggacactggcctcgaagtagccgtagactgcgggttgcgcgcaaaggcggagttctgtataaggttatataatagatcacttccaactagaaacgcgaaacttgccccgcttgaagcacgcactgaatgtataggaaggctcggctctgtatgctttctgggttacgtcccaaattgcgtcgcttactgctaggaagcaagtccttaatctctccccacacctccgggctcgaggccctcttacccgccgggggtggg

SEQ ID NO: 32940 - DNA, 479 bp, Glycine max
taaacacccacaggcaaccacccagagtacagtttgagggcgagggccccggcgtgggtgcaataattttagtagagagtaggaacaccccgagtaacagtaagttggcaggactaacagtagaaaggggtaggtagagatataagggatagagtcgaataacagtatagggcggggcggggcacggcgggcgcggcggcggcgcggcggcagtgtagaagaataatagccacccgcacaataacaacgatagtatagtgcaccactgcaaccactataagaacttaccccagggcgccagggtaagttaacccaaccgggataagcgggtacaggccctaaaccattatttgccagcacaccggtttggcggcaattggctaccttaccagcgcatgcagctaggtcgactagattagttacctgtactagccaacgagtggcagtttggtggtatacccgattattgaacacagggt

SEQ ID NO: 32941 - DNA, 419 bp, Glycine max
  unsure (1)..(419): unsure at all n locations
nnnnnnnnnnnnnnnnnnnnnnnnnnnnnnnnnnnnnnnnnataacacaagaacaccaatatataaattgaattatattgaggcactaactgggcatcagctgtttttaaataatagatacatcaactgggtatacgtttacagcataaattttaaatagtaaatggcctcttaacagttttcaataataaactgcatcacttgacgaccatgtttcctcggttcacgagatgaccattttaatgcattactttcgatttctaccacccagccaactggcactccatagtataaataatgaaccatgttacagtcttatcaagggaacttccaatatatgaaccaccaatgcagaagtacccaaggccactaactcccaataacgaactgatcggcatgctgcaatgttactaaaaaaa

SEQ ID NO: 32942 - DNA, 505 bp, Glycine max
gcagagcaaaaatttgattagagaccgtaaatatatgaaacattatgggcagggatataggaatatacaacttcaaacgcatcgacacgaaccatgcatacatgtagaaaccttgcacaattcatctccatttttcaatacacttgaaacatcccaaacagagacaagctatcattttcagacttttaaccccaccatatataaaccctattgagaaaggcctgttatgcaaactatgtaattaatgtgcatggttttcattacaatcacccgctgtacaccctgagacgactagtgatcctctctcggcacatgggacaattagttaatttgtgtccacactctctgcaagtcatgtgcccacatccaaaggccaaatctcttgcattggtcaaacaaactgggcaggccgtttggttttggtcatctccggaggatgctgctgtattaatgctgggtgcaggcctagaataaggaacaggaggaggttttggaactattctct

SEQ ID NO: 32943 - DNA, 194 bp, Glycine max
gaggaaaacagcaacagaaaagaatcaacaacttgtgcagttgctaacacactgtttttgccatacattaatgctttatatcatactaggactcaaatttgcttcccctctttgtaatgcatagcttttctacttgggctaataacatttgtacatgttattttgtgtaatgaatttccagatggcttattgat

SEQ ID NO: 32944 - DNA, 188 bp, Glycine max
agaggtcctaagtccatataaatttttatacttgcgcacactgaaaggtaatcgaattacaggtacagaagcaaccgacacatttgggtctccttctgggtctggcacttccacatccataagaaccaacattgacagtggcacggatattagttgaatgatgcaataactgagacttaatcagtggc

SEQ ID NO: 32945 - DNA, 1117 bp, Glycine max
aatagttcgacattttataattttaaaaaaagtgcacaaggcttaaataaactatcaaaaattaaacacatcgttacttagttttttttttggggggtggggtacagatacacatgcaatagccaaattcaaatcaaggttgcaaatgtcaaaatcttgtcaaataacttggttttatgctgttaaaaaccaaacaccttatccaacttcccttgaaccatttaactctttccattatttttgcacctctcaacaatgtatgttctccatgattattgcacctctcaagcatatatcttcatcatttgcacctttatcaaacacaaaactctacatttgttcagcactcatgatagaaacacacctccaattcaattataatattagcttacaaccacctaagatcacatgaatatacaataacaatacataagctaaggacttgagggaagcacaactgcacaaacagcaaatttttctatatgctaggtcataacttagcaatcaaaagcttttggaaagaaaaatgtttcctttgtcaaaccaccagaaggctagcacagaaatcagtgggacaaacattgctactgaaagaaatgtcaagtttctccaatttgcaggcttatctgctgaaatagatgatgttactcgagttacggagcttgcaccttcttcatccacctgcctgaaatgtcttattaaagtgatctattccttcttcatctgatgatttagcagagttatcattgctcgagtcattgttggaagcttgatcttcatttctgttatttagtccattgttgcatgcatctaaagaggcatcaattttagtattctttaacttttctaccaaatgtttattttcctgttttaaagcatgtaactggttattgatgcgctccctttcagaggctagttgcattaccatatccatgataagcttagctttacaatcaatttcttttgcccttgatgatcttgtattgctagcttgatccaaagatgttttcaagcttactgttctggacctaaggagatccaattctttattaagttccaacccagtctcagacagcacaaagcattgctctacagcacattctttattagtttcagc

SEQ ID NO: 32946 - DNA, 617 bp, Glycine max
cagaccagttataatcaggtccgcaaaacacctgctgataggcctatcattgggatggtggcagctgactggaacaaggatggggattctcaagctcctcctccgaagtggtgggatggtaacggcttaccaaattcaacctataagtataaagaagatcagaaagtaaattggcatgcaacatcattagaagagaggttcgagaaggcattatctgaggagactgtcatctctcaaaggaaggatacatgtggcaaatcaattccttttgatgagaacgaagaaagtgatactgctctatctcagctgcaatcttcaactcatccacagtccgtggtgtcattttgatgtctattgtccctctctgctcttttgtctggttaaagagatattgtggcatttctcgaaactaagtctgaatcctcctcgttcaaaatgctgattggttggaacaaacattggtttattcgaattttgtggtaatatagaactatcaagctgtgtcacacggcttgtattgtatataaattatgggaattattgcgtaaaataatgggtattgggacttgggagtttagtaatgtgtttttttttcccgttaaaaattgaagtagttc

SEQ ID NO: 32947 - DNA, 670 bp, Glycine max
aggaaaaaaatttagtatcggaatcagcttgggaaatatagacaaaagttaataggtttagaattttccagtcaaacacaataaaataaaatgaactatgcatgaagatttaactatgcatgttttactattagttcctgcaattttctttttgcttgtatgcataaaagaaatagaagacacattcaagtattcaacttcagccgtgtgcaccacccccacggtcagacacaaggtaattaaaatgggggtgttgaaaacttgttcttccaagtgaaacaaacattttagagacgggaagatgattttgtagaccttggatctttactatattcatacacaccaatacctcgttttcttccaagtcttccagcatcaacatactgcacaagtagagggcaaggtgcatatttgttgtcaccaaggccagcatgaagaactctcattattgacaagcacacatccaatccaatgaagtctgcaagctctaaaggacccattggatggttagtacccagcttcattcctgtgtcaatatcctctttggttgcaacaccagtgtagagagcaaaaaatgcttcatttatcataggcataaggattcgattcactatgaagcctgaataatcatgggaggttatcactacattgtcagagaggcttggcaagg

SEQ ID NO: 32948 - DNA, 418 bp, Glycine max
acaagaattggatttacttcacctttcaaattgtgatgatgatgatacataatatctttctttttgttcaaatcaaccaacactaaaaaaaaaaactagtactaaaactttttataaacattttcattaactattacccctcatccattttttcgcttctcttttttggtttttaaataatatacatgattcttggacttgattttcatttcaaaatccccgctcactctttcactcactgtttcgagagattacttctccaaacttgaggaagagttgagcatctgaggtgctcattgaggggcagttcaccaagtgtggggtcttgaggttcgcatactcatccacgttgcatggcactttggcagatggatttgaagcaggtggttggccagctaggtgctttggtgggatgctt

SEQ ID NO: 32949 - DNA, 433 bp, Glycine max
aaagaaagtaaaagggtgcattgcttggctgttccaattaggaaagctagggcctatgcgggtaaccctctttacaagcacttttaagataaattaatgagaggaaaaataagacggacttcttcataaactaaaatgagttcttcattagctaatttgtagaaactctctcatatagcttctctaagagatgagaggacgtctacaaattagctaatgaatggctattttagtttatggagaaactaattttttttttttttatttctttatcctagaagtgcttttagagaaacttacccaaacaggtccgtagtctgagccattgttgaggtgaattaagggagtcttttccattgggcaagaccaacttccctaaaaaggaacaggtaaaatttgcagacgctgtttagctccatttgagttcattcag

SEQ ID NO: 32950 - DNA, 470 bp, Glycine max
acttggaaatgtgagatataaacttgatgaagtaaccaggccccaaaattgtttacaacaatcaaaacttctcttacaatgaccgagttaacattttgtcaactataccttggaagcaaagacaacagtagccatgccacatgatactggaccttcgttaatcgttaagaaaataccgagttaacaaacccaaatctggactgctagtagcaactgttgatgcaatctgagtatcttctgtgattttatagccattgaaagaaaagtaaaatctaccacagtcagatccagaggtcacgcttagattacatcactagcaggcttgctccactgatatttagcacaatcacatggaccttactcagagaccacatattccagtcccagctgaagaatggggataatatttgttctgaaagaacttccctaattgaacgagatcatattcagtatgttgattcattctttat

SEQ ID NO: 32951 - DNA, 150 bp, Glycine max
cttttcatgtggtaatttgacattttatcaatatgatcattattattgccatttgtgtatttaacattcattaattgtaatggaaataaatatcactcttggctgaggttgcaattatttagatctatctgtttattaataagtcatttt

SEQ ID NO: 32952 - DNA, 361 bp, Glycine max
cccatgaaaaggtccggctattggaacggcggttggcccttccccaaccttggtttattggtttgccaatggaattttggtaattaaaagaattccaccacctttttccgcctgggttaagggaacctataggtcccctttggaaaccggcttatttagcctaccaccaaacccaaaagggcccgggccttaccggtatttggcttccaagggaccggggcttaaccaccacccttaccggagccggcggttccaaccccggtaaaccggacctttcttatttgggcaggccttagggattggggccctgggggtggagaaaggggttggctgatttttatggaccccaaccccccaaaaa

SEQ ID NO: 32953 - DNA, 469 bp, Glycine max
gaggcagcaaccacgcgtctgtaaattgctattcaagcattgaacattaaagtagaaatttcattgttttatctaacttcatttaccataccagttcccctaataaaacatgaacacataaactgaaattaatgcctacttttgtggcgaaccaatataccaacaaggtgcttaatatttgttttttctgctgctatgctcatcaagccaagatataatatcaccaagcacgtgaaatatagtttcatcaggttcaccttcaagtagagtatggaaagcatccttatagaggcagagtttcttgtccttcactttagctttctcatacaaagccttactagctgatggatcagtaattatatcagcctctccatgcatgatcaacaatggcagagaaacctagcaattgaaattcttcagtggatttcattgacacacggaaaattccaccagaaacatgtgcaatagc

SEQ ID NO: 32954 - DNA, 463 bp, Glycine max
caacctcatctcctgcaccattctgaagatcaaagcttctctcagagttgcatgatgatggcaacaacaaccattttgttaatgcagtaataataatgcaagttaagttaccttaaattattattttgtggtctttatatttttggtttctaagatgaatatttattcggagaggggttatataatttggctgggtgtataggaattataattatatagagagtagtggaagaggaggctgaggcagaaaggatcgcgtaagaaaggtttcgagtcaagaacgaaccgcgatggaggaacttgtttgcatgcagtttttctgctcatagtggttcgggtattgactcgttcacctgcgagttagtctctgtgctcttgtttggataacattagaaaaaacaacacatgtgcctgtgttactacttaaattattactagtgcccatcctatcatacacatttgc

SEQ ID NO: 32955 - DNA, 413 bp, Glycine max
agattaccaaaaattacgaccaaggaaacgcagattctgttgatgaggaaatacaagctctattgaaaaagttaaattttataccaacatcggttttcacaacggacttgccttacgtggattttctggatcgtgtacataaggcagagctgaagcttagatccaagggtttatgggatgtacctcatccgtggctcaacctttttgttccaaaatcaaggataggggacttcgacaagggtgtgttcaagggcattcttggaaataagacaagtggacctatcctcatataccctatgaacaaaaacaagtgggaccagcgaagctcggtggtgacaccagaagaggatgtgttttacctggtggcatttctaagatcggcattggatactgagacgctggagtacctgact

SEQ ID NO: 32956 - DNA, 470 bp, Glycine max
cgaaacatagaaagaatattcaatcagatcaaagaacgaatcccatcggcagactaacatcatcataaacaagcgttttcgcaataattaacatctcctcatccgtgataattaacagcattgtttatcttaattaattctctcgtcatttagagagcgagcatcacgagggaagcgatggcggaagcagcaccaaagagtcccatgttgacgcgggaagcatcgctgctgggacctggtgccaaagcagaaggtgactgtgcaatgttatcaccggcaccgtcggcggcggttgttgcaagtggcaccgtagcagatgtcgctgctgctgccgcagattcaacgccaggtgcaacgataggcttgctaacctgaagaaccgaaacggtgtcgggttggctcgtcacggacctcacaagcacaacctcgaaaggtgcattcggtgcggcggcggcggaaccgaacgcaat

SEQ ID NO: 32957 - DNA, 364 bp, Glycine max
aaagaaacaaaatctcatttatttcagattacagatgcatcttcaatttttattggggcacataaaacaaccttaacgggttaaacagacaaattagaatgtttcatttcaatgaatatatcaacttaaccaaacaaaacttggccgagaaaatgttgaagtcatacaaaatccgtataactgacagatatcaaggggaagttatatgatggagcaggcaaaaagggaaaaggtgcaacagaggcatacgatacgggaggacgcgcttcagtccgatagggacgcctggccttgatattttgatcgccgttatcatcatccaactctgaagactccgtagaggatgcagatttcacaaaaccct

SEQ ID NO: 32958 - DNA, 486 bp, Glycine max
aattaaagtatcatgacagacattacataattaaatttattcatcctttatgacaagggtattctactatcttgtataattttcctgattggagggagaaggatctagtcggtgcagctggttcactcttctcaagttttgtcaaacaaggagtaattgttattcctattaagtaaaatcggaggagcccagcaaatgtcttttttcatggtgaagatcaatattttcaatggccttattgatgttttttcttccaaatatctgtaggtggggttggtggtggaagaccaaaatatttgtagtggaagctctttccaaagtttttttatttttagtcagtggggagtgggaccatttaaaaggaaaggatgggtacgcatgatgtatcgggagaaaactttaatacaagttgaattataatatggttagttaccttgtaaagatgttttggaagcatctgacaattggaaaagctaaagatatttt

SEQ ID NO: 32959 - DNA, 423 bp, Glycine max
aggggtaaggtaagattagatgatttgcattcaacggtcttgtaccagagttgacactcaatcaggtcacagtacagaagaaattaacaggtttcattgtggtaaactagtagcaatgcacatcacaactgaaaagatgttattctaaagctaatcagggatgaaaattgtagttgagaatcccttttaacacagttcaatgctttcccctcgaaaaattttgccttcaaatttgtagggcattagcaatagacccggctagactcagcacttcaaaaggagctgtatttgctacagctttgacagtaagagggcaagaatctgtaatccagaagtaggcaaatgcattctccaaggcgtcttttttatgagtgaatcgctcccatgattggttaggaaacacgccatgggtaacataggcac

SEQ ID NO: 32960 - DNA, 479 bp, Glycine max
ggcaagagaaaattgtattaatccagaatcggtcgttacttaacagtcaacagattgtccagccaacttacccaacaaagggattccaaatcagatacaattacatcctacattacaattacgacagttttagttctactatgaaaatacccaactacgggttttcttcttcttgggtatcggcggaactttggagatgacttaaggtaactctcgccttttttgggtgggatgactcttcttctcttgggccatcttcattacccttcttcctcttctctcccacattgtcttcttcatcaatagcagctgcagcaggttcagaactcaaatcaccttcagatcccaatgtggatgtctttggatcagattcttcagctatatctttgtctttctttcccaattctccattctttgctgacttctcatattcctgcagaaaggagcggatttcttcattggtagcaagatccaaaggg

SEQ ID NO: 32961 - DNA, 534 bp, Glycine max
cagaagaaatttgaacgaattcccattcatctaaacatctactttctataaacaacaagtacatggacagagcgctaaggtaacaacagctataaagaaattacaataaagattcaaacaatggttctatctacaagaaggatatttcaatatccaaaaatatatcctaataaaggtgaaacttgcatagtcacaagagcctccaatattgcaaactatagactataccagcaaatgatatttagctggctggctgtcctactcaattccaccgttcatctctcctcgagtctaattcttcaaacttccatcaagcatggatcctctttggggattttctccctttcgctgattttgttgtagcatctgcaaaagcttgtgcagcctccgcatcagcttctgctgcctctgcttcctttgctgcctcctctgcttctgcaatggcggcttctgcttcagcaactgctcgagcagcaaatgcagctgcctcttgtggagtcatagaccttatcttttctaactctaaatctatct

SEQ ID NO: 32962 - DNA, 391 bp, Glycine max
ctcagattgaatgagacaaggagcttaactaacagagcaagccaaagaggaggtggtgaatcaagaggagctttgaacttgctaggcaggggactgagttctgggttgtcacctaggttcctctctggattatttacgaaagaaaagccagagaagactaggcagcataaagacgaaaacattatcttaatgggttccttaccaagcactatatgatcacaacctgtacgtaagtgttatctgtctatatcttacgctgatcagctataccatacattttattacatcttaggatgtttcttcaataatcactaatgtccatgtattcaatttttggatttgtcattctttgtaaaaataaattatgtatagtgtgaaatcatgtttcttc

SEQ ID NO: 32963 - DNA, 539 bp, Glycine max
tccaactttgattctaatgctacgttctgaagatgctggtgttcattatgaagcggtcggtgtgattggtaatttagtccactcttcccctaatataaagaaagaagttcttctcgctggagctttacaaccggttattggattacttagttcctgctgctctgaaagccagagagaagcagcattgttacttggacaatttgcagcaactgattcagactgcaaggttcacattgtacagagaggtgctgtccaacctttgatagagatgcttcagtctcctgatgtacagctcagggaaatgtctgcttttgcattggggagattggcccaggacccacataaccaggctggtattgcacacaatggaggcttagtgccgttgctcaagcttcttgactcaaaaaatgggtctttgcaacataatgctgcttttgctctatatggccttgcagataatgaggataatgtgtccgatttcattagggtaggtggagttcaaagactgcaggatggagaatatattgttcaagcaacta

SEQ ID NO: 32964 - DNA, 497 bp, Glycine max
aatggtctggcagaagtaaacccagcggcacaacttccttgcagaaaactttttgttcatatatacataagggaaacaatatttacacctataatcataaagtcaacaatggtaattccctgaacgtaggcatctgagagaagaactgttaaatcatatagcagtcacattgcatgagaaaaaaacaatgttcgtgaaggtcatatttgctatatctatgataatgacgttacagacagaaaggggcttacacctcatttaaaaagaagaagaagcatgactccggcgttagatatttcttttagccaaactgtataccatacaggagattgctactagagtcggtcgttttgagagttggcctttgtaagagctttaacgaagtaattacggatctctggtgttatgcgctgaatcagaagagagtgccctggccttgaactcaatttatcaaattgctccaagataaaaaggatgcatgcatgcctcaatgatat

SEQ ID NO: 32965 - DNA, 565 bp, Glycine max
tcgagcaaaaacccaaccatactaaaatcagttgctgcaacatctccaacatttaacatagctatggcacctcctcaggcagacctaaggaagatcggtgcagaaggctttgctctgatagacaagttctatggtccagcaagaaggaacagtgtcaatgatgcattccatgggcgaagaggagatcgttgttgggttgtttataatgtgtctaatgatgtcatggaagattctgctgcaattggcatggaggcaacaactggccattttgctgcgaaatctgctatgaattatccaaaggcaggtaaacccgaaattcgttattggggtagacccttaaaattttaagtttttttggcttatgcatgttatcaatatcaggtgtcttcaaatgggtctgtatttcatgttagcttactcttgtttgatatatacgtgtataaaaaaaaaaactcggagaccttcatctatatttatatcaaggtcttctgtagtttgtggaaggtaaattacatatgtagttgaataaagtactcaagtatcaagggatgtaatgaaacctcgt

SEQ ID NO: 32966 - DNA, 407 bp, Glycine max
agtctactcggccgccctttttttttttttttttaatagaactcttaaacctggtattgaccaaggttaataatattacatcttctcttcattagtcaaagataaattcacaaaactaagagttaacaagcaaaactcgatcaaaaggaattgtacaaagtaaatggctgaacaacgttccttcccatcaacttgtatctggtggggccctattattacacttgaaacatttacgcagcgatatttttctccccacagagaaaaattacaagatgaacccaaaaattcgataaccaattgccataagaaacaaaaccaacaaatttttccacttcgaattggtgtccggggagatattggacacattttggagagcttgaaacccaaatatgggccttacctgcccc

SEQ ID NO: 32967 - DNA, 458 bp, Glycine max
  unsure (1)..(458): unsure at all n locations
gagaggtggagaaaatggctggtgtgggcggcggaggtgggggggttcccattgcaaaggaaattcagtctcccctggtgccctgccagctccctgcaccccagggagcagactgactctgggaaagcgggcaggttatggcggctgatttatcgcaggcccagctgccttcccgcacctctcgagctccctgtgacctggcttcccagcaacccctattccccaaataacctctggaggggcttaatgaggggaggctggatacctccatcttccccactgccctctcctttctcccatgtccacctcttgggagtggaatttatgtcgtctccccagagactgtgctgaaagtcaagatgtctgagccaaagactccttagagatctgctagtccagaaagacaaatcagcagccctttgctggtgnttttggtctgcttctcagtctgcacagtt

SEQ ID NO: 32968 - DNA, 478 bp, Glycine max
cactcaataactaaatttttaggtaattcattcactcgtgtagaagagcttagacttcctaccagatatacactagctttctcttagtgcaacctgctcatggagtacaatttgagatccttgaacaagttattctgtgtaaattgactggtgccaaaatttacaaatcaaaaacaaataaaagaatctgcatcactacttatttgatttcgctgggtagctaaaaattcagttaaagcatttcaagaaaatgtctgcattagtccctttccttccagtaactgttggaatcatgagaactctaacccacattaggtaaactacatcttgaagattctgctccacccaacaaccccataggactagagattatctttaaaccactttaaagctccatttgccacagatccagcaaagcccttcaatttattccatacatcattttcatcttctgatttttcagtttttttcttcgact

SEQ ID NO: 32969 - DNA, 410 bp, Glycine max
gtgacaagttccattctgagtttcctagattcctgacagggttttaaggttgtgggtacttgatgttgggaaaaaaggtgtggcctttactctcattggagaatgtctgaatctgcttggcactgtcgttgaagttgaaccatgaaaaaattagcttttataagaggcagtaatgtgcctttgggaatgtgagcatgatttgcaaatggggttgctctgaatagtttcacaagagctctcagcctctcaggaaggaaaaaaaaggccttggttttttttttttggagaaagtgagagtgaaaaaagggcaagggaatttcttttcaccatctttttttattcgggaaatagtttttttttttccttttcttctggaagagtctttgatagttatggaagattttgatatg

SEQ ID NO: 32970 - DNA, 386 bp, Glycine max
aatgtcttggaaacatgcatttatcataacagttactatacctagagcttaacagtaagagtaaccttgtttgaacgaaaagtgggaaggtgacagcctccataaggaagacgaaattcacaattcatatgtataaatcagcaaaccttgctaggaaattaagcacaaatttcaggtcaagtcagcagctttcgtgcaatagtaaagtcctgatcaacttcctttctggatgcttcccaaagtcgatgttcaatccccaatttcctcagttcagaaagtccctgctcagcatcaacggcatcatgtgaggtaggtgaatgcccactccgaccaatccaaaaccgaagacgttctttggcaatgtcctactctataccatgagcctt

SEQ ID NO: 32971 - DNA, 427 bp, Glycine max
caggttgaacattgtagttagccttcatagctagattgcaatcaaatgtggacactaacaaggaaatgtaagagcacaaagaatctggctccagaaaattgtggtcacctaggatagttgtctctatgacttcgaaattctaactaacaactaccctctacacaaacttccatcatcatcatcatctaaatcaccattggatttgacaaagtgaggactaatgtagctgttcactttcccagcttagcttagagacaactctttcatgttgtgggaaatattcctccatctctttgacaagctcttttggtgttggggcagatacaattatatggcgagcagtggggctgatgaagccttcctccaccgctttgtcaataaaagacaaaaaggtattgtagtatccatcaacattcagcaatcccac

SEQ ID NO: 32972 - DNA, 474 bp, Glycine max
aaccttaaaaagcttgaaaatgaccctccatctttatttctttaaaacaccaataggccatttcaaaaagatacgagcgtgcagacaatctaaccgggtttgacagagaaatgttaactaagattgtcttatcttaccctcattttacctaataatctcaaataaaatacatcattaggtacttgcgtgttcgggtcgtcttactcttgcactgctgatgttgtgaggagcccgttatattagttctgatgccgcgatgattacaagtacacagattttcacacactaattcccacccagatgaacagaagaccaaaaattgatacaaaaatgatccaccggggcttcttgtcaccatattatcatatcatgtacaaagaaacaaatacaaggatgcacccacattttaacaacaaacaccattttcttgagataaagcacaccagacatggattcatggcatgcgattatcat

SEQ ID NO: 32973 - DNA, 638 bp, Glycine max
atcagccaaatagaattatatatattaagataacagtaccaggggtactgtggttacaatagagttaaagaaaacgtagtgaatccacctgccaagctactcagcttggggaaatccacccactcaggagattacataatcaggccccttggcttgtgaaccctcctaaactacatccccgccattagaacccatcctaatctgctgaaaagcatattggtaaattggtggaccaataattgtagtgaataatgaagtctttctccgatgctctaagccacgaccacaacaggaacagagcatcatccattagcttagcagcgttaaatgattcattcgagaaaaggatcttatttctgtgctgccatattgaccacgttaatgccacccaccagcacttccacctatgatttctttttcctccattcatcccgttttgatgctgcaaaaaatggtacctagggataatggggaatgcccctactattccagtccatgctagagattcccaccatagagctagagatttgggacagttgaaaaagagatgagctgcatcctcctgctgagatctgcaaaacgggcataaactgtcgtttatctctatttgcctccttctgagattagatttagtcggc

SEQ ID NO: 32974 - DNA, 602 bp, Glycine max
aacataggacactgagaaatcctgtctgattcaaacgaaaaacatgtttaaccaaatccaaaacgcactatcaaaatgataacattattattcaaccttccaacctttctcaatgtagaagagagagagagagagagagagagaacttatctgagcatgcgttccctttagcgtagcaatcacactatcacttcaggataagctcttacccttgaaaaaaagccattcttttgtagacctttgcttggtatccatatagatcaaactgaatggaaaatcagaaaattaaccaaacataactttgactaaaacgaaatgtttgttcaaaccgcaaaacgttgaataaaaagatgtcttgcaactataataatgaacttctcacactgccctcatgatatcaatccataacttgtgaggagaagaaattttgacaactttattttgcactatttgtgcatcacttggaaggcaaatcctggtcttttttgggaatggctttcacttctgttaggagaatggaaaagtttaggcctaattcccaagctgaatggcaatttctctgattggctcatgagttgctgtgatgatggattgagagacat

SEQ ID NO: 32975 - DNA, 483 bp, Glycine max
gatgtataatcaactttaatttacactatttcaaatccaaaaaggaaaaaagaaagttacaatatacttggtctacttcttgccatcaagatacaatagtcaccccgttgatagttgtcccacataaattagtaatgtccaaaagcactattaccttgtaaagcttttttaaagggaactataagtagtcattttatacatctttgataatcatacaaaagccatctttatcaatgtaccatttgactagtttcattggtctccaaccattgttcacattttatcttccacttggcatagaggagcatcttggaattgcttcagctttggaactgcattgcactgaagatattgaggcagagggtcttaggaggggtgtaacagccctacttgaagtttcattagcaatgggagaaggggtagctgtaacagcttttacttgttgtaattctacttcaggagtatcaattaattgatcatctt

SEQ ID NO: 32976 - DNA, 419 bp, Glycine max
aagtatcagccattataattgttattgatatagggtataatatgagatgccaggaattaccatgacatacacttgtgagacatattgtatatctgctaacatagtataacttctgccagaaattcgttctcctgctttggaattggcttaaaataaaaataaccatagaagtcaaatttcaattaactacatctaccagaaattaaagaaaaaaaaaacattggacattccctccttctattgaacatggttgtattaccaaccatttttttttaaaaatcatgataataaaaacatttagcagtttcctatatacctgagatggtactcactaaccttttctattacaaaagatcttctacggagaataaagaaagatggaagttataaaaagagggaagggctgttatgcattcttg

SEQ ID NO: 32977 - DNA, 452 bp, Glycine max
ctttatctgaatgggatcaaataggcaccataactcacgttcccacaatctacttctaccgtcccacctcacaagacaaagacaacgttaacaccgttgcttccaccttgaaagacgcattaagcagagccctagtgccgttttatccactagctggtcgtttacattggataaacaagggtcgtttagagcttgattgcaacgccatgggggttcatttcattgaagctgaatcctcactaaccctagaaaatctcggtgacttttcaccctcttcagaatacaacaaccttgtccccaacgtagactacaccctcccaattcacgagctacccgtggttctcattcaactaactaacttcaagtgtggtggttttagcattagcttaaatacttcacatgctgttgcggatggaccaagtgcattgcacttcttgtgtgagtgggcaagg

SEQ ID NO: 32978 - DNA, 546 bp, Glycine max
gtaaatcacagtcgaattttttttcttataaataaaataagttggctgttttgcagcaattcttctattacaacatattaggtgtaattacaagtcaaataaggaattgagccaataatataaccaaaccaggtgttcctttataaattaaattcatctgtacacgggcatagaaaaaaatacataaaaattatttgttcagaacttggagagtagaccaaattgagtttcgggatatacacgagacgagattatattataacaattcttctcaccttagcagtcgatgtcgtgcacacttgttttccaaagacctccaagaaagacaaatttctttggctagagatcagacttgaacaaatgttcgtgttcttcttttagctctctctccaatcgtgtatttccatagcgagatttctggtctatccaaccaataatatcggagaatacaatctgcaaattttgtggtggctctccatacaatagaccgtgccacatttctggatacgactttagtgtcttatctgagcttgccgcctcatcata

SEQ ID NO: 32979 - DNA, 266 bp, Glycine max
caggaaggtttcccgtcatgactgtatgacgtcctccttcgttgggggggggggggggggggacacataaaacgcgaccgggaggacaaaattagtgtaaaacttcgctagtatggtaacggtacacagggataaggtttaggactaccgttaaagagagagcatagggggccaataattttaggggtaagtaggcagataagatacacgaaacaaaacccaaaacaaaaaacaaaaaaggaaccccaggcagtagagcagtagca

SEQ ID NO: 32980 - DNA, 530 bp, Glycine max
ttgctgagcttgtgaaccacccagagatccagcaaatgttaagggatatattattcattgggaaggctaacaatgacaaatgtgtccaacatcctactacgaaagacaaagttaacatacaaataaattgaagcccgcaaatattatagtatgaagaataaaataactgcatctaacgcacatacaacaacaacacagtttcagactctttgtaaatcagtaaaattggcatcccgtagctcagccaaagtgtaaaatgaatggcaatcgagctcaagctttctgtgtaagctctccagtaccaagctcaaccacaagccataactgcaagtctgcaactatatatatatatatatatatataagccaggcaacagtaaattcactagagaatagcatactgagcatgtacctgccattctagatatcacaaaccaaagtggcattagatttccttgcctcaatccaccgcgtgatcactcaagccttagtgaagaatcatcttccattgtccacacaaaaccaggcatg

SEQ ID NO: 32981 - DNA, 421 bp, Glycine max
gcatcgaacaatatattaaaattaaactaataaatgtacattaatagaagaaaaaaggcagaatgaacatctttgtacaagttcgaatccacaggggatccaaacactttcaattgcttctgttctgttacatctttcactacacatcattgacctgtatatcagttttctaaaataacatcactaagcacaattttcactgcctcttcgccaacgtcttcctcaaccctttgataattttctgaaaaccaaatcaagttcataactgatagtgccagtggcacaacaataactaacacttgtccaaacgcgtgcatctgctcaatctggtcaaagtgcaggtagacatggtaaaacatgtaaacgaacaaaagtattctggcaaccagccaagcaatgaatatcacaacccacgcgacca

SEQ ID NO: 32982 - DNA, 713 bp, Glycine max
gcaccctttggccattcatgatcgtacctatagcttccaatattctgattatcgagaggaagatcaggatggctggtgtttcttccatgcttcttttctttctatttgtaatattaatatctcaagtcagtgcccagttaagcgtaacctgtgattacagcaaggtcggaaattacacagcaaatagcacctataacaccaatctgaacacccttttatccactctctcttccaacacagaaattaattatggtttctacaacttctcacatggtcaaagcccagatagagtcaacgccattgggctctgcaggggagatgtggagccagataagtgccgcagttgcctcaactatgccagaagcaatctcacacaagattgtccaaatcagaaagaggcaattatacattttgacaattgcatgttgcgctactccaaccgcacaatatttggccaagtggaaaattttcctggtctctatatgtggaacttaaagaatgcaacggacgtggatgagttcaatcaagtgctcgcaaacttaatgaggaacctcaaaggagtagctgcatcgggtgactctcgtcgtaagtatgctacggatgatcaaactagtggaaattttgaaaccatatatggtcttgtgcagtgcacccctgatttgtctgagacacaatgcaatgactgcttggatgggactatctcagaaatccca

SEQ ID NO: 32983 - DNA, 825 bp, Glycine max
aaacaagaagcagggaatgacattcattcaggaatctgaacctgaaattaacatacagtacatttcttgctccaaatgacaatgtattcaaaggcataacacaaatggttatgtaacaatagagacccctggcttataagaaatcaaacggccaacggccaaagcgagaataaaccgtgcttacattcccaagcatgaagtgctgagcattacctatttccaaaaggagactagccattcccgctaccaagacaatgagtaaccgaagcctttaagcaatttgcaaatcaattattctcaccaaggattacctaccggacaaaacttatgcagtttcttagatgcgtttggtcttttcctccaacaggatttgaagttttaccttggtaatccaaggtaataatgatataaaactccaattctgataggagaacaccaccaaaagcacctatgtaactacataaaatttcgtccctacctaccaagtaccaccacacctccatcaaactatcaatgacagcaaaatcacacgaaactccactcaggtcccccattcatccatgagtgttaacagcctcccaaaccaaattctttggaaccggattggaaccgtctctggcctgcaaagcagcattcctcaaggtctgaatcgtcagcacattggccttccagaacgacacacaattataaggaagattatgtttcttgcaaagatccttaaccaaaggcgcaatcttcctcaaatggcaccgtggcagccttggaaacagatggtgctccacctgaaactgcaaccctccatgaaaccagtccatccaaggagag

SEQ ID NO: 32984 - DNA, 658 bp, Glycine max
caaactcaacacgttttcaaggtaattcaattctcagaaacaaagtaacaaaatacaaattacaatggataacaagtcccttaaataagagataccttgtatcttttcactagcagataaaaaacaaccaagttcaagatggtttaagaagaataaccaatatggcaagggtgcctcccctattctggaggattatatatcaggaaccaaggctcagaaccgttcaccaagaacagtactagatggtctagagggacaatcgaacagcactgaagatgatacctttagcactagggtctcaagcaccacaaataccccatcatcggattctaagaggcgatccaagataagaaaaccacagttcccattcaggttcatagtctcattccttgcttcaccatttagaagcaaaaactttagcatatccaaaaatgaaaagcgtcagcctttgttgaagtgcttcagctatgaacagatttccaatgctaccaaagacttccaccaagataatttggttggacgaggtgggtactcggaagtatacaaaggtgatctttcagatggacgaaccattgctgtgaagaggttggccaaggaccaacaggatcctaacaaggaaaaagagttccttatggaattggtgttattggcacgtctg

SEQ ID NO: 32985 - DNA, 362 bp, Glycine max
ttgggggggggggggggggcttgtggcgaaagtgatgagtgaggatgggtaagggcggtggatagaaatagggtaagacaaaaaggcaaaggaggggtgccgacaagaagcagcgacggagtgcatattgggtgccgcgttaatgaggtggggagacaaataaaagcgcgagcacccctgctgtaagctgctaggaggaaaactttttgacgggagccatgagccactaaggagtactacaagaagtgcatgagcgataatatggctacttaagggtggggagggataggtcggggtctctagttgccgctagcgggctaggtgcgagcgcgccaaggtaatgatataaacgaaaccccgcg

SEQ ID NO: 32986 - DNA, 361 bp, Glycine max
ttggggggggggggggggtgggggttgggcggtagagggttggctgttgggcgggggggaattgccccgtttaggataggataagtaatagggcagaaactaaaacttataacttttgttgtttgtgcagggccgtggtttcggtggaatcaacgttgcaaaataaacccggggccggggcgggtgtcttaatcggaaggaaggccacgggcagcaggcgtcggcagtgtgttgtaaagtaattattattatctgtataggagttcaatgagcttgtcttaatctgaatggccggaataaaagtcatctagtccactaactttccgtccaattcgttcttcgtatcgtatgttttccacag

SEQ ID NO: 32987 - DNA, 433 bp, Glycine max
  unsure (1)..(433): unsure at all n locations
nnnnnnnnnnnnnnnnnnnnnnnnnnnnntcggtaaagaaataggtgacgggagacacctataaaaaaggtttagggtatagcacaggatatgggaccccctggatacgcaccctgcaccacgagagcatcataagtagcccggaaagggacctaatatgcttggctaggactgggaaaatcgcaggtgtgtggccgtctaaggcttgacttgtatttggtttgggttagtcgcggctagggggcccaagccctaagtagcatatgacctgctttccttgagggaacaaaggtgaaatattatgccaaagggtaaccggaaaactagcggcgtaggtgagctgaggataccctgagaccgtgccggggcgccacaggcaagtgtggggcccgtccgctggtggttatggtgggggctctaatggtagcacaga

SEQ ID NO: 32988 - DNA, 468 bp, Glycine max
  unsure (1)..(468): unsure at all n locations
nnnnnnnnnnnnnnnnnnnnnnnnnnnnnnnnnnataaaacccatacccaaaatatgtggaggatggctaaattcagtcacactagttaaagatacatagatacttaagaagaattagacataacgaggcctgaggggaggtaaaactataagacagaactaaattatatatataggggacagccacagatgccgcccaaggttgggcaaatgtagtttggttgtatggcaatcagccactaagcgcgagccaactgcaatgcctttagcgtcctggggtacatggccagtaggcggttgtgcgcgcagggggtttgtaagggtgcttacggccgggttaaatgggggcaaactggttaagcttgggcaagttcgacgttaagggccaggagtttgggccttaaccgacattgtagtacaactagcttggcataagagtgtgagtatgcaaagcgtaagaacccgtgt

SEQ ID NO: 32989 - DNA, 447 bp, Glycine max
acctgtagggggctgccaaaatactggcaacagccttcaattggcctacaggataatagttacaaacaagtgatttgttatggccgctgttcgtggtctccgccgagctaaagtgggcccatcatgtggatgcccaacattaggatggcccaccgacacactgtgcatataaggcataagcgcaaccttaacagttaacataaccacccgaggttgttacattactaaaccggcagggggctgcccaactactggcaacagccatctatctgcctacatgataataggtaaaaccacgtgatttggtattggcgttggtcgtgcaccccaccgagctacagtgggcgcaacatgggcataccaaaaatgagtattggccaacggcaaacggtacatataaggcagaagcgtaacctaaaaagataccataaccaaccgagtttttta

SEQ ID NO: 32990 - DNA, 382 bp, Glycine max
ttgggggggggggggggcacaaccaaagtgggctgacgatgtgactaggggatagtaggctacagaaaaccgataaagattccggagcccaggctagcaaaggtaagttgggggtggatatagagagacggaaggagtatggaaggagaaccacagtagcgttatgaccaaaaatgtaaactaaaaagcaagcagaaagagcagaagcatgaggaggcgtagatcggaacgggcggtagtgtttgttggagcctaggcctttgtatgaactgtttaagccgcggaagccttaagggtacagttgttaagccaggcttacctattatgcgtggcgataacgactgagtaaaccgtagtggtgctatagatgtagtactatata

SEQ ID NO: 32991 - DNA, 364 bp, Glycine max
gccttatcctaatactactgcttattgtcgttgggagccccatctcgtgttgccacctgtatgttccactcccctcacgctatctttcaggtcctggtcctaacaaaaacctgtttcttttaaacaaacttgttaccccagtcccttcacatattcatacattttgggccgagttccctcttaaactctttcaagattgtcagcccacgtggcgtccacatgatcccggtcagttcgggccctgacccaactttctccacgattgctacggtcactgccatgtctgccattacaattggctcaacaatcgcctgccccatagtaggccaattaccattcactgtctccatcgcaacgttatctt

SEQ ID NO: 32992 - DNA, 489 bp, Glycine max
  unsure (1)..(489): unsure at all n locations
gttacgacgccagttcaacttactggtactgtgcacccgacaagctaaagttgcaattgtaataattgctcctagtattagtgctgccaggagtaatacgagtattttgcgaagttctcggcagtatctttctgtttatagtacgcgtaggtgaataaatgaatagggctataaaatatcttaaaaccacgcaacagtgaaataactaagtgcgcgcgcggttcttagcaatcaacaataatacgcgtgctggtgtactgtactggtgtctggtgccttttttaaaccacgcaactgagtcgatcctatgctccctggtacccttcagctagtatggtgttaagtcatccgcgatacacgcccaagttggctactttggacagtctgtaacatttctgttcgtagtccttgtagcagtattcttgcatataatanacgtgttcagaatccacgtaaaagtctgcatttaactcctcctagctgtgtgta

SEQ ID NO: 32993 - DNA, 619 bp, Glycine max
cagcagcagatccggcgggacaaggtaaggttcgaggcggcgccattggtagggatagaggaggaggaaccagtgtacgagaccgccggaatgttgtcggagatgttcaattttccgcccgcgacggaattgctggagcagcagcacgccacggcgacgttccgggcggcgaggcaagccggagagtggtacggaaacagacagcagcaacagcaacagatttcaggcattaatgctgactcagcagcagccatgcaactttttctgatgaaccctcaaacgaggtcgccttctcctcctcaaagccacactactccttcttcaactcttcacatgttgcttccaaatccttcttccaattccctccaaggatttactggttcggccgcgggagggtcttttggtcaattcacatgggttcctgagggtgctcaccaacaaggaggcgtggtggaagggcaaggtctttcgttatcgctgtcttcttcgctggaggcagcgaaagccgaggaattgaggatgggcgatagtggttttctatattacatccaccaccaccaccaccatcgcctctgaggtggcgccacccgtgtctcagtgcttcgacgactcagacctg

SEQ ID NO: 32994 - DNA, 310 bp, Glycine max
tgttgttgtcgcctgtgaggatgatgatgataatgacattgacatcccccaaatatccatctatttccgttaggttgttttcgcccctataagcatcaggtgtgtccgagacttgtctttagttagaaaatagaatatgttggaccttccagtttcttattcataatggttaattgcttacactccaaggaacgacactgtccaccgcagtccacagctcatttcatatatgaattgaaaagcagctttcgttccttgtattgtatgttatatcatttgctctaatttttttaatacaccttgtttcttg

SEQ ID NO: 32995 - DNA, 494 bp, Glycine max
  unsure (1)..(494): unsure at all n locations
atccactccttaattccccaaaccaaacacgccgttaactaactcaccaaccctccctcctttacccgagagatcgattctctctgtaagtaaatcttgccgttaactttctcggaaagtcggaatttcccggaaaatggaaggaggtcgccggaggataacactttacgatcaaatgaaagccggcaacagcagccgatactcactcgccagcctcatgctgggcgatgtcgttttcaagaaggtggaagcagaagaagcagaagaagcagaagccgaagccgaagcgagctgtgagctgagccgaagccggactctccaagacatcattcgcgaagaaaaacctagcaacagcagcaacaacacgaaggatcgcaactcttggagagccttcacggcgaagcttcggctcaagcgcgccatcngctcggcttggtcctccaccaccactatcactaatcacagcaatgatgatagaaatttacctaatatac

SEQ ID NO: 32996 - DNA, 456 bp, Glycine max
ttctttttttttgcgagaaagatatgatgatttaggggaatagaattctccacttcatctaatatatattgaacatatgattctacaaggtatattttatctttacaaagtaaaacataaaactagaattgaaggttaaaaatctgttgcatactatcagggcagactacacgttcggaaagggtatagattcagtctactgtgctttatatatagttcaaaccctcaatgccacctggtcttgccatgaaatcttcctcttccctgccctatttgatccatccccaacacttctacaggcagccgagagcttgatgtcgccgtgctgctcgtcagccgcaactctttgtgtacttctctttggttcttcgatccccatggcctcactgttcccctgcaattcctcctcttctctcgaaatctggttcaagtcgaaaaatggagttacactcttct

SEQ ID NO: 32997 - DNA, 527 bp, Glycine max
  unsure (1)..(527): unsure at all n locations
cttgttctcttcttcttcaacacaactagtcataatccagctcatctctctctccctgtctctttgttctctctttctctttctccaaaatggctctaaactacccttttttaacctacttcatactactgctagtaaccataacccgtttgatattcactgtgggaaaaactgagcaatggaaagctccgattctaccagagcttgacattgataacatatcccacaaactccatgatgaccctgaaaccattcaaatggcttcaagggactatggccatttaacgcatgaattcccattagctgtgtttcgtccatcttctatagatgacatagtcaccttgataaaatcttcgtacaatagctttgccccttttgacatagctgcgaggggccaaggccactccactcatggacaagccatggctcgtgatgggattgtggtggacatggccagcctaagaaaacaaagaaatggggttgcgattagtgtctctaaggaccctntgatgggtcactatgctgat

SEQ ID NO: 32998 - DNA, 449 bp, Glycine max
caatatattgttcatgtttatgggataacggtacaatggattcaagatgaaaatcttgaaacataatcctttgtttcacttcattttcatttcggtcccattatcctcaatattattccaaaacatacaaattataatacacaatagttaataatatattgcccatcatggaatacaagatgcttgttttagcaacactttgcttatgtcatccatgttacaaatatacacatgaaacatatggagaaaagcttattcttgctcatttccatccatgcttaaattctaagctatcttgaaaggaggggatttgagagatggattagcgaaagggccctcaactagtcccttagctattagcctatacgctgcttcagtaaaatgaggcccatcccaatttatttgttttgaaggatctgagcaaactattgcagcaggactaccacata

SEQ ID NO: 32999 - DNA, 449 bp, Glycine max
ggggttacacctgactcaacggcatgggcttacataagtacgggggacgccagcggtggggaacggccatgagggcataaacttggtaggggggcaacaggggcctgggcggcacaaaagaaaaagcgtacatacccgcaacattccacagcaatggggtggccggcctgatttagaggggaagcgtaagcaaagctgtcggcgccaacaatgggagaaacacctccgtggcaatatgcaatccaaatgcaggagaggtaagccacaatgtcagtctagaacagtgccagaggagttagtaggtggtgatttaaactggctgctatggatcaacgttggttgattgagcagccaaatgcgcgaggataggtagaagggtaacccttctaagccaccaatatgggggaacgtgctgactgaaaggaatgtttaggccgtgaaggagcggc

SEQ ID NO: 33000 - DNA, 627 bp, Glycine max
  unsure (1)..(627): unsure at all n locations
nnnnnnnnnnnnnnnnnnnnnnnaacttcacaagacgggaataaatttcatttcaattatacgtttccatatatacatcaggcacacaagtaatccattcatatgttaaattgttacacaagcatacaacagtgtcatgatttcctcaggtccacaaatattggaagtttgaatgccaatagcctcgaatatgcaacttgaatcttagcccaaaacttttacttagttattggctttgccatagcttcttgggaaagggataacgtccctaacattgccaaggccagttgcgaagaggaccatcaggtcaaaccttagagtgaacccagagttcttcactgttccgtttcgacgaagatctaggtaccattcatacttctctcgcggcaagcctaactcatcaatcctggagcttatcatgttaagacgttcctcgttttggctaccagatattattgttccaagctttgggacaaccaagtcaaacgcagctacagttccatcatcattctggcgagcataaaatggcttagcttcttttggataattgtatatcacaaccggcttctggtagatggtatcagttagatagcttaggtgctctgaagtgagtgcaaaccctgactc

SEQ ID NO: 33001 - DNA, 315 bp, Glycine max
tgcggccgccctttttttttttttttttataaaaaagttatacacttaaaagggggaccaaactttatttggggcatacaattatctataattcagtagttaaattcatctaccttcaaattaataggggcccagagaaagagaaagaccttccaggtgacgtgtaaatagagttccataatacaagaattgtatgatgaacattaaaaagccatcttgaagacaaagtactgtgcaggtaaaatatacaagcaggaaaggaagtaatatatatctgcatcattttgccgaacagctgcgttctgtacagttatc

SEQ ID NO: 33002 - DNA, 489 bp, Glycine max
  unsure (1)..(489): unsure at all n locations
acccggtgtcaaatcgcgcaaatgtagaaaccctaactggcaagtgtgtcaatcggttaagctacttaatacaaataggttacccgcgccgttaccggttgtactacagacaattacaattgtacgccggacgcctggacccaacaaatgcaaccatggcagccagcaggggtaacccggcacccttacaagctacaagcacgataaccaaattcgccaatcaaccgatgggattagaataccacaaaacctgcagcaacatattagacacaatggcagagtaacgccacaaacgcacacggggtggtacaccctcaggtaccaataacccaccccgtacagaagccatattagagtccacaggtaacacacatatcagctgcggaaccacagacacaacaagggcaggcactgctagtancgcgggggccatagcctactgtggcgacacgtgtaaccgtaataatggaataatagacacacgtagcg

SEQ ID NO: 33003 - DNA, 198 bp, Glycine max
aaaggataaaataatctaagaaaatgtatacatcaggataataacccttattaaaggttatagattacatttcaaccacaaacatgttctcccttgggggtcaacaagaaatcaaatcacacaacaatttctttccagcatttaataataacgctaaaatcactcactcatatacatatatattataagttataaata

SEQ ID NO: 33004 - DNA, 416 bp, Glycine max
aattttgggtgtggtgtggttaaggataaagtttggtggtgtgtgtgtgtgtgggaggtgtagggtataatgtagtaagttttgtgtgtgtgtgtttaaatctaaaattgaactagcctgtacaacctttacaaaaatcatatgcacgggaaccgttttcaatttagtagtaattttgctattattattattattattattattgtcagggttcaattggtgacaggtggtcagctaattatttttcttatggtagtctctgttttaaactcagtttgtttgtgtcatcaccaagtgtacatccattaaatcatcgtggtgcactttaaatctcttcgcaattctgctgttcctgcttcctcctctcgcccatgtatcccaggttccgcttctgctccacattggggtgctctaca

SEQ ID NO: 33005 - DNA, 497 bp, Glycine max
tttttctttcactatccctttcgaactctctccgattagggcacacgcgatgcctctcttcctctccgacgaggagttcgcgtggtgctccggtgacggctctgccgtggccgcgaaggccgacgccttcatccgcggcctcttcaacgagctcgacaccgtccgctccaaggcccacgccgccgacatcaacgccgagcagaactgccttctcatcgagcagaagtatctctccctcaccgccgagttctccaaactcgagtcgaacatcgccgaacttcaatcctctctcgatcagcgcctccgcgaaatcgacgaggtgcaatcgcagaaccaccgaatcaaattggaagcggttgagaaagatagggagatagagcggttgaggacggaggtggcggagttgcacaagtcgaagaggcagttgcttgagttgaacgagcagaaggatttggagctaagtgagaagaatgcaaccatgaagagttatcttgata

SEQ ID NO: 33006 - DNA, 418 bp, Glycine max
tgggggggggggggggggggagacataaaggatgacggaggatccgaaagccgtatagatgataaacccaaagaagagtctaagtctgcaataagcggagggaataaaaccagtcattatagagaaaaataatttaatgttaagtagtagtattatcgttactaaaagataggtaaaactgagtgaaaaagggcaccaatttatacgcctctaggacaaattagcattagacaagggagcacacaaagaggagccctattcgcttgtgttaataagttttaaaatcggctggatctggtactaaatttaactgtacaaactggggccgcacttgtaatcgaagtactcaacaacctagtggtcgttcagctagagggtgtaataacaacctccaatataaccgtacataaaacgcttg

SEQ ID NO: 33007 - DNA, 510 bp, Glycine max
ttcagaacttatctgtggcagtgtctgttctgcagcagtgcaaaaatctcaccacccttgtacttactaagaatttccgtggtgaggtaatttcagaaagtgtgacagtagaatttgagagccttatgattttagcacttgggaattgtggtcttaaaggccatattccttcttggttatccaattgcaggaagttggcagttcttgacttgtcttggaaccatttgaatggtagtgttccttcttggattggtcagatggacagcttgttctatttggatttctcaaataattctctcacaggagaaataccaaaaggtctggcagagttgaagggcctcatgtgcgctaactgtaatagagaaaaccttgctgcttttgcattcattcctctctttgttaagagaaacacaagtgtaagtggactgcaatataaccaggcatcaagtttccctccttcaattctcttgagcaataacatattgagtgggaatatatggcctgaaattg

SEQ ID NO: 33008 - DNA, 486 bp, Glycine max
cacgctttagcagggggaacctggtgaaggctagtaagctaagtgagagctggccacccatggccgccgcacaaaaaacggcagttgacaagataacaaataatgggtagataatagatggggccgccttcgtggtaagttaaccggaacgcgggcaaggcgaagtagcaagtacaaaccgagcacaataggagccattgcattggccacagaggcccggcccggcacgtatgccaacagctctgcatgtacgggatggctttgcaacagcgccagccacacaagagcgatacagcgccaaccgctatagtagagcggtcactgacaacctaatgcactagatagcacctgttgaatagtggcatgagacggtgcaacacagggtagcaaccaacagagcccaaaaggaataacgcgtagaatggagttgcaaacgtgccagagcaggttgggtagcattcccatccacagaggttattatgggat

SEQ ID NO: 33009 - DNA, 485 bp, Glycine max
gaaagagaacaatttgttgtttactaatgagagatgaaggaactaatcatttgtcttgccatcgcaaaagaatagaactcccataattccattagagcagcaattaatatggggttaaatctaaaatccaaacaatggttgccccaaagttacacaattaaaataaaagttgcaactttaacttgcctactgtgtatatccattcctatagaagttcctagtaggacctctaacgcagatttttggggtaactactatggggacataaggaattgctgtaatttgaatttcaactttctgcttgcagaagaacccgcataaaaaagggcaatacaggcagaacataaacaattcattgtgcgtctgagtctgttggggtagacttttccgttaatgcagcaagctgtgtctcctgctgtttcttcagatacctctgggaagttgcattcactatcttgacaaagagttcataagcatgagccaca

SEQ ID NO: 33010 - DNA, 584 bp, Glycine max
catgcaacacaattaacaaatttcataaatattgaaccaaaaaataacaaatcatgttattgtattcacaaatccaaacaaaacctccaccctaataactttttccaactggtctctttttttttttttttctttagattttatcactcccccacttgagtaatgagtcagaatccctatccattttttacactgtggcactgtccacccctttttgggttattatttctaatttttataataacttctagccactgccacacagagtgtatttttaaaaaaaaagagcaaaaccgcaatgcatcccacgtcagcatcacgcattagttgaccaacaactgctctccacgtgtgcactgtgtgccacttgacttcccacttgctcctttctcaatccactttgagccgtcaccgtggaccccaccaccttcttccgcctcttcgtcgacgacgcactatccgacgaagaagacgacggctccggcgaatacctctttgccgtgacccgaaccggttcgggctcgcctgaattaatccggagcgggaaattcaacaaagcgcgcgagccgcgcattcggtacgcg

SEQ ID NO: 33011 - DNA, 508 bp, Glycine max
ccaggaattagggacattaaatttttttgttgggtcttaaagtaaaaatcacatttatatatatataaaagggtgttgtacaagaagattaaaaaaaataatagcatatacgaaagggataactagacaaaaaatgggaagaaggaatggcatcaaactgtgaagccaatccatccccgtataaatcgaaattacaagagagcacatttgtaaactcagatcttgcctccctggaattggaaagatgatgacagtatcctgaagagtccatccgggttatcagtatgcacccagtggccagcatcttcaaggacatgcatttcaactccacctccttcctcaacagcaagctcttcagctgcatggatccgctgaagatcttcaagagcccatctatgtaagcttctttctgctttcaaaaagttcacatgcaccccacgaggtacatcttcaacaattttccacaaatttgtttcttcataggattgatacatttctgcaatccccc

SEQ ID NO: 33012 - DNA, 516 bp, Glycine max
tagcgccgcgaggccaaggcaacactcatctgaatttctgaactctcaaaaatggaaacgccaactgtaacgatacctaaaattggaccaaaaccgtcaaagaaattgaagcttcccacaccaaaggagctgatatcacactatgagtctcagggtatggactcgcaagatgcgtccttgaaggtcatcgaggatcttcagaaggcgctgtttggagtaatatcctctggcaaaggtaaacatgacaagctattgactgagtcttctaggaagattgatgcaattagcaatcgactcactgttcttgacatgaagcttgattccaaacctggttatgttgagacttttgcaattgggcttgcctcgggagctgccctgaaagggattggtgcaattgtgcctcatattattgcccctcttttccagatatggaactctgttttcactgccactaaatcttccccccaatgatattgaactttgtaattactagttagtttgtagaaatattttttt

SEQ ID NO: 33013 - DNA, 569 bp, Glycine max
gaaggtttcccgtcatcactgtatgacgtcctccttctttgggggggggggggggccggggggggtgaagagctatggggttaggttactgagtaggcagcaaatagctctcacaatatggaatacataagggagataaatacaagggtggtaggaatatggaatactaaatatcaccataggtaagtattttaaagatagaatggaattagatagaccgaccagcaaccaagtagaggttggtgaggtatggggaggcaaaattacccaaacgatgctaataattagacacttttgacagccacagatgcggcccaaggttgtgcaaacgtaagtttgttgtatgacaaccagacactaaacgcgaacctaggggacttcctttatgctccgggtgtaatcgtgtcgttggcggtggtgcgagaactggggcggtaagtgtggcaactggtgggttaaattgtggcaaccttgtgacgccattactagtacaacgttaagacgtattattagtgtgtgttttaaccgacaatgtagtacagcgcgcttggcataacagggtgagaagg

SEQ ID NO: 33014 - DNA, 455 bp, Glycine max
ttgggggggggggggggaaaataatatcagagcataagcgaagctagggtagaggcgtatataggtagaataaatcgaccgcccaagaggacacgatgaggaggaagccccatataaggcacggtaatataaattcaatggaggggtaacccataggaggatacatttaggaaatagtaaacggtggtaaagcggggcccaatatagttaataggatataatcactggaaaattttttatccacatccaccataaccgcaacccggcaggttggtgccagcggcgacgtactcacccgttggttagttgtcactgctggcttactaaaaagtacttgtgctgccgttccgcccagcttggttggcgttgcaagtggccttggtataggcgtaagccgcgtacactgtgttattgtcacccgaagacgtggatttcgaacacgtggtatcaaaagt

SEQ ID NO: 33015 - DNA, 438 bp, Glycine max
ttgggggggggggggggggacgaggggatagaaggtagaatagcattatgttttaggccagggggtgggaaacgaaaattataaatataggcatagacatgatacgcatagggcacagtcaggatactgcgcgtatatgagccaccaccattagcctcaaactgtaaacagatgagctgcgataccggaacatggaacttggtggaggcgcatacagcctatatagaacaataaaagaggcagaaggcaaaacacaaacaaaaaaaacaagtgttgaaggacttccgtacaaaggtcggtttggcggtagacgcacaaaaagaggccgtatggacgcgacccaagaatagtggcggatgggtggtggtagctagtatttacaccccggcacaacaaagcggcgatgcagtttagcagccgccacaacctagaagtagt

SEQ ID NO: 33016 - DNA, 346 bp, Glycine max
gagacatggttttcagatccagatgtctgtagggaattagagttgcggtacacactgtcagagactttggctgaggatgctgcctggaaatgtgtaaatgaaaacagcattgacatgatttctattaacccaactatggtggcaggacctctcttacaaccagagattaatgaatgtgttgagccaattttaaacctaataaatggtaaaccatttccaaatgaatcttttggatgggtcgatgggaaagatgttgctaatgctcatattctggcctatgaaattgctccagctagcggaagatattggttggttgagagagtcatacactactctgaacttgcta

SEQ ID NO: 33017 - DNA, 587 bp, Glycine max
ttcttggacgaggaagaacatggtcctgtcgttgaccatcccatctggtacatccgcaccaccggtctccaacaagcagtcatcaccgccatcaccgtctgcaattacaaaaaagacgaaggcttgatcgaaggtacagaatgttcagtttgcctcagcgagtttcaagaggacgaaagtctcaggcttttaccaaagtgtaaccacgcttttcacttaccttgcattgacacgtggcttagatcgcacaccaattgccccatgtgtcgtgctcctattgtcactgacccaacaagggttccttcttccatggaccctactgcgtttgaaacaagttcttttgtggaggagatttttgaaaatagtgcggagaatactcaaaatagtagcgatgatttgttgaggggtgaggaagaggaaagagtgcaagaagatgaagcgtgtgaagagaacttggcttctgaagttgtggtgactgtgcagcagccgagaagatcggtgtctctggattcttcttctgctgctaagatcagtcttgctcttgctactgttgtgacaggggaatctcacggggatcattcaaagag

SEQ ID NO: 33018 - DNA, 887 bp, Glycine max
gagccacgaaatcatctatttgagaattgatcacacacttaataatttattccagtacaaaagcacaagtacattcacaagctacatacaataagtataaaagattccctaattcccatgccattgtcctctcacagggtgataaatatatttttaattcatcatatcatctaattgagaattaagcacacacttcctaatttgtttcactacgcaagaacattcacaagctactaaattgaccatcaacgattcataagttctcatgtcattgcccactcattgacatcataaacacatttagaatccatcatagattatgcgaccatatcatactatttcaccaacccttgagaaagagcaaggaagaagatgtcatcaagcctatcattactaggagagttgccaccatacaccaacaacccctcgtggccgccccgccaagctctggcaaaagcacaccaccctcggggcccaggatggccaccgaaatccaccttatcctccaacctcttccatgctagtgtctccatgtccaatgcataaacctcaccagaaaattgaccagcacccatgtgaccttggtcgctaggatcaatttccccaccatacacaattatatgtttcccatcactgaaactgcaaaacacactgcgggcggtgggcttttgcccactagtctcaacttgggcccaagttttctgggctggatcaaagcaatgcacatcatccatctccattccagcgaagccatacacaacccatattttccctcgagccacaaccaagcccggcccacctctccccttgcaattctcaccgggagaaggaaactccacccacttgttctcaacaacatcaaaagcccacaagtcattaagcctccc

SEQ ID NO: 33019 - DNA, 388 bp, Glycine max
cactgtaaactaagtttcttgcagtaccaagaagaaagtggggcgggctgaacaacaataaacctcgagagttgtgctgagatcattacctcaggaagccctttattttacaataaaccgaataaagaacatccttcaactatcccagttgttcgtaaaaacaggacacgagtccgtttagatccacaattattgggcaatggctagttttttttagctaagtatatgctcatggaaataataacatgtatgaaacccagctaaaggaaatgtttaagcgtctcctaataccaatagaaagtagtagatgattatatatgagcagatgacacactcagctcctgaatcacatccaccatggttggtctttggtctggaagctcatgag

SEQ ID NO: 33020 - DNA, 578 bp, Glycine max
agtgctgaagccctaaaacaaagtattggtggaatgagcagtgagaaacagcccttgttgagcaaatggagagccttctttcgaaaatcacctctagaagatgtggtagtagttaagaataatgtttacgataaagggttcttccacaatattcaggaggttatttcccctttctctacaaggcggtcctttacacaaaacaaattgaagtccagctgaatatgctcctaacatacgtgtctttctagtgggtagtgggtctatgcatttctttagattacccaataaatcatcgtgaaaaccagaaaaatgatatattaaattctatttttaaattagagttctagactagatgtagagtgaaaattgattgtttgttagcccccttgtgtctctttttttttgggttggttttgatgtattattccctattagaaaaaaacagaaagataccagtagaggaaccaggagtatatcacccaagatatattttctttgcaatattgatccccaagcaaacctatttacaattcacatcaacgagcaaatttcaaaacatgccaacttgtttagcagat

SEQ ID NO: 33021 - DNA, 511 bp, Glycine max
gaaatagttaggagatgttttctcatcctcttctgttttcttcaatacccttgcagataccctttgtatgcaaaagctgctctgcgtcaagcttgttacaaggcattgcgtctcaccagatccttggaaatgaaagcctctcagcttctagatgcaatacctaaaccatttttgtctcttcatcttcgttttgagccagacatggttgcttacagccagtgtgagtacccggacctgtctcctgcttccattaaagccatagaagcagcacaagtggacagaaaaccatggactggagagttagcccgtgtttggagactacgtgggaaatgcccacttacacctaacgagacagctttaatacttcaatctctttccatcccactaacgacaaatatatacctggcagctggagatggtttgatggaaatcgaagggttgatagatacctatgccaacatagttactaaatcaagtcttctcagtagagaagacttcacaagcatgcatg

SEQ ID NO: 33022 - DNA, 831 bp, Glycine max
tttcttccttaatccaaatttccttcttcaacaaaatcgtgtgacccgatcacaattgcagtggtcactgcaaatacaaaaccgtagaacatttcagggatccaaacgcccaatcggattcgcaagctcggaagagcgaaagagaaacgcatggcaatcttcttcggtgcgtgcgtgaagatcgaaccatggatgacgaattgctcgagctgcagcgacaattcgagttcgcgcagcaagccaagtccagcattcgcttatcggagcgaaacgtcgtcgaattggtccaaaaactgcagcaactccaaatcatcgatttcgagcttctgcacactgtctccggcaaagaatacatcactctcgatcaactgaggaacgagatggtggcggaggtgaagaaaatagggcgcgtttctttgatcgatctcgctgacgctactggagttgacttgtactacgtggagaagcaggctcagagcgttgtaacggaacaccgagaactgatgttgactcagggagaaattatgtcggagtcttattgggactcgattgcagaagagattaacgagaggcttcaggaatgtagtcagattgctctgaccgaactcgccgcgcaattgaacgtaggtttggacttggtttcctccgtgttggagccgcgccttggaacaattgtgaaaggaaggcttgaaggtggacagttgtatactcctgcctatgtggctcgtgttggtgccatggttcgtggtgctgtgcgggcatcaccgttcccacgaatttgactgtggtatggagctcattgcagcagttgctgcaagaaattgatggaac

SEQ ID NO: 33023 - DNA, 471 bp, Glycine max
ggaaaatcaaaagcatataaggctatgtaaaactttattatggataatgaggtaaggtaagattatcccggttagtcatactctataatggggggtttaaatttacaaaacaggatgcagtcatgttcatgaagaacatgagagaatccccattcaatattctgtgagttggaacctaaagaatcgctaagtaaactaaaccactacttatttaccactttattataattcataataaactaggaaatgatttaacttccaccttagaatagctaaagaaaaactttagggacctattgggcgacagggttcaaaaagaccccaaaagagaacatatatactatatccgacaatcatcgacatcaattggaggaatctgcagatgcaccatagccataagggtttttgctagcccaattccattgatcgcggcacatatcatcgatgctatatttagtcttccaattaagt

SEQ ID NO: 33024 - DNA, 407 bp, Glycine max
ttcaaaatgtcaccatctgaaattctatcaattgcactaggaatcatagataactgagaatgattggctatgaatgacagttgaacaaatagtctgtccggatcaggtattagaccttcatggaccatcatattgaaaaataaaacacattcctttactttattttgtttactcatgctttgaaaaagtatacactatgcttccaaatcaagattgcttcctaccatcgacatttgtgagaggaatgctaacagatcttctgccccccttcattttgacagctcatgcatgatagtcgtgtgtgtagcaatacagcatgacataccacagaaataagctaattgccatagacattttatcaacttgtagaaggacaaggaatgaagagagcatctcttcattgacat

SEQ ID NO: 33025 - DNA, 672 bp, Glycine max
gataaccatgatcaaaattattataaaatttaattcatggcagatgtgatttcgtaatatccaagcccaaaatcatgtctgactaagaattatggggctacgattcctacgaaggagggttccaagaagtccaaataaatccaaggaagtcatatggtacaacttagaacaatgatgctatccaagtatcaagctctctatatttttgtacaatatgtatgctagcagtagcagctgcctatttgattttgagaagtgtgcgcaaggcgttcaagggagaaaataagatgccagtgagcctgtacataaaatttctataagaattttaaccatagtattggtgattatttttccttgtatctctgatgttcaatgtctaacctgccacccaaattgaaaaccgatcttcgtcaaaatggcagtattcgtattcaggccataatttctttctccatcccaatgactttaattcttgaagcatgaatatacaatcttcgcaaggagcacctaactgcaattgacagtttgagtcaaaacattctgcaaagctatgacaaggcttgggccatcgtagaacgatatgagaactgctgttcataaaggccacggaagatcttgtatttggcatcatggtacttttttacctttggatccttagatggatgaatgacc

SEQ ID NO: 33026 - DNA, 338 bp, Glycine max
cacaaacccccattatttgtgaacttgaacgaggttgtaagcattcagactcgataacgattcgcacccaaaccgcaaaacaatttgagggacccacgctaagacacaattgcacagttcagctcaataagtacgtcaaccactggacacttgggatggcagagggacgaaactctatgtatgtgaatcctcgattggggctagcagcccgtactcacaaaagcccaatactcctggaacttaggaccgcgacctcttgggtacaccgccaagtggtgacggtggctgagggcatttcaaattcagtcagtgacttagcactaccggcaacacactgt

SEQ ID NO: 33027 - DNA, 427 bp, Glycine max
ggggggctaaagatgagtttatttcattaaaagcttcacaaaattcattcgacatgctaaaattacagtcgaacaggagggaatggaaaatgcaaaaaactcataacttacggcatggcacatttgattctgaaaggacataaccccggctaatttgcttataacaactaatgctctcgcacgcttcaaatactcaaagggttcatcttgggtgattccagaattacgggttccagcaactttggcaaggcagggagctattattccatgttttaggaattggcttccctagcacgatgagaatttcatgacagtagggtaatcttcacttcatttcaagttttttcaaccaataatcaagttggctggcaacacatgctgacccggtggagccataagagacaaatttcttaatcgcattttctac

SEQ ID NO: 33028 - DNA, 407 bp, Glycine max
acgtaaaattaaaaccagtatatgtcaatgtagtagcttatcgtgctaggggagtacaacaccatggacagaaggctaaaagttagacctctttttgtagaaaacaagagaataagaggttttattggttctacttgattcatttatttgtactaatttctagctgactattttttagtttcgacgtgcagatttcatgctccatgcttttaggtattccacggtgatatgctcagtaccgttattgaacacaaacaaatgagcttttttctttattgctagggtaggataaaccctagacaagatgtttgttcttcctccggctccaaaactctccactactgagtgatcaatcaaactcttgagagagagctttttatttttggctaaatccacattcacaaagc

SEQ ID NO: 33029 - DNA, 461 bp, Glycine max
ctgagtcatcgtctagctatctcgatcgaactgtccaaggtcctgtcacctgggagggaccgcataaaatgatgtatacacaaacatatgtccacattggctaacatggtagtaagcctgcgtaaacgggagaggcgcgatgatgttagcgagcccatagcggcacaaatgactacaacaaagaaacaaacccctggttgtgcgccaaccgcggcaccttaaaggagcctaccgattgcacatctgctaccagcaccgctgtccgaacagcacgctattatttaacagtcagcgattacgtaggattttcaagcaatgagttcacctgcagcctgggcgaggtcctggtttaataccgggccaagcagcctgctgtacgggaaactggggtgacagctgatgccacctggagccacactataatactggctaactaacttgctgcctagtggtgatactat

SEQ ID NO: 33030 - DNA, 462 bp, Glycine max
gtcggcggccgccctttttttttttttttttttctttttttttttttttttttttttttggggccgcataaatggtgatgggtaaaatacactaactatccaacccaaggccattttattttgactatatcaggatacaaaaacaaacttcctgcaagaagggaaaaagttgttaacaacagaaaaaagaaagaggtccacatccagagaaggggaaggaaaacccaaggctgcataggcaaacaatagacccaaagtgcttaaaacacccaccaaaagatgtgtcaaggcctgaagccaacacttgggcaatgtttaaaaactgggaggaaaaataacttgagctaagaaactcaggttacatccatcctcccaatgactacaatgagccagaggagagcttcccccattcatcttggaaggagtgtagtgaaaattaaaaagaaaggtgctgatattttt

SEQ ID NO: 33031 - DNA, 395 bp, Glycine max
caaaaccaatcataaacaataaaattaaataaaatagcaggccaccgttgcaaacagaaatagaagggagaaaataattgattacaagttcacaagtcaatgacatgtttgaaatagaccatcttagtatttggaaaaccaacataaaatgcatataggcgacaatgccaatcacaacccatgcccctaacttgacaagcctctgactctgtcatttaagtttcaggcaaaacatattgttacagtatctacataaaggccttattcatatgaataaaacagaaaaggaaaatgaaatatcaacaaatgagaatgctagtttcattagcctctccaattgtctttctgcttccttatctctcctaatgcttcaacaggtgacttgcagcccaccc

SEQ ID NO: 33032 - DNA, 565 bp, Glycine max
gcaaatttgactacacattgagacctgatgcatttgaagcatctgtgttggctattaatgagaagtttcagctttatttgacgaaagaacatgttaaaaatcgtcttagaacatggaagaaacagtatgccattctgaaggaacttatgacccagagtggctttgaatgggatgagaagcgaaaaatggtaattgcaaatgattctgtatggactgaatatattaagaaaaatcctgatgctcgaattcttaaaggacgagttatcagaaactacaatgaattgtgcataattctaggtcattgtgatccagcagatagttccattaatggtgcttgtgcttatatgggtatgactacagacgatggtgtaatggaggttcaagagacaaaagaaaaagaaaaagttaagaatgttgtgacatggacagatgagatggatcattgcttgacagagttgcaagtcaatcaagtaatgttgggaaacaggcttgagaaatttttcaagacctccgcatatatagctgctcaaactgctctaaatgagagatttgaaatgaatttaac

SEQ ID NO: 33033 - DNA, 505 bp, Glycine max
gttcattggacataggtgtggtggtggtgaaatggtggagggaaagcgcccgtctacaccggcgaagaatccgagccgcagccggaatccgagccggcgtgtggccttggacgtgccctcccctcgccacatgggctccaccctcagtggcatccattcctccatcgaccaccttgacaagggacgttaccacccatgttgctttgcatgttgtgcatggtcatgccttattgtgttcatcttaatcatagccattctctttcttggtattacctacttggcttttctcaagtcagggatgccaaaaattaacgtgagagccttcaacataacaaagtttcaagttgatgatgggtcacaaaagatgaattcggttataggcttaggattaatattctctaacaagaatgataagcttaagcttttgtatgggcctcttgatgttgatgtcactagtgaggatgtgctattggggaagaaaaaacaaggtggcttctctcaaaag

SEQ ID NO: 33034 - DNA, 597 bp, Glycine max
attaccacttcccaatcgcactctgcttccgttctcactttctctcacacctgaaaagtgaaaactcatcatcatgttctctctccaacaattccttccacacacttcctctaaactgcttgaccattctctttccttaaagcgccacggccaccgccgcttccaccgccactgccccaccactctcagcagttcccaccaatccggaccctcgctttgtgattccaaaactcaagtgtctcgtgttccgcttttgacttccactcaggcctatgaaaagctaaaaacatttagagaaaatataaagggcaagcaacaattccttgccatgtattctagtatttttggtgggataacaacagacccagctgctatggttattcctatggatgaccacatggtccacagaggcccacggtgtctttgatactgcagcaataatggatggatacctatatgagctagatcaacaccttgatcgctttttaaggtcagcatccatgtctaaaatagatcccccatttgatcgaggaagcataagaagaatactcatacaaactgtaagtgcttccaagtgtagaaaaggatcactaagat

SEQ ID NO: 33035 - DNA, 493 bp, Glycine max
gaatattaaaatgacaactggtacaattatgtttgggaagagttgcattatacatcaaagggttagtagaacccagtagtctcttgtgcacatatattcaattacataatcagaagaatgtgctgcacaaatcaaacgaatgaataatacatacaagggcgaggaaagaatcatcaaagacctaagtggcaccacaagcacccacctaatgatgacaccacaggaaaatgattctattcggatgctgatcagccaacttgatagctttcgacattaaaacaaaactaggccaatgcacatccgaataaaagccacttgaaatgagattttgcgataagaatacccgatggctccctttagaagacactcttccatgccataaaccataacctcatgtagacaattgaaacctaccactaggcttctttcttctccatcccaaggcagcataatatacaaaagtcaatccagccaatgcaacaaatgcaatctg

SEQ ID NO: 33036 - DNA, 486 bp, Glycine max
cttggacaaatctgcttatggttacaatagaaaattaaacaacttgctgaaaatggtatttgcaattgatgatgatcattgacactgcgtggataaaatggaaaacggttatccccatctaaaggcaacccatcctgaagctttaatttggcatcacaaattatgtcccatttcatcaccattttgactaaataaaactattggcaaacatgctacatccacatgaggttctgcctccacctcagtttctgtctttgttaacctcttcaacccatgttctggccagctctggatcctctagtggaatcagaatcagttcatgttctgcaaataaatcactgccttataatttcaacttatgtagttccatgtacacccattaactgaatcatagaccatatgctagattttatcctcatcttctgtaacagagctactgcagcctagaatagtctccatatgtcgatccctctcactcaaaaactt

SEQ ID NO: 33037 - DNA, 687 bp, Glycine max
taacaagataaaagagatccagtacttctaattgccaggcattcaaagaaacatcggcgaacgaaagtaatatctacactgaaattcatttaagggagaaatgaacaaaagagaccatttggtgtttgtctagcaaagttgggtttcaaatttaagatttatgcccatgctaaagagctcctggcataataactttgctccatacgggacatgagccaccacaatgtcatccgcagattcacagtggcggcaataaggtcctcgtattttccggccaccagagacaggccgcaagatcacatttgcaacatttttgcatttgctgcagatatgaatctgagaggagtcactgagtggaaacaggcgttcatacaggttggatgatgcaccatgagctattaggcaatcacgctccatctcaccgaacttgataccttcaaatcgctatctgtcagctacaggctgtcggctcaacgggtgaactggaccagtgtaccggaatttcactttgtcttcagacatatggtgcagacgctggtaaaatgttggtcccatatgaatgagtgatcgaaccatctcatcagtccgtccatggtatacactctcatatcctcatcttgaatacacagctctgatgcgctgttgagtaatggcatcatcagtaggagtggataacggcgtaggttg

SEQ ID NO: 33038 - DNA, 513 bp, Glycine max
  unsure (1)..(513): unsure at all n locations
nnnnnnnnnnnnnnnnnnnnnnnnnnnnnnnnnnnnnnnnnnnnnnnnnnnnnngggtagcggtaaatttcatttcatttcatcagaataatgggtacattacaaagctttcttatatcacaaccaataacgcgccctaaaatacaaagaaagagggccacaagaggtttattttaacccaaacaacctatgccccgtctgattcaaacccaggcttcggccaacgtacgagctcggacccatggaataattcgttatatgcccaatgggtacataacacaacaaaaacaaattaacagggtaagaaacaaaataacaaacatgtactacgtattagcgaggcatgcctgaatggtgggaaccactgaaaatttaattaaattaaatgccaccaaggcactctgggggggtcactgggaaccttgacttatccttacaatagtcatagataacatggttcagacgaacccacctgtaccttcttgcttcaatggagttaagggcttggtatgc

SEQ ID NO: 33039 - DNA, 449 bp, Glycine max
atagagtaaacagacacacttgagcattaattatgtaaatcatactttgcgccatgtcttgcgaggtaaaacaaagtacaaattcgagaatagaggcaagtacaacttagcaaagcctattgataaaaagaactacgactgtataagcaaaactgttataggaacccaaattcaagagggaaagtcaatcacacaatttggtagctatccgttatcagctgtgttctctgagcaaatttgggaggattaccaccctttaatggtatgatgttggtaaccttcaggtcactaaacgtgtcagttgccataaagcagactgaaatgggaaagaatgttgatgaatctgctagtggaacaacaaactccattgacccactgcggttggaattatcaatcagaaggacagaccactccaaaatggaattcctagagtcatacctccattcccc

SEQ ID NO: 33040 - DNA, 421 bp, Glycine max
gggaaaacgataattcgggcttaaacattgaacaatacttgtcaagggtaaataaattaaaaatgtatttggggattaaaaaagcatattcaaattcagttaaaactcgccaccaacgcacatatacaaataaaagctaaaacaaacatatttgaatgttgtcatggttaccttgtcttgtccatttggtacaaagcaaagcaaaagaagcccaacattttgatgatcctgccatggttcattgaacaattggctgccaacacacattctatatttctctgccaaagcaacaatgacaaatacaaaacatagtgaagctagtaatggcacaaaactaagctaatggttttgaagcatttcatccctaagtaactctttcctactatgttggcaagatggaaagattcaagattgaattatt

SEQ ID NO: 33041 - DNA, 448 bp, Glycine max
aagtcaagatttattatatgacaaattatttgtacaatagataattgagtttactcataaacttaatgacacaggcacaaatgagcaacgacgtaatatatattcaacactaactaattctagtagtatctcaggtggtaagaaaggtgggaagaaaagacaggacttgccgtctatccacatgtgcctctcataacacgcaagagattttattcatgaaatatgttattttaagtacgtagaattacactgtcgtctcaactatgtatcctctgatagctagggcatcagcaccttaatcaagcaacttcactcactacatcatccccatctcaacagcctttacggaaatcctcctgggatgccaccaacgccaccaacaccaccaaagccagtgtttgagaagccgccgtcgacgccaccaccaaagccagggaagatgccgggg

SEQ ID NO: 33042 - DNA, 488 bp, Glycine max
cgcgctatcactgattagaacctaattgaacaccaatattgtaggagttgtgtactaaagtccggttaaagaatatgtagttcaagacaatcaagtcactacatttttctcggatgaaagttcataaacactaggtataaggttcaaacccgaaaggttccttataccgaaatacaatatcacatgttctttctcttattttttatacaaattatctttcggaaaatatattttaaaattttaaattatgtgggggaatgttggtaaatatttgtgttttaatttaaaattgataaatatatattaattccatcttataaaataaaatatttattttagattttcttaagattttgttttaatgagtcaaactagtttgttagatttgttttgacaactataagttagtttccaacggtcatattttgtttgttgcttagggtgatctgtgcctatatattatctttcattatttctaaaaagatgac

SEQ ID NO: 33043 - DNA, 786 bp, Glycine max
aggagtagtatgttgtttttctaatagaaaatttaatcaccaactttctctttacattagaaagatcatagaagaaggtcttggctgtcttctaatttatgtagtgtttggttttggaagcatatataccactataagcctaagtatagtacggtcatggaagactatttgagtggggagagaactttgtggctgggagaattttatccaagaaaaagattgcagaacatgggggtttgtaaaacttatatggtcataaaaatattccttattttctataaaatttttcgatccgtcaaaatgattgcttgtgattctatccatacgcgagaaattggagagtctttcttttaaggtacgtacatgttatatgtttggagcatatatttaattttatatgccctgcccccccatcaatatataaatggaacgtggggagatttagatcttaaagagcataaggaatccataggcttcactgttaactttgatcctctttttcctttgctaaaaatttctccacgtgcttctttttgaaaaaaaatcacgacgaattcattaaatgcaaagtgtttctttatatatatatatatgatttttttttacttttgaacttccaattatatttgtacttttttgctctgaaagttggatgttggttatgagcctatgagacaagaatgttcattttagcctcgctatatttgatattaagactggagtaattaagatatatatggatatgaataaaaatggggaactaggtcaagttatattatgcagttt

SEQ ID NO: 33044 - DNA, 680 bp, Glycine max
ttaggctactgcaatggaatgaacaaaaagcagtcaaaatccaaactttgagtggtcatattttggagacaatttcgagtgcaaggttcttattgtttcaatatagtgttgtgtataagctgcatcttactggaaacaatacatcacttgcggggattgccacctggactggttcctatttcagaaccttactttgatggtgagttgcctgaggtggagcttattgttgtagacacaagcaagtttgatgatgcaacgactccagaacctgaacatactaataaggaagacaagtctgaactttacaagccaaaagtttctacctggggtgtcattcgtagacctggcaatatttcaaaaacatttggtggtggaagagttatatgcccaggacaggttctagagagcaaagaagcgaaagttgttaaagaagcacgcacaaagcagctacttgctgcctacagcaacaaaactggattaaatgttgatccaaagctgaaatctgagtgcgaggagctaagcatatttagtgatatccaaatattacaaccattctttccttcttttattcatggctttcctttttatgcgcattgttgggcgttttttctgtcatagctattgctcgttgtattcattgacattcatggctatgacagatagcgcataaatgatagaac

SEQ ID NO: 33045 - DNA, 506 bp, Glycine max
aagaattgggacctctgaagcttaaaggggatcttgacatcaaacatctaggaaatgtaaaaagtgtaatagatgccaaagaagccaatatgtcaagtaagcaattgaataggttgcgattgtcatgggacaaaaatgaagaccttaaattacaagaaaatgttgaggagattcttgaagtgctccaacctgatacccaacaactttggagattagatgtggaagaatataaaggtgtccattttccaggatggatgtctagtccttctcttaagtatttaacccttttaaatctgctgaattgcgaaaactgtttccaacttcctccattgggaaaacttccttctctaaagattctaggaataatgaagaataatcatgtagaatacctctacgaggagtcctataatggggaagtagttttcggagccctagaagttctgaccatacgtcatttgtcaaactttaaaaggttgtcaagggaggatgggaaaagcatgtttccc

SEQ ID NO: 33046 - DNA, 511 bp, Glycine max
tttttaaaatggaggtggttcaagagcagcagctacaaaatacagatggaagaaaattgcacaactcagacagaaactcaaatgtcacacagcaacttcaacatccaagattcagaaaatacaaatggtggctacgtgtgtccctctacataatctttcttcttgtaggccaatctgcagccactcttttgggaagattatactatgacaatggtggtaatagcaaatggatggcaacatttgttcaatcagctggattccctgtacttcttccactccttttttacttcccaagacaaacacatgccaagtttaataacaatcccagcaataatgattattcctacaaaacaaaaccaaaattctccacccttgttttcctctatctagcttttggcctaattctcacaggggacaacttgatgtattcctatggacttttatatctccctctttgcacctattctctactatgtgccacccaattagtcttcacgcggtgttctctttc

SEQ ID NO: 33047 - DNA, 512 bp, Glycine max
aagttggcgtatggtggtttgtttgaggcaagtttctcggtggaagatggagctgagttaaccaagaataacattaaggtgtccatgtattctccacccttcactactcatggcttctctatgggacagaggcttttgtttctcaagattgacgagttaaacgtacaaggccaagaagggtcttacagggttagagtggaggcgcctccatccaatgccatagctcctcctggatactacttgctcttcggtcgtttaccgtggcttgcctgcagccaagggaatgtgggtgcacattcaatagagattttctaattcttcatttcctctgtatgctcagtcggagttctaatttattagaaaagactttagtttctaattactatacattattattgcacgggtaatgctgcttattagtatgtgttttgaactaggttatattgcgtggccttcaaatattttatctgtacgtgtttggaaacccattaataacatgagaaatcgcattc

SEQ ID NO: 33048 - DNA, 377 bp, Glycine max
attatattaattaatagcattatttgttaactttatgtgcacttacaataataacatttttattaattagcttccacaacctacccttaattaacttcttccaattcttagagatgaatcaacacctttactgttgacacttgcaaagatcctagcaatctctaactgtgtattggcaattatttcagttctcttgaggtccatttcccctctcttggcctcagcttcaactctcatcctctctatctccttcattgcgtccattcttgcttgttctgaccttatcatagcttctgctagccatcttaagctttctgctatctccacacactctttccttcttcgtcctgtgttgtgatcaattgttttcttcttcc

SEQ ID NO: 33049 - DNA, 517 bp, Glycine max
gtcacgaatgcactagtaatgcttttatatttcctcttcggactggtgggagaatcccctcgtaaggtacaagtcaaccaaactatacatacaacgttgtattaagatcaactatgcacacaatccaatgatgacgcaaaccaacacaaaccataaagaaagaaaacagaaactacaaaagattcactcaatgcaaaggcttttataagataaagggctgaatctcatttattcaagagataatggcatcagaaagaatattctctttatcctacaagatgtatggatgaacactattgctgcttatagtagccactttggtgaggcggaggatatggagatggaatggtataaggaggccgaggaacagaaccaggttgctgtgcttgtgcattgtagtacggaccacgccatcccggatatgctggttgcccatactcatggtttgctggtggctgttgatgaacctgagggggtgggtatggtgcagttgatgatggtggaatgtggtatggaa

SEQ ID NO: 33050 - DNA, 381 bp, Glycine max
gatgctactatatatagatggcttgaactcgttaagctaatattccacaaacttaaggctagttgatttaagtgcttgtgtttttcattaaattatcttaattattgaaataaatgtactattaaacactttccaaattttaaacatactgaaaggcttgtattttttataaagacatccattaatagaacgtttttgtatttattgttgggtgaggaatgagatctggagtttgcggctgaaggttcatatcacatcgacgacctaatctttgtctcttaccatccgcatccaataatacgagaatttcatgtcaaaactgcatctccagtgtaggcatatgatggcttagctataagcgatgcacttctttttgcaatc

SEQ ID NO: 33051 - DNA, 555 bp, Glycine max
ctcatttttaacctgtagccaattgaatagcccatatcagaatcaaattgatagcacacacacatacataaagtattattaagtagaagtgatatatcacaaaaagatgatttaaacatgaattctcacaaccatgaagttttgataatattttattataaggagttagctcttctaacttaaagatgttttataaagtaagaaagtaagtttccaagatactttaattcaaatcatcaaatgaaatataataacaaagtttgaagaaagccaaccttcaagtcagacaagtataagaatttccatcctttgagactggctcgcaccgccaagtccatatctcccactgtggtcctatccttccatccaccagcctcattcagcgccaaaattctccatactccatccaccagcctcattcagcgccaaaattctccatactcccgcagttcctcgtgtatttacaagagtacaaaagaaattggcttaatcttttgttttcataaaagagctagcttccactattgcacaaaaatccatgttttttttcaaaaa

SEQ ID NO: 33052 - DNA, 510 bp, Glycine max
ctgtaaaggccttatggcaaaattttctacaaagattgacatagaatattttttacaatgctaaatttgacatctatatagaatctaatagtacttgtaggaattcattctaagctatgcctcaagaactgtaatcatggatttatcacaggaaacctacacgactaatgtacaaagtaatgtgagctgaacattgcattccatgattgttttcacttacctaccatgttgatgcttgccctatatatctatcattccaccaaggccaagtcactagcagtctaacagtaaaacatgaccctcttcacattttctttcaagtctggcaatggcttgacactataatcaccagctgctcgtattgctttggcaccataaccattgccatcacctgcagagccattgtcttgcatatctggctccatatagaaacgtgctcgaaacgctgctaaatgtgcataatatgctggaggaacaactgatactgagcgcgtacacctggcatatgta

SEQ ID NO: 33053 - DNA, 396 bp, Glycine max
cccctgttaacttcattaatgcactgattttatgactcaacaaattaagtatttagatctgcctcataacacaggtctaagctatgttttgtgtaaacaacttgcgattatacatgtatttggtatttctagctatacatattatctgctggaaagtggatagtagttgaaagatgggccgggaaaggaatgcctcaattcaatatgtaaatcttgttgatgcttccttgggtgaaattcatttgctcgaacccaaaaatatgcttaatatcttttaattgtaattgataaaatgcttcctctttttttcttgttccttttgggtaggagcctaggaggtaacttgctgagctgaaagctgttagacatgggaaaaatatgtttcttcaactcact

SEQ ID NO: 33054 - DNA, 472 bp, Glycine max
gcaagaataagaaagtctggacaaaagcgtgccaggcgtgagaccattgttggccctgctattgataagggtgtggctcatgagtctgttggagtaaaaccagccaccttggttccaaaggaaatccctgtgataaaaaagaaccatgtcttaaagataaacattgttcccaaagcaacagtgaaagaacataaagatgatgacacaacacatgagttacatgagccagaaaaagatgttccggatcctaacaaatttttgactccagatgaattggagagaggaaagttgcctcctgaggaaatcttatcccttccaatgtttaagaactatacagctggaaatcctgctcctgtgttgtatattaagaatttggcaaaagatgtgattgctgatgatttctattttatatttggctccttggttggaagtattgatgctgctaagtctggtcttcaagtcaaactgatgc

SEQ ID NO: 33055 - DNA, 499 bp, Glycine max
gagttaattactaatgatattatggaacttaaggttaagcatgatgagaaaagtattcattacacttgcttccaaggaaaagaaggaagaggaaataaagagtatgacaacaatacatatagacaacgaggtgcttccaagttccaattctcctatatgtatttatatttttatgagatcatagattatttcctgtaacctttggtaaatcacaagttagtgaccccttgtcccataaaacaagcaagccatttttacctatgtgaagtagactattctgtatgttggaattgtttgatggcacctaatctccttgcaaacatggacaccattggccctgaatctctaaatcctgggaaaggtgtaaaggaattgaacttatgcagctttgctgtgtgatattgatttcccttatcatccttaaggacagtggaatcctctttattgataccacagttatgtaaattttgagcctcagcgagcagttggtcatcagtag

SEQ ID NO: 33056 - DNA, 509 bp, Glycine max
gaagaaatgaaccttcctcctcaaacaaagcaatgatctcagacaagaatgtatcgaggaatgctgctgattatatatctagagaaagtcatgaatttcaaaatcctcatgcaaatatggataatataagattgggacttagtgctattgaagatgtcaattttgttgagaaatcttttgagggtggtgaccgatgcaatcctgctgaagactcaccttgctggaagggagcttctgctgctcgcttttctcatttcgaaccttctgcagctctctctcaagaatttgtacacagcaaagaaagtagctttgggtctgtcattaaggagcctcagaattatctgcttgatacagaaaacaatatgaaaaaatcatgtggaaattcaaatggctttcaaatgcatactggaattgtctatcaggacagaagttcagcaggttctccaaggagattttcagtaacaaagtttgcacctgaatattgcaagtcaggtagtgctctgaatgat

SEQ ID NO: 33057 - DNA, 398 bp, Glycine max
gtgctttgaaacaaagctgcgcagtggcaataacgtgtatttggtctctcatccaccttctatggcataaaaagttatacagaaaacatcatactattacttgtcatatacgactgcacctccaagaagatttagatagttagttgtcaatataacttgccttgttattctgttctgtgcttacattcaggactagtaaataatcatttaattaaattattcaaaacagaactattttgttgaatagttcataagagaaggcagcccgatcttggttcactcttacgcccgtaatttttctgttggaagcaatatttcagacaccttgatgtcatcatgccatgacttgagatcgattcaacaaaacaataatgaaggagaaatataaattggcactc

SEQ ID NO: 33058 - DNA, 556 bp, Glycine max
  unsure (1)..(556): unsure at all n locations
gatgaagaagaaaccgtgtcgacttcggaggacgcaatttacggggagaaggtggagcctgagtttgatttgatgaagacaatgctgcgaaagtcgtatacgccgaagaaggttgccgcggaggaaaaaaacgttgaatcggaggtggggaatagcagtcaggacactcttgtgaacgaggacaggaaggaagtgaagggctcaagtccgggttcggtttcgaacaggaaggacggaccgaggtttaaggatttgggtgggatgaaggaggttttggaggaactgaagatggaagtgatcgtgcctttgttccacccccaattgccaagacagttgggagtgagaccaatggctggcattttgttgcatggaccacctggctgtgggaagactaaacttgctcatgccatagctcatgagactggtcttcctttctatcagatttcagctactgaggtggtttctggagtttcaggtgcatctgaagaaaatattagagagctttttgctaaagcgtacaggtctgcgcctgctattgtctntattgacgagattg

SEQ ID NO: 33059 - DNA, 117 bp, Glycine max
catcacaacccaacttactctgtttcaaaaaaatctttgtaactgaaccggagcaggcaatgtaatggactgttaataaaagattgcaactcaataaggattatatgcactctaact

SEQ ID NO: 33060 - DNA, 416 bp, Glycine max
ataacaagctagttcgttcgttctcataaatcatgccccaaaggggtttctatgaatcatatcatatttcaatacaactgccgtaaaacctaaagccagatgcggatccttgtgaaaacacttaataaaatccgggcagtttgcgcgagccaaaattttggaacgaccgattgattcggaaaaactaaaaccttttattgggaccaaataactctaaacataacagctactactagagccataatcgtcaagaggctgatagatattccacccaaaagaaccttatgaacgaaggcccacttcctcatgattccttcttgctttttaacagatcccgaggcgagctcactctcatccgttttgtgcaaatgctcccgcttcctcagcatacatgcaatgaaatttcttttgctttg

SEQ ID NO: 33061 - DNA, 634 bp, Glycine max
attgaaataatagtaagagtacttactagcactcccctaaaacataacacaaggacaaacagtttgcaccaaactacgaatgaatagatttataagttacaactcagtatatgccatcttaaaattaattgaaattcataaatattagctgtattagaggaattcagtgatgtgatacttttcagcagcctcattggccttcttcccccgatgttgatctagttgtatactcgattgttgccccggaattaaactctggtaattgtgcactatcatcataatatgcaggttctaaaggtactgggagagtttgagaatggctattaaacacggttacaacgaaagccatggtgggtctggcagctacattttcttgaacacagagtaacccaatgtggatgcatctcactatttcattttgtgaaccattgatcaaggtggcatctacaatatttgcagctgttccttccctccagtttcgccatgcaatacttagtagatcctccttcttctctccgttccaaatgccactatttttctggccgcttataacctcaagaaccaatacgccaaaactaaaaacatctgacttctctgaaaactttccatttacatggcacctgagtatgtaaat

SEQ ID NO: 33062 - DNA, 507 bp, Glycine max
gtaagaagagcagcaaaatatctccaattacagactatctttaattaatacaaaatgattttcaataaccaatacatctcacttacagagtgaaaataaagcataaacggcacatcatgcttttcaaaaaacttttcactgcaatgaacataaagcatagaccgctgtgctaccggaaactaccaagcaagaagcaaccccctaactttataatcaagaaggcagtgtaaggttcatattccttcatcgtttttttccagacgatgaacatcaaacacagatattgactttgcctgggttacctcgatgtctgagagttttcctttgcacactaaagaataatttggcaaactgaaatgtgaattacattcaacctctgaactactgagctggggtagaactagaaccaacattacccaaacccatcttctgccccaacaatgttagctgctctacaaagtcaactccagttagcatttctgttgctccatatataatatgtttggc

SEQ ID NO: 33063 - DNA, 437 bp, Glycine max
ataattaaggagagttgtttagaaaagagattgcttttgtaatccatcatcgattcagacaatagaatctcctttttctactctgatatctgtttcttaatacacagaatgaaatacatctgaaatgactgaggcctggcatgcactttggcttgagaaagtcatgtacatgccccaaagaacagagaggcttaacctactgattgtttgcaaattatggaacacataatactgtaatagcccttttgtgggaatgatacaaggccacgacccaatcaatcaggaacttcaaaatgtcccaaatgaaatggggatttacttgtagccagaaagatcaattttactcaaagacacaagtgaagacccccgcttgcaaaaattaatgttccatcaatcaatctagtgctcttgctcagagtgatcatcatcaacctcgt

SEQ ID NO: 33064 - DNA, 470 bp, Glycine max
gatgaaattgatgctacaatcaacagaggtcatgcctttaaactctgggttcactggaaaagggaatagtgccaaacctgatgaactgcatgaaataatcagggctggagctatgggactgaagctgcatgaggactggggaactacaccggctgcaatagacagttgtttgacagttgcagaccaatatgatatccaggttaacatacatactgacaccttaaacgaatctggatttgttgaacatacaattgctgcatttaaaggaagaactattcatacttaccacagtgaaggagctggtggtggccatgctccagatatcataaaagtatgtggtgagaagaatgtgctaccctcatcaacaaatcccacacgtgcttatacacataataccatagatgagcatctcgacatgttgatggtctgccatcatcttaataagaatattccagaagatgtagcttttg

SEQ ID NO: 33065 - DNA, 556 bp, Glycine max
ataatgtcccctcaaaattaagtgtgaactactcaaaggcttcaaaaacaaactatggtgatatttatagaacttaatgataaattttgtacaccacaaaaagcataacagtatatttaatttaatcacaaagaatacttctaccctttaacatactcaccttggatggatggaatggggattgtttctaatgtgtttatagggatgcctatttatatagattagattttatccatcataaaaataaaaactgattccataatatcaggatgtaaatatactttcaacaactttataattaaaactgaaatcgtgttaataacttggaatcgtgagaaaaattaggaccactttcatttgatttcaaaatcaaaactaacacttaaaggatacaaatgaaaaggaattttgaatagaaatataccattttgaaatcaatacgacttacaacgagacacccagggatttttaagcaatgctagaagaaatatcaaaagatacttttgtttcccactaattagtttaaaacttacttgcatagtttatgattaatact

SEQ ID NO: 33066 - DNA, 653 bp, Glycine max
ctttcttggtggcaccatgagaatgacagtgtctatttgtgtcatattgcttgagctcactaatgatctcttgttacttccacttgtaatgttggtcttattagtctcaaaaactgtggcagacagcttcaacaagggtgtctatgatcaaatacttaagatcaaaggacttccttatttggaggctcatgcagaaccttacatgaggaatttagtaacacgcgatgttgtttccggtccattgataaccttttctggcatcgaaaaggttgcgaatatattgcatgctctgcatactactgggcataatgggtttcctgtcattgatgaaccacctttctcagatgcaccagagttatgtgggcttgtactgaggtctcatttactagtgttactgaaggagaagattttttcaagggataggggttttgcaaatcaaaggatcttccaaagaatttctactttggattttggaaaggcgggatcaggaaaggggatcaaactagaggatcttgatatccaagaggaagagatggatatgtatgttgatctccatcccataactaatgcatctccttacactgtggttgagacaatgtcactagccaaagctgctattcttttccgacaacatggactcaggcacatgtgtg

SEQ ID NO: 33067 - DNA, 486 bp, Glycine max
aaaaatcaatttttttagttattatcactccaaagtgcaaatcatcctcaatggaacaacattaaggctgttgcagttgagaagggtcacaactctgggtggatatatatagcataggggggtgagattaggggtttaagattgatgcaatacccctaagtatgggaccatacaaaggccttatttggaaagaagttccctcttattctgacattcttgagccttgaagcaacttggggaaatctgtaaccgtggctgtcctagacatcaggttcaggatcattattgaccagtctctaacttgagacggttaaaaatgagtacataaaataaatcttgggtcatgtacagtgatagtttggaaacacagaaaatggaaaaagacccagatactaagaaactaaaactacaattttgatatggaaagaaaggatgtacaaagcaacgatctgtacaaattaattcgcacgcgtgggcggacgcgtg

SEQ ID NO: 33068 - DNA, 472 bp, Glycine max
gcagtgtgttatatgtcggaaactgaatggaagtgagggggagtacattgcgcacagcaaggaagatcttcacagatttccggaattatcttcacccatgtttgactatgttcaaactgggaacaagagacctggttttgttccagtttctgattccagaatgtctgccccaattgttcttgttatagatgaatgtttagatgaacctcacctacaccatctacagagttctttgcatgcttttgttgattctctcccgccgacaacgagattaggaattatactatatggtcgtactgtatcagtgtatgatctttctgaagaggctatggcatctgctgacgtgcttcctggggacaaatcaccaagtcaagaatctttgaaagcattgattcatggtactggtatatacttgtcaccaatgcatgcttcgctggctgttgcacattccatattttcatcattgagggca

SEQ ID NO: 33069 - DNA, 425 bp, Glycine max
aagggcacaaataaaataaaatgctacttcaaagtttaaaattaaaacaccgaagcaaaatcccagttcaactgaaataacaatccccccggaaaggaccaagaagacagtcacttttttagcgattaccaatgttatgaagagaacgaaaggaagaagatacaggcttgctacaaaaattacaatctaaaagtgcaattttagttatctacgtcctccattttggggtactaggcttttgcagctttcaccatagatttaatgctcatctactttggaagtatctgaaaaacgaaacatccacaaatgactccatagattgatcataaatggctacagcccaagtttagataggagctgacgccatcttggagtttcttcatcaaaaatataggtcaagggtgatataagaactccactgcctc

SEQ ID NO: 33070 - DNA, 329 bp, Glycine max
acttgcagaaaaaatttcattacataatgatttacagcatctcttttgctcatgtttacatgctttcaagttcattttgcttggttctttccacagatacattgatgtacattaccaaaatttaattcgagcacctttaccttcttggatatcaaatacaagtttagtttaacttatatacactctctcagtgtaaaacagttttacataaacatccaataataatttatcttatcatcatattatattaatgaataagataccttgataaaacgatcaaatcttataggatatctatgtaaaaatgttttacattgacagggtatata

SEQ ID NO: 33071 - DNA, 273 bp, Glycine max
cagggttaatgcatttccttttgccttttcaatttttgaagttgattattgtggaaggggtattgatttgatcgattatcttttgttttgtgtttgtcgactttgaagaataccatgacaaatgtcatgaatctttcgtgtcaaatatttttagcttcagatcgagacatgtgtttgttatatcgcaaatcttatactcaggaagaacagctagtgtgactaattgtacctccgaataccccacataataagaacagtgcataatgttatcgg

SEQ ID NO: 33072 - DNA, 544 bp, Glycine max
ccttcatttactctaggcggaggggaattattccattacaaaaaaacatcgctatttccactcttccgttactgctttgtagctttcccctcattgtcttcctttataagaaaagggtaaaataaaaatgaattgaaaataaaaaaggctgttattgattcctgacagaatgtttcatgaatcatcctgcatattccagatttacaagccgaaaattatgtacagttacgaaaaaaactggccggaagcatagccagcagcagaactatcatctcaaagctaagtctgctgatgatgaacatgagtaagtccacactatctgagaagaattcacaaatattaaacagggttaactaaaagaactaatggaaattaccatgcagcattagcagattattgcttagaaagaactaagaactaacagaaattccatctatataggcatcagaaccatggggcaatgattataggtttaaaactaaaccgacagataacagatactactttacaaattacagacatcagaataatgctcatcactaat

SEQ ID NO: 33073 - DNA, 493 bp, Glycine max
aggattattcacattatgaaagattatctggaatcatgtctatttaatattacactggtgactaatatcaaataaaaatataatcaatcttacattgaactatggtcgctttggtttgatctaaccccacgcttactcagtagcgttatgacgtatgccatggcaactttagcacctaggctagagtgaccacgtgacaggcatatagctgtagcaccccctagaagcaacaaaccattggctatcaactgtcttgatggccttctttggatcatcctaatgtgagattcatcagtaacttgatcatggaagacggtaggatttgctggagagatgttactcgaaatagtgtccaagcaagcaggtaccttctgcattaaatcgattgaagtggtaactgaacttgataaatgatagcctataacagagtatcttctaagcgcgttatccatcttacatacatagttccatatgcccttgcgaaaggcctggt

SEQ ID NO: 33074 - DNA, 488 bp, Glycine max
agaaatccttttaacggctttgtattttagttagttcaagattaaaatcttgacctgctactaattccaaacaatcaaataattttgttccaacggcctcagcactgaaaattttgagtgccgaagaaaaaatattaaagcagatatactagcgggagctgcccaattcacagaacaatgtacattgtgctgaactagagcgaatgcaattctcttacgacagacctaatgaactcccatccattgagtaccttacgctctgagaagcccgtgtttgcgtccatagccactgctcttctggtcttcaccaacaaaataataggcatccacgaattttcctggctaactaatttgtctgcactgattttagacagatcccacagggatcatctttagagctgctgcaattggcatgccaaggactccaaagagaacactaccaaaccactgtttcaaactaagtggagatgtgtttgcaaaggttccca

SEQ ID NO: 33075 - DNA, 357 bp, Glycine max
cggtaatcatacttcttgctgctaacactaacttacgaagtagcagagaaggtctgaccaagtcagtattcacaccctacctacaatacaagtttttcgccatcataaacatgactaattaggactgagggatcatatgacataaatagatcctaatactacatatgatcacctttaatacaagtcgaaccaaagctatccaaaaactagaacttgctgctgctacatggctaggttatcttcctaaaaagcaacatgcaccaggaagcaagatcctaatgaacaccatgcacaacatctgtctgaccactttgctgagcgtcattactcacatgctgatcattctggccagaccta

SEQ ID NO: 33076 - DNA, 408 bp, Glycine max
gtcaaagtcaaagggttgaatttgacttagtcaacacagacggattgctggggtgcatatatgaaggaggggatgtaaccatcaacatttattttatttcaggattcacaaaatcaatgggctaggcccaacatgaaaaaggcgcatgtgttaataaggcgtcaataaatgttttattttatttcagacttcataaaaaatgggctagaaccaaaatatgaaaagagtgcctatttgaaaaatagggcgtatatagcaattttttctggttaggttgcaaccgggtcagggtgacccggcttaacccgtaattagacaacatggttggaaaatcctacatgtcctagccttgaaacggtgcaacaaaagggggaaccaccacagagggtggtgtgccccctcagtggt

SEQ ID NO: 33077 - DNA, 246 bp, Glycine max
aatttccgggtcgacagcgggggggcggcggccgccctttttttttttttttgtgcagaagagaggatgtataactttttaaaggaaagaaaagagcccttggaagctgtcacacctttgttcactaggctaaaatcatgacgcgacgacacttataaacatgattacatacaaaagtggcttaaagcagaaccatatattgtgatgcgttatatatcactgggtgacgcaacccttgtgccacgt

SEQ ID NO: 33078 - DNA, 335 bp, Glycine max
gataattctgcagccgtaggtgaagacgtgggtgaggttaagtgtggcattgctgacatagaagtgaccatggtggaaagccatgcaaatctcaaaataagatccaagaagcgccccaagcagctcttgaagttggtttctggtttgcataccatgcgcctcacaatcttgcacctaaatgttactaccaccggtgaagttgttctctactctcttagtgttaaggcagaagatgattgcaagctgggatcagttgatgatatagctgcagctgtgtaccagatgctagataaaattcagcaagaggcaatgttgaattaagatcaaaccttgac

SEQ ID NO: 33079 - DNA, 466 bp, Glycine max
gaacactaacaacaatcctttttccatcaacaggtaaattgttggaatacaagtgaaaaataaagtttcatattaaataaaaataagaaaattgaacaccatataaataaagataaaattcataaatatgagtcttcaagtttttgattaaggtatgatgttaatcaaaagtttcaagaagtgttatttaactaggtagtagtacttttcttttcattattgttatcatcactgtcaactttttctcctttaccaccatcatcaatttcctttctctgctggtcctctttggcctcttgttccttctttttagcctccaatttctgagtttctttcttctttctcatgaaatctataagctgttcgaggctagtttcgatgtggctgctcttcagaagctgttctgctacctcagcaggagtcacctgggttttctgcatctcttcctcgatcttttcgaagagag

SEQ ID NO: 33080 - DNA, 128 bp, Glycine max
agcaaaatgaacagggcgaggtgtgggagaatcctgtctaccaaccacgtcttctatccaggggacacacattccatgagctaaggtccatacttcaatctttgtgtacccatggttgtattggcaac

SEQ ID NO: 33081 - DNA, 260 bp, Glycine max
gaaggatgaaaatgagataccttatatttctctccaccaacacaataatagccctcctgctgaacagaactatggccctctttatgtggtaaattgacttgtgtatcactagcatagttgcaaattgtggtgacacaagcttcattgagaaaaggctttctaatttgcattggttgttatgggagaattttgctggacaatgtaatagaacaactctttgtgagaaaaagaatattattgcttttgattttgaatgagtt

SEQ ID NO: 33082 - DNA, 399 bp, Glycine max
aatacataaaatttacctgatttattaagaaaataactgatttttgtaataatcatgtgtttttaaataacttaaattctaagcgtacgggtaaattacaaggttaagaattttgcaattggcctttgctacaaccagcatgaatcaaacaggcaaaaaactgctttgaaatgtattgtacagatacagaacagaacctcatatcctattgtccatgtccaacaatggaaacaagccagcaacccaaacctaaattttgcacgttagtccaaaatagcatcgaatatgggacgtaattagctaccctcaaccgcacacggctgctgcacaaaacaagccatcaatcatcatggtcatccaaagatgtgtagatcatccaaaacaaggatcggaaaagga

SEQ ID NO: 33083 - DNA, 350 bp, Glycine max
ggtgcttctgtgtaacattctccagcgttttttctctgttacctgtccttctcaacctcttacagttcatttttcattctgcagaggattctgggttggggggttgatcctcttatcattttttacttatataagttatatttacttattgatagagggcgtcaatattcgccctacacaggtttttttttttcctacccaattttggtggtgaatgtgatatagggatttgtgcagtgagtttctagggccaatttttcgcaaatgtagtaaggagaaaacatgatccgatgtaaagctatattggcctgtcacgcatgcattagacttcccatattgtcatcgtaact

SEQ ID NO: 33084 - DNA, 274 bp, Glycine max
ggggaaagcagcctaggatcaatcatgttcattaaggtgataaagttcaagaaaagtactagtccgcagccatcatttctgggacaatattccaatggtttaccttcaagctaatatggtatccttaagtctgatgaaaatagttttaagtagtgcactagaggtcctgagcttgatttatgtaacagaagtcatcttatagatgtttttgtctttgagtttgactcttctccctttccatatttagcatattgactacattataccttaatac

SEQ ID NO: 33085 - DNA, 263 bp, Glycine max
  unsure (1)..(263): unsure at all n locations
attacagttgaatcaacactgatttaggtttgtaatgcttcaagatgctatgacatatattctagtttgaaacccagattcaagacacctagtgtcaacttcatgtatgatttatgatgataaataatttttccttgtgccttgcnnnnnnnnnnnnnnnnnnnnnnnnnnnnnnnnnnnnnnnnnnnnnnnnnnnnnnnnnnnnnnnnnnnnnnnnnnnnnnnnnnnnnnnnnnnnnnnnnnnnnnnnnnnnnnnnnnnnnn

SEQ ID NO: 33086 - DNA, 655 bp, Glycine max
gtttatgctcctgtggattttgttgctatgaatgttgtcttgagtggaggagatccagattatgttgccctgctcccctcgggctttgctattcttcctgatgggcctcctgcattaaatggtgggcccatgcatgaagttggatctggaggttctctactcacagttggattccagatcttagttgattcagctccaaccgcaaagttatctctgggttcagtggccactgttaacagtttaattaagtgcacagttgaaaggatcaaagttgcagtcatacgtgacaacaacaacacctgatttcaattcagaactttcatatacatgtcagaagagcaaattaaggtagagaaagtaatgatcgagcttggagtggtgcctatttcgtttccaaaacaagggcaagaagtcaatgaacgcacctcggagtatcacttcaacgttaggagtttgaagaatcttaggttcgggtattgactttcacttatgaattgaagactaaaatggttccatccagctgtagtattttaacttagaaaaactgcaaatttcggactcgctatttattttagcgtagaattttggagtagtatttgtaggcttgagcaaactttcctaagtgtggttaccctggcttttcctattgtattgt
